United States Patent Application Publication US 2012/0017338 A1 - sequence listing, part 2

SEQ ID NO: 3722 - DNA, 2019 bp, Zea mays
  Peptide Sequence Number=SeqID_45501
atgaggcgcgctcgcggtcgccgcgggctgctgcttctcctcggcgtggcgctctcggcggctgcgctgctccgtggctgcgcggggcagcaaggggaggacggctcggacgcccctgcggcggcggcggcggagacggcccccatggaggagaaggagcgcagggcgctgtacgccgccatcgagagcttcgtcggcaaggggtggaacggctccgggctctacccagacccctgcggctggtctcccatccaggcgcgtccctgcccttcctgcgctttccctttcgcatcgatctatgttaccgtgctgttcgattttctggcccgcggggtgtcatgtgatctcttcaatggcctgtggtacccaacagtgatgagcattggcccagtccttgacaactcgctgcagtgcggccccgacgccaagttcagcgcccagctgttcgacctgaggcgcctccggacgctgtctttctacagctgcttcccggcgagcaaccccacggccatcccgaccggcagctgggagaagctggcggggacgctggagacgctggagttccgcaccaacccgggcctgaacggcgccatcccggcgtccctcggccgcctggccagcctgcagtcgctggtgctcgtggagaacaacctgacggggcccgtgcccgcggagctgggcgcgctgtcgaggctgagacggctggtgctgtccgggaacgggctgtcggggccgatcccggtgacactcggtaacgaccgccgcgccgacgagctgctgctgatcgtggacctgagcaggaactatctaaccggctctctgccttcgtcgctaggtggcctcacggggctcctgaagatggacctgagcagcaacctgctgcagggcagcatcccgccggagctcgcggggctcaggagcctcacgctgctggacctcaggaacaacagcctcaccggcgggctgccccagttcgtgcagggcatggcgtcgctgcaggacctgctgctctcgaacaacccgctgggcggcggcctgccgcagtccggctggggggcgctggcgggcctggccacgctggacctgtccaacgtcggcctcgtgggcgccataccggggtccatggcggccctgacggggctccggttcctggcgctggaccacaaccgcctgacgggggccgtgccgcccgagctcgcccggctgcccagcatcggcgcgctgtacctgaacggcaacaacctgacggggacgctggagttctcggccgggttctaccagcgcatggggcggcggttcgcgtcgtgggacaaccccgggctgtgctacaacgtcgcggccgtggacgcggcccacgcgccgtcgggcgtggtggtgtgcaaggacctgcaggagcccagcgtgggcggcggcgcgcgggacggggacggggacggggacgcggaggaggacgggacgaagcccgaggcgggctccagcctcgtggcctcctcgtcgtccggcatgccggttggcagtgtcggtgggctccggtacctggtggtggttcggggaatggcggctgcgatggtgacggaggaaggagggaacatggatctggatggtgtgagccacagattacattacagtagtagagtaaactatgagagttcttgtggactgaagacgatacaaatggaagaagagcgggcaagcagcacgacaggatggagcggcggcgccgccgcatatgtccggctgccgcctgccggcgatctcggtgtctcctgctgccttttgcctttgcgtgttctcgagtctgaaaataaaatcaaaaatatggaccgagacgctgattgcgcagggccccgcgctcgcagaggagtcagaaacagaaaggacctgtcaccttggaaagctggcggccggagcggagccctcacagacaggctgcgctctgcctctctggcactggcaggcggcagcggcagtagcgctagtcctctacaggtggaggctggactgcacctcgacgtgtag

SEQ ID NO: 3723 - DNA, 984 bp, Zea mays
  Peptide Sequence Number=SeqID_45502
atgggcaattgtcggttcttcacttatgaagaattgtatcaggtcacaaatggtttctctgcacagaacctgcttggggaaggtgggttcgggtcagtgtataagggttgcttggctgatggagagtttgcggttaagaaactgaaagatggtggtgggcagggggaacgcgagttccatgctgaggtggatattatcagtcgtgtgcatcatcgccatctagtatctcttgtagggtattgcatttcagatgagcagagattgcttgtctatgattttgtgcccaacaacacgcttcactaccatcttcatggtcaccccagaataatccacagagatataaagtcctctaatattttgctggataataacttcgaagcactggttgctgattttggtcttgcaaggatagctatggatgcttgcactcatgtaactacacgagtgatgggaacttttgggtaccttgctccggagtatgcctcaagtggcaagctgaccgagagatctgatgtattctcatttggtgttgttctcttggagcttattactggtagaaagcctgtcgacgcgtcgaagccattgggcgatgagagccttgttgagtgggctaggccattgctcacgcaagcgctcgagaccggcaatgctggggagctggtggatgcccggcttaataggaactacaatgaagtcgaaatgttccgtatgatcgaagctgctgcagcctgtattcgacattcagcatccaggaggcctcggatgagccaggttgtgcgggtgcttgatagtctcgccgacgtcgatctgactaacggcgttcagccgggcaagagcgagatgttcaatgtcgcgaacacggccgagatcaggatgtttcagcggatggcgttcggcagccaggatttcaggaccgatttcagccagtccagctggagcagccagagcagaggccttgacgcatctggttccaggccattgtaa

SEQ ID NO: 3724 - DNA, 834 bp, Zea mays
  Peptide Sequence Number=SeqID_45503
atggcaacgactgcaccaatgcctgcctttgcacctgaagacattccgccactgtctactggggagccgctgctctgtgaggctggactagacgacttgtttgaacccccagtcgttaccgggcgaactggatcggctgccattgctggggctggcaccgatggagtgctaccagagcctggcgttgtcgtccctggaggtgaggggctagagggagtggggatcaaaggatctgcggatgtcggtgagggactgctcgtagagggtttgacaggaattccagaaggtggtggtgccaggggtggaggtggctgcgctaatgtcggcggcgttgggtcagccggcgggttgggcgttggcagaatggttgggggtggcgacgcggccgcagggggccttatatgtataggcgacgcctttggcggggcagcaggtgtaggtggtgggggcactgcaaccggcgccggcggcgagggtgggggcactacggctgctggggcgggtggcggagaggcaacaagtggcggtggtggcacggcgtctggaggaggcggaggcaaggagggcggtggagaagtgagctgtggcggtggcgtggatgcggaggggacggggggaggcgcgaccggcgacgagggagggtcggccggggtagcattgggctgcgtcaccggggccggggaggccggcgtgggcgtggtggttgccggtgacggggttgcgctggaaggcggcaagggggccctgatggtgcccggggaaggcgaaggtgaggacgccattggagcccagcagcaggctagaaagcactacagtgccggctgtgacagctga

SEQ ID NO: 3725 - DNA, 183 bp, Zea mays
  Peptide Sequence Number=SeqID_45504
atggcgaagccccccggacaagttgcagagggcgcaatgaccccgaatcggggtctcccccgcgcggcggattactccaagggtcaaggcgcaacggccgcggcccatgcggccgggacgttgatggagtccggcggcgtggagaagatctacaggacgcacacgattctattggggacgtag

SEQ ID NO: 3726 - DNA, 204 bp, Zea mays
  Peptide Sequence Number=SeqID_45505
atgccgtgctccggaccgtctgaattgctcgtcggagcgacctccttgccaccaacctgctctacactgcggctggatctccctgatccatggcgtcgtgtagaagtcttaggattggggaatggcgccctggcgtgccctgggaccgcctcgccggcgtgtgcttcgtcgtgtagagcgcggcgctgccacctgagtgcgtga

SEQ ID NO: 3727 - DNA, 303 bp, Zea mays
  Peptide Sequence Number=SeqID_45506
atgggcattgattcacatttaagcacttgtgttgacactcaatcaccaaaatacttagaaatggcccaagggcacatttccctttcagtttcccacatcgaaggaggcggtgccagaggagtcgacgtaggtgtcgctagtggtcttccaggtgcaatgctggtgttggctaagtctcttgtgagggagtctatgccatcagccatcccggggcttctccggggcatggggtgccatgagtggcatgattgtggttgctttgtctctgcctcctacgatgagaagggcggcgatgggagctag

SEQ ID NO: 3728 - DNA, 171 bp, Zea mays
  Peptide Sequence Number=SeqID_45507
atggagcccaggaagtcgaattatctcgtcgccctcgtcttggcgtcgttcttgctctccgtcgccgtcgcaggagggcataggaagaagctcgatgacgcatcagaatcaatggatctctcaaacagccattcagctaaagcattagaactagtttatgatatatactga

SEQ ID NO: 3729 - DNA, 228 bp, Zea mays
  Peptide Sequence Number=SeqID_45508
atggcgccgcacctcgtcgtggtccggcctcagcgcaacccaaattccggtaagaaaccccccctcgcattcgtcgtagctccaattggggtttacttctgccctatgccgcggggaaacgtcggtgcgccggggaggaagatcgccggcgtgctctgccgcggaggcgcgtctatgcgtctctcgctgcctctgctggggaagagggccagtgggccatcgatctag

SEQ ID NO: 3730 - DNA, 303 bp, Zea mays
  Peptide Sequence Number=SeqID_45509
atgacgcctccgacgaccacatcgaccgcactcgccgctgaggctctgctccctgtccatcccgcagatgcctgggtgaacgtcgtccgctgtctggtttgcagaggagggattagagggggcggcgtgacacggtggtatttcataccctggagccgggacgtgcagcttgcgatggcgaggatatcggatcctggcggttataggcctcaacgacaagctcaggagttggggacgaagacagttcagcttggcgagaaaatgggacgagccgaggaggatgtcggtgttcacatgtgctaa

SEQ ID NO: 3731 - DNA, 399 bp, Zea mays
  Peptide Sequence Number=SeqID_45510
atgtgtagttttgccgaagaactgggttttaatagcctgatgcatgttgagcgcaggaaaaagaaggtgcctaacgagaagagagcacatggcgctaggaaaatcgaggcgactagagccaaggagcatatgttggacaatcttgttgagatcgaatgcatcaggaagcatatcacaaaggagacacatgcaagatacgtggagaaaatggtagagatagagttattggcggaggagaaagacgacacttcaaggttgagtgagctcctggcgctagctaaggctagattacttctggaagaggacaagtttatgtctcagaccatcgatgaagtagaggccgcttattacaagcaaaaggccaatgaagcacatgatgaggacgagttaatatcctag

SEQ ID NO: 3732 - DNA, 144 bp, Zea mays
  Peptide Sequence Number=SeqID_45511
atggagcgtcgtggtctcgtggaggtgtgcctcgtgcaagacaccatggctcatctcctcgacaaggagttcttgcagtacatgtcctctcttgcagcaagtcttcctgaggcattagccgagccgtcccttgacatgcgctga

SEQ ID NO: 3733 - DNA, 333 bp, Zea mays
  Peptide Sequence Number=SeqID_45512
atggcaacggagcacagtggcggacacggcagcgattacgtccgacacaacagtatgcttacacctgcacaaaacagtgcgcgcatgccgcctgacgccttccgatgggacgtccaatacgacaagccgagcggatgggccttagggtgctatctctttgcctcgcccgaagaagaatccagcctacgagcacgacttctccgcctcgctcgaccccgggtccagcctttgggcaatttctccgcctcgtccgacgtcaagcccagccctcgagcgagttctccgcctcgcccgagctcggcttcggccaccgactacgccgtggatccctga

SEQ ID NO: 3734 - DNA, 606 bp, Zea mays
  Peptide Sequence Number=SeqID_45513
atggctgccacctcggtgacgactaacaacaagtcacgatcaaccatcgagttcagcctcgggcgcaacaggaagctccgcctcgcccgacctcaggctccagcctcgggaggaggtctccgcctcgtccgacccccggactcggcctcgaccctggtctcgggaggaatcgcgtcctcgcccgaccctggcctcggcctcaagagaacaaggagacgtcagcaggatcctcgccacgctgccagctgcgctcctacaggactcaggcgctcctccgacagccacaccatcacatgtacagggcccaagctctcccccaacggccacgttggcatggtgatgatggcgcttcctgttgacgtggctggcttgcgccctaggttgggcgacgtggaggctcctccgaagccgaggttgagtctgtcttccgtggccgaggccgagtccaagcccctgggtcgggcgaggcggaggtcgttcggcagaggccagggcggagtccgagcgctggggtcgggcgaagcggagttcgtcatcttccgggacttagcccgagtccgagccctaggtcgggcggagcggagttcgccgtcttccgggacttag

SEQ ID NO: 3735 - DNA, 213 bp, Zea mays
  Peptide Sequence Number=SeqID_45514
atggcgcccgaggctggacttggctgctgtcagcctcaccctagcgggtggcacagcagtcggagcagtgcaggcgacgctgttttcctgtcaggtacgttaattaatcacatgatacagaagacgagaactgagtcgacccccaagatgatgcaagtagtggtcttcttcgcacgacgatgtcatcagtcggaccaatttgaagatggataa

SEQ ID NO: 3736 - DNA, 438 bp, Zea mays
  Peptide Sequence Number=SeqID_45515
atgtcgatgccgcgcggtgatctcgctgacccggccaacggagtccgcgacccgacctccaaccccgccgagattttcgcaagaccagctataagacccggccgcaagaacatctccggcgtgaacatggccgcggcggtgttcgccgctatgcttggtcacggctggaggaaggtgatgtcgtgccagccgttagatccatggtgggcgcgcacgattagatctgggtggccccttggcatcgggcgtcgtggaccgtccgatctagatcggaggggtgcggataggttggccttcattagttttggacccttagatctagatctgatggccatgcttgcataccggttcgggcacgactgttttgatctgtgcggtcggatcatgatcgggtggctcaccccgtccgataccccttcggctgggcgttttgcgtaa

SEQ ID NO: 3737 - DNA, 162 bp, Zea mays
  Peptide Sequence Number=SeqID_45516
atgacgcgattcacggcggcgcagtcgactgaattgggggaagaaggaaattctccggctatggagcgcaaggcggtggtgtccaatttcgcgaagacacgctggcgaccggagagggagaaggctactggcgtgggtgaaaccgtggcactcaccggctga

SEQ ID NO: 3738 - DNA, 582 bp, Zea mays
  Peptide Sequence Number=SeqID_45517
atggtctccgccttgcccgaccccagggctcggactctacctcgacgctggacgacggtctccgcctcgcccgaccccagggttcggactcaacctcgacctcggacgaaggtctccgcctcccccgaccccagggctcggactcagcctcgacctcggaggagccaccacctcgcccgacctcgggctcggactgaccacgtcacaggggggcatcattaccctacccctagccagctcaggctacggggaacaagaccggcgtcccatctggctcgccccggtaaaaaagtgctcgtattattaagtgaaatgcttcctcttaacaaagttccaaagctacaaaagtcgttcctaagggagcgcagagtaagttccgaagctacaaaagtcgttcctaagggagcgcagaatgttacattgtatcattacaacaaaagcctagtcttctttaagaattttctcggcggcctcattcagcagactatcgatgacttcgtcgacgatggaattggcaacattcatcacatccagtgcttctttcataacaggatcgacctgggggtcgtatggctcgggtag

SEQ ID NO: 3739 - DNA, 216 bp, Zea mays
  Peptide Sequence Number=SeqID_45518
atggcggattccgttgagatgcgcgcggaggaatcgctccatcagttcggcgtgctacgagcggatcacacggggaagaaggcactgctcgatcgggcccacgtagcagtgagcgaccaagcgacagcacacggctgggttggcccacacgccagtgaccgagcaccaggcgagcgcgcgggtcggacggcctgcaagcgggacccgcagatgtaa

SEQ ID NO: 3740 - DNA, 339 bp, Zea mays
  Peptide Sequence Number=SeqID_45519
atgaacctcagacgactgtggaaacctgattctgggagatggggctccgcaccgcgcggcctcgccaccaaccgtgcctggggcccagggatttatccgcctggatctactccgttgactcagctcatcctctatacgtgtagcgccggtctacgaccgatttggggtgccataacctcgggtcaccggttcacaggaatgcatcgccggcttcaccgccatggttctcgcgcgctgccatctggggactatcgcggggaagaaaaccccctggccgtccgattgactatgggtggctggttggagaagatggcgtgggatggaaacggtgaccgttag

SEQ ID NO: 3741 - DNA, 279 bp, Zea mays
  Peptide Sequence Number=SeqID_45520
atggggttgtccactgcggcccgagcatactggcgctccatcgagcgcgccggactcggcggatcggatgactcagaggaggtatcctcggaagaggtggactcctctgaggagtggaacggcggcgagggtgatggccgcgagaacgacattagcagtggcgacgacgacaccaagggtggtggcaacggcgatggtgaaggtggcgatggcgagggcgacggcaaaggcgacagcaagggcaacggcaaagccggcagcataatgctgctggtttag

SEQ ID NO: 3742 - DNA, 312 bp, Zea mays
  Peptide Sequence Number=SeqID_45521
atgtcagcaccttccccttccttgcaactaattcccgtggacgccgggtcgttgagctacctccgtcgttctcgcgaccgggcacgatcgggggtcatcatccctcagattgctcgccggtgctcacactccgccgcggatccgcccctcatcgtggctggagctttcccctacaaggccatcgacgtgctcgattcagcttgggaagccctggtgcggctaccggtgtgctcgccggtgaggaatttggggcgcctccgcactccagtggtgaggggagaagataacggggatccattggatcctgtttga

SEQ ID NO: 3743 - DNA, 342 bp, Zea mays
  Peptide Sequence Number=SeqID_45522
atgcccgcctgcgccccgatgtacaacatccaaaaccgaaaggcgctactcgtcgatgggccaacaggaaacaacagggaagatctcataccgattttagcacagtggggaaagctggccgcgagtgatggcggtgatccatcgattctggcgagcaattcgccgccggacgatggctcacgagcccgattgctcacccgcgcgcgatccacacagaacggagatcccctggtcaactccttagccaacgaggaactccaggcgtgggatgagcacacggcggcgaggcaaggcttccctttcccccgcgattccggcgtgtacgacagaccgccctggtga

SEQ ID NO: 3744 - DNA, 1236 bp, Zea mays
  Peptide Sequence Number=SeqID_45523
atggctaaggaaagcaagctaacggccggggtggccgccgcgctgaccgtcgtcgccgcttgcgcgctatgcctgctgctgccggcgacggcccgcgcgcagctccgggtgggattctacgacaccagctgccccaacgccgaggcgctcgtccgccaggccgtcgcggccgccttcgccaaggacgccggcatcgccgccggcctcatccgcctccacttccacgactgctttgtcaggcctagccaagagtcatcggtactcaccatatcgcgcgcgttccacgactactgtattaaggattgtggcatcatctcggcgccggagggctgtgatggatccgtcctcctcaccgtgaatcctggcggcgggcagactgagcgtgacgccctcccaaacaacccgagcctccgcggcttcgacgtgatcgacgccgccaagaccgccgttgagcagagctgcccgcgcacagtctcgtgcgccgacatcgtcgccttcgccgcccgcgacagcatcagtctcaccgggagcgtctcgtaccaggtccccgcgggccggcgcgacggccgcgtgtccaacgcgacggagaccgtcgacctacccccgcccacctccacggcgcaaagcctgaccgacttgttcaaggtcaaggagcttagcgtggaggacatggtcgtcctctccggcgctcacaccgtcggccgctccttctgcgcctccttcttcaagcgcgtctggaacacaagcacgaaccccgctaccgcaatcgtggacgcggggctgagcccgtcgtacgcgcagctactacgcgcgctgtgcccgtcaaacacgacgcagacgacgccgatcacgacggccatggacccgggaacgcccaacgtgctggacaacaactactacaagctcctgcctcgcggcatggggctcttcttctccgacaaccagctgcgcgtgaacccgcagatggccgcgctggtgagcagcttcgcgtccaacgagacgctgtggaaggagaaattcgcggcggccatggtaaagatgggacgcatccaggtgcagacagggacgtgcggagaggtccgtctcaactgcggcgtcgtcaacccgagttcgtactcgtcgtcgtcggcggtggagctgggttcgagcgcgccagcagccgtcgtgctaattcatatggatgagttccccgccgacacataccatgtgtttggttacccgactaagcgtaactag

SEQ ID NO: 3745 - DNA, 219 bp, Zea mays
  Peptide Sequence Number=SeqID_45524
atggagcgaaggtggagggggagcagtgcatcgagcagaaggttcgcgacgcaccaggatctgttgggggcgggcgttgctggcgcggggcgcggcggtatcggggacagcgggcgcgaggagggcggcagggactacgggggcgcggcggatttggggacagcgggcgtgaggacggcggtggggactgcggcggcgaggagtcacgagcgcgggtaa

SEQ ID NO: 3746 - DNA, 213 bp, Zea mays
  Peptide Sequence Number=SeqID_45525
atggacgccagagaccgggtttacgagggcggacctcactgggtacaaaagaactgtgcgatggattccagagaccgggtttatgagggcggacctcatcgactagatcacaggcgccccgccaacttctcgagcgacgacgggtgtcagacttctttggttaggtggcgacttgggtcgtcctcatggatgtcgagggcggagcctggctag

SEQ ID NO: 3747 - DNA, 894 bp, Zea mays
  Peptide Sequence Number=SeqID_45526
aacttgacatcgctgtcagagttagatctatccatcaacagcctacaaggtgaagtgctagaacatcaggaacgagatgacatgttagattttgtcgaagccgtcttcgctagtggaggtttcgaccatcactcgtcgttgtaccccgatggtgatcggcgatacgcgcgtggccggcccacctcgtgcggcccagcgcgcaggcgcccacgcccattccgccaggccagcgccccctccctggcccagcaactgcggcccacccagcgcgctcgcgagaacgcactcttcgtgatgtgcgctcccattccgccaagaaccgcccaactgctcgtgctcctgtcgacctcccacccctccactccgcgacggttggcggctgtctcgccgaagcgacccagccagcgcagccgagatggcgaagggcgacgggcgcagaggagggtcgcggggacttcgatcggctgtacaatttcctggtggtctgccacagtgacgcagaccgcgtggctcgtctccaccgcctgcgacatcatcgctaggaaagagaggcatgggatggtcgtgtcttgccccttcctgctgtacctcgtctcgtcgcaggataaggctgcgcaggtgcgatcgatatgcaaacctctgaagcctcttgggattcattcagtgagcttgcatcctggcgcatccattgaacaccagatctctggactgaaaacttgtgagccggagtttcttattgctacccctgagaggctacttaatcttgtttcgttaaaggcgattgacatatcagatggtgacaaggatgatggttttgactatggtaatggtaaagaagaaggggtcgaggcgaatctccaggagttcccggacttcgacgagctcgaggattag

SEQ ID NO: 3748 - DNA, 933 bp, Zea mays
  Peptide Sequence Number=SeqID_45527
atgaagacaatgcgatcaacatcagccaacaagatcaaagtggtgcagcggaagtcgcgcgtggctggcccaccccgcgcgtcccagcgcgcgtggctggcccaccccgcgcggcccagcgcgcaggcgcccacgcccaggccgccaggccagcgccccctccctggcccagcaactgcggcccacccagcgcgctcgcgagaacgtgtctggccatcgtgcctcgctcccgcatgggcgagcgttgcgcctgccctcgtgccgctaggcccaccggccaccctaagcaactattcatcttctttaggcactcttcgtgatgtgcgctcccattccgccaagaaccacccaactgctcgtgctcctgtcgacctcccacccctccactccctgacggttggcggttgtctcgccgaagcgacccagccagcgcatccgagatggcgaagggcgacgggcgcggaggagggccgcggggacttcgaccggctgtccaagttcctggtggtatgcctcaacgctatccgggatgcggtggcgcccgaggaaggcggcaacagcatccacggcaccggtgactggggcgtggagttctggcggtgctgctccgcccaggcgtcgtccgacgtgctcgacgctagcggtgcgtgcgccacggtgacgcaaaccgcgtggctcgtctccaccgcctgcgacatcatcgctaggaaagagaggcatgggatggtcgtgtcttgccccttcctactttacctcgtctcgtcgcaggataaggctgcgcagaggaactggggtgtagtttgcttcgccgtcgtgccgttaatggggctcggtgtatgcggctcactctgtcaagatggtgataaggatgatgattttgactatggtaatggtaaagaagaaggcgtcgaggcagatctccaggagttctag

SEQ ID NO: 3749 - DNA, 471 bp, Zea mays
  Peptide Sequence Number=SeqID_45528
atggcgccatcacactgtccagctcatcatctgcctgaagcccaacttgccacccaagagtcatcggtactcgccatgtcgcgcgcgttcgatgactactatatcaaggattgtggcgtcatatcagcgtcggaggtgacgcagaggaggaccaacagcgatgaccactcgccatcgtcaggagcctctcccactctcccctcaccttccccggtggcggcgcccttcccccctccgtttcccctccccggcggcgcccctttcccctccccggcggcggcggcggcggcggtggcgcccacgttcccgcgccccacgcccgcgcgcacccctcccggcagcggtggccgcgcccacccccggccggcccaacctcgtcctcccctgcgcagccccctccccttcctctcatctctcttccatggatgggaggaagaagatggagagaggaagaagatgacaattctgtaa

SEQ ID NO: 3750 - DNA, 1593 bp, Zea mays
  Peptide Sequence Number=SeqID_45529
atggacgacttgtcgatgagagcattcccaattcttggacagcttgccgacttccaggcgcaaatcatcgacgaccccttcgagactcatgcgccaatcatcgaacaacctggctgctttctccacctcctggacttgcttaatctgctccaccgcaaaccccgtctcccccctgccggcgcctttcacgccgtgcctctcccacgccttgaccacggccacccgcgcctcctcgcctcccgcaagcccaccccgcgcgcgcccgccccggcggcgttggcgtctccctcctctccggccgctatggcaggggagaacgacccccgcagcggcggcggtcccgttcccgtcgacgcgtgcccgctctgcggcggggccaacgggcccccctcgcgcgtcgccctcgccaggcgggccccgcccggcgacgccctcgcgctggcggtggcgttgtcccccgccgacgaggcgtccgcgctgcgcgaggcgctggcgcggcaccggcgcggcgtcgcggacctgcaggcggagctggaggccgagcgcggcgccgccgcgggcgccgccagcgaggccatgtccatgatcctgcgcctgcagcgcgagaagtctgaggccatgatggaggcgcgccagtaccggcgctacgccgaggagcggttcgcgcacgacgccgccgaggccgccgcgctgcacgacgcgctcggccgccgcgacgccgccgtccgctcgctcgccgccaggctccggtcctgccaggcgcgcctgctccacctcggcttcccttccccgtcctccccgaccccgaccgcggccgaggccgaggccgaccatcccttctcctcctccgacggcgacgacggttaccattccgtccactgcctcgacgaccacctcgccgacgagggcaccccgcgcgccccccacggagctcccagccccccggactccgataagccggtcgtcatgtttggctcgccgcgccgctcgtcacgccacgtccgcacgttctccggcgacggcggcccgtacagctgccgggtcgcgctggccgacgagttcccgctcttcacggacagggacgcgccggggcaggacgacgaggaggaggccgaccgggtgtacacggttgacgcggtgcatggcgtgccggtcatggcgcctgacgacgactgctgcgactttgggaccacgtgggagggcgaggtgggcgctcgtgctggggccgcgggctgggcggaggaggacgagatacaggaactcaaagccaggttgcacgcgttggaggcggatcgggagtctatgcggcacgccatcatggccatgggagatgagaaggcgcaggtcgttctgctcagggagatcgctcagcagctctgcagggacgcggcaccgttccctgctgtcccgctcaaggtgcagccaaggccacagccgtttgtcatggcacagaggaaggtggtgaagaggcactcgtccttcgctaagatcttcattgtcacagtgatcaagacatgcattagaaaggataacctaatatgcaggactctaatcattgagttatccgaaacacactattgcttgataatgtga

SEQ ID NO: 3751 - DNA, 1824 bp, Zea mays
  Peptide Sequence Number=SeqID_45530
atgccgccgctcgccgcgcgcctctatgccccgcttaacctcgcccccgccgtcccagccgcctcccttcgccccgccacgcggctctgcgctgcgagcgggccccgcaacgagaaggcggcggcggtggcggtcgcggagaaagcgggcggcgaaggtggaggaggagaggacgagggcccgtacgatgcgatcgtgatcgggtcagggatcgggggcctggtggcggcgacgcagctcgcggccaagggcgcgcgggtgctggtcctcgagaagtacctcatccccgggggaagctccgggtactaccgccgcgacgggttcaccttcgacgtcggctcctccgtcatgttcggcttctccgacaagggtaacttgaatttgatcacacaagcattggaagcagttgggcgtaagatgagagttctaccagacccttctacagttcatttccacctacccggtgatctctctgtccttgtgcataggaagtatgaagacttcatcaacgaactggtcagcaaattccctcacgagaaagaagggatccttaaattctacgatacatgctggacgatcttcaattcactaaattcgttggagctgaagtctctagaggaacccctttatctttttcggcaatttttccagaagcctcgggaatgcttaactctagcttattatttgccacagaatgctggggatatcgctcgcaagttcataaaagatcaggagctactctccttcatagatgccgagtgttttattgtgagcacagtcaatgccttgcaaacacccatgataaatgcaagcatggtcttgtgcgataggcactttggagggattaattatccagttggtggcgttggtggtattgcaatatccctggcagatggccttgttgaaaagggcagcgaaatccgttacaaggcgaatgtaaccaacgttattcttgaaaatggaaaggctctgagcacttctgtactccaggttggggtgaggttatcaaatgggaaggagttctttgctaaaacagtgatatcaaatgccaccagatgggacacgtttggaaaactcgtgaaagaggaacttccagaagaggagaaaaactttcaaaagaattacgttaaggcaccatcattcctttcaattcatatgggtgtcaaagcgtcagttctgcctgctggcactgactgccaccattttatacttgaggataattggaataatttggaaaagccttatggaagcatatttttaagtatccctacagttcttgatccatcattagctcccgaaggacatcatatacttcatatatttactacagcaggcatagaagattgggagggtctttctaggaaggaatatgaagagaaaaaagaggtggtggccaatgagattataagaaggcttgaaaagaagttgtttcctggtcttcaagattcaatagtcctcaaagagtggcggagcacccattatggtcaactatggctagagctataccttaaaatcatgtttggtgtagtggtaggctcaccaaaaacacaccgaagatttcttgctcgaaatgacggtacatatggaccaatgccacggggtaaaccgaagggattactggctatgcctttcaatactacctcaatagatggcctttactgtgtcggtgacagctgtttccccgggcaaggtgtcatagctgtagcattctcagggatcatgtgtgctcaccgagttgctgcagatattggactagagcagaagtctccagttctagatgctggtcttcttgggctactcagatggctgagaacacttgcatag

SEQ ID NO: 3752 - DNA, 417 bp, Zea mays
  Peptide Sequence Number=SeqID_45531
atggcagcggcggcggtaaccctcctccgccttcttctcgcccgactctcctaccacctccgctccgtagaggaggaatctgcggccgaggcggacgcgcctaggtcgttcgtgctcccacagttgccgtggccgaagctgagcgtgaaggaagatgtgtgcccgcatggaagcacaattgttggtattggttcactggatcctcctgcattcgtgtatgacgatgaagactacaaggatgtttttgtgtcagaggcttgcttgctcactcgcgacgagaacgagtggtacagggaaccaatctcggccaatgccacgtctagcaaagaagatacagaatttgatcaacgcctcgacatggtaggaaagaacactacggtattggcggggattgttcataagacaatctggttctga

SEQ ID NO: 3753 - DNA, 447 bp, Zea mays
  Peptide Sequence Number=SeqID_45532
atggttgctcgacgagaggccgctgccatggttgctccgcggggcttggccggcctgggcgccaagctgagggaagggaggagagagctgagggcagagagaagagggaagggagagatagaggcggtggctgcggctgggagagaagcagggagcgtgcgactgctagtcactaacatctacagtcccatccaagtctacatcttcaggagaattccatttttcaagggtaaggttttgatcttgtttcttgtagaggtcttcacaggaggtgaaggtgatatggagccacctgccgaggaacttcgagctccggctggtgtcgccgttccctcggaccgattggatgaaggtttcgccggagccgagagggaggtggtgagctacaagaggcggatggtgccagttgggagggtgttggaaaaccgatggttaccttttgtgtga

SEQ ID NO: 3754 - DNA, 1002 bp, Zea mays
  Peptide Sequence Number=SeqID_45533
atggtcgacaagctgggaaattattcaaaaaatcaaatttacattagaggaagcataagaaaagcaagaccaccacctgttcattgtagcaaaccatcaagaactgacaggaaccgtaactaccgaggaaactaccaggatggccccccacagcaaggaaattaccagaacaaccgtcctccaccacaaggtggttaccacttaccagaacaacccgccgcagcaaggaaactaccagacataccgctcgcagcaagatggaagaggctatgcccccacagcagaattatgcacaaggtggtcatgatggtagaggttttggaaggaaggaatgattacacagaccgttcaggctacaatggaccacctgattttcgaagtcaaagtcagtaccaagggcatgtaaatccagctgggcaaggtcaaggttacaacaacccccaagagcgtagcaacttctcgcaagggcaggcaggagaacatctattgctccttcagcacctgggtcttatggccaaccatcagcacctggatcttatggtatgtccatcagcgaatcctggtggtaacagagttcctggtgtgaatcctagttacggtggggatggcagacagggggctggaccagcatatggtggagataactggcaaagaggttctggtcagtatcctagcccaggtgaaggacaaggaaactggcaggttgtttataaacatagaggactcttaacagaccaggttcttgaggaccttacaatgtacctgagacggcagagggaaggaggtgacgatgctggcgcagtagtcgcctcctctagagacgacaacaacgtcgagacgatgccggagagctcagagccctaccagcacgcttcctccagagacgacgacatcaaggcaatgccggagagctcggatccgtaccaggggcctgcacacgcatgccaagagatgggacgtcgacccatttttatcccttgctcatcctacgtgtgggattaa

SEQ ID NO: 3755 - DNA, 321 bp, Zea mays
  Peptide Sequence Number=SeqID_45534
atggcaaatggctacagcagacctcataaagatgaagctattaagatcataaagcactgcatgtttgccacaggcgccggtctggagatccccaacgagcagcgccgcggcggcaccccggcggacgccgaggccaacaacgctccggacacggcgcgggacgttgtccaagcgctccgcgagccccaacaaattccagagcccgacccaaacggcagcgcagttccttcggcttggcttctgtcacaaggtaagggaaacatcaaagactctagggaacggggacaagtgacggactatctccaccaacttacattctag

SEQ ID NO: 3756 - DNA, 1404 bp, Zea mays
  Peptide Sequence Number=SeqID_45535
atggcccagcgctggcgctccagggcgcggtgggactcagacctggacgaagatggttccccgccttttcggcagccgcgcaggggcgggagcgacgaggaggacgacgaggtggggaacgaggacctcagcctggagatcatcgcgcgcgcgcagcggaagcggcgttgggcgtcctgcggtggagtcaccgggttcgccaacctgctctcggtgtcctccggcgacgacgaggacgccgtggtggagctcgctgaggcggatgagccccggaggaaacagaagaagaggcagcactggaagcaaaggaaaaggcaacggaaggaggcgaccgctgctgctgcggctgcggctgccgtggacgaggaagagaaggaggttggtaccacccaggaggagcaaattgggacagcagaatcggtgctaactgaagatggggttgatgcccctacatctcacagtatgtttctgcggaagctccttcgcataccaagatactttgatcctggggaaacattgttggagacttgctttaattgtagcgaggaaggacatgtagctgcaaactgcccaatgggaaagcggaagaagccttgctttgtttgtgggttgtttgggcacaatgcaaagcagtgcaagcagggtcaagactgtttcatctgcaaaaaaggagggcatatggcgaaggattgtcctgataagcacaagaggaatgatcatcaatccacattatgtataagatgtggagaaacaggtcatgatatgtttggatgtgccaatgattacccaccagatgatatcgagtgcaatagtgccctagctgcaaggttagctgttataactgtgcccaatctggccattctggcctgggatgtgctaagcaacgcagggaagctagtgctgtcacaaccccaaccttatgcttcaaatgtggcgaggaagtccgatgggccaaaaggctggtcgtcaccacacagtcagaggaagggaagatggaaaaacgatggcaagtcaccatcacacatccggaggaaggaaaaatggaagaaagattccagtgctagatcagctcctcatgatgcctgtacaacaagcaaaagcaatagcccctctttcgaggaaagaatgggcgcatctaatcataaatcgaaatggaggggtggttggactggtgatgacgatctaccatcgaagaagtacaaacccaatggatggggttcaccagctactcccaagaggtcttacacgaatcaccagtacttgtctggtggtggtgactacttcactccccagtcctcacgaaggcacaaccatggtaccgcgtcacccggtgctaggaaacacaggttctcgtcgtcaatattcgccgccagcaacacccatgtccggttcaaaagaagctag

SEQ ID NO: 3757 - DNA, 2850 bp, Zea mays
  Peptide Sequence Number=SeqID_45536
atgtcgtccgacatccgtaaatggttcatgaagccgcaggacaagagcgcggcggcatctggagccgccgggaagccctcggggtcggcggctgagaagaagcccgtgctcagcattccggagaagaagtcggcgccccccgcattggcgtcctgtgaccatgatacttccgctagaaggaagacaagcaaatattttgggtcaaaagcagaaaaggactcagatgtccaaatggcagacgcctctggggggaagagtgcggctaaaagaaaacttcagaaatgcaacgatgaagtcaaggaggacagcaagccttttccagcaaagaaaatgtttgatgatgaagaagatgacgattttgtggcacctgcaaagaagaaaactccagtgaagccaccaccttcaaaaaagcttaaagttgaatctaatgttgaagcccctgcaaagactactggtgttgatgatgctgaggatgaggacaggatggatgaagatgccaagaccccctctaaaggagctggaaggggaaggggaagaggaggaagaggaggagcaggagctgcccctgggggcagaggtagaggaggtgggagaggttttatgaattttggtgagaggaaagatcctcctcacaaaggagaaaaggaggtcccagagggtgcccctgactgtttatctggtctgacatttgtcataagtggtaccctcgacagtcttgaacgtgaggaagcaactgatctaattaagcgttatggtggccgtgtgactggctctattagtaaaaagacgagctacttattggccgacgaagacattggtggagtcaaatctaacaaagcaaaagatctgggtgttccattcttgactgaagatggtttatttgatttgatccgaaaatcaaagcctgcaaaggctcctgtagacaaacgtcaaaacaacaacagttctgaaaagcttcagaaatcacagacaaagagctctccagctaaagttgaaaaacgagccgaagcaagtgctgtaggcaaaagtattgcttcaaacagtaatgctgcaagtgcctccgctgacaaacaaaagcccaagattgttgaccgtggttctatgcaatggacagaaaaatatcggccaaaagttccaaatgacatagttggcaatcaatcaatggtcaaacaacttcatgattggttaaaaagttgggatgcactattccttcattctggccaaaagggtaagggaaagaaacaaactgacagtgcagccaaaaaggctgtgttgctgagtggacctcctggtatcggtaagactacaactgctaaagttgttagtcagatgcttggtttgcaggccattgaggtaaatgcgagtgatagccgtggtaaggcagactccaagatcgagaagggtgttggggggagtacatcaaattctatcaaagagcttatcaacaacgcgactctgaattatagtgacaatcgtgggcaacaattccataggttaaaacatcccaaagctgtactagttatggatgaagttgatggtatgtctgctggagatagaggtggtgttgctgatcttattgctagcatcaagatatccaagatccctattatctgcatttgtaatgaccgttatagtcagaaattgaagaatcttgtgaattactgccttatgctcaacttcagaaagccaacaaaacaacagatgggtaaaagattgatggaaattgccaaaaaggaaggtattcaagctcaagagaatgcaatggaagagcttgctgaaagagtgcacggagatattcgcatggcactcaaccatttgcagtatatgagcctctcccagtctgtggtcaaatatgatgatataaaggagcgacttaatagcagttcaaaggatgaagatatttctccttttactgctgttgacaaactttttggtttcaatggcgggaggttaaggatggatgagagaatggattttggcatgagcgatcctgatttagttcccttgatcatccaggaaaattatatcaattatcggcctaacaccatcggcaaggatgaaagtggagttaaaagaatgaatgctttagcccgggctgctgaatctatagcggacggtgatcttgttaatgtacagataagaagatatcgacagtggcagctgtcacaagctgcttgttttgcttcatctatagtaccggtgagcgaaactttaataggtttggtggatggttgggttatgaggaataaccatggatatcctgaacatcagcccaagagccatgttcaggatgaagctgttcaaaaggtggtagagtttatggatacatactctttaagccaggaagacttcgatacaattgttgaagtatccaaatttaagggtcatccaagtcctatggatgggattcaacctgctgttaaaagtgccttgacaaaggcatacaaacaaggaagtagttcccgtgttgttcgagcagcagatctaataaacattccaggcatgaaaaagcctttaaagaaacgagtggcggcgatcttggagccggtagaagagagcctacctgaagaaaatggactagcatcagctgaagatgatgaagatggttcttctgatgctgaaaataatggtgcatgttctcctttcccacatgagcttgtgcctgctgactctacgccgaagctggacctgcaaagcgacaagaagaaaggaatccaagtgcagcttgacctgaagagcaatggggatggcccgcgcgggaagaaggcgcctgctgccaggtcaagagcaaccgggtcaggtgggaaggccgcggcgggaggaggttcggctgggaagaggaagaggtaa

SEQ ID NO: 3758 - DNA, 1206 bp, Zea mays
  Peptide Sequence Number=SeqID_45537
atggacgagaacggccactacgtcgtcgtcgccctgccctccgcgcgctgcggcggcgacgatgacgagcctacagtcaaggaggaggacgaggaagcggaggagcaggagcagtcgccgaccgaggcgccagcgctacccgccgcccgcgccgtgcggcggcggccgaaccagaagcggaccaagaacttcagcgacagggaggacgagatgctggcgctggcgtggctccgcgtcagcgcggaccccgccgccgggcgcgcgcccttctggagccggctgcacgaccacttccacgcgcaccgggacttcgcgtcggagcgcagcgagaactcgctcctgcaccgctggtccaccgtccaggacaacgtcaggcgcttcgaccgctgcgtcgccgacgtggcgggagcggccgcgggcgcggccgagggagggctcacgccgcaggacacggttgtgcgcgcgctggccctgttcaagtcccgggacaagaacaacaagccgttccagttcatgcactgctggatcctcctgaggtcgcagcggaagtggatggagaggtcgtcgcagtcgcagacctcttcgccgaagctggcgtggaccagtaggccgccgccgtcccagaagaagcagaagacggctccgagcccgagccccagtccgtgcgctccgccgcgtgctctcgacgacggtctagatgctgcagccgcccaagaacgcgaggaggaggaggaggaggctgtgcacgcgatgcagcagccagtggatgggaccgaggaggaggaggagttacagcagggcgggggcgtgggcgtgggcggggctagtctgtacctggaggcggcggacgatctgtggtggggaaagaggaaagcggctgacgacaatggcgaacagcaggccggcgcgaggacgatgcagcagctcagcaacggcgcgcgagagaagcgtgcgctggaacaacagcgcacggtcgcgctggcgctggaccaagccagggctgccaacgaggcgaggagcctcgagataaggaggagagaagtggagctcaggaccaaggaggtggatctgaaggtgatgctggaagaggagaggatcatggccaaggacaccagcgccatgtccgggatacagcagcagtactacaggatgctgcagaacaagatcatgactcggcggttcggtggctcatcttggatggaatga

SEQ ID NO: 3759 - DNA, 231 bp, Zea mays
  Peptide Sequence Number=SeqID_45538
atggcggggatgcagggatgccttgggtcgacgacaacggggattcgactgtacggggagaacgacggtgagcgcgaaccgggtgaaacagaggggttaggggcaaaccagaggatgtctcgcattgctggcgaagaggcggagctcaccgaggcaacggacgtggcagacgctcgacgacggccacggaacgggcgacggatcagggcggagctccacggacccgcgtag

SEQ ID NO: 3760 - DNA, 375 bp, Zea mays
  Peptide Sequence Number=SeqID_45539
atggagctgagctggttcctgtcagctttcctctcccgatccgtctccctgcccggacgacgagaccttcgcgcgcccgagcgaatcctatccttgcagccgcagcaggaggctttgcttgctctgccagagctcgtcgtcgccgatctgcgcgcatgcacgccatggatggatcgtctactcgccggcctgccgtgcatgtgttggcgcaatctaccatgccactatgccagtggcagcggcatgcagtggcagtgccaccacggatgggacgcccacgcgacgagcagatctccagccgcgcgcgcgctccccggctacctcgctcgatcagtctggccgatggcgacaggcggggcaagtggcggcatttaa

SEQ ID NO: 3761 - DNA, 1248 bp, Zea mays
  Peptide Sequence Number=SeqID_45540
atggaagacccctacacgagcttcttcaagagcagctactactactacggctcctcctaccccgctgccccagctccccaccatctcccaccgtacaccaccctctacccggcggcggcgtctcatcagtaccctgcgtgcttcttccagccgccgccgctgccgctgcatgagcatgacagcccgccctcgccgccgctacgggaggcgctgcccctcctgtcgcagtcgcctacgcgcgccgcctcccgggcccggcggccgcgcccgcacgtggcggtggactccgactccgaagacggcgccgatgacttcctacgcgagggcgccgtcggcagctccgtggccccctcgaccactacgacgcgtgcgccgctcttcgccgacctcaactgcatgccctcctgctgcgacgacgacccgatggacctggaggcggccgccgcggcgcccacggacgacgacgccgacgacgccgcggtcgcgctgcgcatcggcctgcccccggctcccgtcaacggctgcggtggcgcggggtctgacctccggtccgggctctccggcaggggggcctgcggcggaatggaggccgaggaggacgaggacgagtgcaacaaggtgggcgacggcgacggcgacgaggtggtgccgctagggttcgcgtccacgcccatcgggaggctcaacaaggggcagtactggatcccgactccggcgcagatcctcatcgggcctacgcaattctcgtgccccgtctgctacaagaccttcaaccgatacaacaacatgcagatgcacatgtgggggcacggttcgcagtaccgcaagggcccggagtcgctccgcggcgtgcagccgacggcgatgctccggctgccgtgctactgctgcgcgccggggtgccgcaacaacatcgaccacccgcgggcgcggccgctcaaggacttccggacgctgcagacgcactacaagcgcaagcacgggctgaagcccttcctgtgccgcaagtgcggcaaggcgttcgccgtgaagggcgactggcgcacgcacgagaagaactgcggcaggctatggtactgcctctgcggctccgagttcaagcacaagcgctcgctcaaggaccacgcgcgcgccttcggccacggccacggcggcgccttcggctgcaacctcgccggcgccgacggccttgacgacgacgacgacggcgccgtctccgacatcgagcacgactgcgccgcgcggtga

SEQ ID NO: 3762 - DNA, 189 bp, Zea mays
  Peptide Sequence Number=SeqID_45541
atgacacctactctactccacagcttaaaacctcaagatatgtcggtaaccatcgaagaagtacaagtttcaaggaaatgggaatttcatggaaatacagacattgggtccatattacacattgatatgattttggctgacaaagaggctattgctgtcagtgaccaccatatagtttggttacaatga

SEQ ID NO: 3763 - DNA, 630 bp, Zea mays
  Peptide Sequence Number=SeqID_45542
atgtctgttgcagtccaaaatggccttgcacaattgaaatcattgatgactgctacaactgcaaacaacatacaagactgtcctcagcaatcagggagtttatatgatggtgaagacaccgatggttctaatgaagaggaatcccaaagtcgtaagggtgttcgtgccaacatctccaacgatggtgatcagatctcaacaaaagagtacaagaagaaacagaatgaacctacaataagaaactatattggaaaagttactgctcaattcaccatgtacaatgaaagcaaggcagtggaagatgcatgtctagatatgctaaagggtggacagcgccaaatgagatatagactgaaacaaaaatatttcaatgggatacctgctaatgaagtcaggacttcatcgcctattccaagcatgtctgatgaggactggagaaggggtctaccacaaaacacaagaataaacttaatcgtgaaaacgtacggtatcaacaatgcacaagatcccagttctacattgcaaaagcttatttattgtgtttcttttgaagaattgaatatgcttctactgcaaagttgcttcaccactgtagagatttcttttgaagaatttattttggagctctag

SEQ ID NO: 3764 - DNA, 198 bp, Zea mays
  Peptide Sequence Number=SeqID_45543
atgccgagagtacgactacgctcgaccctatgtaggacccaacatgccaaccagaaaaatcccaagagtgaacagttctgttgggttgcatggacacggtctggtgctccccagaccaagttaagctcttttatacctattcaaacgtcgggtcagtcgggttcgggttgggtcaaggtcaggtcgtggtccatttaa

SEQ ID NO: 3765 - DNA, 252 bp, Zea mays
  Peptide Sequence Number=SeqID_45544
atgcccgtgttccgtccctcgaatggctcgcgcaacgaccgccccgcgaaccacctgtcccgttgcattaacttcgcggccccaagccctcctactgatcaggggttcgaaggctggcccctcggaagggttcgacagccgccccagagcactcaggcttcaggatcattactgatcagaggttcgaaggctggcccctcggaagggttcgacagccgcctcagagcactcgggctccgcacccactactga

SEQ ID NO: 3766 - DNA, 600 bp, Zea mays
  Peptide Sequence Number=SeqID_45545
atgaatgaggatggaacaaaggtcgaatgcagggtgtggaaccccttccgttccaagctggttgctgctgtgcttggtggtgttgacaacatctggattgctcctggtacccatgtgttgtatgtatctcatgtgtctgatattgtagggccggatggtctagtctacgctgttgagttctctcacaggagtggaagagaccttgtcaacatggcaaagaagaggaccaatgtgatccccattattgaggatgtcaggcatccggcaaggtaccagatgttggttggcatggttgatgttatcttctctgatgttgcacagccataccaggtaccatttccttcgagcctggtgtctgaatcactgggctgccacattgttggattgagtgttgtttaccctcgttctctgcctttatactcttttgattttgatctggcaatattgagcttaacaaatgatgatcatactcggattccccttcaggacatcaattggatgatgcagattcgagtttctgatgccagttgtgctcaatgccaaacttatctttatttgctttgtgctattcccatttctttgtttttctttattggttaa

SEQ ID NO: 3767 - DNA, 666 bp, Zea mays
  Peptide Sequence Number=SeqID_45546
atgaggattttgcaatggggtgaagaccgaaggtttgacaaaatgcgtgataatttggggaaattagcagttttttggattttccagaaattctcaccaggccatctttttctgttcgggcaggctgtgtgggtttggtctgtcagcttgcccgtcactgttgtgaatgcaagtgacagaaacccctcgattgaagccagggatataatcggttggataatatggttggtcgggatatgtgtagaagcaacagctgatcagcagaagcttgtgttcaaaaattctccaagtaacaggggaaagtggtgcaacgccggtctttggaagtactctcgccacccgaactactttggggagatattcctttggtggggagtatttgtagcatcgaccccagttatctcagatgccgaatggcttgtgattcttggacctatattcctgactcttctgcttcttttcgttagtggaatcccactcctcgagtcatctgctgataagcgctatggacgattggaggaataccgtgcatacaagaacactacaagccctcttatcccattgccacctgctgtgtatggttccctgcctgcgtggttcaaggttgccttcctccttgagctcccgctctacaatcctgggccgggaggtgatccaatcagttga

SEQ ID NO: 3768 - DNA, 276 bp, Zea mays
  Peptide Sequence Number=SeqID_45547
atgggcaccgtgctcgattcgcacttcctggcgctcaccgccatcgttactgtggggtaccagctgctgttcttcatcatcacagctctcctccggttcgataaggtcaccgatttcgcagtttgtgtggcagttgttgctccaagcctccaaaaacccaacctatcccctgaactgtattatactcatccaattccaaattacaagacgatgacttatatagcatacattagggcatgtacaaccccatttaatatggggtctctaagggcttaa

SEQ ID NO: 3769 - DNA, 510 bp, Zea mays
  Peptide Sequence Number=SeqID_45548
atgaggagacgtgccgacattgttcggagggtccaggtggtcgtggggttgggcagagaggcagggcgcgacggagtgttgaagggaggtccagcgcttaaggtgcagcgcgctacggagaccgagctgggggtattgtgtggaggagccgctcggcaggcgctatttatgggcacggggagaagaaggatgaacagggaggctcccggcacacgcggcgtcatccgttcacaaccacacggcgagatccgctcgagcccgccgtttgcgcgctgtctgttgcgcgacccgcggaatccgcgcagccggtctggtgtccggaggttgaagggagcaccaacgcgacggacccacacgtccgcacaacagggaccgagttggaggagtggcgcgactgagcccatggtgtcacgtggccaaggatcacggagtgcggtgcgcccagaggagaagtcacaacgggaggaagaagacactcctaacagatggggcccacatggtttcttttag

SEQ ID NO: 3770 - DNA, 510 bp, Zea mays
  Peptide Sequence Number=SeqID_45549
atgaggagacgtgccgacattgttcggagggtccaggtggtcgtggggttgggcagagaggcagggcgcgacggagtgttgaagggaggtccagcgcttaaggtgcagcgcgctatggagaccgagctgggggtattgtgtggaggagccgctcggcaggcgctatttatgggcacggggagaagaaggatgaacagggaggctcccggcacacgcggcgtcatccgttcacaaccacacgacgagatccgctcgagcccgccgtttgcgcgctgtctgttgcgcgacccgcggaatccgcgcagccggtctggtgtccggaggttgaagggagcaccaacgcgacggacccacacgtccgcacaacagggaccgagttggaggagtggcgcgactgagcccatggtgtcacgtggccaaggatcacggagtgcggtgcgcccagaggagaagtcacaacgggaggaagaagacactcctaacagatggggcccacatggtttcttttag

SEQ ID NO: 3771 - DNA, 567 bp, Zea mays
  Peptide Sequence Number=SeqID_45550
atggagaaggcgcggcggcggcacgtgccggcgttcggggagtggaactactactactcctcctcctcgtcaacctccccggactccgcgcccgccgcggccgagccctgctggtggtacgcgccggagccggaggcccgcagcgaggcctggttcaggtactccccgcccccccgccgcaggccggcgccggtgccggcttccaagaaggcgcggcggcccgagaccgcgggcggcggcggaggagccgtcgccgccgccgtagctgcggagcgcaagagggcggcggcgcccaagggatccggccgcagggtggtggttgtcaggcccgtcgacgaggacctttaccgcgtgccgccgccggacgacaacgacggcgccgccgctgtctcccgccttcccagacgccggcagcagcactgccgcggtacaggtggatccaatccaatgcgtggcggcaagagtggcctgtcattccgacagatgtggaacatgctctacaataacgagaccatgcaaatcgtggaatatatcgaagtctacatgatactgatggttgcaatgtaa

SEQ ID NO: 3772 - DNA, 966 bp, Zea mays
  Peptide Sequence Number=SeqID_45551
atggcggcggcgcaattggaggcggaggaggagctgcggctggaactggaggcggtggcggcggtgtacggagacgacgtccgcgtgctccgcgacctcccaccgcacctcttcgtccacgtgcggccccgcaccgccgacgacacctcgcagcagttcgtggagctctttcttggcattaaagcatcttcacagtatccgaaggaaccaccacatatttatgctgtggaaagtaagggccttgatgagaaccgacagatatatcttatcaccagcatccagaacaaggcaaacgaactttcaaactgtccaatgcttgtgacgttatgtgaggaagctggagagatcctctcgaacatgaatcatccagcaggggattgtccattgtgtctatatcctttaatgggagaggataagggtctcgatttgtccagctcagacaagcattataatgtgaatcagccaagaggattttgtcctgtttgccgcaaagtgttcgatgagaaggatattgagcatgttcgtgatttgttgggtgacaatacttccaggctggcatcactaacagttgaccttggtgaagatgaaaaggaattgctccattccgaggctgagcaaaacaggagaaaaagaatcgagtcacttgttaatctgcagcaagaactaaacggcctgattgaaccaaagaaagaccttgccatacaaccaggaatgtacgtttccgttcctcccagcacgccagacacagctgaagaagagaatgctgatcccagccaaggcacggctacttcgacctcagaaactgagcaacgtggccaggcaagcaacgccagcagcaacaagccgaagaatccaggccatcgaaggagaaacagagctaatgcatcaagacgacagcctcacggccagggccagccagctaggcagcagtggcagaggaaagaagcaggcacttcacaccaataa

SEQ ID NO: 3773 - DNA, 333 bp, Zea mays
  Peptide Sequence Number=SeqID_45552
atgggaaggcatctggcgagggcacacttcgcccaacgcccagccatgcgccaagggccataccccgcacgccacaaattcttcaaccagatcgccacccttcgctcgaggccttcgctgcagtcgctggtccgacggagacaaaacaggtggtccctcggagggcagatgttggggcgaaggcaaagacgccacccttcgctcgaggccttcgctgcagtcgctggtccgacggagacaaaacaggccttcgctcgatacggcgccagacgaaggcctgcgacgttgtcatcccaccgagcggcctcgtccagctcggaggcccacgtgtga

SEQ ID NO: 3774 - DNA, 1194 bp, Zea mays
  Peptide Sequence Number=SeqID_45553
atggacccaacgaatcagaggtcctcaggggcagggcggcgccgctccgttgctgctgctaagggccatggtcagcagcatgtgccggcacctacgtcactccgttcgccctcttcacctgattcacaacaagtacagtctccaaatcccccatggaacttttatccaccaaatggttttgtgaatctcattaaccaaccatacatgccaatgccgtcgcagccacttggagagaatttccactttgttggtctcacacagaacttcaacacttctctgccaccgccaccgccaccaaatgctaaaaggactcaaaaaccatccagactagctaaaggaacaattcagattgatggtgatggtgatgcaaccactgaggaatctaaggcagtcaagaaaaggtattggacacatgacgaggaagtgaggctggctagtgcttggttgaactgttctaatgatccaatacatggcaatgacaagaaaggagaaactttttggaaggaaattgcagaatactttaacaagcatgctccagcagatcgtcaaagggacgtcaatcaattaaagatacactggacaaggttgaagacagtgatcaacaatttcaatgggtgttggagcgcagtatcaaaaatgcatacaagtgggtactctgatgatcagttaatggatgaggcacaaaagatgtatgcaaatggtaataacggcaaaccgttcacgctggttcattggtggaaaactctcagaaatgaacctaaattttgtgcacaaatctcacagatggataaggaaaaaggtcagagccataccattgacatcactgaagatagagatctgcttccctcacaacgtcctataggaagagatgcagccaaggctcaaaggaatggaaagcgcaaggcagaagaggttttggatggtattgctcgccttggggacagcataaacaaaattgttgaagtgcaacaagaccggaagcaagagcgtgaaaaagtggctgaaactcaactagaaatctcaaggttacaactcaaagctgcacaggaacagaaggaggcaaaattgcttgaagtatatagctcactactgcagcaagacactagtcaattatctgatcaaggaaagataaaccgagagaggacattgcagaagatggagctgaaattattcggtgatagtgctgaagactaa

SEQ ID NO: 3775 - DNA, 228 bp, Zea mays
  Peptide Sequence Number=SeqID_45554
atggggacatgggcgtggtggagaggtcgggatgaggaggtaaggtgcgacaggagggaggcatcgccgacggtggtcctgctggcaaggttgggagagggaggcagggcgcggcgggaggcgacagatccggaacgcggacgcggcgggagagaggcaggggttggcgtgggcgagggcgtggcgaaggcacaggctagggtcatggcaatcagtgacagtttgtga

SEQ ID NO: 3776 - DNA, 207 bp, Zea mays
  Peptide Sequence Number=SeqID_45555
atgacctacaaggaatgggagatggtggtacatgtcatagctgcattctgggtgccatcctcgatcatggaaaacaacattctctatcaaattatatctcctcatgatggtgctcaaattttgaaaaatagaggagcattccttaatgcatttggatcaattgttctcaatgcgcctgttggaatcaaatcacttccactgagatga

SEQ ID NO: 3777 - DNA, 111 bp, Zea mays
  Peptide Sequence Number=SeqID_45556
atgaagctgacggtgaagaccctcaagggaacgcacttcgagatccgggtgcagcccaacgacacgggacgcgtcgtgggtgcgagcgctcgtggcccctcagatcaatga

SEQ ID NO: 3778 - DNA, 147 bp, Zea mays
  Peptide Sequence Number=SeqID_45557
atggcactatcttactttactggcatatggtattctggatccattgtagcaggtattttctggctcaaattttacacattgaaggtaagtaacacaagtgatattccatgctctacctatgaccgctcttggggctgttttgtgtag

SEQ ID NO: 3779 - DNA, 3420 bp, Zea mays
  Peptide Sequence Number=SeqID_45558
atgagttccgggtcggcggtgacaggcggtggtgcggaggaggcggcggcggtgccgctggggcagaagctgattgtgcacgtggcggagaacggccacaccttggagttccagtgcggcggcgacacgctcgtcgaggccatccagcactccatccagctccactgcgaaataccccctgccgatcagctcctcctctgcggcaacatctccctcgacggcgccaacgcgctcgccacctacaagcttccgcgggacgaccgtgaggtcttcctctacaacaaggcccggctccttgcggactcccggcccccggcgccggagtccctctacatccctgagccaaatattcctccgccgccccggccgcagggctcaccaccttcggacgcatctgcagaccccgcgctgaaggcgctggtatcctatgaaacaagattcagatatcacttccaggtcgccaatgcggtgtatcaatctagtttggcaaaatttgagctgtgcaggcggcttctgcgggaggggcaggtccaggagcgagcgctggacacagcagggagcaacctcgagcacacattccggaaactctcacagaggtattcagaatttttgcggtgcttcacacaacagcaccgttcacatgttgagatgctggccaatttcgagagagatgtgcagaagctgcgtgctgttaggctgcacccagccctgcaaagtgaggggcggcattgcttgatggaccttctcaaggaaaatgacctgaggaaattggctgacgaatgcttctgctcacataagaagtttgaggttaaggtgtcacagctgaaggcaaacttcttggagctgaagaagagggtggaaggcttattccatgccatgagctcaggtgggtgcaaggatgttgagaagctgataaaggagcaccagggagtcattggtgaccagaagatcatcatgcaagctctaagcaaagatgtggacacctcaaagaagcttgttgatgactgctcaagttgccagctatctgcttctctccgtcctcatgatgcagtctcagcggttggccgtatctacgaagtgcatgaaaaggataacttgcccagtatacgggattttgatcagaggcttacaaaattgcttgagaaatgcaaggacaagaagaatgaaatgaatactttggtccatgtttgcatgcaaagagtaaaatcttctcagattagtatcaaaggcatgatgagtgaactcgttgcattccaagaggtgatgggtcatcaagaagattttgataatctgaaaatagtcagtggcttgggtcatgcatatagagcttgtgtcgccgaggtagccaggaggaaatcgtattttaagctgtatactggattggctggaaaatatgctgaaacgttggcaatcgagtgtcaaaacgagaaaacaagacgagaggattttcataggacatggagcaggtacattccagatgatgtcatgtgttccatgggactctttgattctccaagccagtgtgatgtaaaagttgctccttttgatcttgatcttcttcccattgatgttgatgatgtggaaaagcttgctccccagtctatactgggttcttttttaaaatctgagagatcacagctagcaaagcctttgctaagcaattctaccagtggaaatttgaacaaatctgaacaacattctctgagtgctgatgataagatggatttccaagattttctggggggctatgatactattgacattgcaggaactagtaagttagaagtggaaaatgccaggctaaaagcagaacttgcttctgcaattgcaattctctgcggtgctggatatggatatgagtctattgacgaagggcaaattgatgctgtattgaaaaaagcaagggaaaaaactgctgaggcacttgctgcaaaggatgagtttgcttaccagcttcagtcattgctcactgcaaagcaggaaaaatgcttggcatatgagaagcggatccaggatcttgaggaacgcttaaccaaccagtacatgcaaggtcacatggtgtcgggaagcaaaggcatgtctgattccctgctttctgcatttaaaagtaatgagtgcaacctggatttatctgaaggcaggcaaccccaaatacgtgatgaatcaagtgtggccatggatgaggtctcttcaacatctgaacagccatctaaacaaacagaaggtggcgatgagaatatgactgacatttcgggtgcactgaacttgcagttgatcgattcagcagcatgtactaatctggatgctttcatgacagaactgccacgtgataatgaacacaagattgtaaacatcaataaggaaggacacatgttgacacaacttactatggctgatacttctgatgttcctatagaagatcctcttagcaacttaaactcaagaactgatgatcatcatgccctagagttgagggataaggagctccttgtgtcagagctgcaaaacacgcttgatcaaaaatcaaaacagttgggtgaaactgaaattaaacttagtgccatgatggatgaggttaattctctgaagaaagaacttgaacaaacccggggccttcttgatgaatctcagatgaattgtgcgcaccttgaaaactgtttacatgaagcaagagaagaggcccgaacaaacaaatgttcagctgacagaagggctgttgagtatgatgctctgcggtcgtctgctttgaggatacatggtttgttcgaaaggctaaataactgcatcactgcaccaggtgtgactggctttgcagagtcactgcattctttggctgcctccttggcaagctctgtaaagaaggatgaagctgataccactgttcagtttcaacaatgcatcaagatcctggcggacaaagtttatttactgacacgacagagtgctgagctgctagaacgctattcagctatgcaggcagtacatggaggtatcacaaaagagctggatgagaagaaagagctgattaagaatctctacaataaacttcaacaagaaaaacaggccagcaaagagaagatatcatttggtcggtttgaagtccatgagcttgctgtctttttccgaaaccctgctgggcactatgaggcgatcaaccggaactgctcaaactattatctgtctgaggaatctgttgccttattcacggagcaacactcgcagcacccagtgtacataatcgggcaaatcgttcatattgagcggcgcgtagcgcgtccagaccagatgggaggagctccacgccctgatagcagtggcggccatcggtcgcccgcatccatgctcaacccctacaacctacctgggggctgtgagtacttcgtggtgactgttgccatgctgcctgatgctgccagttaa

SEQ ID NO: 3780 - DNA, 1071 bp, Zea mays
  Peptide Sequence Number=SeqID_45559
atgggcatcaaaacgccagagcaggggcatctaagcagcgctgagcaggggactttatggttccttatttaccagattatggctgtgaagaagaatatagaagagatacaagggaaagacagctatccatggggccaacaactgctgattttcaatggaaaggtcttgaaagatgaaagtacattggaagagaataaagtcaatgaggatgggtttctagttgtcatgcttagtaagggtaaaacatctggttcaactggaacttcatcttcccagcactcaaacactcctgcaacaaggcaggcacctcctctagaggccccacaacaagctcctcaacccccggcacctaacacacatgacaatgcggcatcaaatcttctgtctggaaggaatgttgacacaataattaaccagctaatggagatgggtgggggcagttgggacaaagataaagtccaaagggctctccgtgccgcttacaacaaccccgaacgtgctgttgaatacctctactctggtattccagtaacagctgaaattgctgttccaattggtggtcaaggggcaaacacaactgatcgagctcctactggggaagctggtctctctgggattccaaacaccgctccactagatcttttcccgcagggggcttccaatgctggaggtggtgctggtggtggaccacttgattttcttagaaacaatccacagtttcaagcagttagggaaatggtccatacaaatccacaaattttgcagcctatgctcgttgagttgagcaagcagaatcctcaaattctaaggttgattgaggagaatcatgatgagtttcttcagttactaaatgagccctttgaaggcggagagggggatttcttagaccaacctgaggaggatgaaatgcctcatgccattagtgttacaccagaggagcaggaggccattggacggcttgagtccatggggttcgacagagcacgcgttattgaagcattcttagcctgcgataggaacgaggagctagcagcaaactatctccttgagcatgctggtgaggaagattaa

SEQ ID NO: 3781 - DNA, 714 bp, Zea mays
  Peptide Sequence Number=SeqID_45560
atgtcgccagcacggcagggaaagagacatggacatggtttgatatgttcacaagcaggtgtgccaagccacgacggcagggcgtcgcagtccggcgtgccgcggtggccgcggacggtgttcctggtgggcgccatgtcgtgcctggccatcagcgcgacggcccacctgctggcgtgccactcgcggcgcgccagcgtggtgttctggcagctcgactacgcgggcatctccgtgatgatcgtcgcctccttcgtgccgccggtgtactacgccttcctctgccacccgccggcgcgggcggcctacctgtccgccatcgcggcgctgggcgcgctcgtggtggccgcgctgctctccccgtcctgctcgtccccgcgctaccgccgcctccgcgcggcgctgttcctggccatgggcctgtcgggcgtcgtcccggcgctgcacgcgctgtggctcaactggggccacgccgcctgctacctggcgctcggcctcgaggtcgccatgggtctcgcctacgccacgggcgcctggttctacgtcagccgcgtgccggagaagtggaggcccggtgtgttcgacgtcgtgggccacagccaccagatcttccacgtgctcgtgctcgtcggcgccgtcacgcactacgtcgccgtcgccgtgctcatccactggcgggagaaggtggctgccgcctgtggcgcggcgtcgtag

SEQ ID NO: 3782 - DNA, 684 bp, Zea mays
  Peptide Sequence Number=SeqID_45561
atggataagacagaggagaggcagatccacagatccagtacaccggagtccatagcagaggggggaagcgctagggaatggggatacaagatactgttaccgacgacgtgccgaggatggggcatccaggaagcacggcgtgcgacggccgacgcctcgacgtcgacggaactgggtgcgaggcggcggtcgacggggacgacggggcgaggcggcgagcaccgcgagggaaccgagaagagaccgggcgacggaaccgaggcgagcagccgagcaccgcgagggaagggaaccgatggccggcgaggcgagcaccacgagggaaccgacggggcgatgcggcgactgggcgaggccgcgagggcggagcggacagcggagagaacgagacgagtgcagcgactgggggcgggcgggtgtgcggttagggttagccttagggaagtaggaaataccagccgggcctatcgtgctggccgttttaaacgggccgtgccgggccggcacggcgtgccttggtcgcggcccaagcccggcacgggcgtagtgccgggctcaggcacgccaaatcgtgtcgggcctcgggccggcccgactaacccggcccatctggccatctctaggtgggaggggcggccgatcggggccccaccgcacacaaagtccaataaaaatatagggtag

SEQ ID NO: 3783 - DNA, 2784 bp, Zea mays
  Peptide Sequence Number=SeqID_45562
gtcgaggtcgtggccgtgagggaccaggtgccggcgatggagcataggtatgatcctacctccattaatcatgatttggtgttgatgggtcaaaccctagacaatgtggacgacgtgcatgatggtttggatgatctctttggttccactgcccctacccctaaccctaaccctaaccctaccataaaccttggcgacgacaatgtcgctgccgagggcgatgctctcccagatgctactgcctccactacggcaagcactggtagaaagaggaaatgcacatccgatgtctgggaggacatggataagattttcgccactgaaaatggtgttcagaggacttcaaatgctaaccctggtgaaggtaagagcaaatatgcttgggatttggtgtttggtgcagatggcattggtagcagttcttcaatggcactgggtgctggtctcggtgcctttggtgccagtagcagttctgggatggttcctgaactctcaagaaggacatctgctagtgctttgcttcatgcagcaagcactcctggtatttctggttctgaactagctgcttatctagatagtgacactgttcagaagtttgatgatgaattcaatctcctagattggtggcatgatcacaaacttacttatccagtactttcaatcctagctaaagatatcatttcagttcctgtctctattgtgagttcagaatcaacatttagtcttgcagtcgatgccatcaacggcctgtatgcggccctgggctcgccggacctcgccggcggctggacgggatcgggaggagacccctgccgggaggcgtggcagggggtgcagtgcgacggccccaacttcactgatgtgcctgccatgcgtgtccacctgcctaacagagacctccgaggtgcaggcctgcggggggagctgagccagacgcttggagacctcactgccgtcacagagctggacctgagcggcaaccggatcggcggcgcgctgccgcggagcttaccacctgcgctggcacggctagacgtttcttcgaacagtctcggcggagaactcccggactcgatggcgaagctgagctcgctgtcgacgctgcatctgcagaacaatcagctgactgggacactcgacgtgctccaagatcttcccctgacagacctacaagctgctctcagttcccaagttcctgtaagcctatctgatgagccacgattcacttttaatcacctcttcgaatcttctcgagcagtcgatcgcaaagctgtagttcacttcattgcctgtctgactgacacaaaaacgtggcttcttgtacttgcagaagagacggcaaccacttcaccatcccaactccggcggctcctccaagccgtgtggcaggcaccaccagcggcaccaggagagcctccagtcctttctggctcgcacccacctatatacgtgattccagctgctacacaggacgacgccccgccgagcggacacaggggcagggtgtccccggcgacggccgccgggttcagcgtcctcgccgccggttcgctgggcgccgccgtcgtcgcggtcctcctgttcacggcgtcgaggcggcgcagggagagggaaagggctcttcgtgtaggctgcctgagaggagctgagatgtgcgcgcccagcgcggtgagggaggctcgtctacgagcagctgccaaactggagaaagacacggggcgccattactcagaggagaagatcgagcggactccgagagattgcgtcgaggcagcaggatcatctctcaagcacagcagcaacggaggcatcgtcgtgggcggttcagaagcacagcaggagcagccactgcaactgcgatccgcctctttcacgctcttcaccgtcgcatcactgcagcaacacaccggcggtttcagccgccaggatctggtcagggagacctgcttcggcaagatctatgcagcagatcgtccaacgggaagcaagctttcggtactgaagctcgacagcgacgcggcgaggacgccggtgccagagttcctggaggccgtccgcggcgtcgcggggctccggcaccctaacgtggagcagctcgtgggctgctgcgtggagcacggccagaggctgctcgtctaccgccacttcagcgaccgcgctctggacggcgtgctgcgtctagagcacggggcgtcgacgtctggacctgatgagaatgagacccttcgctgggacgctcgggtcgctgtggcactcgaggccgcgaaggcgctggagtacgtggtccaccggcacttcaggccggagcacgtcctggtcgacggcgagctcagggtgtcggtctccggatgcggccttgctccgctcgtggctgagcggtcggattgctgcggcgtggcgacgagctacgagccgccggaagcgggcggcggcgcggcgtggacgcccaagggcgacgtctacagcttcggcgtcgtgatgctgcagctcctcaccgggcgcaggccgtacgacggcgcgcgggcgcggggcgagaggcgcctggtgccgtgggcgagcgcgcggctgtacgacctcgccgcgctgcggaagatggccgacccgcgcctcggcgcgccgccgcccggtcaggtcgctgtcacgcttcgccgacgtcatcagccggtgcatacagaggcagagttccggcctgccatgtcgcaggtggcgcaggacctgcggcgcacgctggagaacgcgcgcgcggtgacggggacggggagcggcggctctgcacaagtttag

SEQ ID NO: 3784 - DNA, 825 bp, Zea mays
  Peptide Sequence Number=SeqID_45563
atgaaggcatacaagatgaagacagatctaaagatgataagaacgccgaagctattgccagattggcagcttcggctcataactgagatgaagcctagccacggcctcctggtgcttgctgtggtgctccttgtcgtgctagggtgttggaagctggctgctgctgagctgctttcttcaggcaatgagtcgctcagtggccttgttccccatagtggaaatatccatgatctcctccttgcgctggggctgtctagttgctctagttggtggttggggcaggaaggcgaggtgcctagctgctctaccgctgatattggtttcctccctgttggttgtcctagcggtactactgctgttgctgagggaactgcctctagaattactgttgatgctgatgctgatgctggtgcccttgagggtagggaaggtatgattcatcagatggtagtgaagggggtcaaccaaacctctcagaaacccgtactgcctcttggcatcagtgttgacatcctcgaggtcagcatgggtgctgcatcagaaacatctgctcgattgtcattggaggttttggtggcaactgctgcaaaggtgcctcatcctgaggtgcctactgcacttgctgggcacgccttccacctcggcgcatgttgtcagacatctatagaaagcatacacacatcagatctggcactgcagactttcaaccttctactcctccgagagctccatgatgtggctcgaactgccaccgtagtcgtcatctccgtctgggtctcctccagcatcggagatgccctgtggtggtgcaggggacacctctag

SEQ ID NO: 3785 - DNA, 267 bp, Zea mays
  Peptide Sequence Number=SeqID_45564
atgggcgataaaccttcaaagtcgctgctacgggctctgtggtgcgtctcagagcccttccccgtggggggttcccgttctgctaatcttgctatcttccccagacacttgaggaaggtgtcaacggacggcacagctcctcagaggcaacccatcaaatggatctttagcggctctagtctagccaagggaacgggggttcaacagaaggagtttaggccggtgtccgccctcaagagtgccaatcctgagatcttagagttgtag

SEQ ID NO: 3786 - DNA, 282 bp, Zea mays
  Peptide Sequence Number=SeqID_45565
atgcctgtgatctctctcaagctaggtatcggagaagtccgtcatggaattgaagtggtagagtggtgtgacctagtttgcttagtaagtatggaaggacaaaagacgagtacagatgactactattctccggcagaaagtcactcatttcctcttaaaggtcccaaagatatgagtaaaaaactcttccaaatcaaagatttgcctattcttcgtagtacgagaatactcttacttctcattgacacagacgagaaagaatttcgtaaagctatactttag

SEQ ID NO: 3787 - DNA, 1239 bp, Zea mays
  Peptide Sequence Number=SeqID_45566
atgggggtgaaggggggtttacatacaaccggggcaaagtggtttatgattgaatctcagaggcattcttatcatttggtagatccaagtccatggcctatttcgggttcactcggagctttggcaaccaccgtaggaggtgtgatgtacatgcactcatttcaagggggtgcaacacttctcagtttgggcctaatatttctcctttataccatgttcgtatggtggcgggatgttctacgtgaatccacgttggaagggcatcatacaaaagctgtacaattaggacctcgatatggttctattctcttcatagtctcggaggttatgttcctttttgcttttttttgggcttcttctcattcttctttggcacctacggtagagatcggaggtatttggcccccaaaagggattggggttttagatccttgggaaatccctcttcttaatacccctattctcccttcatccggagctgccgtaacttgggctcatcatgctatactcgcggggaaggaaaaacgagcagtttacgctttagtagcaaccgttttactggctctagtatccactggctttcaaggaatggaatattaccaagcaccctccactatttcggatagtatttatggttctacctttttcttagcaactggctttcatggttttcatgtgattataggtactcttttcttgatcgtatgtggtattcgccaatatcttggtcatctgaccaagaagcatcacgttggctttgaagcagctgcatggtactggcattttgtagacgtggttcggttattcccatttgtctctatttattggtggggagtttggcagacgcatcgattgttcgtggctggtcacacggctccggtgcatcgggccactctcaattgtgtggttccgaaaaaactagggctcttctcgtatgagcaggcttatcaaccactcagaatagggagcttccagcgggaagtccagctttgggacgttgcccctccctcggatgaaaatagatctcgtggagacgggcttgacaaaagtcagttagcaagcgggtgttccataaaaaaaaataaactaggattctcggatgattcaagctttttcaagagtgaacaaaacgtatggatcgcttcctgcttcctttctttggagagaatgggctacgacacctacaagagcatatgctcgggcatccatccaattatggaatattcaggccagcagtaa

SEQ ID NO: 3788 - DNA, 450 bp, Zea mays
  Peptide Sequence Number=SeqID_45567
atgtttttctgggattatgttggtgatcttgaagggttgtgggagtatgcatgggggcagtctgttggtgacaacctgttgaactctgtttatgctatgggtaagtgtgtgcaagactttatggcggatgagaagattcacaagcctacgctgcttgggccgcattttgctttgctggtttggctgtatgagcatactcaagtgaggaagactgtcttctcggggaagacaggctttcgaggacaaaaggaaagatacatgaaaaaatcccaacttaaagtagtggaattgccaagcctatcgggatacgagccaatccctagcctagaagcgaggagagagggtatttcaaattcacaaagccaaactgacaagcgagagccggtgagtaaggtggaggcagaaaggaagttgtatgaatctctttttcccggaaaagtatacttgtga

SEQ ID NO: 3789 - DNA, 270 bp, Zea mays
  Peptide Sequence Number=SeqID_45568
atgagggatttcgctgtattgttcgatatcttctatacccccgacggagtttacatgataaacggggtcagcgcatctgttttgggtacagagggccataggttcgaatcctgtcaccttgatgtgtatctggaaaggaccaggagcccagaggaacttctcaaattaactaataaaatctatgaagggaagcaatccgtactttcagagcttaggcgtttagctggccctttccatggccaaatcaatcctgttccaggatatggatag

SEQ ID NO: 3790 - DNA, 423 bp, Zea mays
  Peptide Sequence Number=SeqID_45569
atgcagacaaccatgaccacagccaccactgctgcctccggcaccggctcggccctccccgtcgactctgagctcggcttccctttgcctagcgcggacgccgccactgtcgcagccagcgcgcgtgctgctggccttgtcccctctgggcttggcctaccgggctacccgacgtgcaccggtgcccgtaccggtcttctctcaccgacccgcctcctcaggaaaccgccccctgggttctccaccacctgttcgctcgttgtcgatgccacctgggattccccgatgccctccaccaactccgtgctggcatctgccattgccaccatccaggctgcactggccgcctcgcaggagcgcgagctcgccgcattccacgctctagagcaagagcatgccttgggtgcaactctgactgcctag

SEQ ID NO: 3791 - DNA, 384 bp, Zea mays
  Peptide Sequence Number=SeqID_45570
atggctttgttcagccaagtctgctcagtctgggagcaccggactgtccggtggtgcaccagacagtgtccggtgcgccatgctggctcgagcgaactggccgctctcgggaattcactggcgacgtacggctataattcaccggactgtccgcatgatatgaagattgccatcgataggaaggctcatcacctgctgttcgcggaggcgagaaaggatgtggtcgacttcttctccctactcgtcctgctcgtcggcgcgaccgtcaaactgctggggaataagggcatggccggcagcaccgacaacctctatgatagtgtggagggcctcgaatacgcccacatccagaccattgtcgtgcatcgaggaagatggacttga

SEQ ID NO: 3792 - DNA, 1581 bp, Zea mays
  Peptide Sequence Number=SeqID_45571
atggacgccttcttcggcaagggcggcggcggcggcggcttccgcggcgccaagtgcaagacgctgctgaagctgtcgatcccgcggataaagctgctgcggaaccggcgggagctgcagctgcgccagatgcgccgggacatcgccaagcttctcgaggccggccaggaggccaccgcgcggatcagggtggagcacatcatccgggaggagaacatgatggccgcgcaggagatcctcgagctcttctgcgagctcatcgctgtgcgcctgcccatcatcgagacccaaagggagtgtcctattgatctcaaagaagcaatatcaagtatctgtttcgctgctccaagatgtgcagatctacctgaactgatacaagttcaaatgatgtttgcaactaaatatgggaaggaatttgtcgctgcagcttcagagttgatgcctgattgcggggtcaatcgtcaggttgttttggatgtttgtaacacatcagaattaatgcttctgcagataattgaactactttctattcgtcctcctcctgtccatgcaaagttgaaactgctgaaggagatagctgaggaacatgaagttgactgggatccatcagagacagagatagaatttctcaaacctcatgaagatctattgaatggcccgacctacttcaacggctccacactacctcttcccaaggagaaacacgaggaaacagtagcggcaagtgctgccgagcggcctgacaaagactgcgagtcagataccggtcttgactcactggattttcctgaagtcccaaaagcagcaatacgtccaccttctaacacaccattgaccccagatattggtccccatgctccgggctctcagccgcttcctcgtgagttctcagaccgtactaacttggaggagaatccaacagctggcggcgcttttaatgttattcagatgaaaagcctggaacatcttatctctgcaccatctgctcagccaaacacaccagatttgccagatgaaaagaagcaatttattccttttgcatctccaccgccagttgttgctactccattggaaaaaactgagacagttccctcaccttcaatgtctcctccagtgaagccaacagagccaaaaatctccacaaagcgggttgatgaattggccacacctccagtacctcccactgattatacgttcacaaaacaaccagaacaagtacggccaatctcttccgagagtgaggcaagtatcgacttggacgatgtactatctgctgctcagacagctgctgaatcagcggagcgagctgcgtccgcagcccgcgccgctgcgaaccttgtgcagctacgcattgcagacctaaagaagaattcaagggtctataacaagtacaccgacagtgctcaaaaggaaagccctcatcaggccgagggtacacagaaaccagtatttgatcaccaggactccttcaccaacgagacacaggactatgtgccgtctcatgtgccgcagaggtcgccgtctctggaggacgatccgtatttctcctaccccaacttgttctcggcgccaaaaccttga

SEQ ID NO: 3793 - DNA, 603 bp, Zea mays
  Peptide Sequence Number=SeqID_45572
atgtctaaagattgtatgttgttctgggagctctacagtaataatatcagcggaattatacctagtggatttggaaaccttacaaacttggtcagtttggatttgtacctgaacaacttcactggtccaataccagattcattggggaagctattgaagctgcggttcttttactttgttaataaaaggcgtcttaacaacaacagcctttctggttcaattccaaaatcattaactgctatcactgcactccaagttctggatctgtcaaataacaatttgtctggagaagttccatcaactggttccttttctttattcacccctatcagttttgcgaacaaccctaacttatgtggtcctggcaccacaaaaccttgtcctggtgctcctcccttttctccacctccatacaaccctacaccccctgtgcaatcaccaggaagtagctcttctagtactggagcaattgctggtggagtggctgctggcacagccttgctatttgctgttcctgcaattagttttgcctattggcagcgcaggaaaccacaagaacatttctttgaagtacctggtaggtattcaacagcaggagaataa

SEQ ID NO: 3794 - DNA, 336 bp, Zea mays
  Peptide Sequence Number=SeqID_45573
atggcacgaggccgtcagggatcgggtgccgactggccgccgcgcacaatggagaaaaaggatgggccaagggtgtcgcggtgggtgagggatcgagcacacaggggcttcggccatgggagcatgcctgtgggggctgagtcaccagggttgcgaccaggggcgctcgcgcgcaagtgcccgggccagggggttggacggagccatgctgcgggctggccacgtggggcatgggcgctgcgcggtggtgtgagccatgggcaatcgccgaggccatgctcgaccagggtgcagggagggtggctcgccggcgcatggccgaaggatgcacagtaa

SEQ ID NO: 3795 - DNA, 411 bp, Zea mays
  Peptide Sequence Number=SeqID_45574
atggttatcctgaaggtgggacaccacctttatgatgtccaccacctatttgggacaaaacagcaacgaagcctagtgcctactcgtgatgagcaatacattgggattggctctgcgaggtggacgacgcgacgttccgtgacgggttgcggggtcgcctggtggtgctcgctgcgacggtgcggactgtccgtggctttgagccagacggtccgcgaccttgctgcaggagtgggtcttctctacgtgctgcccaggcagtccacgctctgggccagacggtctacgatggcgcagggtcgtcttctcgtaggacctagatcccacccctgggggagagaccttagggtgctttgggtcatatggtcacctgaggtgtccctagacgacgtagagtcacctaggaattaa

SEQ ID NO: 3796 - DNA, 228 bp, Zea mays
  Peptide Sequence Number=SeqID_45575
atgaccgcccctcgcgccgccatcacccacatccctcccaccgcgcccgcctcctaccaggcccaacacaagaagggatcgccgcctgcatcaccacgccaccgacaaggcaccatctacctcgcctactgctcgtgcgtgccggacttcttcgtcgcttctgtctccatccgtggcctcaccgtcaccaccctagcccgtccctcctcccgctccctccccctgtag

SEQ ID NO: 3797 - DNA, 627 bp, Zea mays
  Peptide Sequence Number=SeqID_45576
atggtgcacgacggtggtgaattgatcctgtactcgaccccgagcaggagaatggaagaggggaggaaaggggcacgcctgaaagctttatggcccgtgaaggatggtttaactggtgacggcgttgacgggaacgtggcagaggtggtgtctgtttggtccaactaccacatggatggatgggcccacacacttggggaaacgagcactcatgtgcacgacaagacagcgccaacaataacatatcagatgcaaccggaccaattcctattggtgcaaccgtacaaccatatcagtgcaactggacctattaatgcaaacatgcaaccaagtcacaagcatgaaggcatgagtcctcaggccgctggtagggcacaacacaaggagttgtgtcgagccctaggctacaaaggccaagggtcgcatagtccaaatgatgactctcgggcccacgctgcatgcaccgtttgtaataaagaatacgtgacaaccagacgatcgcaagcatgcgtgactttaccccatggtagaacgtccggttttaccttcacccgatggctccttcctaaggaagctaccgctggccgaaggaagaggttggccccaaagacacggggaggtctctag

SEQ ID NO: 3798 - DNA, 351 bp, Zea mays
  Peptide Sequence Number=SeqID_45577
atgaccattggtgagggactgcagccgggctgcatgatgaaaatccttgaagccgagcgatgtctgaagaatgccaacccccacgaggtcgcgctcctccaacaacagcaagaagaaggcaacacgggaccgagaaaggggatatttcgaaaaagatccttctcggcgaaggaaatgggctccgagcccatcactgatcaggggtttgaaggctggcccctcgaaagggttcgacagccgccccagagcactcgggctccgagcccattactgatcaggggttcgaaggctggcccctcggaagggttcgacagccgccctagagcactcgggctccgtgccctttactga

SEQ ID NO: 3799 - DNA, 519 bp, Zea mays
  Peptide Sequence Number=SeqID_45578
atggaccacttgaaaatgctaaagcttcctgtctcagtcccacatgcatcagactactctgccgtcaacatcttcgtccttgtcgatccatcgctgcacgtcttcctccatgcctcagtagtgtccagacatgggcgcggtgctcctctgtacgtctggctccagggtgtcaagctggcaagcgagcacatgacggtgtgtgggcgtgcagcggcgcaggcgaaaccggcaaaccttggaagatgcaacctttctttcattgtcgattttgttagccttctgtttgtttatgctacatacaccgaacatgtttatcctgcaactcccttgcgagggctatgcagcttgttggtggatatcagagaggccagagaaagcttcacatcgcttctagacgagtggcagaatgagcagcagagcctatctcagatggtcatactggactactgctgtctgcaaaagttcaagtatcacatattaggaattaataatctggaatatttgctcaacaacatttga

SEQ ID NO: 3800 - DNA, 1230 bp, Zea mays
  Peptide Sequence Number=SeqID_45579
atggcccctaaattagtctttgttcttcctgttgtgctcctcgccttggcgctgcaggcgatcctccggccaccgccgccaaagctctgtggctccccaggtggccctcctctgacatctcccaggatcaagctcagggacggaaggtaccttgcgtacaaagaggatggagtacagagagacaaggccaggtacaagatcatcacagtgcacgcatttgatagcaccaaggacttcccctcgcctgtttctaaggagctcgtggaaggactgggaatttacctccttgcttatgacagagctggatatggggaaagtgaccccaatcccaaccggcatgtcaagagcgaggcgctagatatcgaggagcttgccgaccagctgggccttggccacaagttctatgtgctaggggcctcaatgggaggatactcggtttggggatgcctccagcttgcaggagctgcgctggttgtgccaattatcaactactggtggccttcgttcccagctgaattatccaagcaggccttcaacagactgattgtgccagagcagagaactctttggattgcacacaacataccttccttgctttacctgtggatgacccagaggtggttcccttcttctgcagcagccatgcaccaccctgaaatatttagcaagcatgacatggaggttcttcagaagatgatggcaatgccaagaaccattgagaacaaatcaaggcagcaaggcatttatgaatcgatccaccgtgatttacttgtcgcttttggaacttgggagttcgatccaatgaatgtcaccaatccatttcctcaaaatgagggctctgtgcacatctggcaaggacgcgaagataggttggtgcttgttgagctgcagaggtacattgccaagaagcttccgtggatcaagtatcatgaagtcccagaaggtggacacatgttcgtgatgttgatatccagaggcccgcggcgacatgtcgcagtaagggctttacgctcaactgatgaccaattcggtaggggcagaagattgcagaaggcgcttgaacgttggaacttaggaaagtcggcatcagcgccagtgaaagtgcggcggtacctgagtatccggatacaattgagggatgagctctgcaatgctgaccactggctgatgaaaacgcctgaaatatatgaatcgccatcagtggcgaccagcagagctagctatgagtaa

SEQ ID NO: 3801 - DNA, 633 bp, Zea mays
  Peptide Sequence Number=SeqID_45580
atgactgagagacagatttggtgcctggctggggcttctgccctgcatgacttggtccttaagctggaccactttggttcgtttttggaagtcagtgtagaagtcgtagccggtaatgggatcgagcaagcaacacaagggatgcggtcatccaagttctgcgtcaacattgcagagttggtcagagaagttaagtctgcagatgacaatcaaggtgttttgaggcaagaaaattttagccacactgtcatagaaggttatgacaatcaaggtgttttgaggcaagaaaattttagccacactgccatagaaggttcaagtggtggcccttcagctgtcgcttgcggtgttagcactggacagcagcacaacagaatgaatcctgatccagcatccaccggcatggataatttcaaaacaccaaaacttacaaaagaaaatggtctccaggaggatgggataggagagagtagtatgtatgacgaaaggcaacctaagagaaggaagcgtacccttatgaataatgagcaaatagatgaattagagaaggctctagtagatgagcctgagatgcacaacaaccctgttctattgcagagttggtcagagaagttaagtctgcagaacacctag

SEQ ID NO: 3802 - DNA, 411 bp, Zea mays
  Peptide Sequence Number=SeqID_45581
atgacggaagatgaagttatactgaatacgaccgtgaacctcaccctgccactggcaagctccgccttgctggatcgagggcaatcgacccccagtgcacgggatccaaacgctccaccaggagcgaggtggagagatgatatcacgaaagggaacccgctgccctcgagcgatgctcccgtcgacccacaggcaacaccgagcaacaaacaggagagacaccaccatcatttggaaatatggtcgaagcaagccgccggtgggcgcctggcaacgagcgtagacatgaaggccaggaaatgtgtgtggcacaacccactaaccctcgacacctccagtggtcagacttatcgatcgccttcgaccagtgcaaccactagagcatggtcccgcaccctgagacctacctga

SEQ ID NO: 3803 - DNA, 507 bp, Zea mays
  Peptide Sequence Number=SeqID_45582
atggcgttcatgcggtactaccgtgcgctgccgcagggggagacgacggtggaggagttcagggcgtggctgagccagttcgacgcggacggcgacggcaggatcagccgggaggagctggagcgggcgctgcgcagcctcaacctgtggttcgtgtggtggaaggcgcgggaggcggtgcgcgcggccgacgccaaccgcaacggcgcggtggacggcgacgagatgggccggctgtacgccttcgcgcacaagcacctccacctcaagatgagccagctgggcctgggctacaccagcaacatatacttttatgaatctggacactgtaaagttttgacaaatggacgtgtggacatattatgctgctcatcatgggaaaacaatttggttacaaatggtcctctgatgcactcattagctgatagggtagagaatgcactcaaattatatgcaaaggtttctgtgaggatcttccaagttgcaataatacaacggttttcttag

SEQ ID NO: 3804 - DNA, 984 bp, Zea mays
  Peptide Sequence Number=SeqID_45583
atgtatccgtcagcccctccggacgcgtataacaagttcagcgccggggctccgccaacggcgccgccgccgccggcagcgtaccagcagcagcagcacggggcgaacatggacacttcacgccccggcggcgggctgaggaaatggtccaccggcctcttccactgcatggacgacccggggaactgtctcatcacatgcctgtgcccctgtgtcacgttcgggcaggtcgctgacatcgtggacaagggcacctgcccatgtatcgcgagcggactggtgtacgggctcatctgcgcgtcgacggggatggggtgcctgtactcgtgcctctaccggtccaagctgagggccgagtacgacctggacgaaggggagtgcccggacatcctggtgcactgctgctgcgagcacctggctctgtgccaggagtaccgcgagctcaagaaccgcggcttcgacctggggatcggctgggaggctaacatggaccggcagagacgaggagttgccggcggcggcgcggtgatgggggcgccgccggccataccgctgggcatgattaggacgctgggtgtgaatagcactgttttggatgggtttgtgattggtctagatgacttatataagtctggactggaccacttgattagcatatgcaacaacacaccagcaccagaagaagcaatgcgatgcgacggtggattggagtgtattgggtcagatagattggaggtgagcacttacctgactgaagctccaggttttgtggtgtggccggcgaatggcgatcacagagaaggtttcagagattggtccggcaggcaggcagtcatcataccaaaaggacgtgactttatcccaggagaccagacaacgcgcaccagtggtgttatcacgaccattccagaggaaagcacggcggcgggagtcaacctttctgacgatgccacaggggggatgagcaatgctgacatgacgtaa

SEQ ID NO: 3805 - DNA, 1788 bp, Zea mays
  Peptide Sequence Number=SeqID_45584
atggacgtgaagcggtcgcggagccctcgggctccgcccgacgacgacaggaagcgtgccggcggcggcggcgggtggcgcggctccggcggcgtccgcccggagatggtgctcgtcggcttcctcctcacgctacccctcctcttcctcgtcttcggcggccgctggggcagcggctccttcccttcgtcgtcgtcgtcgtccgctacctcctctccgcccgtcgtccccaagcctaccgcccgccgcgtggacggcggcggcggcgaccgcggcgcgacgcctcgtcagggccaaaaacctgttggtctgaacaacgtctctgtatcgacggcaacatcagtgtcccaggataagcttctaggcggattgctgtccgcggcattcgacgaatcctcctgccagagccgctacaaatcgaacctgtaccggaagccatccccgttcccgctgtccccctacctggtgcagaagctgaggaagtacgaggcgaggcacaagaagtgcggcccgaggacgaagcggtaccggcgggccgtcaagcttctcaaggccgggcgcaacacggacgactcggagtgcaagtacgtggtgtggttcccctgcaacggcctcggcaaccgcatgctcaccatcgcctccaccttcctctacgcgctgctcaccgaccgggtgctcctcgtgcacgtcccggcggagcaggagggcctcttctgcgagccgttcccggtcagctcgtgggtgctcccgggcagcttcccgcagaacaatccccacaagctccacatcggcgcgccggagagctacgcgaacatgctcaagaacaacatcgtccgcaacgacgacggccccggcgcgccggcgtcgtcgtcgctgcctccgtacgtctacctccacctggagcagttccagctgaagctgtccgacaacgtcttctgcgacgaggaccaggtcacgctcagcaagttcaactggatgctgctcaagtccgacagctacttcgccccggcgctgttcctgacgcccatgttcgaggccgagctggccaagatgttcccgcggagggaggccgtgttccaccacctgggacggtacctcttccacccgaccaaccgagtctgggggatcgtcaggaggtactacgaggcgtaccttgccagggtcgacgagaagatcgggttccagatccggatcttcccggagaagccgatcaagttcgagaacatgtacgagcagctgatgcggtgcgtcagggagcagcggctgctgccggagctcggccccgccgagccgccgacgaacgcgacggccgacgctggcgacgggaaggtgaaggcggtgctgatcgcgtcgctctactcggggtactacgagaagatccgcggcatgtactacgagagccccaccaagagtggggagatcgtggcggtgttccagcccagccacgaggagcagcagcagtacacgtccaacgaccacaaccagaaggcgctggccgagatctacctgctcagctactgcgacaagatcacgatgagcgcctggtccaccttcggctacgtcgcgtacagcttcgccggcgtgaagccgtggatcctgatccggccggactggaacagggagacctccgacgtcgcgtgcgtccggtccacgtccgtggagccgtgcctgcactcgccgccgatcctcgggtgcagggccaagacggacgtcgacgtcgccgctgtcaagccgtacgtccggcactgcgaggacgtcggcttcggcctcaagttgttcgatagctaa

SEQ ID NO: 3806 - DNA, 756 bp, Zea mays
  Peptide Sequence Number=SeqID_45585
atggacaaggcgtggcagcgcaatcttcatcttatcggcggcggcggcggcggcggggagaagaaggcgtgtcctgccgcggcgcccgcgctggggctgcagaagcataagtcgtggtcaccggacatcgagcgcgacgaggtgtgggagcgccggcgccgggacatgcgccgcggaggcacggcgctgcggcgcgcgcggagcgtcacggacgacgacctcgccgagctccgcgggtgcatcgacctggggttcggcttcgagcccgcggagtcggtgtgcgcggcgtgcggctgcgccgtgaggaaccgcctcctggacacgctgcccgcgctcgacctctactacgccgtccacggcgggggcggggcatgcgaagcggaagggccgaagtgctcgtgcggcgccgcgtcggaggcgtcctctgacgagtcgccgctcggcagccccatgtccatactatctccaggcgacccgccggagacggtgaagatgcggctgaagcagtgggcgcagagcaacctcgggccagcgctaatggactggaggaggagcgacggttcctctgcagtccgtacccgaggcgtacggcgtctttcagccagtgatgtctgcgccgtaccgggatgcagtgcagcagggagcaggcgtcttgaggaccgggaccggttccatgagcaccgtcagatgccttccgttccgtccatggttcttccatgcgccacacggggcccactggatggccaaccgttctga

SEQ ID NO: 3807 - DNA, 234 bp, Zea mays
  Peptide Sequence Number=SeqID_45586
atggcaccgtgccttggcttggggggctccagcggccacacgtttggagcccaggccatacgccgcgaccggcctttgtcctttgatgcgcgtgcaagggcgggcgacgtgtcctgtgcggccgtgcacatccatcgtcatgtgccagacagcggggcgcgcggccgcctcttggacaacgccaaccttccccgcccgggggcgcgtctcggccacgagccctggaggaggtaa

SEQ ID NO: 3808 - DNA, 1446 bp, Zea mays
  Peptide Sequence Number=SeqID_45587
atggccgcgccggcggtcgcccgccctcgcctcgcccccgtggctcaccccgcctcgacctcttgcctgctggccctctgggaccggaggcgcgggcacggccgcgcggttgcggcggtgagggcgcgcgagcaaggcgcggcgccgcccgacccggcggccttcctgcgccggccggaggtagcgacggtgacgtcgacggaggaggagagggaggccgatgcggggtcctcgtttgatggccccggggaggacgaggcgcccgaggaggaaggggtccgggggaggaggaaggcgccggagagggagtgggtggattgggaggaccttatcctcgaggacaccgtgccgctcgttggcttcgtacggatgatcctccactccggcaagtatgaaagtggcgatcggctgtgtcctgaacatgagaaggcgattctggaacgtttgcttccataccatccacaatataatgagaaaattgggtgtggtattgactacatcacgaccccgcactatcccgtccccgtgcccggtgcccccctgttcccatccgctgcaacggcaagcacgcagattcgcagacacgatggatctcccgaccccgtctgtcgccgtccctgggatgctcagacctgttatcccggccgccggcaaggatgcgacgtgaagccactccagtcctctccctactcccgctgctcccctcctatcgtcgctctggagacagatctgctcgccgtccccggtcctccttgttgccatcccttacctcctccagggctcgtggccgagacgcgcccccgggcggggaaggttggcgttgtccaagaggcggccgcgcgccccgctgtctggcacatgacgatggatgtgcacggccgcacaggacacgtcgcccgcccttgcacgcgcatcaaaggacaaaggccggtcgcggcgtatggcctgggctccaaacgtgtggccgctggagccccccaagccaaggcacggtgccatctcggccgttgctgcctgctcggtaagccctggctcaatgtcatgcaacaggagctatcagagagaagccagtgcacggcacgcctcgcgccggacccggtcccgtgcgcgggcgtctcgccgacgagcgacaccgacaccgaccctttgggcggctcatggggcgccttgcattgccggtgtatctatcacgggttcatgtacgtggcctcggtgtccccacatgcttgccgcctgcgcctggccaaactttccggctcttcttggctctgcttcagcaataagcaagcagcggccgaaactggggcagctcttttccgcccctgtctcccccctggtaacggttttggtggtctccgggtccacttggatagatgtgaacgtgtcagtatgtactctccagaaaatcgagcttccattgctttagagaggcagatgcatatataa

SEQ ID NO: 3809 - DNA, 657 bp, Zea mays
  Peptide Sequence Number=SeqID_45588
atggcgtgcatcaacatgtacaacccagacggcgcggcggggttcggcggcggcccgcagcagccggccgcgctgggcccgcgcatctccttctccagcgacttcgccgtggagccgacgccggtgcagaaccgggcgacgagcctgcggtgccaggaggaggacctcaacttcgagttctccgtgggcagccaccccatgatggccgccgaccagctcttctccaagggcaggatccttcccctcaaggacaacggcggcggcagtgtctgcttcgctgccgcgcggccgcccaccacgctgcgcgacgagctccgtggcggcggcgacgacgacgacgagagggcggccttctccgccgccggcaccaaggggtccaactccaaccggtggaaggagatgctcggcctgcggaaggcgctctgcgtcggcgtcggcggcggcggcaacggcagtccggccaagaaggctagcagcagcgacaagcagggcgtcgttgccgccgctgcccccggccccgacgaccacatggccgcgtccaatcaggttggcatctcgtgccccgcgcgcatctgcatgcgtccacatgatctggtcgacaccttgcctcatcaaacatttgtttttcttaccacacagcaggagcagctatcatga

SEQ ID NO: 3810 - DNA, 279 bp, Zea mays
  Peptide Sequence Number=SeqID_45589
atgcgcaagcgcaagaacgagcggagcgaatattttccatatcgggatggactaggaagtggccagaaaaaccgcgagaccatgggcagaaaggcagcagagatggtgatccgcctcggcaagagcgagagcgagataggggccggccgggactgcttgggtccccccgtcgtcgtcgtcctaaccttctttccacggcacgccatagaagcctccactgcagtttgcctgtcctgggatacagtgaccgttgcatggatggatcatgctgcacagtag

SEQ ID NO: 3811 - DNA, 1077 bp, Zea mays
  Peptide Sequence Number=SeqID_45590
gggctgtctggtaaaaataattacgcgtgccgtgtgccaggcgtcgaagcttcccccgctacattccgtttgtgggctgcacctgcactgcacgccgttcccacccccgtgtgccaggcgccgaggccgagcgtaccggccgcgaatccaaagcgcaagcggctgcagcctgcaggcagcgccgcgcaggcgtgggagtggccgagtgggagtgggagtgaaaaagaggaaccggccaagagaagcaagcgagaagaaggcagtgctgcggcggcgttccgtaagatggggaagtacatgcgcaagcgcaggggggccgcgggcgagggggtggccgcagtcgaggtctcgcaggtcgtcggcgtccggacgaggtccaggtccgcggcggcgaccggcggcggtgtcgcgaaggtcgctccgccgaggaggaagaaggcgctgctgcccgccgcgaacgtgacgacgtcgggggagcctggtgccgtgggcgctggtggtggggacggcggaagctgctgctacatccacctgcggagccgcatgctgttcatggcagcacctcagcagcaaccgtcggcggctctgacgccggtggaggctgctggtgcggcacagcagggcggggtggtggcgctcgcggctggcctctcgcgttgctccagcacggcgtcgtcggtggacgtcgggggccacgcctgccgctccgacgctgcgcctgcggaggttgacggggatcacgtcccggatgtcgtcaccgcgagcaactcggggagcgtcccggaccgcgagaggagagagacgacgccatcgtcgagccgggcgcacggcggcgagctcagcgatctggagtcggatctggtggggcggcagaagactggctgctcgtcgtcgccggcgacaacaacatcggctgcggagctgatcgtgccgccagcacaggagatccaggaattcttcgcggccgccgaggcggcccatgccaaacgctttgcttccaagtacaacttcgacttcgtccgcggcgtgcccctcgacgccggccggttcgagtggacgccaggggtcagcatctga

SEQ ID NO: 3812 - DNA, 189 bp, Zea mays
  Peptide Sequence Number=SeqID_45591
atggaggattgtaatgaagatcaaccacaaaaaatttcacattctgtgcatgagcgtatgaccaagaatcgcgagctcgttgaggttaaacgtgatgagcagcacaaggagatacttgcacgcagggagcgtgagcttgatttgaaggaacaagagataggagttcaagatcatggctgtgtacattga

SEQ ID NO: 3813 - DNA, 1722 bp, Zea mays
  Peptide Sequence Number=SeqID_45592
atgcagcaacgcaaggccaaggttgtctggggtggcgccgagagcgcggcggcgcaggagatcccggcgtcgtcgcagctggcgatggcacacaacagcagctggcctgagggcgaaggggctccggagcactcaccagtgccgcggaagaagaggctttccctggacgagaagcgatggaacacggtggtcaacgtcatgcttgtcgccttcgtcatggccgtgccgccggtcgtcgtcgttttcgctgggggcggcattgcgcccgcggtctggatcgcggccgccaaggcccagctacgccgaggttccggcgatggcccaccagacagacttctcggcggcctcctggccgatggactcgatgagagaacgtgccgcagcaggtacgagtcctccctgtacagccggaggccggcacggcgaccttcaccgcacctcatagcaaagctgcggagacacgaagagctccagagacggtgcgggccgaacaccgacgcgtacagccgcgccgtccagcagctgagggccggcaaaagcgtgggctcgcccgagtgcaagtacgtcgtctccatctcgtaccgtggcctcggcaaccgcatcctggccgccgcgtcggcgttcctctacgcggtgctcaccgaccgcgtcctcctcgtggaccccagcaacgacatgggcgagctcttctgtgagcctttccccggcacgacgtggctgctgccgcgggagttccccctcgcgagctacactaacttcagcatcgacaccgccgagagctacggcaacatgctgaagaacagggtgctcagggccgacgtgccgccgccgccgacggagacgcagttgccggcgttcgtgtacctccacctcgaccacgactacggcgacgaggacaagatgttcttctgcgacgacgaccagcggctgctgtcgagcgtgcagtggctggtcatgaggaccgacatgtacaccgtgccggggctgttcctggtcgcggcgttccaggaggagctcgacgtgctgttcccggagcgcgacgccgtgtttccaccacctggcgcggtacctgttccatccgaccaaccgcgtctggggcctcgtcacgcggtgcgcaacttcgatccctgggcgcagcagtcgccggtcgttctccggcagatcacgtcgtgcctgtggagggagaaactgctcccggaggttcttgacacggaagagcacgccgtgccggcgccgggcggcgccagaaccacggccgttctggtcacctctctccggtcgtggtactacgagcgcatcaaggggctgtactgggatcaagcgacggcgaccggcgaggacgtgagcgtgcaccagcccagccacgaggggcagcagcagtacggcaagaagtcgcacgacgaccgggcctgggcggagatgtacctgctgagcctgtgcgacgtgctggtgaccagcggctggtccacgttcgggtacgtggcgcaggggctcggcggcatgacgccgtgggtgttgcacaagcccacgaatgccacgtcgccgccggacccgccgtgcttccgggatgtgtccatggagccgtgcttccatgcgccgcacgtctacgactgcaagctcaagcgtggagccgacacagggaaaatgctgccgcacgtcaggaactgcgaggatgtgagctggggactgaaacttgtcgatacaaagttgtacagatcttga

SEQ ID NO: 3814 - DNA, 141 bp, Zea mays
  Peptide Sequence Number=SeqID_45593
atgggcaagtgttactccggcctccgtgtatcagtgaccagcaaccttcccctatggtttgaagcagcgaaagatatagagaatgctgatgaagagaagctggaagaaattcaagaatgggaggtcggcaatgctagttga

SEQ ID NO: 3815 - DNA, 450 bp, Zea mays
  Peptide Sequence Number=SeqID_45594
atgaccaaccgaacaccccgaagctacacgccgagaccaaatggtggcgtaggcgcgattcctccgtcggccatgcgggacctacttctaccgagcgctgcactaatagggttccggcggcgagagcgtttaatagggaatggggtcaccggtgcattgcgacctttcttacaaagtgggtgttacaccactcgcgccttagaagaagaacacgagatcgctgacctccgctccaaaatcagccgtcttcgaggcgacacgtcatccttgtgcgtggagtgcgacggggctcgtgacgacgtggatcaccttcaggatgagggttcccagcttggagaggcactccgtggagtgaagtctcatgctgagctcaccaagtcatcctcacaggtggaggctcgtctagtgcaagtggactcggagcacgtgagggagcgcaacgcaacctga

SEQ ID NO: 3816 - DNA, 336 bp, Zea mays
  Peptide Sequence Number=SeqID_45595
atggcgagagtagcgtgtaccctccgtggcaagaggctggacgatggtgtatctatgctctcggttggttttgcccttaaacctggtgtgacagtcagctataattcatcggaccgtccacacgaagcgccggacagtctagagattccgatgcacccatggacagaaggcaacttgggccttccaactggagctccaacgactcctaggtcccttagggctataaaaggaacccctaggcgcatggcgctttacaccaagcatcctctaaacatcaccgagacactacgaccacacttttgctttgatagattgagattcaagcacgtgttttga

SEQ ID NO: 3817 - DNA, 405 bp, Zea mays
  Peptide Sequence Number=SeqID_45596
atggggatggaccagcaggtttggggagaggacctagcaacggcagggcagaaggagagtgaaaggatggagagcattttcatacgtgtattccttggaataggttatctccatactggactagcattcacgatgacaagccagggtaagaatgctcatctgtgtcgtgtgtcggttgagatgatgctgaaggagattgcacccgaggagctggagaaggagacgtatgttgcagcgtctgtagctgatgaggccatatgtctaagattgcctgatatgtccaagatcatgaagttggctattgtttcagaaaatacaattgaatggagttgccaattcaacatgaagccaatagagaatccaagcatgaagacagaaaatgaaagcaaggtgcaacactcatga

SEQ ID NO: 3818 - DNA, 369 bp, Zea mays
  Peptide Sequence Number=SeqID_45597
atggctcttcgtcggcaacatgaggtcaccggggaggctggtgagtcctcgatggtgactggctccgtggtagcagtggtggcctccaatttgggtggcatcagtgcgcgtccaggaagccactcacgctcggcggcagtgatggcatgggagtgggtgtgtgacttggaggagaggcatactaggagaggaggcgacgtcagccagttctacagcgacctccaagcgcagccggaggtggacgccaccggtgtggcctttccgggtaagaaggacctgatggaggttacccacaaggtctatttcgacattgaggtcgatggcagcaagcccacagttatttgtatcaaggagaaatgcacagcgtag

SEQ ID NO: 3819 - DNA, 384 bp, Zea mays
  Peptide Sequence Number=SeqID_45598
atggctggcgcaacgggagggggcggggagttctccatgttatacgatgaggaagcatcatcctactatgacagctctattagtggcctcggtgatttcccgcctagattgtgccatgccccaatggtgatcgctgccctggtggcccacaaccatctaccctcatttgacgacatggagttcgtagggatggctgatggtggtggggaactcatcttcgacacactctacattgactcggacttaggtctgagtccccctgagagaagcaaggaggaactccccagtggcaaggagtacaaggaccacccgtcttctacggtcccaccggcggcacatccaaagtgtggcgctatacacggtgggagtcggagggatcgctga

SEQ ID NO: 3820 - DNA, 201 bp, Zea mays
  Peptide Sequence Number=SeqID_45599
atggtccttaagcgactcagacggagacattacactgagactcccttctcatgcaagtcaaccgcccagtctcgttttaatcatttaaaccccaaagtttggtacctggcagaggttcgtccatcagcatcatcttgtggagaagctcacgcgcagcgacatcttgtggtcgactcagctttggtccttcgcatcacgtga

SEQ ID NO: 3821 - DNA, 408 bp, Zea mays
  Peptide Sequence Number=SeqID_45600
atggtgcactggaaggatctgactatggagcctgagactctggcactaaagctagagcatcggtatgctgaagaatatgagtcaaaaaagccagatgctctgctctatctgccagaagctgctgctgaagagtgtcctgggctgggtcaatcatcgaatgagcagcgagagtttgctttctctactagcatggttccagcgacgaaccctagtggcagtggctctatgaaggtcaaacaaacacagacccacaacaagtggttgaagctcagtctcatcacgctctctgaaataggtgggaggaactggtggagtggccgaggaagtgggagcagtggaagcagcggaagattcttcggtgacaagttcgagagctggttcccgagcttcttcttgctgtccctctag

SEQ ID NO: 3822 - DNA, 270 bp, Zea mays
  Peptide Sequence Number=SeqID_45601
atggctgctgtcagcctcactctgtcgagtggcacaacagtcggagcggcgcaggcggcgctgtcctcttgtcagaccgttggcgtggcgatttggcctaggttgcttcttggcgaagactgggcctcgggcgagccgaagctttgtgctgatgggggttaccagctgagaattaggagccttgagggtacccctaattatggtccccgacaacattataaggagacaacggtccagcaactcgaagttgactgggagacgacggcctag

SEQ ID NO: 3823 - DNA, 264 bp, Zea mays
  Peptide Sequence Number=SeqID_45602
atgccgaccctaaagccatcacctgggaggagttcagagacaacttccgccgataccacattcctgaagcacctgattgatagagttataatgactgagaggaagcaccgggagatggaagactggaagcgcaagattggtggacctcaggacgagagcattagccgttcccgtttctcaggcaattcaccccagcagttcaagcagagtcactcccacgaacaccagcaccagaatcaacgtccacatcaagagcaattctag

SEQ ID NO: 3824 - DNA, 234 bp, Zea mays
  Peptide Sequence Number=SeqID_45603
atgaggtgtctcattggacatgctagtgagtatattgctttgaggtgcatagttttagacctctttgagtgctcgttcgatgtcgtatcatgtgcatcagagaacatgtccagagtatacaagaagaacatagcaaacaagatcatgacatgtgggtcgatgggatcgattgtgatgcccgaggtttcgagccacatgttagcgagatattctacatgcgaggaagctctatag

SEQ ID NO: 3825 - DNA, 2952 bp, Zea mays
  Peptide Sequence Number=SeqID_45604
atggaacagcgggacgcgacgcagccagaggcggcggcggaggagcgcgaccaggagcggccctccattattcctcctcccaagctgctttttgctggccactggtcagatttaggtttggtaataatggttctcgatacgcttggtgtatccgttcgtcatatgccaaatcttgcaactatcttccttgtaagacaagggaagttaacagcacgtctcattccagttcaagttgagcatattatggatgaaaacgaggataaagatctgaagctaccttctcgtgtggtttctttattatttggtggtgatatatcgacgtcagcacaaacatttgagaaatggctctcattagtacgtaagaggagtggggctttccggccatctgggttcccacatcgaggttcaaggattgaagtcatgccaagtgggagcttctcactatttggtagcggggacttaagtgaacacttgattagagaagcaccaacaagaaaagatccattggactgcgatcaatctcctgaaataagcttgtgggagagacttgggaactcttctgcactggacattgagtcatctgaattttcatgggacgtgttgttgtctctgcatcatacagaacatagtagtagttccgaacaaactgaagacgaaatgaataaagctcttgaggtgactgtgaactctggtggcgtagtgttctttgctctatttagttctccaggtaacattggagttccagaagcggcagctgttataaagttttcgtcatcaaagatggcaacacaggcagagcgtttgggttatgagtttgcaagattgctcggagtccatacaccacaagctagagtagtatataattctagctcagagtggctggcgattaggcatgctgcagaaaatgcacgtacagtagcagtttcaaataatgatgaggttggtgagatgacgtgctcagagttgttagaagctcttgagctaagccgctgccttcttctaatgagttatattcatggctccccactgcttgagagttcaaaggctttccattcacgagaagctgcttgtgttactgcttcatcactgggaagggttttgatgcttgatctgatactgcggaatgaggacagactcccatgccgtcagcttggttggcgtggtaatcctgcaaacctgatgatttcagataaatcatccttacccaatttggacaggttggatgatttcaagagctctacagatagttccaaccaactaattacacattttttgcatagagagaagcggtcacactctttgaatggaaaatttggttcaccagggttggatcccatgtcaccaaaactagaaccattgataaatgaaaaggaaaatgctgaaagaacaaatggcgattttcgcattgtagcaatcgatactggtgtgccccgccgcccccctgtggggcgacgtgtcaaagatcatgagaggtaccccaaagttgtggaactcattttgaatagttcggactactcagcaagcatcctatatgaaatttctggttgtaagcttggacatccacgacctgatgaggttacttccagtgattcttgttgctccctttctgatgaagataatgctggagtgattcatgaattccgaggatcattccgtgcagctcttagggacctggaggggttccatctatttcttctccagctttaccaaaaactggatggtgttttgcgagttttcttgtccataattactaaaacctctgaagaatctgacaataatgatgctgccctttccgattttccttcacctggagccagctatagtactcctcgccttcctagtaagcatctgaacaatgagcttcatagtgattctgaaatgctgaaatctgcaatgaagtcctcttctgtgggatcccgcggaagctcagattcagtttctcctctgcccagggagagttggaacaacaagtccttcaagggaagtgcagaggctccccgtagtttaagaatgacaatgaaacttcgtgatttttacaaaaccccaaaggttgatcctgaattgctcaaagagattgagcagtggaacgaagcacttaagaatgatgtgatcaaattttgccaagagaacaattttcattctggtttctttgatggaactgaaaacaacatggtagctgatgcctatgaattgaaggtgcgtcttgaacacatcattgaaaggatagccttgatttctgatgctgcaaatacagaacgaccttctcttgttgtcaacaacttgttcataggtggggctctggctgcaaggtctaagtacaccctacagcatttgggcattacccatgtactctgtttgtgttcaaatgagattggtcaatccgattcccaatttcccgatctttttgaatacaagaacttttcaattagcgatgatgatgatgcaaacatcagtgatctttttgaggaagcatcagacttcattgatcatgtggatcatgttgggggcaaggttctagttcattgctttgaagggaaaagtcggagtgccacagtcgtacttgcctatcttatgcttagagagggctttactcttgcaaaagcctggaacttactgaagaaagtacaccgtcgagcgcagccaaacgacggcttcgcaaaggctctcctggcccttgacaagaggctgcatggcaaggtatctatggactggcaacacaagcggccagaaatgaaggtgtgtccaatctgcagcaagaatgttggtctaagtacgagttcactcaagctgcacctgcagaaggcacacaagcgtctatctgcaggcagtgtcgacagcgccatgaccatggagatccaaaaatcgatcgagtcactccagatcagccgaggaggaagcctgagcccgtcccagaagctgaccaaggtgttcagcaatgagctgagcttctga

SEQ ID NO: 3826 - DNA, 381 bp, Zea mays
  Peptide Sequence Number=SeqID_45605
atggccccgctcctcaacgacccgggcggcgccagcgccgtgacggcacgcctccgcggattcgggtcgggcgccgggaacgacagcctcttccgctggctctacgacgtgttccggtccaacgtccccgagctccagctcgcactgttggtgccgtcgctagctagggcgcacctgtgccacgccatgtcacggaagccgctggccgggttcgaggcagtgctcctcgcgctgtacgcgcatgccgcgtcgcagcgcggcgccgaggaggtcgagactcgagaccatatcgctcccgaacctggcaaagattttggtacatcacaaagagaacccgtaggaaaaattgaacaagtacaatcaatcggtgaggttcactga

SEQ ID NO: 3827 - DNA, 624 bp, Zea mays
  Peptide Sequence Number=SeqID_45606
atgtggaacacatggcgacgccaaatattatcgggcagtccggatataacctccaaaccatccaattttcgtagcaaaccattcgacaccttacgtcagatggttcgacgtcacaccagaccgtccggccacctagaccgggtcgtccggatatgcgcgcgtgctgggctccccctgctgcagccagcagtgcaagatattaactcctatgacaagttatgtgatcttgatgttatgagctgcatctacttatatgatattatatttataataagtgtattcttgtcccacaagatacacctctccaattttcaccagataccttttagaatgtctgccgaatgtcatcttgatgatttgttgtttgattccaagtatgtgtgtggattggaagatgagaacatagttatagttgaacctcaagtgccagttgtagtgttgaatcaattggcagcggaagaccaaggagtcaataatgaaaagagaactctacctgacacttgcatgttccagctccaagttggagactgccatcagggtctgcatccgacacacaccaagttgcagactgaaatcaggcgtcaaaggttaaaaatagagtctgttggtttccaagccttttag

SEQ ID NO: 3828 - DNA, 348 bp, Zea mays
  Peptide Sequence Number=SeqID_45607
atgactgattctaaggatctcgacgatgttcctccgggcaacgacattcttaggccgaattttgagagtttattggccgacgaccaacagaaattggaagactacaaaaagaagttggagaaggaggtgcacaagttcatctatatcaattctaagtcgattgtccggaataccgtagattattctgaacaggagaagctttttggaaattcacctgtgagcggaccgtccgggtccttccggcggaccgtccgcgacaccaaggggcggaccgtcccgaccaggggcgcggaccgtccgcggttgatagaacaagggcaacggttaggaagtggttggtggctataa

SEQ ID NO: 3829 - DNA, 1428 bp, Zea mays
  Peptide Sequence Number=SeqID_45608
atggagaaggaggcggcggcggagctggagatccccggtgagtgccagtacgcgggggatccagtgttggtgcgaccgagccagccgacgccgcgccacaccctgcacctctccaacctcgacgaccagcggttcctccgtttctccatcaagtacctgtacgtgttcggcgccgacgccgccgtgcccgccgacgcgctgcgggcggcgctcggcagggtgctcgccgactactacccgctcgccggccggctccggccgagcgccgaggaggatgggaagctcgtcgtggactgcaatgccgagggcgccctcttcgccgagggccgcctcccgggcctcgccgccgccgacttcctcagcggcagcgaccggccgcacaagtcctggaggaagctgcactacagggtggaggcgcagagcttcgtcgccgtgccacctctcgtcgtccaggtcacttggctcgcgtgcggcggcatggtcctctgcaccgccatcaaccactgcatctgcgacggcatcggcaccgcgcagttcctccacgcctgggcgcgcgccgtgcgcggcggcggcggccgcgacgcactggacgccggcggcgacgacactgccctgccgttccacgaccgccgcgccctgcgcccgcgctgcccaccgcgcgtcgcgtttgcgcacccggagtacagcacccgcggcatcatcaacgccgccgtcgccaacggcaacggcaacggcagcgcgaacgaggcgccgagcctgctggcgcgcctgctggggcagccgctagcgcccgtgtcgctcaccttcacggcggcgcacctcctccggctgaagcggcagtgcgtgccgtcgctcaagtgcacctccttcgaggccctggcggcgcacgtgtggcgcgcgtgggtgcgcgccctggacccgcccggcgcgctgcgcgtgaagctgctcttctccgtgaacgtgcggcggcgcctgaggcccgagctgccgcggggctactacggcaacggcttcgtgctcgggtgcgccaggtccacggcggcccagctgacgtccccgtcctgcggctcggccgcgcgctacggggtgcggctggtgcaggacgccaaggcgtgcgtggacgacgactacgtgcgctccatggtcgacctcctggaggagcggcgcggcgcccgcccggacctggcggccagcctggtgatctcggcgtggacgcgcctgggcctcgaggacctggacttcggcgccggcaaggccgcgcacatgggcccgctcaccagcgagatctactgcgtcttcctgcccgtggtcggcgacccgcacgccgtcactgtgctcgtctccgtcccgcaggccgccgccgacaagttccagcacttctgcctcgggttcctcaaggacgtcgaagtggacgcgaagctcacctga

SEQ ID NO: 3830 - DNA, 192 bp, Zea mays
  Peptide Sequence Number=SeqID_45609
atgtctcctgccgagcaagtctgcgaggcggagcagacaaccaaccccctgcctagcaagtctacgacgcggactggacgactaggccctctcgccgagcaagtatgcgaggcagagcgaacgaccaagtccctcgccgagggtaccccttactacagtatgaagacacggtgcccgcgtggctatctctag

SEQ ID NO: 3831 - DNA, 360 bp, Zea mays
  Peptide Sequence Number=SeqID_45610
atgtcgtcctccgtgctgagggctgcggccgacagggccattcgcaggcaggccctcacgctgacgaacgccgcggtgtccaggatccggcagctcctcagcctaaggcaacggccatacctgcggctgggtgtcaaagcgcgaggttgcaacggcctctcctacaccctcaactatgccgccaaccggagcaggagaagggatgggtgcagcttgctggaagatgccgccacggagaacagaaatggtagaaggattaggcttgattttccaaaagccttcttcaagttcttgttggtccactccaaggttcctaatcaagaaaacaggtcctacaaggttagaaaaataattgactag

SEQ ID NO: 3832 - DNA, 333 bp, Zea mays
  Peptide Sequence Number=SeqID_45611
atggtatctaaaagggtcactgagcgtcgtgtcgatcttcgttctgctgtaactggtgtttgctggccacacttggctgcttctgttttttttgctcaattgtatgctcctctaatttcagatgaaaaggggaagttcgatgagcttgtcgaggagaaaggagttaaagtactgatcgaccccaaggctttgatgcatgttataggcaccaagatggactatgttgatgatccattaaagtccgagtttgtgttcataaacccaaattccaaagggcagtgtggctgcggtgagtctttcatgactacaggcagcaaagggtcgacgtcatga

SEQ ID NO: 3833 - DNA, 588 bp, Zea mays
  Peptide Sequence Number=SeqID_45612
atgcatgtcctgatggatctgcagtgtgtgctggcagccagtctagtgcatgctctctcgctctccgatgagatcctggccgaagcaaagtgcatgcagatgggcgcgtcttgtggaggccgcgcgcagcacgaagcggcatgtcaaagcatggcggcggcagcagcacgcccagcactgccagtggtgccgtcgtcgaagaagcctcgagtcgagcagcggtcctccaccatcgtcccttctttcaaggtaaggaaagagaaattaggggaccggatcgctgctcttcagcagctcgtctcaccgtttggcaagactgataccgcatctgtgctcatggaggccatcggttacatcaaatttcttcaagatcaagtcgagactctgagccgcccctacctgaaatcctccagaagtaagaagcccaggccgacaccgcggggttcttcaaacgcgagcgctggggagctggaggaaacgaggcctgacctccgcagcagagggctctgcctggtgcctctctcgtgcacgtcctacgtgaccaacgagaacggagtctgggttccaccgaattttagggcaaactaa

SEQ ID NO: 3834 - DNA, 339 bp, Zea mays
  Peptide Sequence Number=SeqID_45613
atggcaggctcaatttataggatccatgagcggtggcgactaattcggggaaagacacgcgatggccggagagaaggggtgctctggcgcaagcgattggtggcatttaccgtggcgggctcaccgacgactatcgggtgggctaagatgactcactgcggcatggttaaagaaccaaggcacgtggcgcaaggtcgcaaagtggctaactccggcgagcctatccaaagcagccgtgacacaagcgggtacggcggccgcagtagaatagtggctggagtttatccacagtgcggtatttcttacctccttgccgttatccatctgcgcggggcatga

SEQ ID NO: 3835 - DNA, 261 bp, Zea mays
  Peptide Sequence Number=SeqID_45614
atggcgctccacgagctctatgacgacggcggcccccagctctcttacggcagcaggacaacgggtggtgattttttgggagcccttggcggccgcacaggtcagctcgccgtcctcaagtccggccctggtaacgaaatacacaaatcactagtgacgtataaaaatgacagtacgtatacaggacttccaaggaaattttatcctggcattcacgtctacgagattcctgttgattctaagactggggtcctagcctag

SEQ ID NO: 3836 - DNA, 1230 bp, Zea mays
  Peptide Sequence Number=SeqID_45615
atggccatcaatggtggtctccattatggggaggaaatggggagagagaaggaggaggtggcggcggtttcgagtgcaggaatagtcgaggggacacgagctggttcggccaggggcacggggtcggcgtccgggcgggaaattctaatggctcaagtgaaagggaaaaatattcttacagggccaccgatgtatcccgcgcccaggtcgtctccattcggggagctccacggctgcgaaggtgacggctgcgcttccgaccaggatacctggcctctacaccatgtgctacggagtggagtgcactgccgcctctgttgctcctgtatcctcctctcccaccgctcgttgtactgctgtcgctgcttcctcctcgtcacctcaccatcgtgcaactacgacaatggcgacacgctcatggcccctccagcaccaaccgtcacctgtcaggtttgccacgacgccgtcgcacacctcccatgcctctaccccccacccaccgatggtgtcttcgtctgccctccctgcaccgcggcccagaacggaaggcccttcacctacgcgccgccctgcaggcagccactcgacgagcgcaacgccagggttctcgtcctaggggcgcggatagcgctagcgctgctgcagcgacacgcgacagcagcgcgcgaagccgcggaacggctggccatggaggcgcgggacgctcgggcgagggcgcatgacgctcttatcgtggccttcgacctcgatgcggaggaagatctttcgtgtgtcgtgccacaacccaccgagaatgacctagcagcttctgaagaagaagaagaagaagaagaagaagatagtgaggcagagacggatgagggggaggtgatgctggtgcggcgcaacgtgatgccgccgttagtcacgccaacaatcgacacggggggcagtgttgtgccgttggcttccgccgaggccaagcacatgcctccgctgtcacaaccaaagctgctttttgaccttaatgagaatgcggctgagaatgagatagatgatgcccaggctgagcccatgcgacatcaggcgcttaactccttcaacgtgaaggaggtggcgatggctgctggcgcggaagctaccagggccagcccgtcgacgccacagacgttgcagttgtttccgatcacataccaagatatagtacctcggacgctgcaactcttcaatgatgatgacgaggagatgtag

SEQ ID NO: 3837 - DNA, 207 bp, Zea mays
  Peptide Sequence Number=SeqID_45616
atgttgtttccgaattttagtgcggacttgaatgggacaactggcgatatggttgattttcaatctacaggggatgtagggaatagcgcagccatcaccgagatgggcaacctggttcctgagccatcctacgaggaagttatgactaacaataataattgttgtgcatgctacaagattacttgtgttctgactgccaccatgtag

SEQ ID NO: 3838 - DNA, 315 bp, Zea mays
  Peptide Sequence Number=SeqID_45617
atgtccgaggaaggtgaattggttgatttccaaaagaactgtttggttatcttggatattttgccaaatggcatggtcatacctgctggtgtacaagcataccttgctggtcttacatttgtattgtcggcattaccttgcagcacacctattcttgctacccttctgggatatgttgacacttcaagagacccaattattggaggaagtttattgttgacatacacaacggactatgttgcgcgccttcctactatagcttcttttgctagagcactgcagatttgtgtcgacacgagttatagtagcctttga

SEQ ID NO: 3839 - DNA, 324 bp, Zea mays
  Peptide Sequence Number=SeqID_45618
atggatatgaacgctgtgaccgtaacaggttttgacttctacctgaagtattatactgatgctctgatagataaagtggaacaagagaagctggagaagctcgcacgcaagggccccagctcaggagagcaaccctcgtcaaccacaggctctgcagcaagtgatgtgaaggccgatgctgggccaacggagtcagcatctgcaagtgtgtcgacggacaagaacaagaactatgctgttctggcaggcgcagttgctgccctgggtggcttgggttggtatctattgttaaagcctaagaagtcggaggaggttgtggactga

SEQ ID NO: 3840 - DNA, 225 bp, Zea mays
  Peptide Sequence Number=SeqID_45619
atggcgaccagggcggcggcgaggttcctgcagcgcaggtttctgtcttccggcggcaaggtcctcagcgaggaggagaaggccgccgagaacgtgtacatcaagtgtggttcaaggaaaaaatatcgtgctggtgacggggggtatgtgttgtgtgaacggttgcttgttgttgacattggattggtcctgtcgcagtttcgatttatgtggccgaattgttga

SEQ ID NO: 3841 - DNA, 279 bp, Zea mays
  Peptide Sequence Number=SeqID_45620
atggcgctgcagcctgcgggcgtaggaaaacgcaacgcggggtcaggttcatttggcgtggcgtcggcgtcgccaccgttgtcgcagacgccgagacaagagaaaaagcgcaatgaatgtacggttcaggccgatgtgacaaggacatggcgtcggcgcatcgcttgcccggacccggtgggcgcagcgcagggaggaggaccagcacttgtggcttgcgtctgcctccgccacgacaaggttcatttgaatcaaagggggaagaaaacagagtactaa

SEQ ID NO: 3842 - DNA, 768 bp, Zea mays
  Peptide Sequence Number=SeqID_45621
atgagcccgtcgtggaccttctcgtccaggtcccaacggaacagcgtcgcgccctcggggaggcacggagcagcaaccaggagtctagattttcagaacaatttcaataactgggactcgtcgcggaagatcgtggagatcatctgccggacgagcctgctaaagtcggagagcagctgcgtccggatcgagcgggtgttcaaggtgcacaacacgcagcggacgctgtcccgcttcgaggagtaccgcgaggccgtgaagctgagggcgagcaagctgcccaagaagcacccgcgctgcctcgccgacggcaacgagctgctgcgcttccacggcaccacgctctcgtgcgcgctcggcggcggcggcggcggcggcggcggttcgtcccgcctctgcgcctccgacaagtgcgccgtgtgccgcatcatccggcacggcttctccggcaggaaggagggcaagaccggcgtgggcgtgttcaccacgtccaccagcggccgcgctttcgagtccatcgaggctgccggcgccgacggggctggcgctggcagtgtcagtggcaccacgcgcagggcgctgctggtgtgcagggtgatcgccggccgcgtgcacaagccgctggacaacctcaaggagttcgcggggcagacgatgggcttcgactcgctcgccggcaaggtcggcccctactccaacatcgaggagctgtacctgctgaacccgagggcgctgctcccgtgcttcgtggtcatctgcaaaccctag

SEQ ID NO: 3843 - DNA, 372 bp, Zea mays
  Peptide Sequence Number=SeqID_45622
atgcaaataaggttggaggtctggacccgttacaagtcggttctcgagttaatcgcgcaggttttgctaacaaatcccactagaaatctagaatctactgattctgcgtacgcgcggaccgttcggccccaggggcggacagtccgcatgtcatttttgctgttcaatagtgcgtatgagaagcagacagtgcctgtgcatgttgatgactgcccgagggaacacttacagccctccacgccaactgcaggtggtggtgcaaagcgtcgtcgttccagccgtcgtgttctgggatggcgtgatcccaggaaaatactcttcgcctttgcagcattgtttagttttcctgtcatcttcaacctacatgattaa

SEQ ID NO: 3844 - DNA, 342 bp, Zea mays
  Peptide Sequence Number=SeqID_45623
atggcccctcggaagggttcgacagccgcctcagagcactcgggcttcaggctcattactgatcagagccccaaccaccaaactagtcgtttggtgaaggctgctgtggcatggcgcaccggacagtccggtgcgccaccggacagtgtccggtgcgccagccacgtcacccggccgttagggttcgaccgttggagctctgactggtggggtcacctggctgtccggtggtgcaccggacaggtgaccgttggtgctgaagtagccgttgctccgctggcacaccggacagtccggtgtggcaccagacactgtccggtgcttcaccggacagtccagtga

SEQ ID NO: 3845 - DNA, 2229 bp, Zea mays
  Peptide Sequence Number=SeqID_45624
atggagagcgtcttggagaaaaagctacagcatcaaagttcgacaccaaaaaagttggacataaactatttaagatccatcacgaaaaatttctctgaagatcaaatacttggacatggtgggtgtggaatagtttacaaggtatgtatggatttcccaagctttatgccgtttaacgaacgactaaaaatgtatatctatgttatgagagtgaaacagggtgagcgagaaaacggtgaggtggttgcagtaaagaagcttaaggtggacaatgttggaaaggatgacaagcaattcatgaatgaggttatacatgctatggatatatgccatcctaatatagtaagacttgaaggctattgttgccacactgaaaaggaagtaacgtttcacgatggatcttttgttttggccgaagagttttatagattgctttgtttcgagtatatcccaaatggaagcctcgacaagtatcttagcgatgaatcttctgggctagactggcatgtacgttataatataatcgagggagtttgtaacggtttgcactgtcttcatgagggtagaaacattctccatttggatctaaagcctgccaacatattgctggatgagaacaagatacccaaaattgcagactttggtctgtcaaggctcattgatgaaggaaaaacccatattcacacaaagaatttagcaggaacatgtggatacatggcacctgaatacatagaaagatacgttctttcgaaagagtcagacatatacagtttgggcgttataataatagagatagtgacaggggaaaggaaataccctgtgggaacaagtaacgaagaatttgttgaggtgtatgagaaatggaggagaagactgcaggcaacaaggaacaagacatcactggaagaagagtgtcaacaagtaaaccaatgcattgaagttgggctgaaatgcatggacaacgacccaaagagaaggcctagtataagagaagtagttcagattattaaaagaagtgaaaatatagattcatgttcagttaccactagagatggaaaacatagggaggaatcggtatattcagaatggagcgaaaaaattaatatccttgtgttaggttcatctaagcagtctattgaagcaatggaaactatatgccatgagctaaaaggcctgacagatgtgcctgaatacatcattaaagacgctgacagattggttttggacttgacaatgatggttgaaaaaagcttcaacttaacccttgctggggcatcttctatgcaattgaagcatgctttaaatactctctttcagatttttaaagtcagacatcttgctcaagctatgaaggaaggtactttagagaaactggtcacacaaattctaatatggatttcgagtgagacggttctcaaaacggaattggatgacgcccgagaactacttaaggctttaaatgttttgatgcttcacatcttggataacgtggacaggacgtccatttttgtaattctaattaatttattatttccctttgacccttcaagacggccatcctacacgccattggagctccttgctgtcacaaatgcgaaaattttagatttagttgtgaaatgtttagttaaactgaccaaggctcttgggagtacaattaacaccattgaccttgatcgcgttcttcaaaacattcacgtcttttttcaacaactaggagtgagaggaatggtgagaaggactggaacttatgacaagccacaacgaatgattagaactatagtgcatgagcttgtaaagcttctggattcaaaaataaaagatcatctttcattggtccctatagatgctgaacctcggccattcattctgggattaattgactttgaacttaaggaacttgcaatgtcggcgccatctctacctatggacccaactcatggggatgctgctacaattaacagtacagatacatccaccaattcatcatcactggagtgtatggttctgagcttggaaaagctgcctagaccagacaacaacccgagaagtactaattttggtcgtacaattactaaatcgactctggagacatcacttcgcgctcctgaaagtactagtaatttgatggcgctcagtgaagagatgtcacacatgagtctcaagacagacaaggatgctgccgacgagatgagctcaacttcgtcgtacggaagagaaatgccctaa

SEQ ID NO: 3846 - DNA, 258 bp, Zea mays
  Peptide Sequence Number=SeqID_45625
atggcccgcgccgtcgccgcgctcgtgctctgcgcggccgtgctcgtcgcggcggcccacgccgggcgcgtcctcgacgccgggctcgacgccgccgcggctgcccttgcgccggtgtcgccgccggcacgcgtacccgcggatgcgggcggcgtcctggacgaccgggagaggggcggagcgatcgccgacgtcctgtggttcgtgctccagtgggccaaccaggctgccaccggcgacaggcggaaggcctactga

SEQ ID NO: 3847 - DNA, 333 bp, Zea mays
  Peptide Sequence Number=SeqID_45626
atggatgcattgggatttgattatctagactataagaagttttctgaagaagaagttgctatcataaaaaggaagagaactgtcagtatcatgaaaaggcggactgagagattagtgaaggaggataggaggaagaaaatagctttgaaaaagcaaaagggagctgatgagggtgaatcttcgcagtcggggccaaaatcccctactatcaagaagagtaaatcatcgaagcttggccatgatgtcaagaaaccatctgagccaccgaaacaggttgatgagactcctttgacattgtctattggcattacaaaaattgtggagagaagatga

SEQ ID NO: 3848 - DNA, 306 bp, Zea mays
  Peptide Sequence Number=SeqID_45627
atgaagcactgtggctctggcatcagcgagcgctctgccacagattttggagaaggctctgaagccgtcgcgccgatggagaaaggtgtgggtggtcaaggcggcgaggaacccctgcagctctggtgttggcgagtgctccgccacaaattttggagatggtgggaggcaatggagtcgatctgggcgacgtcgacgaactgcagcatggtcactatttatcttcattattgcgccctcaaccggaagaagtggaggtcgtggagcgtgctgcgtgccagaggaatagcagggcggttgctctga

SEQ ID NO: 3849 - DNA, 420 bp, Zea mays
  Peptide Sequence Number=SeqID_45628
atggcgtgcgcgtcgtctcctctcgtcagctatccacaggggcgcctagaggaagaacgcattcctcgattgtgtcgcgctcgagtcgccgcaggcttcggcggcggggcggtcggcgctgaagacgtcgccgcggaggcagaggtggatgggaatgaggccacgaagaaggatgcggatgcgcggaggtgggcacgggaggcagggcggtggcggcttgcaaagagggggcgggaggcagggcgccgacggttgtggaaggaggagcgaaagctaggtcgctcacgtggacaggggtcgaccgaggggggcgacgcacgccgtgtgcatcggacgatgaagacagaggcgtggacatcacagacggtggagattgatcgatggcagaacggcagaaccaaggaggcagactactattag

SEQ ID NO: 3850 - DNA, 240 bp, Zea mays
  Peptide Sequence Number=SeqID_45629
atgaactcgatgaggaaggtcggtcgagcagggaacgacgaggtacgaactccagtgaggctccacggactccggaacggacggcgatcaacggacagcgcggcggccggctggctcggacgtgggtggcctggtcctgtcggggtcgcgcggctggcgtgcagggcgtggacgagcgcggggctcggtgcctgggcggtcctcggctcggcactgcaaggcggcgttcctggcggctag

SEQ ID NO: 3851 - DNA, 135 bp, Zea mays
  Peptide Sequence Number=SeqID_45630
atgccgctgggcgttggacaagctccctccactgcttcaacggtcgggctgttgggcatggttaccgtcgatctcatgatcaacgggcagtgcaggatggggagtccagatctaattagatacattgatagttga

SEQ ID NO: 3852 - DNA, 420 bp, Zea mays
  Peptide Sequence Number=SeqID_45631
atggccgagctccttgttcccctgctccatggtgcccttcctccctctctctgctatccatggcgccaagcagcagctctaccttccctggccgtgcccaagattgccagctcagtaagctcgccgccggcgatccacgcgtctggaattgcgctggtcaccgtgattcgtgcttggcacgcagaggatatccatgggaaggcatctagcgtacccacccgtacctcagatcctccaccagagagctccaatttgggattttccccaaaccaaccaagaataccgtgccttgtgtcctcgccgtggccagcccaattcagaacccaaaaccctagcccctaccctatgaacttcactattgactccgggaaccctcagttctcggagatccgtgaaggaaagttgtattcaagactttag

SEQ ID NO: 3853 - DNA, 117 bp, Zea mays
  Peptide Sequence Number=SeqID_45632
atggaggccatagtcatggtgctcgcagaggcaaccatgagggtcagtgcaatgactagggtgaaggtggccaagactgtggtcatggctagggtccaactagtttctgacctctaa

SEQ ID NO: 3854 - DNA, 723 bp, Zea mays
  Peptide Sequence Number=SeqID_45633
atgcgggagggggaggtggacggctttggagggaggcatcacgcattgtctccgtcggtggggtggggagcggcaggatgggatttcccagtggggctgggcagcgggggctgcggctacgggggagggaatggggcgcgtgggcgggggcacggaggggctgagcagggggaaggcggggatgacgaggcggcggacaaaggtatcccgacggtgactcgcgcggccttccttccccgacttgcgcgacatcacagtgacggctggcggggcgcgcggagcgcagagctggcagcggatctcgcctttcggtttggtgggggcgcggaggtggcgggctaccggggaaggaagggcggcatcactgtgatggctggcggggtgcgcggagccaacgggggcaggctgccgcggaaggaagggatgccagggaagcgaatggtacaaacgcccttccattgtggcgacggtggtggtggggaggaacgccgcggttccgcgtgggggaggaccgcgttgaatgcggcggcggtggagaggagggtgggggatccacgcgcgttgattgacgaggatccgcgggcgttgattggtggcggcacggtgtcgaccgagcaattgctggcgctgatggcggggcgggtttggggcatgagcaagggcgcctgggggaggaggatcgcgggcagaaccgtggtgcactattgtggacgcctacaatag

SEQ ID NO: 3855 - DNA, 204 bp, Zea mays
  Peptide Sequence Number=SeqID_45634
atggaggtgttggcgggggtggtgaggatgaaggcgactatgatgaggcggaacccgggcaacatgatggaggcgagctggtgccggaagaaaatcaaatctaaaatgaaagaaccttatttgattggacaattcccaatttctgtaaattgtagacactatgaagttttagctgatccgttattcaagaaggaaataggttga

SEQ ID NO: 3856 - DNA, 177 bp, Zea mays
  Peptide Sequence Number=SeqID_45635
atggcctttttgggaaggcgctcgccggtggactttcaggtgttgctgcacaggtgcaatgggctggcttttgataaactcgaatgtggaggtggcttgctactgcaagccttgttactggcttataaatctggcttccaagtgtgggatgtggaacatgtttatgatgtaagatag

SEQ ID NO: 3857 - DNA, 354 bp, Zea mays
  Peptide Sequence Number=SeqID_45636
atggggacagagaaacgggagagggggcggatgcgcttacacggcggccgcgggcgcacggggcgcgggcgcgcgcgcaacggctccggcgcgggctacgtcgccgggaaagtgaagaggacctgtcgggagccgttcgcggagaagtggggcgggggcggcagcgtgcgagagggacgaagacgagcgcgggcgagcgcgcaacggctacggcgcgggctacgtcgctggggaagagaagatgttgagccgttcgcggtggggcggggaaatgaaaagctgctgtcgggagcgtacgggagggacgaagacgaagcgtcggttcgacctgagtgggacgctgtgtgtccataa

SEQ ID NO: 3858 - DNA, 315 bp, Zea mays
  Peptide Sequence Number=SeqID_45637
atgaccggcagacacaacccatccatgtcatcgaccaaacctctatcagaaataactacgtcgcgtgggggatatgaagaacacgagccgttagggatgataggaggagcggatggggatttataccggcaaaaggagaggaggagccgggccaacatcccctccccgaaggatcagcacccgcatgcacggggtttgttgagcgcaaacttggtagagaagatctccagtagccggggaaggtgccgtcgtgcgcggcccaatggacagcgtcccgatgagggcacgatgtggcagacccgcagggcccgctag

SEQ ID NO: 3859 - DNA, 303 bp, Zea mays
  Peptide Sequence Number=SeqID_45638
atggtgcaggctggtgatgactacggcggcggcgaggcttttccgtccctatctgtctgcaccgatggtgcccctatggagtttgtttggttggcttggataagcggtggacaagagaagtccggctgggagaagcgagcagactttgccggatttcacgcaaccaaaccgctcgacgctcgggagcatgtttgtttagcgaagacggggcggcttttaattgcatgcagatatcactgcgatgatatttacggttttagaattaaagaaaacaagaaatacacccatggcatgatcacgtga

SEQ ID NO: 3860 - DNA, 249 bp, Zea mays
  Peptide Sequence Number=SeqID_45639
atggaggatgtgatgcttggggcagctccccttcctgttttggatatgaccaaaaagcgttctcgcagttcagcaataaggattattaaaagcgtttctcgttctgtgaaactgagactaggcactggaggaactacagagaggatcatatctgcattgcacactgttcttagtgaacaaggagatgaggatgatgacctgaaaaaatgcaagacttctatgtgtcatgttggaaagatccagaattag

SEQ ID NO: 3861 - DNA, 246 bp, Zea mays
  Peptide Sequence Number=SeqID_45640
atggcgcggctaggagcgagcagaggcgcacatcgtaggcgcccatggacggagaggtgggcgagccttctcgtcggcgtggaggaggcgcgcgatggaggcgaccgtggacggagaggagattctttatattttagtcactatggagaaccggggcttttgtcccagaacataagtaccaattcatttggaaccgctattgaatcaaacttcaataccagttttaactaccaagtattaagctaa

SEQ ID NO: 3862 - DNA, 219 bp, Zea mays
  Peptide Sequence Number=SeqID_45641
atggcgcccaccgcagagacgggtgaactaagtaggacgttggaagaggtatctggccgttctctgcctctctgcttgaaagggaaggaaccattcaaatttgtgcttgatgtgaaaaaggagttcaaatctttggtgctgaactttgccagtgggaagaagacccttatggagatccctactgagaactacctcattgtaacagtaaatattgcataa

SEQ ID NO: 3863 - DNA, 342 bp, Zea mays
  Peptide Sequence Number=SeqID_45642
atgagtgagcggccaccagggaagcttcacgagctggaggccaacgcaaggggctgggcgcgagcacaggagctcggcgtcgtggccatggccgagcaaagggagcagcgcgccatggatggaggagcagaggccgaactggagaacggcgcacgcagggaggagcacgcgactggactggagaagggagatgggcgcgcacatggagctcggctgcgagcaaagcccgagcacaggatctttttcttccttggggatctgggagcgttgcaacgagaacatataataacactggtaacttatgtggaagaatacggggatttacttattgaagaagaataa

SEQ ID NO: 3864 - DNA, 363 bp, Zea mays
  Peptide Sequence Number=SeqID_45643
atggtcaagggcgtcaagaagttggagcatgttggcgtacgctacaatcaggtgttccacgatgcgttcgacgagcgctggatggtggagctccacgacatcaatgtcgccatgatgcttgtaggctccgatggcactctcgtgcctctccagttgcctcctgatcccaatggttgttgccaccgcacacgtttccccatacctaaaatattcacccatggacgtgctttcatccttctgaatcacggacaagacttcttcttcgtgccctcaaaccctagccccaagctctccaacatgatgttagagcctagtcagggtgccccattcgtgtccgtgtcatcggatgagatgcgacactaa

SEQ ID NO: 3865 - DNA, 168 bp, Zea mays
  Peptide Sequence Number=SeqID_45644
atggcgcgcggtgatgtcccgatcgaaatcgcctctgtgcgatacagagaatcgccgagtcctgcctcttggcactgccctcacggtacactccctcggagtgcgatggtgaacctcgcccagcaaccgcaagcgccgcagcaacctgtggtctgcttttcctccacg

SEQ ID NO: 3866 - DNA, 324 bp, Zea mays
  Peptide Sequence Number=SeqID_45645
atgactggggagaaaaggatgttctcctcctacgagaaaaaccatgatccccaaagagctatcacattcggggatagaaatcaagattctttagattacaacttgctttcagtttctcaattatgcaaaatgggctacaattgtctttttacggatataggtgttactgtctttagaagaagtgatgattcaatagcatttaagggagtattagagggtcagctatacttagttgattttaatagagctgaactcgatacttgcttgattgctaagactaatatgggttggctctggcaccgccgtcttcccacgttgggatga

SEQ ID NO: 3867 - DNA, 1053 bp, Zea mays
  Peptide Sequence Number=SeqID_45646
atggggagagctccgtgctgcgacaaggctactgtgaagaagggcccgtggtcaccggaggaggacgccaagctcaagtcctacatcgagcagaacggcaccggcggtaactggatagccctgccgcagaagataggtttgaagaggtgcggcaagagctgccgcctccggtggctcaactacctccggccaaacatcaagcacggcgggttctcggatgaggaggacatgataatccttagcctctacatcagcataggcagcaggtggtcgataatagcggcgcagctgccgggaaggacggacaacgacataaagaactactggaacacgaggctcaagaagaagctcttcggcaagcagtcgcgcaacaaggaccagcggcagcagcatcagttcatgcgccagctggcgggatcagcggcaagcgatgggatggtgaagcaagaagcagcagcaggtggggatgcagatgcagcagcggccggaagcagcagcgtggcagtggcggccacctacaactggcaccaccatgccatggccatggccatgccggtgcaaccagtgccaggtagtacaacgataatggaaggccatcgcgcagaggcggacgaggtagatgagtcgattcggaagcttctgtacaagctgggaggagctgcaggcccttccacagcactgtcgtcggttcctcagtgtgttcgtccaatgtacgaggagcgaagtgcagcaagcctcatgccgccgccgccgccgccgccgtcatgcccggcggtggtggacgccagcagcagcgcctcgcttgacgaaggcggcggcgtgcttccagcgctggagctggaccagagcttccacttcggccaggttaagctggatggcctagaaagcttctttggcatgggtggtcagagcggcatgaggtggtggagtgaggcgagcccattggtttgccctagtagcacggtggccgcggcgtcttcgagctcccatgggatgcaaatgcaacagtactgcgttgttgttgatgagccgggaaagcttgggatgaattag

SEQ ID NO: 3868 - DNA, 1983 bp, Zea mays
  Peptide Sequence Number=SeqID_45647
atggcgccgtgcagcggcttgtggggcggcaaggccggcggcgacgcctaccggggcacgccggtggtggtcaagatggagaaccccaactggtcgatctccgagatctcgtctccggaggacgacgacgacgacgaggacatcttggccgccgccggcggccgccgccgcaagggggcccgcaccaagaacgccaagcagatcaggtgggtgctgctcctcaaggcgcaccgcgccgccgggtgcctcgcctcgctggcctccgccgccgtcgcgctgggcgccgcggccaggcgcagggtggccgcggggaggaccgacgccgacgccgacgccgacgccggcgtgctggccgtcgccggcgagagccccgtggtgcgctccgggttctacgccttcatcagggccttcctcgtcgtctccctgctcctgctggccgtcgaggtcgcggcgtacatcaacggctgggacctcgccgcctccgcgctcgccctccccgccctcggcctcgagtcgctgtacgcctcctggctgcgcttccgcgccgcctacgttgcgccggggatacagttcctcaccgacgcctgcgtcgtgctcttcctcgtccagagcgccgaccgcctcatcctgtgccttggctgcttctacatccgcgtcaagcgcatcaagcccgagccgaagtccccggcattacctgatgcggaggaccccgatgccgggtactaccccatggtacttgtccagataccaatgtgcaacgagaaggaggtgtatcaacaatcaattgcggccgtgtgcaaccttgactggccgaaatccagcttcttggtccaggtgctggatgactccgatgacctactgacacaggctctgatcagagaagaggtggccaaatggcagcagcaaggtgcccggattgtgtacaggcaccgtgtgttgagggatggttacaaggctggaaacctcaagtcggccatgagctgcagctacgtgaaggattacgagtttgttgccatctttgacgcagacttccaaccccagcctgactttctgaagcgcactgtgctacatttcaagtatattaacctttgcttccactttgaggtggaacagcaggtgaatggagtgttcttgaacttcttcgggttcaatggcaccgccggggtgtggaggatcaaggcactggaggactcaggtggatggatggagcggacaacggtggaggatatggacattgctgtcagggcacatctccatggctggaagtttatattcctgaacgatgttgagtgccagtgcgaactgcccgagtcctatgaggcttacaggaagcagcagcatcggtggcattccggtccaatgcagctattcaggctgtgtttaccggacatcatcaaatgcaagatggcgttctggaagaaaggcaacctgatcctcctcttcttcctgctccggaagctcatactgcccttgtactccttcacgctcttctgcatcatcctcccgacggcgatgttcgtgccggaggcggagctcccggactgggtggtgtgctacgtcccggccctcatgtccctgctgaacgtgctgccgtcgccgaggtccttccccttcgtcatcccgtacctgctgttcgagaacaccatgtcggtgaccaagttcaacgcgatggtctcggggctgttccagctggggagcgcgtacgagtgggtagtgaccaagaagtcgggctcgggcccccgctcgtccgaggtcgccggcgacctcgtctcgctggccgccgccgccccgacggcgaagaagaagaagaagaagaagcacaaccggatatacaagaaggagctcgcgctgtcgatgctgctcctgaccgcggccgcccgcagcttgctgtcgaagcagggtatccacttctacttcctcctgttccagggcgtgtcgttcttgttggtcgggcttgacctcataggggagcaggtcgagtga

SEQ ID NO: 3869 - DNA, 298 bp, Zea mays
  Peptide Sequence Number=SeqID_45648
atgccgaggccgacagcgtggggccgcgcgctggccgagctcaaggccgcgcgccataggcacgccgggccgagctcaagaccgcgccgggcaggggcggggcacgccaaggcgggtgggctgccggggccgcgccatggccaggccacggccgcaccaaggccatgccatggccggggcaaggcggggcgccgagacaggccgcaccacagccgggctaggggcgcacgccggggcaagcgggcacgcgaggagggcgccgagcaggggcggggcgaggccaagccgccacagcgag

SEQ ID NO: 3870 - DNA, 2220 bp, Zea mays
  Peptide Sequence Number=SeqID_45649
atgtcggagccatccaccaccgagggatgccgaatccacggtgagatcaagggactcctagagaccacaaaggagatagcccccacggtccgggaccgcctcagcggacggctacaccacgacgaccgacgacaagccacgcatgtctaccacccttggcgggatggtcgttacgacagtggtgaggatcgaagcccctcgcttgagccaccaggaagccgtcaaggccatctttcacaaggtcaagggcagcgggaagtggaaggaggacgccccggggcgacctcccaacacaacaccaagaaaagcaacaagaagaagtcgccgcagcaccggcacgaggccctcaacgcagatcttgtcgccacagcagaacgatggaacccccgaggccctcaagggggtcccaatgttttcaacaagatgctgaaggagtcttgcccttatcataagggccctgtcaagcacaccctcgggaagtgcgacatgctccggcgtttctacaacaagcctggcccctctatggatgatggcatgaagaaaggttccggtgacaaggaggacgaccagggtgaagagttcccagatgtccacaactgctacataatcttcggtggacaaacggtgaacctctccacacgacagtggaagcaggaattgtgggaggtcttctccatcaaggtagcggcgccggtttatctagactggttcgaccacgccatcaccttcgatcgagacgatcacccagactacgtcccgaatcctaggaatagcctcaacatcatctatgcagaaacattggacctcatggagatcaaccggcccaagatttgggctagggccacaccatttcacggcatcacccctgggttcaaaggtacctaccacgtcattctgggaaggccatgctacgccaagttcatggccatcccgaattacacctacctcaagctaaagatgccaggaccagcgggcgtcatcaccttcagccccttgtaccgccacacctacgagtgtgacgtcgagtatgccgaagcactcgtagagtctgaggcgctcatcatcgacctagagaacctcgccaacgaggtttttgaccccaagcgacatgaattgatcaccgacgtcctccgctcgaatgctaaggtattggtgtggagtccctcggacatgccaggcataccgagggaggtcgcggagcactccatggacatctgtgctggctccagatcggtgaagcagcacctgcgccgcttcgacgaggaaaagtgcagggtcattggggaggaggttcacaagcttttggctgccgagttcatcaaggaggtctttcatcccgaggggttggcaaatcctgtattagtcaggaaaaagagggaaatggagaatagggaagcctcgggcagggtagccaagtgggtcatcgaactcatgggagaaactctctcgttcgcccccaagaaggtcttcaaatcccatgccctagcttactttctggccgaatggaccgatacccatttaccaacggctccgatccaagctgagttatggaccatgtactttgacggatcgctgatgaaaactggggtaggtgctggattgctttttatctcacccctcggcgtacatctgcgatacgtcgtgtgtctccgcttcgctgcatccaacaatgtcaccgagtatgaagccttggtcaatggtttgcgcatcaccatcgatctaggagtcagacgcctagacctcaaccacgtcgcacgccagtacaacgaggtagctgatgaactagcgaaaatcgcctcggggcggaccacggtcccctcgaacgtcttcgctaaggacatcttcaaaccctcggtaatgcccaaggaggcgtccgagctcgccccccatgaagaagcacccccggccggcgggcccgaggctatgcaaatcgatggcgatgaaaaccgagccgctctagcttcggactggagggcaccttacctggaccccttgggaatacttcaacgatgtataccaatcagccaagggcaggagttgctgggcgaaaaggcacctgggggcttcacgtacctgatggtcaccatcgacaaattctctaagtggatcgaggtccagcccctcaacaacgttaagtcagagcaggcgatcgcgttcttcacggacatcattcatcacttcggggtccccaactcaatcatcaccgacaatggcacctag

SEQ ID NO: 3871 - DNA, 2553 bp, Zea mays
  Peptide Sequence Number=SeqID_45650
atggcggatgtgtgtggactacactggtctcaacaaagcatgtccgaagggtatcaccaaatccggatgaaagagtccgaccagctcgcgacttctttcatcacgcccttcggcatgtactgctacgtcaccatgccgttcggtttgaggaatgcgggcgcgacgtaccagcggtgcatgaaccatgtgttcggcgaacacatcggtcacacagtcgaggcctacgtcgatgacatcgtagtcaagacaaggaaggctttcgacctcctctccgaccttgaagtgacattccgatgtctcaaggcgaaaggagtcaagctcaatcctgagaagtgtgtcttcggggtgccccggggcatgctcctggggttcatcgtctccgagcgaggcatcgaggccaacccggagaagatcgcagccatcaccagcatggggcccatcaaggacttaaaaggcgtacagagggtcatgggatgtctcgcggccctgagccgtttcatctcacgcctcgacgaaagaggtctgcctctgtaccgcctcttaaggaaggccgagtatttcgcttggacccctgaggccgaggaagctcttgggaacctgaaggcgctccttacaaaggcgcccatcttggtgcccccagctgatggagaagccctcttggtctacgtcgccgcgaccactcaagtggttagcgccgcgattgtggtcgagaggcaagaagaagggcatgcattgcccgttcagaggccagtctacttcgtcagcgaggtactgtccgaaaccaagatccgctacccacaagttcagaagttgctgtatgcagtgatcctgacgaggcggaagttgcgacattacttcgagtatcatccggtaactgtggtgtcatccttccccctgggggagatcatccagtgccgagaggcctcgggcaggatcgcaaagtgggcggtggaaatcatgggcgaaacgatctcgttcgcccctcggaaggccatcaagtcccaggtgttggcagacttcgtagccgaatgggtcgacacccagctgccgacggctccgatccaaccggagctctggactatgtttttcgacgggtcgctgatgaagacgggagccggcgcgggcctactcttcatctcgcccctcgggaagcacctacgctacgtgctacgcctccatttcccggcgtccaacaatgtggctgagtacgaggctctggtcaacgggttgcggatcgccatcgagctaggggtcatacgcctcgacgcccgcggtgactcgcagctcgtcatcgaccaagtcatgaagaactcccactgccgcgacccaaagatggaggcctactgcgatgaggttcggcgcctggaagacaagttctacgggctcgagcttaaccacattgctcggcgctacaacgagactgtggacgagctggctaaaatagcctcggggcgaacaacggttcccccggacgtcttctcccgggatctgcatcaaccctccgtcaagatcgacgacacgcccgagcccgaggcaccctcggcacagcccaaggcacccccggcccggcccgaggcgccctcggttcagcccgaggtaccctcggcccccgagggcgaggcactgcacgtcgaggaggagcagagcggggccatgcctgatcgaaattggcagaccccgtatctgcaatatctccaccgaggagagctacccctcgaccaagccgaggctcggcggaaggcgcccgggggctacacgcacctgctggtcgccatcgacaaattctccaagtggatcgaggtccgacccctgaacaacatcaggtccgagcaggcggtggcgttcttcaccaacatcatccatcgcttcggggtcccaaactccatcatcactgacaatggtacccagttcaccggcaaaaaattcttggatttttgcgaggatcaccacatccgggtggactgggccgccgtggctcatcccatgtcgaatgggcaagtagagcgtgccaacggcatgattctacaagggctcaagccccggatttacaacgacctcaacaagttcggcaagcgatggatgaaggaactcccctcggtgatctggagcctgaggacaacgccaagccgggccacgggtttcacgccgttcttcctggtctacggggccgaggccatcttgcccactgacctggaatacggctccccgaggacgagggcctacaacgatcaaagcaaccaagctagccgagaagactcgctggaccagctggaagaggctcgggacaaggccttactacactcggcgcggtaccagcagtccctgcgacgctaccacgcccgaggggtccggtcccgagacctccaggtgggcgacctggtgcttcggctgcggcaagacgcccgagggaggcacaagctcacgcccccctgggaggggccattcgtcatcgccaaagttctgaagcccggaacatacaagctggccaacaatcaaggcgagatctacggcaacgcttggaacatcaaacagctacgtcgcttctacccttaa

SEQ ID NO: 3872 - DNA, 480 bp, Zea mays
  Peptide Sequence Number=SeqID_45651
atgctcgggcgcaatggggattcaccgctgatcaggttcggcacatacacatgcggcgcgtgcgccgtgtcgggcacgctcaagtgggacatggccactgtcatggagtacaagggcctacctctgcagcaggtcgtcgactactatgtcagggacatggccactgtcatggagtacaagggcctacctctacagcaggtcgtcgactactatgtcaggggcacgatgcagaatatccgaagtgtagctattagacaatatatgggtttgatatatgaacatttatggtcacaattggtccaaccgtccaagcaatgtccgatgttagagtgtgaaattccatggaccaaagcaaatgagcaagaattacgtcgtaaatttttgtatggctggattgttgtactagaaatgtataataattgttctaaagaaatgctagaggataaagaagctacaaagaagcactacaaagaagcataa

SEQ ID NO: 3873 - DNA, 483 bp, Zea mays
  Peptide Sequence Number=SeqID_45652
atgccgaagctccttgatggtagcttcagcgtgtacctttgtgctatatttgcttctgtgctgatcctccaaagtgaagcccctaggcacgacaccgaggacgcggtggcgatgagtgcacgggtcgacttatggcggctaccctctccccctctcttccgcgatggcgacgacggcacaatttccccctgcgtttgggtggtcagggagatgtggggcgacacgatccggctccagatttatatgcaggacgtgggccgaaaccacttttctcagctggcgacggagttggttgcgcgcgatctgggtcagcgcggtccgattctcgcagagaagaagacccagtgcaccgcagcgtgcccctggagcctggccgagaggccccacgcgacagccacggacgccaacgcgatggtgggcccaaccagcgagacagagggagcaggaggagctgggctgcgagggatgtggcctagatcgcag

SEQ ID NO: 3874 - DNA, 276 bp, Zea mays
  Peptide Sequence Number=SeqID_45653
atggagccatgcaacgcagttccatctggagtttcctgggaggtgaggccagatgtagacgctagcgaggagaagaatgaaaaacaagagtcatgtagcaccacagtggatgaagcacacgaagaagggtggcgaggcctcaccaagggtgttgcgacgtcgcgggttggggctgcacaggtcgaggtggagctcactgcggtatttcatcgagcacttggcgagcgtcgcggacacgggtttggcaccggtatgctgctgtaccgttcgggctag

SEQ ID NO: 3875 - DNA, 261 bp, Zea mays
  Peptide Sequence Number=SeqID_45654
atgcagggttcttgcctgaccgacatcgcagcaaaatcaaccaaggacctccctacactgaccactcccctactgcccttgcccctttctgacgaccatgcccgcggtagcgagcgacctgccgcagaagcagatgactccgacgagccattgtcggttccctcggccacgattccgcccgatgaagccacagtagcatccggtgagcacccgcaaatccacccagctgagccacgaattcgaccagcgacccacgattga

SEQ ID NO: 3876 - DNA, 219 bp, Zea mays
  Peptide Sequence Number=SeqID_45655
atgcagggttcttgcctgaccgacatcgcagcaaaatcaaccaaggacctccctacactgaccactcccctactgcccttgcccctttctgacgaccatgcccgcggtggcgagcggcctgccgcagaagcagatgactccgacgagccattgtcggttccctcggccacgattccgccagacgaagccacggtaacatccgatcttgtatgggtctag

SEQ ID NO: 3877 - DNA, 507 bp, Zea mays
  Peptide Sequence Number=SeqID_45656
atgctctccggaagagcgtggcggggagaggggcggagaacggtctggactctgctgctgctactgcggactgcgcccatagcccacttctccgtgcgactgagaacttctctgcgccaactcggtagtcgcctagtcggcaagacgccaagaccagacgctcaacgacgcggccctccttcagttccaacttccaaccctaatccattcgacttcgacagaccggcggcgctccccactccccacttccccagttccccgctccggcgctccccagtccccacgcggccaaccgccaaccagtgcgcaaggcctcaatccggcggcggcggcagcggcagctctgcggcctgcgggctacgagcggtcgagctgagggccacgagcggtcgagctgagggccacgagcgcacgcctgcgggctactgtggcagcaagactgcaagaggaggcggcgactgtgtctgtgcgactgtgcggacagtgcggtggccggtgggctactga

SEQ ID NO: 3878 - DNA, 1458 bp, Zea mays
  Peptide Sequence Number=SeqID_45657
atgcctggcataccgagggatgtcgccgagcactcgctggatatccgagctggagcccgacccgtgaagcagcctctgcgccgattcgacgaagaaaagcgcagagccataggcgaggagatccacaagctgatggctacagggttcatcaaagtggtattccatcccgaatggcttgccaaccctgtgcttgtgagaaagaaaggagggaaatggaggatgtgtgtagactacaccggtctaaacaaagcatgtccgaaggttccctaccctctgcctcgcatcgaccaaatcgtggattccactgctgggtgcgaaaccctgtcttttgtcgatgcctactcagggtatcaccaaatcaggatgaaagagtccgaccagctcgcgacttctttcatcacaccctttggcatgtactgctacattactatgccattcggtttgaggaatgcaggtgcaacataccaaaggtgcatgaaccacgtgttcggagaacatattggccaaacggtcgaggcttacatctatgacatcatagtcaagacgaggaaagcctctgacctcctctccgaccttgaaacgacattccggtgtctcaaggcgaaaggagtaaaactcaatcccgagaagtgtgtcttcggagtcccccgaggcatgctcctggggttcatcgtctccgagcaaggcatcgaggccaacccggagaaaatcgcggtcatcaccaacattgggcccatcaaggacttgaaaggggtacagagggttatgggatgccttgcggctctgagccgtttcatctcgcgcctcggcgaaagaggcctacctctgtaccgcctcttgaggaagaccgagcacttcacttggacctccgaggccgaggaagccctcgggaacctaaaggcgctccttacaagcgcgcccatcttggtgccccccgctgccggagaagccctcttgatctacgtcgccactaccactcaggtggtcagcaccacgatcgtggtcgagagacgagaagaggggcatgcattgcccgtccagaggccggtctacttcatcagtgaagtactgtccgagaccaaaatctgctacccgcaaatccagaagctactgtacacggtaattctgacgcgacgaaagttgcgacactacttcgagtctcatccggtgactgtggtgtcatccttcctcctgggagagatcatccagtgccgagaggcctcgggtaggattgcaaagtgggcggtggagatcatgggcgagacaatctcgttcgcccctcagaaggccatcaagtccgaagtcttggcggacttcatggctgaatgggtcgacacccggcttctagcagctccgatccaaccgaaactctggaccatgtttttcgacgggtcgttgatgaaaacaggagcgggcgcgggcctgctcttcatctcacccctcgagaagcacctctga

SEQ ID NO: 3879 - DNA, 504 bp, Zea mays
  Peptide Sequence Number=SeqID_45658
atgtctggagccggcgaggaggataagaagcccgcggagggcggcgcccacatcaaccttaaggtcaagggacaggttgctgtcgaattgggattggtaggtagcgatgtgtcggtgctgatagatggttctttgcgagcgaatgttttgtcgattgcgcctggaccgacgtcaagtctgctttacgccatacaggaagaattaccatgcacttttcaccatacttatcacatttttctcaactacgactcggacaacacctccatcagacagactcgggatggcaatgaggtgttctttcgcataaagaggtccacccagctgaagaagctgatgaacgcctattgcgaccgccagtctgtggacatgaatgccattgcattcctgtttgatggccgcaggcttcgcggcgagcagacccctgatgagctggagatggaggacggcgacgagatcgacgccatgcttcaccagaccggaggcagcgttcctagcaccacctaa

SEQ ID NO: 3880 - DNA, 369 bp, Zea mays
  Peptide Sequence Number=SeqID_45659
atgggcaagaacaacaagcgcaagcgtgagccaactcctccatcggaggagtttggtgactcggagtactcagaggaggagttctcctctgagtctgaggggcctccgggtcccatccccctgcgtgagtcgtctgacgactcagacgactcccaggggctcgcagcggaggtctggacgtatatccgggccgtcgagcgctccgggctcgagggctcggatgagtcgtatgacggtagcggcaagggcggtggcggcggcagcaaggacggtgacggcagcgacagcaggggcagcaaccggggcggcagcagcaggggcaacaccaggggcggcagcggcggcggcagcagcagggccagtggctag

SEQ ID NO: 3881 - DNA, 210 bp, Zea mays
  Peptide Sequence Number=SeqID_45660
atggctccctgcggcgccaacggctccctgcggtgcattaaatgcgcgcgcagcgcgcgcagaagtcagaatcgcccataccggtgcaccggacatcaaacagtacatgtccggtgtgcaccgggacacccaggcgggcccacaagtcaaaagctccaacggtcggaatccaacggcaatggtgacgtggcagaggcaccggactgtccg

SEQ ID NO: 3882 - DNA, 261 bp, Zea mays
  Peptide Sequence Number=SeqID_45661
atggacatgtctcgaatggagacgttgtatcatgctgagaaggagaagaccgaagcacttatcctggagctagctggtcgtgtggcttcatcatctaatcagcaaataaggaaactccagtggaggtgtaaggtctcccatcaaatctccagtcagctcaccaacacaaaagggtgccgcaatcacaccgttgttgtgcaaaacaaacaatttgccactgattctcacccaagaggaccaggatatgctaaggggtgttaa

SEQ ID NO: 3883 - DNA, 720 bp, Zea mays
  Peptide Sequence Number=SeqID_45662
atggcggggcggtctcctcccccttcttccggagctgctggccaaggcttcacctcaaatagcgtacgccggggtcttcgccactcatccctatctcctctccgcttcgtgcgctggcggttgatggacggactccgaagacctcggtcgcaacaaactccgaccgccgcgcaacggccgtggatcccggggctgcccgcctgctactcctcgggtataagaaccgcagcctcgcgcccttgccctactctgctcccccttcgactcttccccataaacgccgaacagcagtgccggtattgcaagcaggactcagagagagagagtgtgagaaagctcccgccgccgataggattcgcgcccatggctgcatctcctcgtatgttggcacctgtgggatcaccagggaccttggtaattgggcaatggtgctgccaatctcggggatcaccatggccgtatgaattactcaccgtcgcagtgctccgccgtatgcccgcccgctgccgtgaacgggaagcttcgcatcaccacttcgggtatggtcacctctcgcgcattcgtcgtctattgattcaccggttagcaccgctctgcgttggatttgcccgtcggtggggccgaacagccatcgccggcatgcccgccgccgtgagggccaacggcgccgttctgctcgccgtcgtgcgaggacatggcatggtggccgttggatactaa

SEQ ID NO: 3884 - DNA, 357 bp, Zea mays
  Peptide Sequence Number=SeqID_45663
atggctgcatctcctcgtatgttggcacctgtgggatcaccagggaccttggtaattgggcaatggcgctgccaatctcggggatcaccatggccgtatgaattactcaccgtcgcagtgctccgccgtatgcccgcccgctgccgtgaacgggaagcttcgcatcaccacttcgggtatggtcacctctcgcgcattcgtcgtctattgattcaccggttagcaccgctctgcgttggatttgcccgtcggtggggccgaacagccatcgccggcatgcccgccgctgtgagggccaacgacgccgttctgctcgccgtcgtgcgaggacatggcatggtggccgttggatactaa

SEQ ID NO: 3885 - DNA, 1971 bp, Zea mays
  Peptide Sequence Number=SeqID_45664
atggacttctcggcgccctcattctcgctgggttttgactgggacgacgatgaccccccggccagcagcgaccggcgcgagcagccgcgcgggtacggggcccccgacgcgccgtcgttctcgttagggatcgacgacgacgacgacgtggaggagccccgcatcccggcgagaggccgccagaatgagcaggcgcgtgagttcacggcgcccgatccgccgtcgttctccctgggcttcgacgacgaacacggcgatggtgacatactctctgccgaccgttgccgcgagcagtcgcagccccaggtagcgcccggatctccttcaaatggcactgcagatgatgatgatgataaggaggatggcttcgtcgtcgctggtggcaagcggccggttcgagtggagcgtgacacgctatacccagatcccctgccgacgccagcggagaccaatcggttcaagcggctgcggaagggctctgcgacagcccatccggcgcaaactccccaggtgccgcaccgtgaggcgcctgacgctccgtcttcctcccttagcatcagcgacgacgacttcctaactggcggccagcatcacgagcgactgaagccacaagcctctcctcggatcccctcatcgctcagtatcgaagacgaggacgacgacttcttcctcgctggtgaccgacagccagagccaacactgcctcaagtgactcaactcaagcggctgcggaagggccctgtcccgccacatctggcgccatcaccgcctcctcccaaggtgccaggacagcccacgacggaagcctctccagtaatgactgaagatgcagcacgaggggcggttgggagttgggaagacgagatcgaggattggacaacagacgaggaccgaccagttcgagatgtgccaccatctgttggtagctgcagcacttcaagcaactcaaagttctctctgcttaaccgtggtgtccttatgacccagtcaggaactaaagcgagtacatcaaaatttacacaaacaccaaatacatctgcttcaatatctttggaagaaagctgcacaaagaaattacttcctaagataacagtaagcccgatgaggaaaatttatttgcttgattctgacactgatgctgacgatgactacagtcaaaataaagcaaagagcatgcagcaaaacaggaagccccaaatgaacagtactgtacagaagagcggggctatgatgagtgacaattgggcaacacctgccttggatgagttctgcaaggaatacttcgaatctccaaaagatgcaggattttctcagccgaaagaaggaaacactcattacaaggcttcacaacctaagaactctgggcacttccagcaacaagcgtcttcaagtggaggtgaagtggatgatggtcctcctgctatgcaatatctgtaccaccctgacccaagggtgggtgatttgttccggaacaggctgcaacatttcgttcctattggggcaggaagtaccatagcaaatgagcaaaacagagcaaaaagtctaagaagttgcaggaggcaatccagctcgagtgcagctgctaccgatgactgggtaactcctgggagggtctcagttccaactgatgctagcaaaagaagggtgcatgccagtggaactcattctggctctggccattggtttactaatgacagtgggaggaaggtttacgtctcaaaaaatggacaagagttgactgggcgtgatgcctatcgacaatatcaaaagggtataaaaactgttgtgctggtggaaaggaaacatgtgtctctttcacagcatgctgccatgctgggtcaagggttgggacaggattatcccagtgttgtccccagttatccctcaaaattggagggacgagaggatgccagaggacgtccctatcctggttgtcccgcaaccaaacacacccttatatcaggaggctag

SEQ ID NO: 3886 - DNA, 579 bp, Zea mays
  Peptide Sequence Number=SeqID_45665
atggctactgtttatccttccaacggagccccgtattcgtcttcgcaaattgcgagctgctcgcgacgcttcccttttctgcgctttctctctcctccccctaaatccaaatcaaccatccggcacagtacggctgcctcgcctctctgcctctcttctgtctgcttcgccctctatctcgcgccgccgcaacgccgtcgttctccggtccggcagtcgcgccggcatgtggagcggggctcctcgcgtgacagaacggctggagctggagcgccaagcaactctcgatgggcacgtgcctcgagatctcgaagccggagtgaacagcggcggcgcacaaggtctgcatcctctgcgagttcgtcgtcttcctccgactacaggacggttgtttttcatctccctgagcacaacgatgcccagaagcgagcttgcagcaaatctcgccgcccagaagctgctgcgccgctcggaggtcgtcggctttcttgtcttggcgggaggcagcaaatcccgccgcccagaagttgcaaatacgagcgagaatacgaacagccgctggagaaaagaaatagatag

SEQ ID NO: 3887 - DNA, 447 bp, Zea mays
  Peptide Sequence Number=SeqID_45666
atggtgaagttcctcaagcccggcaaggccgttatcctcctccagggccggttcgccggccggaaggccgtgatcgtgcgcgttttcgaggagggcacccgtgatcgtccctacgggcactgcctcgtcgcgggcctcgccaagtaccccaagaaggtgatccgcaaggactccgccaagaagacggccaagaagtcccgcgtcaagtgcttcatcaagctcgtcaacttcacgcacctcatgcccacccgctacaccctcgacgtcgacttcaaggacgtcgcatcgggcgggcccgacgcgctctccacccgggacaagaaggtcgaagcctgcaaggccgccaaggcgcgcctcgaggagaggttcaagaccggcaagaacagcttggatggaccatttgaatttcctttgattccaaaaggaagagcagaattgtgtgactaa

SEQ ID NO: 3888 - DNA, 549 bp, Zea mays
  Peptide Sequence Number=SeqID_45667
atggaggtgccaatgaacaccacgcaatctggtcctcacttccctgtgcagcatcggtccctctcgttagacatcaagggaaataaaacagatattgttatcaataaatacgaagatacctttctggtgattgtgacccaaatcggctgcatgggaaccatactagctgccaagaaagatgaaagtgttttctccgacccaacctacaacgtgtctgttctttttgggaagagagatgagccactcctactagcttgcgcacgtcaacttattgagcacataaggttgaggctccatactgctttggcaaaggggcagagcagagcagagcagagcagagaggagggtgacagcgctggctgctggaggcaggctgcactgtctgctagcggcgcgctggaagagggatgtgggcgctgttggaggcagtggcagtggctcagcccggtcattggtgatttctctgggtctgaaagatcattctcagggaacgctgaaggatattactgtagctgtgatcgagaatcgcctttggtgatgattgaatag

SEQ ID NO: 3889 - DNA, 615 bp, Zea mays
  Peptide Sequence Number=SeqID_45668
atggagatggagcccattgccatctctacttatgtcttcccaatccggtcacaacctacaggcttgccggcatctgtccgattgtccggtcacaacctacagcgtcacagccgccgacacccagtcgcccaccgaggcaccgacccgaccccaaccttggagctgctgtgccccggcggtccgtctctggccagagctccgccaccgcccgccgatcagagctccgcctccgagacgacgcgcctccccccagtggctcaggccgcctgcccgcctggcaggacgccgcgccgagctctttcccggcagctgctcgcccgcgccgatcttttcttcggcaaccgcgcgcccgcgtcgagctcctccccgtccccggcagccgcgcgccagcgccgagctcctccccgcggatccgcctctgctcagtctgagctccggccagccgcgagctccgtcgaggcgtcgacgccgaggcccagctccgcccgtgagtgcctgtgccggattcagcaaacagaaatttgcaatagcaacaccttaattttggagcgggtttcaccaatccctacccccctaggttcaaaacaggatttcatggcttcgaaccagtattag

SEQ ID NO: 3890 - DNA, 1452 bp, Zea mays
  Peptide Sequence Number=SeqID_45669
atggacagcctggcacctgcagtagtctggatgggcgggctttgtagtcacagccccacccactgcagctacaaagctgctcaggtgtgccgccgagtgtatgtaaccgctttcctcgtgtggcccgtgtgcctcgcaggtcgctcggactcggaggccggcgagccgctcgtgctgggcgccgggatgcaggcggccggcaccagacggtttcccggatctcgccggcgccgcgtctcggcgagaaagggctgctacttctcaggggagtcgaagaaacactcagatgtgttctgtgatatctcagaattagatttctttccatatgctacagattcggatagcgaagaacttgaactgaaggagcagaaacctgttccgaaggctctgtcgggaggcgattcaagtggcaacagatcaaacgattgctacttcccaggccttcatgatgacctgtcacaagactgccttgcctgggcaagcagatcggaccacccttccatttcttgtctgaacaagagattcaatctgctaatgaacagcgggtatctgtacaagctgcgaaggaaatacggcatcgttgagcactgggtgtacctcgcttgtagcctgatgccctgggaagcatttgatccatcgcagagacggtggatgaggctcccgaggatgccatgcgacgagtgcttctcctgtgcagacaaggagtcactcgccgtcggaacacagcttcttgtcttcggccgtgaatacaccggcctcgctatttgggtgtacaacttactgactcgcagttggtccccgtgcgctccgatgaatctgccccgctgccttcttgcctcgggaagctcaggcgagatcgccattgtcgctggtgggtgtgataagaacggacaagtgctgagatctgttgagctgtacaactcagagactggccactgggagactgtcccaggcatgaacctgcccaggcggctcgcttcaggtttcttcatggacggcaagttttacgtcattgggggcgtatcgagccagagggactcgttgacctgtggagaggaatacagccttgagacaagaacctggagaagaatacttgacatgtaccctggtggaaccagcgcatcccaatcgcctccccttgttgccgttgtgaatagccagctctacgccgccgaccagtcgacgaacgtggtcaagaagtatgacaaggcaaataacgcctgggacgtagtgaagccactgcccgtcagagctgactcgtccaatggctggggcctagctttcaaggcctgtggcgataggttgctggtgatcggaggccatagaggacctcgtggcgaggtaatactgttgcattcctggtgccccgaaggcggggaagactgggaggttctgtcggtgaaggaacgcgcaggcgtcttcgtttacaactgtgcaataatggggtgctga

SEQ ID NO: 3891 - DNA, 1392 bp, Zea mays
  Peptide Sequence Number=SeqID_45670
atggcctgctgctttctgtttggaaagaaagcgaaacaaaccactgaaggcgatgaagatctacatagcgtcaaggtattctcttacagcgagttgagaaaggctacgcaggatttcagcggcgcgaataagattggcgagggcggtttcggttctgtcttcaggggagtgcttaaagatgggacagtggtggcggtgaaagttttatctgctacttcaaggcaaggcatccgcgagtttttgactgagcttacggcgatatccgacatcaagcatgagaatctggtcactctgatcggttgctgcgccgaaggatctcgcaggatccttgtctacaactacctcgagaacaacagccttgcgcagacattgctaggatccaggcacagcaacatccggttcaactggcacgcccgcgccagaatcgctgtcggcgttgcccgtgggctcgcgtttctccacgaggagatccgtccccccatcatccacagggacataaaggcgagcaacattcttctcgacaaggacctcacccccaagatctccgacttcgggctggcaaggctcctgccgcccaacgcgacccatgtcagcacccgagtggcaggaacattagggtacttggctcctgaatacgcgatccgaggccaagtgacgaagaagtccgatatctatagctatggggttcttcttttagagattgtaagtgggagatgcaacaccaacacgagattacctagcgaggaccagttcctccttgagaggacatgggcactctacgagcaaggacgtctagaggacatcgtggacatggacatcggcggcgaccgggacgtcgaggaggcgtgccggttcctgaagatcggcctgctgtgcacgcaagacgcgatggcgcgccgtcccaacatgaccaacgtcgtccggatgctctcgggggagaggaggatcagcgtagagaagatcactaggcccgccatgatctccgatttcgcggagctcaagatgatcaagataagctttgcacgacggttctcattgtcgaactactttggactgctgcaactcggtgattatttggatcagttcaccttacatcttttgggtttttgtcccacagaatacgtgaaggagaaccgcttagcttcgcgctgttacgtgatgagggagaaaaaaaagagagcacccagatttctagtacgtactaacgttgacagcacgctcatgctgccgatgtcggcaggaagaacagggacggtcaagtggctccgagttttcgcagagatgcgacaggcagttgaggaagagcgaagaaccgatcaaacctggaaatccccgcgcagcagtgcacgagatttcggacgacaaacgcgtcgccccgccgtcaccgggtag

SEQ ID NO: 3892 - DNA, 153 bp, Zea mays
  Peptide Sequence Number=SeqID_45671
atgtcgcagtatgggcttgaacctcaggagtatagccctgtcatcgacgggccgttttactgggaattagccactcatcagtgcactgctatcattggagcacttgcttcagcagcagcatatgggatggagaaggcatttcaagctagatag

SEQ ID NO: 3893 - DNA, 408 bp, Zea mays
  Peptide Sequence Number=SeqID_45672
atggcgtgcaagacgaagagcctgctgttggcgctcagcgtggcggcgctgctcgcggcgcggtcggagtcccacggcctgggggacttcacgagcgggagcgacgaggcgacgacgacgccggagatgcagaccttcttcaagccccaggccgccgcggcgctcccggaggccctcgacgcctccatgcccgccaagccggaggccacggcgctcccggccaccaccaccgccgccgccgcgacaacggccggcacggcgccgtcagccacgccgcgcaggtccgtgtccgtggccgccggcgtggcctgcggcgtggcggccgtggccgtggccggcatcgcggccgccgtggcgtacgtggtggtgcgcggcgcgcggcgcgggacggaggtgcagctcggttag

SEQ ID NO: 3894 - DNA, 1071 bp, Zea mays
  Peptide Sequence Number=SeqID_45673
atggcaaccgcaacggtgacttccccgtcggatcccttcacgttccacggccccgtcgctgcgctggcggttccggctcaggccgacgtcgacgagttcgagttccacgtcgtcccagccgccgcggtagcgctctcggctgccgacgagctcttctccggcgggaagctcgtgcccttacgccgacccgcgccagcgtctgctccttgctcccctccgccgccgcgcctggaggtggagcccgcgtctgaaccgacgtcccctcgcgccccgcgatgcgctgggcgccggtggcgcgacctcctcctcctcctcgtgtccagctacaggaggaaacccaaggctgccagcggcggcgacgccagcaggtgcgcagcggaccggtgtctgaaggcgcggcgacgggcgacgcatttccggccgctcctctcgcgggactcctcgtcgtcctcgtcggcgtcctctgtcgactcgggcaagagcgcgcgccgcccgccgccgtcgtgttccccgctgcggacgcggtcggcgcccgtggcgaacctcctccacctcatgtccaggacaagatctacggggggcgacaaggtcggcgccgccgcggacgcgccgaagcggcaggaaccggcgggcgcgcgcctgctcccgacccgtgcctcgtcgtcgtcctcgtcctcggcgggctcttgcaggaaccctcgcgcgggggcgggggcggggccgtggcccccgcagcgcgggccctctcgcccgtcccggcccgcggcggcggcggagagcccgcgcgtgagcgcgtccgggcgcgtggtgttccgcgggctggagcgctgcgcgagcacgccggcgtcggcgggcgtcgggccgcgacggccgaggggcatggagcggtcctactcggccaacgtgcgcgtggatccggtgatcagcgtcttcggcttcgggcacctgttcatgccgtcgtcgccggccaaggagaggaaggccgacagggagagggacgtcgtcggtggccgcaggaacaacaggccggagaagctggccatggtgctcatgagagatccacaggattag

SEQ ID NO: 3895 - DNA, 1128 bp, Zea mays
  Peptide Sequence Number=SeqID_45674
atgcagagggccaaaggtaaagctggtgatcgagcaagttttgtcaagagcgagctcatggaggatggcagcagtgctccaagacgggctactccccccacccgcaggagcagatctgccgacttccacaacttttcagaaaggaggagaagggacaggatcaacgagaagctgagagcgttgcaggagcttcttccaaactgcaccaagaccgacaaagtttccatgctagatgaagcgatcgactacctaaaatccctccagctacagcttcagatgctggtcatggggaaggggggaggaatggcaccggtggttcctcctgagctgcagcagtacatgcactacatcacggccgaccccgcccaccagatgatgcctccgccgctgcggccctccgccgggcagctgcagcccgccgccggccggcagtttcagataacccaagcagcagcagcagcagccaacaacgacaacgacccccagcgacgacgacagtccaacgtcgagtcggacttcttgagccagatgcagaacctgcacccctccgatcagccgcctcatcatcacaacttcctcaggccgccgagattgcagctctttacgccgcagtatgctactgcatgtgtttggcttctcttgatagtcagatctagtggcatcgctagtttaaatccagtgcgatcacaaatgaagaacagtattattgttgcagttccagcatgcgatcataaagtattgccatacagccaaactgtcatcctctccaggcgggtgtggtgtggtgggggtggggagttttcatggacattcttctccccaccaatgagctattgccggcaatttgagagacacatctgccctctgggactgatgagaattcacgtaataatcacgcttgacgtgatggacacttttgtctgcatccaatccaacgagatgaataatatatctctcccccactgcaccacaacttggccgaatctttcagcttccattcttctgcgtaggcagacgcaggcatcatgttgcggcactgaaaatgaagagtcaaaaaagcaggactacttgtgccacccactcttcttcaagcccataccaccgtcaggctcaggcagcatgggctag

SEQ ID NO: 3896 - DNA, 447 bp, Zea mays
  Peptide Sequence Number=SeqID_45675
atgcacgcggtggcactgcacgcggattcccagcgcacggatctgacggacgggctagcaggacagttggtggatgagtcatgcatgaagcccaatgcaaaggccggagccgcagccgccggtggtggtcacacactcacacgcaacgcagccgcagccgcagccgcaggcattcaggcaccggcacgcacacatgcatgcatgcgccagggaggccaccgtcagatgatcagaccacgccacctttgcacgagacctgggctgggcgctctagctaggtctagccagtcctatgatctaggccctacgttgtttatcgctgccgcgctgcatcttggttggggtaggaaagcagccagccagtgcgacatggcggtgactgcctcccttgttcgcttcctgcgcctgcctcgccatgccgccggcgtcggcggcgtgcatgcgtag

SEQ ID NO: 3897 - DNA, 1356 bp, Zea mays
  Peptide Sequence Number=SeqID_45676
atgtcgttcgcggccgtcctcgcgcaggttgtgaatacaaagaatcgttcaggcgaaagattacagcctgcacttctttccaagtttgaaactgagcctagactttggatgcagatctgtacatcggcagtgaaggaatcattgagaaatatatatggtaacaagttagacagttttatgagaaactttgagaaatcattcagcagcacattgacaacgcttcatcttgttaatgagatgcctgtctatggacaaggtccagttcctcaatgttcttctaagcatgaagactctgaagcttcaagcaagttgagcactggtggtacacaaaatctaacgcgtgaaatcaagcaggagcgtttgaattcagtggaaagtcagcttgttctttatgctggcggctatcagcagatgactcgccgcgctcatagcttatcttctcctgaagctgatcagcgcatccttaatgcatttgagagatctttgaaagaacaaactcggtcaaatgagctcaaggaatttgagataagccttagcatgagaaagttgaagctaaaacagtctcaactagaacttaactcctattcacacatgttagacaagattaagttatccttgggatttcagaaagcttccttccaagtggaaaaattcaagactcagatgcaggacacgaggcatgcacaaataatgaggacactcatagattttcttgttagtgcagtgattattatgtcagtatgctttgggtatggaacttatacttattcataccaaaggataactgatattacagcagcatgttcagccacttcaaagggatctaaatcatggtggatgccaaattcagtgtcaaacttcaatactgggttgctcttcataagatgtcatgtaatagctgcaacacggatgttctttggtatagtaatgattttggcagttgtttggttagcgttccagcgctctgcggtgtctgtatcaagtatgccagtaacttttaacatcattctgttgggagttatttgtggctacgctggaaggttctgtaccaacacacttggtggtgatgggaacatgtggcttatatgctgggaggtactttgttccgtccatttgattggaaattgttatccatcggtcttgtaccgtgttctccatggtcctatatctgtatctcatagcaaggagtctgtctggttcccgtattggattcgccgttggatgttttatgctgtgctggggttttttatcccagccttgaatggcttactgccatttgcttctctttctgactggaataaccatttcactaaggagctaaaatccatcttcattgatgagagaatcgaagcctga

SEQ ID NO: 3898 - DNA, 168 bp, Zea mays
  Peptide Sequence Number=SeqID_45677
atggaggagctgctggcccggatcatggcacacacgacgtggccaggcggtggtgacgccgacagacgacgacgctcggacaagagcgagagcaacgagggagaatctgagtatcattacgattacgtgtggagaaagataaatttgttcatagggctcaggatctag

SEQ ID NO: 3899 - DNA, 696 bp, Zea mays
  Peptide Sequence Number=SeqID_45678
atggatttcgacggcgccattggcgatcagggtgagttgtgggaatggcaaagtcaggagtattgtatgcagaaagattcgttagctggtttgctccacgtcattgcatcactatttctgctcgaaatatatatccacgtagagactttgtgggccgaagcaagcaacaatgtgggtggtgattggagcatatttgaggagcaaacaccaattaaacactgtacagacttcgaatttcagttctgtgatgtaggagatatcatcgtcaaggagtttgaagaaaggaaggaaactttacaggcaaaacgcacacgcatgctgcagttctgtccagaaaatcttgagatgacatgttcagtgactgaagatgggctcttggaaagtcttcaggagatgatttttcagctggcaaaatttattatcggagcaaagaaggcgagaccatccgtgtccctcccttttgtgctgatcaaaccatacagcatccatggcgacatcaccctgaacgacatcaacgagaagatccacgccccttcgccgcataagatcaggcacaggagcgacgaggagcccgacccgctccaggcctcagcagcgatctcagggaaacctgtggcccacaagacgaagatccacacggagggggggaagggggaaggggagcatcacgatcaccagaaccaaaggctaggctga

SEQ ID NO: 3900 - DNA, 447 bp, Zea mays
  Peptide Sequence Number=SeqID_45679
atgacgactcgttcaggattttttgttgagcacttggtgaatatcgcacagggctttgccgtcttctaccatcgcaaccccaaaaccacccaaccagccccgtggtcagaactgcggtgtcggccactagttacctcggcaaagccatctaaggtctttgaaacgaggataggtgcatgtggccctgataacatgggaggttctgccacagaagaggcaaagacaatgtacaagaacctccacaacttcatggaaatggccgctgtgcagcaagccaagatcgatccgcagttcccccttaggatcaagagctatgcacgcaaacgaccatgtcttggagtagggagcacaaccctcctggtccacaaggacgtgtgttccatgaaggaccgcctcgtagacatctgcgatgcccgacgcatcctcaacaataggcgtcaggagtag

SEQ ID NO: 3901 - DNA, 156 bp, Zea mays
  Peptide Sequence Number=SeqID_45680
atgacgaacgagccacaattgaaggaattggcgaaggcgttgatggacgcaggctcagctgggacgagaccatcaggcaccggcttggtagggcttgcaactactgtttcgtcatgtttctccttgggaagaggtagtgtggatccattgaagtag

SEQ ID NO: 3902 - DNA, 2649 bp, Zea mays
  Peptide Sequence Number=SeqID_45681
atgacgctgcgactgcggggggatttcaacccgtcggcttctaccttcggcctctactccactctcatcgtgaatttagcacaaaattacttaaccgggcctttgccatctttcctcgggaatttgactgctatgcagtacatgagtttgggcatcaatgcattgtctggatctgttccaaaggagcttgggaaccttgtgaatcttgtatctctaggcattggctcgaactacttaaatggttcccttccttcggagttgggaaacctggcaaaacttgagcaattgtatattgacagtgccggcctaagtggtcccctaccgtcatcgttttctagactaacaagaatgaagacactgtgggcatcagataatgattttactggggaaataccagattatattgggagctggactaatttaacagaactgcggtttcaaggcaattcatttcaaggtccacttccagccactctttctaatctcgtccaactaacaagcttaattttgaggaattgcaggatatctgatagcctggcatcagtgaacttttcacagtttgcaaagttaaacttattggatttgagttttaacaatatcacaggccaagttccagaagcccttgtgaaattgaattcactcagcttcttagatttttcttacaaccagctgtcaggcaactttccttcttggactactcagaacaatttgcaacttgtattaccttcagggctgtcgtgtcttcagagagacacaccctgttttcttggctctccacaatctgcctctcttgctgtggactgtgggagcagtagatctatatctgggtatcaacctgatgctgccagtcttggtgctgcatcctattatgttacaggagcacaaacgtggggtgttagcaatgtaggcaagttcatggaagcatcaaatggaagttacataatttacagcttacaccaatttcagaacactctagattcagaactattccagacagcaaggatgtcgccatcatctttgagatactacggtattggactcgagaatggaaactacacagtcacacttcaatttgcagagtttgactttgaagattcacaaacttggaagagtgttgggagaagggttttcgatatctatctccagggcgagcgtaaggagaagaactttgacataaggaaggcatcaggggggaaatcttacactgctgtcgagaagcagtatattgttcctgtcactagaaactttcttgagattcatcttttctgggctggcaagggcacttgttgcattcctgctcaaggctactacgggcctgcaatctcagctttgagtgcaactccaacagttttaggagtactagcacttgctggaatctgtatgtggaggcagaaaaggagaaaactattattggagcaacaagagctttacagtattgttggaagacccaatgtatttgtttatggtgagctaaggaccgctactgaaaattttagttccaataaccttcttggtgaaggaggatatgggtcagtttataagggtaaattagctgatggaagggtggtggctgtaaaacagttatctgaaacatctcatcagggaaaacagcaatttgcagccgaaatagaaactatttctcgagtgcaacaccgtaatcttgtgaagttgtatggttgctgtcttgaaggaaataaaccactgttagtttatgagtacctagagaatggaagccttgataaagcattgtttggaaacgggaaactgaacctagactggccaacacgctttgagatatgcttaggcattgcaagaggcctcgcttatctccatgaagagtctagcatccgtgttgtgcatagggacataaaggctagcaatgtcttgcttgatgcaaatctcaaccctaagatctcggatttcgggctcgccaaactttacgatgacaagaagactcatgtcagcaccaaagttgcgggtacatttggttatcttgcacccgagtacgccatgaggggtcatatgaccgagaaagttgatgtgtttgcatttggagtggtcatattggagactctagctggaaggccaaactttgacaatacgcttgatgaagacaaggtttacattttagaatgggtctggcaactgtacgaagaaaaccaccctctggacatgctcgacccgaagctcgcagaattcaacagcgacgaggtgctccgtgccatccacgtggccctcctctgcacccagggctcgccgcaccagcgcccgtccatgtcacgggccgtgtcgattctggcgggagacgtggaggtgggccaggtggcgaacaaacccagctacatcaccgagtggcagatcaagggcggcaacaccagcagcttcatgagcagcaacgtcagtgggcagtcgggcgtggcgccgaggtcggcctcgcacgcctcgtcgcagttcctgggctctgtcatcgaagaaggccgttggaatttgtatgcaaatgatgatattggatggttaagtctatttgtaattttggatgttttgagtcgcattcgcaaccgccggggctcagcaagtatcaaccaagaggacagatccaaccgaaggagggagaggagaaagggcgaaaatataacaacgcgccagtga

SEQ ID NO: 3903 - DNA, 861 bp, Zea mays
  Peptide Sequence Number=SeqID_45682
atggtgtcactgagctccaaacaacattttgcttctgagaaatcagatgatctggtatcagctacgccatgcaaaaaatcatggaccctgatatatgcatatctgtttacctgctcgcctccgccaactccacaaaggcatcgacggccttggccacatagatcttggggttggccaccatcaccgagggggctgttccaccgcggcgccaccaggggcggcggcgtaggcgtgcccaagttcaagtccgtgcagccgcccagcctgcccatctcgccgccgccgatgtcgccctcctcctacttctccatcccgcccgggctcagccccgccgagctgctggactcgcccgtcccgctccactcttcctcgaacttcttcgcgtcgcccaccaccggcgccatcccggcgcagaggttcgactggaagcaggccgccgacctgatcgcgtctcagtctcagcaagacgacagcaagacgacagccgagctgcggtcggcggcgccttcaacgacttctccttccacgcgcccaccatgcccgcgcagaccacgttgttcccttccttcaaggagcagcagcaacagcaagtcgaagcagcgaccatgggtgggcgcaacggggaggggagctcagatcggcggcgatctcggtgcggtggttgaggggaggcgcgggcgcggagggggcatgggtgggcgcaacggggaggggaggggcgaggactatcggcgttggggcggacgcatcgggagtgggggtgggcgcggcgggggttgtgggcgcggaggggaactgactcggagaaggcggagaagtggaggccgtgatgagggatgccgcgggagtggagctgactga

SEQ ID NO: 3904 - DNA, 1251 bp, Zea mays
  Peptide Sequence Number=SeqID_45683
atgtgggaatctatcaggaattcagctaattcaatgcgggctacttgccacaaaggaaatggttatgagatgaaacattcaggccataaagtttgcgattgggattcatcatcgaagtctgatcggtctcaccaagaagcatcagcagcaagtgaaagcagtccaaatgaacacacatcgactcaatcagacaatgatgaagatcatgggaaagataatcaggacacaatgaagccagtattgtccttggggaaggaaggctctgcctttttggccccaaaattacattacagcccatcttttgcttgtattccttatactgttgatgcttattatagtggggttggggtcttgacaggatatgctccacatgccattgtccatccccagcaaaatgatacaacgaacactccgggtatgttacctgtggaacctgcagaagaaccaatatatgttaatgcaaaacaataccatgcaatccttaggaggaggcaaacacgtgctaaattggaggcccaaaacaagatggtgaaaaatcggaaggctgcaaaggagggcgagcctttttgggatagcccttggggccgtggaagaccgggatggcatattgaatgcagcgcaatgagtgctcactatttaggacatgtattcgatattcatggtggggggaaagatttgatttttcctcatcatgagaatgagcttgcacaaagccaagctgcttatcctgagagtgaggtgaagtgctggatgcataatggctttgttaacaaggatgataaaaaaatggcaaaatcagataataacttttcacgattagagatatcagatgtgaaccattctgatcaagcacttgagattgcatctgatcgtgtctattacatttatcagatcctgaatacttcctttgtcaaagctttcacttgtctgaaggaagacgtcggccttctgcttctccatcaccatcgttatcatgcaacctgctggaatgccacagcgggacaggagcatggggatgagcaggcgcaagatgatagcaagtggcgccggatcccgacgttcgacgactggaacctgcgggacgacatgcccgtcacccaatacttgcaagcagggacttcttcatcattgtgccgccgacagagaaggacgacgacgaggatctgttcaaggtgcccctgtgttccctgccaagccctacaactacaagaagttctaggagctaactcaggcttacgaggtcctcagtga

SEQ ID NO: 3905 - DNA, 1545 bp, Zea mays
  Peptide Sequence Number=SeqID_45684
atggctggtggcgtgggtgcggatatgcggcggtcgtgcggatatgggtgcgaagaaggcacacagccagccgccgccgccgattattcatcttcctcacagcgccggcgctacatcttccgctacctcggcacaggcgacggcgggggcgctcaggctcgggctcgcgctcggagcgacggcgtcagcggcttccccctccgcctcttgccagtcgcctcgcgcccttgcctccggtcctccgcacaccagccggtgaccctgtgtgcgtgcccccctctctctctcctcccgcctccggtggatcgtcaaacggagccaggcctcggcgtctgcgccgcgcgcggcctgagggcagccggggggggggggggggggttcagcagccgctgctccagcaaggcggtcgcggggctttgggagcgcttatgccccaaagcgaagatcatgtcgagagccttagcgcgtcacccggtacctcctttcctgaaacttcgttccacggtttgcgacgacggctactggatgggcagattggaccacaaggactggctcgctccaaacgaggtgctcaaagtatttgtgaacatcagggacactagcctgataaacagcgtattcaagaaggcatgcagccggagagactacaagcccagcgaggcgctctacagcttgatgatcgacaggctggcctgcgccaggaggttcagtgatgtggaggagttgctgtccaaggcaagaaccgaaaagttgaggttttcagacgagttcttctacaggctgatcaagatgtacggcaacgtggcagaacatcctcagaaagccatggacaccctctttgcaatgcctgggtataattgttggccttctacaaagacattcaattacgtccttcacatgcttgtgtgcaagcggcagtacgaggttgttcatgaggtctactcgagcgcgcccaggcttggggtgacgttggacacatgttctttcaatatccttgtcaagggtttgtgccagtacggtaaatttgatgaggctatctccttgctgcatgagatgccgaagcaagggtgtcagcctaacgcgacaacctactcgaccttcatgcatttcctctgtcagcgcagtcaggttgataaagcatttgagctgtttgagagaatgcggaagcaggatattgctgcagatacagttgtgtacaatattttgatctctggtctctgcagggacgaaagagtgaccgaggcattcgacctgttcaagtcaatgacttctgaagggtgctgtcctaattcagggacatatcaggtacttcttgatggtctaatcagtttaggaaaactttttgaagccaaaagccttgtttgcactatgagtacagagggtgtgaggccgagcttccaatcatacaagctactgattgatggcctctgtagtgatgactgcgtgggtgatgcacatcttgtcttgaagcaaatggtgggccaaggttttgttccccggatgggcacttggacaaaacttctcacatccatgttcaagttttag

SEQ ID NO: 3906 - DNA, 246 bp, Zea mays
  Peptide Sequence Number=SeqID_45685
atgtgggtcttctccaacagcagaggaagagctcttgcagcaaccaagacacttgttgatgtggtggtcctcctcctaccaccactagagagattcagaggcagggtgagggggggagacgagttcttgtcggtttcattcttggccgccgacttcacatgccaacaaccccaaggagcagaagccaggctaggaccactaggccttggatcttgtcagcaaagaggtggtcatctcgaccactga

SEQ ID NO: 3907 - DNA, 201 bp, Zea mays
  Peptide Sequence Number=SeqID_45686
atggctatgcgatgtagcttcaaggccatttggttttacttatacatgacaatatatcagttcggtcagacctttaacattggcaaattcttttcttataatgtaattaggcttgcacggaagctaccaacaggtgatctgcaggccatcaagaaatctgacgatggcgaggaatccttggacgaggatgacctgacttaa

SEQ ID NO: 3908 - DNA, 576 bp, Zea mays
  Peptide Sequence Number=SeqID_45687
atggcgggctcttccgaccccgacaagctcatgagcaaagccgacaaactaaaggataatgagaaagcaaaagatgcttttgagaaggcctcaaaaggacaggaaatgatctcctcaccatgggacgctgctaagcatatggaatctgctgctgctttagcaaaggagcttgggcgctggaatgaagtatctgatttctatcacagagcttcagaattataccgtgaatgtggaaggccacaacctgcatctgatgctctagcaaagggtgccagtgcattggaggagaaatctccagaagaagctatcaaaatgtatgatgaggcttgttcagttctagaagaagatgggaaggaacagatggcttttgacttgtaccgtgccgcagcagctttgtatatcaagatggagaaatattcagatgccgctgctttgtttttaagacttggttcagctgctgataagtgcaatgccatcaatagccaatgcaaggcctatctgagtgcgatcatcatctatctttacacacatgattttcagcaagctcaaaaatgctacaatgactgctcagagtaa

SEQ ID NO: 3909 - DNA, 522 bp, Zea mays
  Peptide Sequence Number=SeqID_45688
atggcgggcgagaggagggagggcggagccgtggtgaagagttcagactccagcgccgtcttcttcgcggtcgccttttgcgctccatcccctgggctttccgtcacggcggccgcagccatggtggagatgcggcagcggaggaagccgctggtgctcgcctccacgcaggcgctcctcgactcgcttccgggggatcgcccgccgccaccgccgcagaagccggtgcgccttaaggccggcgtcctccgattcccctccggaggtggtggcgccgagttcggggagctcgcgtctttcgtcggcatccctgcccctgctctccgacggctcgcggtcgtcacgggtactcctgtgagtcctctagtttcagtcatttgtttcgaattggagagtcgtgctgggaaattcgatcggttaggcttcgtcgcgggaactctgcttggtgctttcaggaagagctttggtcgttctgtagaactagaaggatgtactggtttaagtttcactactcgtttgtga

SEQ ID NO: 3910 - DNA, 2766 bp, Zea mays
  Peptide Sequence Number=SeqID_45689
atggccttagcaagttcatctctgacacaattcaggtgcaacttttcgtgcttagatgctactgatctgcaggtgcttgtcaagaatactgacaataatgttgggaggattgtcaaagcagtattgtttggtaacccgtcccttgacaagtcctgctcagaacatactgaccaagtggtctctgcctctctctctggtcatgcaatgggcttcttaccttgtcgcacgttccctgctattggttttacatccatggatgaagatgttggttatgttagcccacttttggcattcaacttgggattgcatgtttcttgccttaaacttcttattcaaagagaagggcagcctttcaagttctgttctcgagctgaagagattgatgcaactgccagttctggaagtgatctttctcttcacttagaccttcttccatgccctcaagtgcctaaatatgcattgcatttacgagtttctgttgtgaggattcctgattgtggtgtgcttgcttctttaaagatatattcatcctttggaggaagtgagtaccaagacatggtagatcaagctttgaacgagtactttaagtttgataggttcctagcaagaggagatgtttttggtatacaaaacagttggaagtgtggctcaagctgctgcctggcatgcaataagcaggataataaactgaatccccgtaatatgatctactttaaggtgactggcatggaaccatcagatgaacctatacttcgtgttaattgcaatgaaacagcccttgtacttggtggagctgcttctgctgcaatccccccttattccttttttgcttcttctggatgtggaaagcgcacagtggttaggcatgttgctaaccatcttggtctgcatgtggtcgagtgtagctgtcatgatctgatgacatcatcagaaagtggggcacctgctgcacttgcaactgcctttaaagaagctcagaagtattctccttgtataatacttcttcgccactttgatgcaattgggaatgcatcctcaaacgaaggtccacagtctgagcaatctgggattgcatcgaacattgaatctgtcattaagcagtacattggacaacgttgggttgctaaggattcactgccaggaaaagatgtaaatgggagctcatacctcgtggagcctgaatgtgtaagctctcttcaaatcatactagttgcaactgcggacagttctgaaggaatgcaacagtcaattagaagatgcttccgctatgagatcgacatgaagactatgaatgaagaacagagaaacgaactgatatctgagacacttcaaggcattcctaaagttgctgatgagagtatttgtgacaagttcataaaagatttagcagcgcaaacgtcaggtttcatgcccagggacatacttgcattggtcgcagatgctggtgtgtcttttgcgcataaaattgcagcagggaaagatagcaaagcaatcagtaagcatacggaggtccttccagaaagctcttctgccactcaaaatgaggaacaccatttcagcaaagaagatattatgtcttccttggaacgagccaagaaacggaatcgtgctgcactgggcacacccaaagttcctaatgtcaaatgggaagatgttggtgggctagaggatgtgaaaaaggttattctagatactattcagttgcctctgatgtacaagcacctgttttcttctaaattgcgcaagcgatcaggtgtcctgctatatggacctccaggaacagggaagactttactcgcgaaagcagtagcaactgaatgctcattgaactttcttagcgtcaaaggtccagaactgataaacatgtatgttggagaatcagagaaaaatgttcgggatatttttgagaaggctaggtctgcacgcccatgtgtcattttctttgatgagcttgattcccttgctcctgcacgaggatcctcagcagattctggcggtgtcatggacagggttgtttcccaggaccttttcattattggggctaccaataggcctgaccttcttgattctgcccttcttcgccctggtcggttcgacaagcttctttatgtcggtgtaaatactgaggcatcatacagggaaaggatccttaaagcacagacacgcaagtataagctgcacaagaacgtttctctcttgtcagttgcgcagcgttgtccaccaaacttcactggtgctgatatttacgcgctgtgtgcggatgcatggtttcatgcagcaaagcgatcagttgaaacattcgaaatcgatccttcaagaagtaatgaagccagtgccgaagaagtcatcgtcgagatcgacgattttatcacggcagggactcagcatctacacatcctgttctacggtacggtacgaactgaactaaactacccccatgcatatgatgatacctttctggtgattgtgacacaaatcggctgcatgggaaccatactagctgccaagaaagatgaaagtgttttctccgacccaacctacaatgtgtctgttctttttgggaagagagatgagccactcctactagcttgcgcacgtcaacttattgagcacataaggaagtcttttagagaactattggagttgctcttagctgctggcagcgcctggtggagatgcagattgcggaggccaacggcgctctgggagctggaggctggtagcttgacttggaagatgatgggcctcacagtgatgggcctttga

SEQ ID NO: 3911 - DNA, 252 bp, Zea mays
  Peptide Sequence Number=SeqID_45690
atggcggcgcgggagttcgggtacggccagaagggcgtgctgcggatcccctgcgccgccgccgagctccgccgcgccgtcgccgccgacaggcaccggtggactggacgcgctaggcgatcgacagcgaggctctggttatatactggcgacacgtacgacgccgacagacaccgccacgtccaaaagttgatcaattcattactagctgttaggatttatgggcttggcccaattaagatattcaaataa

SEQ ID NO: 3912 - DNA, 1080 bp, Zea mays
  Peptide Sequence Number=SeqID_45691
atggaatcagagtatcagactattatgactatcagaatcagaggaagcaacactgggctctcgtcgctgccggatcaacgttgcgctgttgatggtctgatcaatgcagtgcagcagtccatgaccggctgggtacgactgtacgagacgaggcagcctagtcagtgtcgtcaggaactcatgtgcgactactggggcgcgcggtatgcaatgcttggcatcgccgcctggggccaccggcaccgccatcatgtccttgagaccttgacagcctccggttccccgccgttaggcgccccgccgcgccccgccgctgtctccatcggagctccctaccgactgccccgaaccatggcagccgcatcagcgacgcgccgcggcctctcctctctcctcctctccccttcctcccgcgcgctccgccgccgcctgggccccctcgccgccgcggccgcctcaccgcacgtcgccccgtggccccttctcgcgccgcgcggggccaggaccgcgtcgtccggcgggtccgggcactccccgctgaacgacccgtccccgaactggagcaaccggccgcccaaggagacgatccttctcgacggctgtgactacgagcactggctcatcgtcatggagttccccaccgaccccaagccgtcggaggaggagatggtcgcggcctacgtcaagaccctcgcggccgtcctcggaagtgaggaggaagcaaagaagaagatctactcagtgtgcacttcaacatacacaggatttggtgcattaatttcagaggagttatcatacaaagttaaaggattgccgggagttctatgggtgttacctgattcgtatctggatgttcctaacaaggactacggaggtgatctattcgtagatggtaaggtcatacacagacctcagttccgattcaatgagaggcagcagacgacgcgagattgcccaagtggagccgagggagacgatgcaaagaggcccttcgacgacgcagcaacagaggccgccatgtccacaggaggccgctacacagaatcaggagcagcactgaaaccatgctggcaggagtag

SEQ ID NO: 3913 - DNA, 195 bp, Zea mays
  Peptide Sequence Number=SeqID_45692
atggcgtcctgtagggaggactgggcgaccggcgatgacagcgcggggaggactgggaggggactagcggcggagggctgggcacacggtggagtgagaggagatctgggcggcacggtgacggcgaccgcgtccgaggggcggggtggcatcgtcgacgagcggcgggatggggccacgatggggcagaagtga

SEQ ID NO: 3914 - DNA, 363 bp, Zea mays
  Peptide Sequence Number=SeqID_45693
atggctaggttgtttatttgtcagactctgattgctgaattcttgtttcagagtgagctgctggctgccgagatcaattacatggccaaaagggagactgagcttcagaatgaccacatgaacctcaggaccaaggacccaagaacatgccctacaggccaccgaccagaagatcaacctgcaggacaccaagaacatgccctacaggccgctcaagtgccagtcctgctgcccaggattcttctgcccaggaccactaaattcttggcaattttaaatcgcctaatctatcgcacagcggcatccaagaacaataaagaacagggaatgagctactgggcttcagatctgatgatccattag

SEQ ID NO: 3915 - DNA, 1035 bp, Zea mays
  Peptide Sequence Number=SeqID_45694
ggtttggaatcgagatcgctggagtttggatcctctgaggtgagtttttcccctccccttccctattttctctctcctccccctccccttcttcttccccgcgcgaccctcctgcccgtgcgccttgcgccacccacggccgcgccctccccggacccacgctcccatccccgtcccgcgcccggagagccctcgcggccgcgccgcgactcgccctccccgcgcccggcctcgtgcccggccccggccccggccccggtcccgcgccctccacgtgccctccctgccccggcgagccgcgccccggcgagcctcgcccccggtggcctccccggacgcttggcgagcctctccccgcgccgcccctcggttgtgccttgctccccgccccggcgagcccccctcctcggcgagccccccctccaccggccctgcgcccgcggccccctgtgcgcccgcgcccggcaccagcggctcggcccctgcccgcacgccctcgccccgccgagcccgccctcgccgcggcctcaccctgccaagcccgccctcgccgcggcctcgccccgccaagcccactcccgccacgagcccctgctccccggccgtgccccggcggctacgccctcgctgcgcgccccggcggccgtgcccggccccgcgccctggtcgcccgccctcggccacgcccctgcccgcacccgtgccccggcgactcgcgtcccgcgtgcctgcatgagaacgatccggttgaagagcccgaggaactcgcaggagaagtccctgagcaacagctggttggtggaggcaaatatcagggctgaggatgaggctatcggacagttcgaggctcagggtgccattgaagattcttcttccgatgatgatgaggacctggggatcccgccaccgcctcatgttccacctcattcccatgatcacgaggccgacagttccaatgctgctcctgctgcccctccagctattgaccctgatgtagatgctattcttcaatctcttactcagcagcaggcctga

SEQ ID NO: 3916 - DNA, 132 bp, Zea mays
  Peptide Sequence Number=SeqID_45695
atggagggcgctgaaacggttgtcgccagtaaagaggagaatcgtcgcttgtcggggaccgtaattaggggtaccccaaggctcctaatctcagctggtaacccccatcagcacaaagctgcaaaggcctga

SEQ ID NO: 3917 - DNA, 159 bp, Zea mays
  Peptide Sequence Number=SeqID_45696
atggacgggagctcgcaagaatgggagggacaacgctgggagcgtggagaaggaatggagaacgttggggagtgccctggcgccgtttatatagatgggggaggcagagaagggtcagacaggaaggggcaatggcagagttcatatagagttgtttga

SEQ ID NO: 3918 - DNA, 381 bp, Zea mays
  Peptide Sequence Number=SeqID_45697
atgcgccatcatagccctggatcgagcggagccgaggacgaggatgggatctaccgctgttggtccacgcctgcgccgccatcgaattctcggggccgaggctggaagcttcgccgcgactatgggatggtgcccgtggccttctctaaaggggagaaccattgggtcgccggtgatttctcgctgaagacatcaaggcacgccttaccgtgggttgtcctcacctcgacaacccagctggttttagatcctaaggacttcatcgtgtaccggttcggcgctcggatgtttaaatccacatcatgcatcgctgatcctgcggtcatcaaaggatactggttcaccttggatcaggatctaatctgggcccttgatcattga

SEQ ID NO: 3919 - DNA, 567 bp, Zea mays
  Peptide Sequence Number=SeqID_45698
atggttccactagtggataagaggaagaaggttgaggctagggcgaaaggcccaacgagacgcacgaaggcctgggagaagtttactgaagagatggccaagacatgtgctgagtcgatggagatcatgactttgctcatcctgtgggaagcctctactcggatgttggaagtgaccaaggggaagtcttctaagaagaaaacgaaggctctattgtggctggtggaccctcgtcgcgatacaaaggctcttcgtattggcgcggttggaggatcgaagtccaaagctgcgaaggctgcagctgctgttgcgacgatgcctccgcctgcggcaccatatgcgtctgtggtgccaccttcacctagcaaggctagccaggacgaggtggcaaacgcagctgaagcgggcgcgggtggtaggacgctccctgacctttccggtgacgactacgtgctcgagggcgctgatgcaggcttggggtctagccagctggttatgacccaagctaggctgagggcttcggttgacccatgggcgcagttatgcgctgtcgttgacgagggttga

SEQ ID NO: 3920 - DNA, 507 bp, Zea mays
  Peptide Sequence Number=SeqID_45699
atggatcgagcggagccgaggacgaggatgggatctgccgttgtcagtccatgcctgcaccgccgtcgaattctcgaggccgaggctggaagcttcgccgcgactttgggatgctgcacgtggccatctccgaaggggagaaccatcgggtcgccggtgatttctcgccagagccatcaacgcatgccttaccgtgggtcgtcctcacctcgacaacctggctgcggtagttggggcagtaaatcgcgggccgcagcgggtgaagaccttgcgacggcgaggttccaccgtgggcagaaaacggtgccaccgggccacaatattttagatcctaaggacttcatcgtgtaccggttcggggctcggatgtttaaatccacaccgtgcatcgctgatcctgcggtcgtcaaaggataccggttcaccttggatcaggatctaatctgggcccttgatcatttaacggatggccccggttggcccataccctttgctgtggcaaattag

SEQ ID NO: 3921 - DNA, 1464 bp, Zea mays
  Peptide Sequence Number=SeqID_45700
atggagcagtggctggcgctgttccgccacctcctcacctcccccgccgccaacgccgccgccttctcctcttccccttcctctggagactgccccagcgcgcctccttcggccgccgcgctcctgcgcctccttctctcgccagcgcccacgctcccggcctccgaccccacggccgccatcctcttccagaccctacctcccttccttcagtcccaggcgctctccttcctcgtctcctctgctggcctcctcgatccgcacctcctccgtaccctcgcagcccgtgtcctctccgctccacatggcctgtatggactatgggtcctccgcggcgcccgtcatctgatcgacggattgcctgaagaggaaggcgtccctggtgttgcctccgaggagtttatcgatgggtttcacgatccgccaacgtggcttcaagaagcgggcgcgcgggcgcatccggtcttgccgtggctccctgttgattgccggagcttgatgggtagcgggtgcgggacccgtgctggtcgtggcggtgagtatggttcggacgggattgggttggagaacttggtgttggtgcaaaacgaggacgtggagatgcaggaggctggacgtgttcttcctcctcaagctcctccgcttgaggactcaatcatgcagagagtcgtggctctgcagaaggagattgtgacagtggaatctgtcttggcggcccggcgggtggcgaaggatttgcaggacctttgcgttgagtccaggaatgctgcaggagtgcttagcttagtacagccgtgggaagctgacgatgacactctgagggtcttgctttccaatttagtgcttgaggaagatggggtggatggaaaaggaccagcacttgttctgtgttctgttttcttaccacagttactggagcttcaaagaccagcttcatccgttctcctttccactgcattgggtctctgcaagcgccacccagctgcagcactggaagctgtactctttccactggttcttagaaagggcggcctaaatgttccccagtgtgatgtgttaacacgtattatcaaggaatgcatgcatccactgcaagttactgctttctgccataggctgctttcaggaaaggagcaagagaggaaaccaatctgtatgcctcagcatatggagaatatcggtactcatttggtgtggacggaatctctgtttgcactattttacaacattcttagtcaagatatttacttgacaccaagcaccgttaatgagctaatttctgtgattgatgaccgggcatcagagttcccgaggtcattgaaatttggcaactttctgctgtgcttcttatcaaagtgttggcatgaatgtaagcatcagagggttttacttgagagagctgccaagagaaccaacactttccttactaaagctatattggcgaaactgcgccctgccagttga

SEQ ID NO: 3922 - DNA, 828 bp, Zea mays
  Peptide Sequence Number=SeqID_45701
atggatgtgctgagcaggagcatcatatttcgtgagaatgacgaccttgatgactatttgctgcttatgattcgtgaatataggaggaggaaaaatgccccaagtaataggcatcgaggttcaatttttggccataaggtttacgacaggaacagagaggaaggtgctagaaaactacatcgggattactttgacgaaaacccaacataccccgagaagatttttcggcgccgctttcggatgagttcccgtcttttcaacaggattgctaaagctgttgaggagcatgaccactattttgttcagaaaaaaaatgctgctggtgtccgtgggttttcctgtcgacaaaaggtaacagcagcattacgacaactagcttatggtgtaccagcagattatgttgatgagtatgttcggataggtgaaagcactgctatagaaagtttgaggaaatttgttagggctattgttcatttgtttcgtaatgaatacctgagagcccccaatgtagatgatacaaccaggctacttaatattgctgaatgtcgtggatttcctggaccttgggacgtcggcacgacggcggaaggaagagttgccggtcgtcgtccaatcgctgccgcaccagacttcgacgaaggcgcaggacgcttcccggcaggcggaactccttcaggcatcgcgtacaaactgggcggctgtgctgagtatgacaaggggaacacggcgcagggtgaaatgaggagacgacggtggatcgggagcagcaagaactggcggtggtggatcgggagcagcaagaactggcggcggtggatcaggtactag

SEQ ID NO: 3923 - DNA, 297 bp, Zea mays
  Peptide Sequence Number=SeqID_45702
atggcggctcggcatctaaaccggacagtctgccagtggagaggagaggaggaagatgagtcacgccgtcagcccgtcacgggatttgggggcacgccatggagcagtggcgactggcgaccggcggtgggcggtggcggctggtgcttgactgcttgctgtgtgccgccgcctgctggttctgttctgcgagagagactgcgagcgacggaagtggaagacaggcagagaccgacggcgcctgctgggctgcttgctgccttgctccatgggccgcccatgagccataagttctga

SEQ ID NO: 3924 - DNA, 1161 bp, Zea mays
  Peptide Sequence Number=SeqID_45703
atgagcgcccttctctgctgtgataatgtcaacgccatctacctccgcatcaacccggttcagcaccagcccacgaaacatgttgaggtgaaggatttacactaccaacaaagttttgcttcgggtggcacagaggtaaaagtatggtttggaaaggttgaagatctgccagtttacttcttggaaccacaaaatggcatgttttgggttggatgtgtctatgggaagaatgatgagagtagatttggcttcttctgtcattctgctctggagtttctgctccaaaaaggatcttctcctgatatcatacattgtcatgactggtcaagtgctcccgttgcttggctatacaaggaacagtatgctcttaatgggatgggaaatggtcggattgtatttaccatccacaatcttgagtttggagcgcatcacattggcaaggcaatggcacattgtgacaaggctacaactgtctctgatacatattcaaaggaagtggctggacacggagctattgcacctcactactataaattccatggaattcgaaatggaattgatcctgacatttgggatccatatactgacagatttattccggttcattatacatcagagaatgttcttgagggcaagagtgctgcaaaaaaggcattgcagcagatgcttggattacagcaaactgatagccctgttgttggaatcatcactcgtctaacagtgcagaagggaatccaccttatcaaacatgcaatgcatcgagctcttgaacgcaatgggcaggtggttttactgggttctgcaccagatcatcgcatacaaggtgactttacaaatttagccagtaagctgcatggtgaataccatggccgggtgaagctatgtttaacctatgacgagccactgtcacatttgatatatgctggcgcagacttcattcttgttccttccatcttcgaaccttgtggtttaacacagcttattgctatgcgctacggatccatcccgattgttcggaaaactggaggcctgtacgacaccgtctttgacgtcgacgatgataaggatcgggctcaagcacaaggcctcgagccaaatggattcagtttcgaaggagctgatagcagtggcgtagattatgctctcgacaggcaagtataa

SEQ ID NO: 3925 - DNA, 2322 bp, Zea mays
  Peptide Sequence Number=SeqID_45704
atgtcgttcggcttgaggaatgcgggcgcgatgtaccagcggtgcatgaaccatgtgttcggcgaacacattggtcgcacggtcgaggtctatgtcgatgacatcgtagtcaagacgaggaaagcttctgacctcctttccgaccttaaagcgacattccgatgtctcaaggcgaaaggcgtcaggctcaatcccgagaagtgtgtcttcggggtgccccgaggcatgctcttggggttcatcgtctccgagcgaggcatcgaagccaacccggagaagatcacagtcatcaccagcatggggcccatcaaggacttgaaaggcgtacaaagggtcatgggatgtctcgtggctctgagccgcttcatctcacgcctcggcgaaagaggtctacctctgtaccgcctcttaaggaaggtcgagtgcttcacttggacccctgagaccgaggaagctctcgggaacctgaaggcgctcctcacaaaggcgcctatcttggtgcctccagctgccggagaagccctcttggtctacgtcgccgcgaccactcaggtggttagcgccacgattgtggtcgagaggcaagaagaggggcatgcattgcccgttcagaggctagtttacttcgtcagtgaggtactgtccaaaaccaagatccgctacccacaagttcagaagctgctgtatgcagtgatcctgacacggcggaagttgcgacactacttcgagtctcatccggtaactgtggtgtcatccttccccctgggggagatcatccagtgccgagagacctcgagtaggattgcaaagtgggcggtggaaatcatgggcgagacaatctcgttcgcccctcgaagggccatcaagtcccaggtcttggcggactttgtggccgaatgggtcgacacccagctaccgacggctccgatccaaccggagctctggaccatgtttttcgacgggtcgttgatgaagacgggagccggcgcaggcctactcttcatctcgcccctcgggaaacacatacgctatgtgctacgcctccatttcccggcgtccaacaatgtggctgagtatgaggctctggtcaacgggttgcggatcgccatcgagctaggggtccggcgcctcgacgcccgcggtgactcgcagctcgtcatcgaccaagtcatgaagaactcccactgccgcgacctgaagatggagacctactgcgatgaggttcggcgcttggaaaccaagttctatgggctcgagctcaaccacatcgctcggcgctacaacgagactgcggatgagctggctaaaatagcctcggggcgaacaacggttcccccggacgtcttctcccgggatatgcatcaaccctccgtcaagatcgacgacacgcccgagcctgaggcgacctcggctcagtccgaggtaccctcggcccagcccgaggtatcctcggcacagcccgaggcaccctcaactcggcccgaggcgtcctcggttcagcccgagaaggcacctgggggctacacgcacctgctggtcaccatcgacaaattctccaagtggatcgaggtccgacctctgaacagcatcaggtccgagcaagcggtggcgttcttcaccaacatcatccatcgcttcagtgtcccgaactccatcatcaccgacaacggcacccagttcatcggcagaaagttcttggacttctgcgaggatcaccacatccgggtggactgggccgccgtggctcatcccatgtcaaatgggcaagtagagcgtgccaacggcatgattctacaagggctcaagcctcggatctacaacgacctcaacaagttcggcaagcgatggatgaaggaactcccctcggtggtctggagcctgaggacaacgccgagccgagccacgggcttcacgccgttcttcctagtctacggggccgaggccgtcttgcccacagacctggaatacggctccccgaggacgagggcctacagcgatcaaagcaaccaagctagccaagaagactcgctggaccagctggaggaggctcgggacaaggccttactacactcggcgcggtacgagcagtccctgcgatgctaccacgcccgaggggtccggtcccgagacctccaggtgggcgacctggtgcttcggctgcgacaagacgcccgagggaggcacaagctcacgcccccctgggagggaccgttcgtcatcgccaaggttctgaagcccggaacgaacaagctggccaacagtcaaggcgaggtctacggcaacgcttggaacatccaacagctacgtcgcttctacccttaa

SEQ ID NO: 3926 - DNA, 1200 bp, Zea mays
  Peptide Sequence Number=SeqID_45705
atggcctcctcccttttggccggacggggagggggccaccaccacaactggggggagacgcgcgccccgctcgagcccataccccccaaccctagtcccagccagccccacccgcgcgccgacgggtccaagtccaagccgcgggcggcggccggctacgtgaagttccgcccggcgtccctgggccaccgcgaggcccgcgcgctccgggaccgcctcgcggtggagctcggccaggtccgcgccctcctctcccgcatcgacacctggcagcagcagggcccgccgccgcgcgcggtgctccgcggggcgatgcggaagcggtgcggccagatcctcagcaggctgcgcaaggacaagcgcagcgtgtggttcaacgcgcccgtcgaggtggagcgcctcggcctccacgactaccatgccgtcatcaagcgccccatggatctcggcaccgtcaaggagggcctcgccgccgggaggtacgcctcgcacgacgacttcgcggccgacgtccgcctcaccttcaccaacgcgctgcggtacaacccggtcggccacgaggttcacacgttcgctggcgccctcctcgcctacttcgagaggatgtacaaggaggcgctcgtttgtttagaggaagagcgcaagcgccttgagccgccgaggccagtggcggctgagctgccacctccgccggcagttgagcctgtcgaggcgaaggctaagacgagagcagggaatgtgaggatgcggaagcccaaggcgagggagcctaacaagagggagatgagcctggaggagaagaacatgctcaggctggggctggtgagcctgcccgaagagaagatgcacaatgtgcttcagatcgtgcgcaagaggaacaacaacccggagatgcttggggatgagatcgagcttgatattgatgagatggatgttgagacacagtgggagcttgatcgtttcgttactaacttcaacaaggcgctcaagaagtcccagcgtgctgcgatgttgaatggtggcgttgctgatgtaaccagtactgctgtggctgaggatgacactgcacctgtgggcgatgtgcctacattggttggcaatgacgatgcggtaatgacaataggagcagcacgtttgtttttggttgcagctagtggacgtgtgaattgggcgctgatgctggtaattgtaagtgtgtag

SEQ ID NO: 3927 - DNA, 2199 bp, Zea mays
  Peptide Sequence Number=SeqID_45706
atgagttattttgagctcaaggtgaagaagataaggagcgacaacgggtccgagttcaagaaccttcaagtggaggagtaccttgaggaggaaggaatcaagcacgagttcttcgctccctacacaccacaacaaaatggtgtggtagagaggaagaacaggacactcatagacatggcaaggacgatgcttggagaattcaagacgcccgagcggttttggtcggaagctgtgaacacggcttgccacgccataaaccgggtcaaccttcatcgcctcctcaagaagacgtcgtacgaactcctaaccggtaacaaacccaatgtgtcatactttcgtgtatttgggagcaaatgttatattctagtgaagaaaggtagaaattctaagtttgctcccaaagctgtagaagggtttttgttaggttatgactcaaatacaaaggcgtatagggtcttcaacaaatcatcgggtttggttgaagtctctagtgacgttgtatttgatgagactaatggctctccaagagagcaagttgttgatcttgatgatgtagatgaagaagacgttccaacggccgcaatacgtaccatggcgattggcgatgtgcgaccacaggaacaaaaggagcaagatcaaccttcttcctcaacaatggtgcatcccccaactcaagacgatgaacatgttcatcaagaagaggcgcgtgatcaagggggagcacaagatgatcatgttatggaggaagaagcacaaccggcacctccaactcaagttcgagcaacgattcaaaggaatcatcccggcgaccaaattttgggtgacattagcaagggagtaactactcattctagattagttaatttttgtgagcattactcttttgtctcttctattgagcctttcagggtagaagaggccttgctagatccgaactgggtgttggccatgcaggaagagctcaacaacttcaagcgaaatgaagtttggacactggtgcctcgtcccaagcaaaacgttgtgggaaccaagtgggtgttccgcaacaaacaagacgagcacgtggtggtgaaaaggaacaaggcacgacttgtggcaaaaggttatgcccaagtcgcaggtttggactttgaggagacatttgctcctgtggctaggctagagtccattcgcattttgttagcctatgccgctcaccattctttcaggttgttccaaatggatgtgaagagcgctttcctcaacgggccaatcaaggaggaggtgtacgtggagcaaccccctggctttgaggatgaacggtaccccgaccacgtgtgtaagctctctaaggcgctctatggacttaagcaagccccaagagcatggtatgaatgccttagagactttttaattgctaatgctttcaaggttgggaaagccgatccaactttattcactaagacttgtgatggtgacttatttgtgtgccaaatttatgtcgatgacataatatttggttctactaaccaaaagtcttgtgaagagtttagcagggtgatgacgcataaattcaagatgtcgatgatgggcgagttgaactacttccttgggttccaagtgaagcaactcaaggacggcaccttcatctcccaaacgaagtacacgcaagacttgctaaggcggtttgggatgaaggacgccaagcccgcaaagactccaatgggaactgaaggacacgtcaacctcaacaaaggagactccgactatgctggatgtaaggtcgataggaagagtacatcggggacgtgccaattcttaggaaggtccctggtgtcgtggagctctaagaaacaaacttctgttgccctatccaccgctgaggccgagtatgttgccacaggacagtgttgcacgcaactactttggatgaggcaaaccctccgggactttggctacaatctgagcaaagtcccactcctatgtgataatgagagtgctatccgcatggcggacaatcctgttgaacacaaccgcacaaagcacatagacatccggcatcactttttgagagaccaccagcaaaagggagatatcgaagtgttttatgttagcaccgagaaccagctagtcgatatctttaccaagcctctagatgagaagaccttttgcaggctgcgtagtgagctaaatgtcttagattcgcggaacctggattga

SEQ ID NO: 3928 - DNA, 387 bp, Zea mays
  Peptide Sequence Number=SeqID_45707
atggcgtggaagaactccggcgacggcgtggacgagcaagagagtgaggagcacgtccataacgcaagaaagaaacggttgcggatgtcgcttgagttgctcggtgtcggtcggcgtcggctcaggtccatggcgcggttcctggcgcggctgcacttgggcgcggctaggcgctgcttggggtcggcgcgggtcggcttcaagggcgcggtgctgcgcggggtcacgacgggcgactcttggcgcgtcggggcaggggtgcagacgcagcgtgggtgtcgcgacacgtgcagggcgctgggtccggccggttcttgggcgcgtgcttggctgggcgtgcaggggcgtcagcgtcttggcgggagtagggtcggcggctcggcctag

SEQ ID NO: 3929 - DNA, 3396 bp, Zea mays
  Peptide Sequence Number=SeqID_45708
atgcctccctcaccatcacctaggagatctctgaaagaagtttgccacgcaagggggcatagttttgtcagtattctgcctgctaaatcgaaggatgatgaactcacgttgttcaaggatatgcagaaatatgagagggataacttcttactggaagcaacagaggattttgatgaatccatctcaaagttgagatattttcgagattcaaagattggtgtcaacattgctgcacgcggagaaaatcgtgatttacttaatactgatggtgaaagaaatgactatgattggctgttgactccaccagagaccccactttttcgttcattggatgatgaagatcaacacattggtatggctcataggggcagggcgcaggttaagccaatatcaatttcgaggtcttccacaatggaaaatactcaaagttttaacagaagaagtgcaagcccaagtaggcttagcccagcaccacgctcatgtagcagcactatgttgacaaggataagatcatcaaattcttcttcacgatgcagccctgcacttcatttgcaaccagcggcaccatcacgaaggtcttcgactcctccagcttctaggacatcaacacctccacaaaggtcaccaagtcctgcttcaaggaggttgagtactggctcaagtgacccaattttaaacagaaaaggaggaacttcgcctgttaaaaccagtaacaggccatcgtcaccaaaacttcaaggttggcaatcaagtgaccctggtttctcttttgacgcacctccgaatctacgcacatctctgtcagatcgtctagtatcccattcaaggggtggatctccttcatctttcagtggattggacatgaattggagaggtagaaggcaatctgtgtctcccactccatcaagaagagccagttcatcgcatagcaatgatcgattcagctcatacagcaaagcatctgcaacatcttctgctgaagacgacctagagtctatgcagtctgtgctgattagttactccagtagcccagctctaagaaagaacatgccagtaataaaatccagaactattgcatcacctaagaagccgtccaagagtttctcccctagttctggtccaaagaggtcctttgattctgcagtttggttaatggatcgtcgcaaagctcctcaagataagttcaggccacttctatcaagtgttccttgcaccacatttggtgttggcaaaggggataatgtacactcatctatgttgtctcataattcctcactcacaacaagcagtaatttaagctctgaccatggtgtcacttttagcccttgtatgggtaatgaacaaggaccaagtgatatagccggtgactgtgaagcaacacctacttacagtttgtctgctactcaaagtagcccaaaatctccaagcacagaaaaaaatgcggaaagtaacatggaagacctcaatatggaaagaagtagaatagtcgagacttcaggtaatgttgcaagtggttccaaggctgggctaactaaaatggcaacatgcactaggtgtgaaaagttatttaatgcgataaaagatgatggagaaattgatttgtgtgaagaatgtggtttagtagatgaggttctttttgtgaaccccaagatagagactttggaagaacatcaaaaagaccacaaaactagaatttctaaaccttgtgttgccttggaagctcctcacattactcccgatcatggtgaagataccaagaagtcatttcttgatagtcagctgttgaatgatgaacctccagctgattgtctgcaaaagtgtcctcagtctcagtcaacaatatatacaaccgacagaatgcttttaatgctgcatggagagaatgttaatgaaaatttaaggccagatgatgttggcaactcttcccaaggaagtagcctcgatatttcatcccatcaatgtaacataaataattatcaacaatcggaactagcatctgtagttgagtgtgataatttaagagatcaaactgccaaccaccagaatgaggtgttccaacgcctgccagggtcagtgtatcaaagcattgaatttgcctctaatacacttacctatgacagttgttgtaaacagggatcggctgggcattcaaatctaaaggttgaaaatacggagggtgctgggatttcagtactgctgcagaagtcaagcagtaacaaatggcctgttatagaagggcgacccttagctggtacaaatattatctgttcagaaccctactatacaagagatggtgttactatgctaaagcgtaccattggatgggatagttcatcagcgtcttccattgatcaagggtctacaaggcaatctggacatttggaacaccttaaaagtagtaatcgtcatgactttgagaagtctcaaataagtagtaccatgagttgtaaaagcattgcatccatgtcagacatgtcaagtagcaattgttcagtttcagtttgtcctcgggatgatgcaattgcagatactggcttcctaaccgacaattcagaaagcagtgctcctcgatccataatttgtactgaagaacttaatgagtcgtgtaagtacacactctcaagtgctatagagtgctggtctgctgcacaggctattgttaatgttggcattggttcaactgaagatgtagtgattcagaaactatgtacaggtaggatggttcacaaagattacacaagtgataactcatgttcatcagatactgaaacatgtagcaatatctcactctctctggctcctgaggaacgatgcatacagaaaattgaagaaggtacctcagttggcactccagaacacccagatggtgattgtggcatcagtaattatcaaatgcagcatgaaacaattcctgaggcagataggttggatgatggttgtgcgtctgttatctctgaggaggccaacataatggggcttcctggtaatgccctttgtgtcgataatgtcgaggtggccgagtgcaagggcgtcgagccgttgtcgaggtgcagtgcatcgggtacctatggtcgatgtagctgtcgaggacaccgaagaagacaagccgcacaagtcgcgggcgcaggcgtagcatgtgggaaggcccgcggagcgtcaggaggcgctaggatgatggtgtcgcagaaagagggcgccatagacgaagacagtgacacaatcgaggaagtcgtagaggaagtagccgatgccgaagatgatgctgtcaaactgtcgtggacgaggcgtgctccaggtttggcacgcctggaaacgtgtcgtagacgaatgcacgtgccgatgttgccagtatcgcacgtactaggtagaaggccccaaccaagtgtcagcgtttga

SEQ ID NO: 3930 - DNA, 309 bp, Zea mays
  Peptide Sequence Number=SeqID_45709
atgacgtcgatattttaccaaggtatccagaaccacgcaaggtcccgactaatcctcgttgatgcccctacacaaaggacgctccccgccatctccactatcgagcttccggtcgaaacgtctcaggactcgttccctctggtgaccattggcgctgtcagccttgcaccggacagtccggtggctctccaggaactagccattgggctactattccctggtgcaccgggcagtccggcggtgtggcaccggacagtccggtgtgccaccggacagtccggtgctctcagccggatggtccgcaagtga

SEQ ID NO: 3931 - DNA, 831 bp, Zea mays
  Peptide Sequence Number=SeqID_45710
aagatggatgtgctgagcaggagcatcatatttcgtgagaatgacgaccttgatgactatttgctgcttatgattcgtgaatataggaggaggaaaaatgccccaagtaataggcatcgaggttcaatttttggccataaggtttacgacaggaacagagaggaaggtgctagaaaactacatcgggattactttgacgaaaacccaacataccccgagaagatttttcggcgccgctttcggatgagttcccgtcttttcaacaggattgctaaagctgttgaggagcatgaccactattttgttcagaaaaaaaatgctgctggtgtccgtgggttttcctgtcgacaaaaggtaacagcagcattacgacaactagcttatggtgtaccagcagattatgttgatgagtatgttcggataggtgaaagcactgctatagaaagtttgaggaaatttgttagggctattgttcatttgtttcgtaatgaatacctgagagcccccaatgtagatgatacaaccaggctacttaatattgctgaatgtcgtggatttcctggaccttgggacgtcggcacgacggcggaaggaagagttgccggtcgtcgtccaatcgctgccgcaccagacttcgacgaaggcgcaggacgcttcccggcaggcggaactccttcaggcatcgcgtacaaactgggcggctgtgctgagtatgacaaggggaacacggcgcagggtgaaatgaggagacgacggtggatcgggagcagcaagaactggcggtggtggatcgggagcagcaagaactggcggcggtggatcaggtactag

SEQ ID NO: 3932 - DNA, 1032 bp, Zea mays
  Peptide Sequence Number=SeqID_45711
atgggtatgcagtatttcacactctattttacaggcatacttgattttcagttctcattggctgaatacatgttttgggttggatgtgtctatgggaagaatgatgagagtagatttggcttcttctgtcattctgctctggagtttctgctccaaaaaggatcttctcctgatatcatacattgtcatgactggtcaagtgctcccgttgcttggctatacaaggaacagtatgctcttaatgggatgggaaatggtcggattgtatttaccatccacaatcttgagtttggagcgcatcacattggcaaggcaatggcacattgtgacaaggctacaactgtctctgatacatattcaaaggaagtggctggacacggagctattgcacctcactactataaattccatggaattcgaaatggaattgatcctgacatttgggatccatatactgacagatttattccggttcattatacatcagagaatgttcttgagggcaagagtgctgcaaaaaaggcattgcagcaaatgcttggattacagcaaactgatagccctgttgttggaatcatcactcgtctaacagtgcagaagggaatccaccttatcaaacatgcaatgcatcgagctcttgaacgcaatgggcaggtggttttactgggttctgcaccagatcatcgcatacaaggtgactttacaaatttagccagtaagctgcatggtgaataccatggccgggtgaagctatgtttaacctatgacgagccactgtcacatttgatatatgctggcgcagacttcattcttgttccttccatcttcgaaccttgtggtttaacacagcttattgctatgcgctacggatccatcccgattgttcggaaaactggaggcctgtacgacaccgtctttgacgtcgacgatgataaggatcgggctcaagcacaaggcctcgagccaaatggattcagtttcgaaggagctgatagcagtggcgtagattatgctctcgacaggcaagtataa

SEQ ID NO: 3933 - DNA, 330 bp, Zea mays
  Peptide Sequence Number=SeqID_45712
atggtggacctgcagcgactgatgaacccggacccacatgccaacgttgggaggcataacaaaccaaagaagttgaatgtagctcgagttgtgccccaagattatatgtgcactaaagacgatgtgaaacttatcgaatacattaaatcattatcgagaaaaaacgtcatggtgaacatcgacaatgcatggttaaatagaaatgatatggaatgtcttttccatgttgacatgcaattgattggtgaagtccttagtgcatatatacattctatttgggatgaagagcatctacttcatagcagtggcggacgcaggacaaaattatag

SEQ ID NO: 3934 - DNA, 267 bp, Zea mays
  Peptide Sequence Number=SeqID_45713
atgctcgcccacttccccttgctcatttgcgccctcagccgagcacccttgcccccctctctcgccctgcgcgtgcatccaggcagctccgtcgccgctcaccgaagcccgtcgcccgttcctcgaccgccgttgagcctcggtcgcgtccgttgcctcggggactcaggccattttcctgagtacctctccgtaaggacctatttggggagcgacacccaggataacaatgcaaccatgagggtggaatgggatgcccttagatga

SEQ ID NO: 3935 - DNA, 1136 bp, Zea mays
  Peptide Sequence Number=SeqID_45714
atgcaggcaagcattgcagttgcagaggcgctcgatgccgggaagctcacgcctcagcccgtcgccgacgcggccgacttcgcagttgccggtctcgccgtggccattggcacgcttgccgtcacagcgtcgttcatgcttgtctccttcgacgcgcgcgcggggcagggccaactgcgtcgtatcctcgacctcggtccatcactatgtggaccacgcttgttgctcgtcttctttgtggggctcctggccgccgccgagatgctccgcctcccattcttccacggcgccatgctgccgccgcgccaccacgtcatgccatgcctcgcgtacccgctcgtcgcccatggcatcgccgagccagggttgctcgcatgtgtgctcctgctgttgcgtgtgtctgtcggtggcgcgcggctgccagcgtctgcacttgtcgtgccgctcgcctgcttgccattcctcaccgtgcatgttctcgtgctcgccacgccggccaccgtcgccgcctacccaggccagctcgcccatgccgctgatggaattgggcactgcgcgtacccgacgtacgccgccacgctgctcctcgccctcatcgcggtgttggcgctcgccctaacctcagtgtgggacatgcaccagtacacgtcccccaccgtcggcctcgttgggtttgtcgcggtggcggtagccgcggaggcaacacttgtcatcctcgtcatgctaccgcactttagggtcgccatcatacttaagcatgctggaaatgagcgtgttctccaagaagacatttccaccttctctatgaagcagtggcggatccacagtgagggcaaggaagagagccagccgccatccaggctccagccgttcgccaggaaggcagaaaaccgcagctgcccaccaggcgccagcgcccagcagccgcaagctccgccgccgttcgcccaggcgcccagccagccggcggttctcttccaccgttcgaccagccgccagcgtccagcggcttgcgggctgcggccccgccgttcgcccagcggccccgccgtcgaggccaggactcaggagcccaggacccagccaccgagcggtaaatcctttggtccttctggatctgcctctgcgctcgcaag

SEQ ID NO: 3936 - DNA, 126 bp, Zea mays
  Peptide Sequence Number=SeqID_45715
atgagattgatggtttttggtattgactctagtgatggtttaccttgcaaggttaaaaactcgactcaaatcgtcttcctctctcagctaatgaagcttcttgatccattgtactgcattgagtaa

SEQ ID NO: 3937 - DNA, 1458 bp, Zea mays
  Peptide Sequence Number=SeqID_45716
atggacgacgccggaagggcaccaccacccgcgccagcggcggtgaccgtctccgccaccgccgcacccgcgcctaccccgccctccgccacggccgccgccgacaagtcctccctcgaccccgacgcgctttatgaagaggggatgtggcaacagatggccatgaacagcggtgccacaatgcaacctgggtcatatcctgagcgaccagatgttttgccattatccgacattcttgttgttatgtacattagcagcattgttatggaccatgtgtggttggaaggaattttatctttgaaccaaagacccttggagtttttccctttctgttgtgtttcagttgcatcacggaacaaaatgcactccaagaagcaatgtctgaaaagcaaagctgtggtgatgtgtctatgtaatcattcttggtatttaatccttttctcatgggaaaacatgcaaaagataccggttccagctattgcctctgccagaatgaagggagaatatcctgagagagtgggacagccagagtgtcagtattatctgaagaccggaacatgcaagtttggtcctacatgcaaatttcaccatcccagggaaaaggccggaattgcagggagggtgcagctaaacacattaggatatccacttctcccgaatgaaaaggagtgtgcgtattatttaaaaacaggacaatgtaaatatgcaaatacttgtaaattccaccacccagaacttttcaatgtggtgccttcgtcacgtggttcacctatttatacttctgtacattcctctgcaagcgctggtccacagtcatatactggaactatgtcaagctggacttttccacgagcttcttttataccaagccctaggtggcaaagtccttcaaattatgcaccaatggttgtacctcatggccttgtccaagtgccgagctggaattcatatcctggtcagctgcagtcacctggggctcaacaaacttatggaagttcacaacaaggcgaagctagtgcaggaaatcagggaatgctatcaccctatagatccagttcatttcctgtgcctcaatatgcgttgcagagagataatgtatttcctgagagacccgatgaaccagaatgccaatattacatgaagacaggagattgtaaatttggtgcagtgtgcaagttccatcatccccgtgtgagatcacagccccctccggattgtgtcttaagtccaatgggtcttccaatacgtccaggtgaagaactttgcaaattctattctcgttatggcatctgcaagttcggcgccaactgtaaatttgatcatcctacaatggctgctccaatgggagtttatgcatatggtttctctgggtctgcttctgtcgcacccgcttcaactaatgcacctatgacgcgacatcttcttggatctccatcaggttctggatatatgtcttag

SEQ ID NO: 3938 - DNA, 606 bp, Zea mays
  Peptide Sequence Number=SeqID_45717
atgaatccgccgcacccagagccgggccttccccgccgccaccaccacatggtccacctccacctcgacccgcgccaccaccaccacgtccacatccacctccgctgctgccatcatcaccaccacggcacccacctgctcgctcctgcgccgccggcccgcctcaacgacaaccagcagcggcacccggctcccgtactcttccccaacacctacccgaacccaagcgcggcgcctgggcagccagagccgccccgcgccgccgtaagggaggacgtggaggatttggatcccgagccggggctgctgcacgcggaggaggaggaggaggaagacgaggagccggtgttcgtacttacggacgagtgggcggagttcttcgccaaatccgaggccaagagaagactggggctgaggtgtccacatagccatggtggtgggtgggcgagcgagaacggtggtgtgaggatgatcaaatttacagttggcgccgaacttgcagatgccataacgagaatagaatttgcaaagttcttcaccctaaaaaccattggacaggataatcaagatggcagaccattcaatgaggtgtaccagaaggactag

SEQ ID NO: 3939 - DNA, 429 bp, Zea mays
  Peptide Sequence Number=SeqID_45718
atggacatgtctcgaatggagacgttgtatcatgctgagaaggagaagaccgaagcacttatcctggagctagctgtcagctcaccaacacaaaagggtgccgcaatcacaccgttgttgtgcaaaacaaacaatttgccactgattctcacccaagaggaccaggatatgctaaggggtgttaagtacaggaaatttgttccaggaataagcaaaagccaagagtttgacacaaagtcaagtcacagcaaacagagcagtttgagcaagagcagcggccactctcgggccagcggtagcagaaaagacttgttcccagcactaaacttcactaaagggagaccaaaacgaaaaaaattcttctctttcaggcgtaaagagtattttaatgaggcccctgacacccagctaacagatctacttctgtga

SEQ ID NO: 3940 - DNA, 201 bp, Zea mays
  Peptide Sequence Number=SeqID_45719
atggcctactcgaccactaggcctgttcacaggcggcccatgcagcctggccacgggagaggggtgcgctcaggtcagccattgggcctagccgtcaggtgtcgaggatattggttcccgtcgtggatctgcggtggattggctcctccaatgttgcctatagggggaatctcaaatctcgatgggatgatggggatctga

SEQ ID NO: 3941 - DNA, 261 bp, Zea mays
  Peptide Sequence Number=SeqID_45720
atggggaagcctgtcccatcactcctcatgctcctcctcagccaagtaaccgcacttgtacccaccataaccggaatgggagactacgtctcaggtcgcgtgaggggatatgtcggctaccaggttcactcagacaatcaatccccatggattgttgtccacagatcaacatcattagactatgaatgtggatacaaccaattcttgacctcgtgcgaatgctggaaaaatcactcgacttctaccgagatccctaattag

SEQ ID NO: 3942 - DNA, 732 bp, Zea mays
  Peptide Sequence Number=SeqID_45721
atgacggtctgcttgacctgctgctgcatcctgttctggctcctggtggtctgcgtcggcctcgccatcctggtggtgtacctcctgtaccaccccagggcgccgcggatccacgtgagcacggccaccctcaacgccgggtacatcgacgagctcccgccaccgcacctgggcaaggcgctcaactcagacctctacgtgctggcggccatctacaacccgaacaccaaggtcgacgtcgtcctgcgctacatgcagctggacctctacttccaggggaggctgatcgggacgcaggcggtgtggccgccgctgtacgagaagcccggcgactcggcgctccgcagcgtgcacctggtggtcagcgaggtggtcatgacgcaggaggacgccgaggtgtggaagaacgtcaccaccggcggcggcctcgtggagatgcacctccagggcaaattccacgtccagctcaacttcggccgctggctcccgttcagcctaagagatacttcccttgcccctccagaaacacacatctccttactaaaaccttgcaatattagccttgaccgacaaccatgttgtgacataataccatcctattggcactgggacacctctgtctctggcaagaaccgacatcaggtaaagatggccattgtagagccgagacaaggaaaaaagatctgtgggcagatggttgctaataaaatgtatatgacagaattttcatga

SEQ ID NO: 3943 - DNA, 477 bp, Zea mays
  Peptide Sequence Number=SeqID_45722
atgccgacgctgcacgcgaatatggccgagatgccgtctgctgcgatggcgaaggcgcgtagcctgctgcggcgcacggacagggggtccagttccatccccaccaggaagaggaagaagaggaggcccggttgtgaagaggagcagcaacgacacgaggcgaggaagacgagaggacggagcggaacagaattttccgcggcaaagtttcccgtgaaggatgtcatacaaaatgctgatgaaactagtggtgatgatgatgatttcactgatagtgagagtgaaatgtctttggaagatgactctagttcagaagaacagactcctagcccaaacaagactgatgtagtagttggcaagaagagggcaattgaagctgaggcaccttctggtaagaaggctaagtctgaacaatctgctcagaaaacagcccaacttgggagccatgcctgcaagtcatgcaacaagtatgtataa

SEQ ID NO: 3944 - DNA, 504 bp, Zea mays
  Peptide Sequence Number=SeqID_45723
atggcgctcaccaagccaccgacggcgaccgatgacgaccaggccgaacggaagtacctcacatcctgcctcataatgctctcgtgcggcctccgcgacggtgacatggccaacgccacgagggaagcgggcgcgacgccaacgtctgcgaatatggccgacgactacaagtgctccttgtgcgacaaggtgtttgcgtcctaccaggcgctgggcgggcacaaaacgagccaccggaagccggcggcagcgccaagtgacgaggcgtcatccagcggcaccgcgtacgagaaggaggagaagttgcaccagtgctcgctctgcccccgcacgttctcgtggtggcaggcgctgggcagccacatacaagacccggagattgcgattggcgacagccaacggcagcagcacccaggccgtgagcgccgtctctccgatcggggtggtgaggagcttcagctcggccaggacgtgcgccatgacgcgaggaacgccgtgatgtag

SEQ ID NO: 3945 - DNA, 372 bp, Zea mays
  Peptide Sequence Number=SeqID_45724
atggaacctggcactggggaatcactaacgcaagcttcttttgccggggtgacgccatatccatctgcagcgaccgatgattttgaggtaagacttcggtttcgtgatatgtatgtggtcgtggtctgcgatctgcgagtctgcggtgttgctcgtgtttgctcactgggagaagacagaggcaacgatctgctagttgctcgttggcctgaattacatctgccgatggtggcagcctggaaggagttgcaactggggacgaggtgccgacgtcgtctgatacctaggacaaaattgacgtcgtatgaggcatgggacgaggtgtcggcgttgtttgcaacctgggcgacgcaagtagaaacagcggcgtag

SEQ ID NO: 3946 - DNA, 519 bp, Zea mays
  Peptide Sequence Number=SeqID_45725
atggcgcctcctgtcgacgtggtaggtccgtgccctaggttgggcgaggtggaggctcctccgaggtcgaggtcgagtctgtctttcaaggtcgaggtcgagtccgagcccccgggttggacaaggcagtgcccgtcggctgaggccagggctaagtccgagccctggggtcgggcgaagcggagttcgtcgtccttcggggctgagcccgagtccgagccctggggtcaggcggagcggagttcgtcgtcttccggggctgagcccgagtccgagccctggggtcgggcggagcggagttcgtcgtctttcggggctgagcccgagtccgagccctggggtcgggcggagcggagcggcgctgtcctcttgtcagaccggtcagtggagcggcgaagtgactgcggtcacttcgactctgtcgactggagggcgtgcgtcaggataaagctttgtgctgatgggggttaccagctgagatttaggagtcttgaggcccccgaggcctcggaggagtag

SEQ ID NO: 3947 - DNA, 402 bp, Zea mays
  Peptide Sequence Number=SeqID_45726
atgtcgaatgtcgtgctcacatttaatgcgagccatgcagtagttatctcttcgcaaagcgaccaccataccgaataccagggtctattttgttcttcatctaacaatatgactgttccgaactgtagccatcttcataatttctattctgatgttgcgtttttcataacgtctcaggttgggaccgtgacagcaatttgtgttacctgctttctgataagatgtgttgtggtcgcgctatctgcatttgatgctgatgtatctctcgaggttttggaccatccagtcctggatttcttctattatatgtttgcggagatactcccttctgcgctggttctcttcgtccttcggaagcttcctcccaagcgggtatcggcgcaataccaccctattaactag

SEQ ID NO: 3948 - DNA, 720 bp, Zea mays
  Peptide Sequence Number=SeqID_45727
atgaggagggagcttgcctcccccttagctactgccgccgctgccacggccggtgcctcctcctcggctgccgcctcgctccggggctggtgggacgatgtcaacgagtcgccccagtggcaggacggggccttcttctccctcgccgccgcctacgccctcgtctccgccgtcgcactgattcagctcgtcaggatccagcgccgggtgcccgagttcggatggaccacgcagaaagtcttccacctcatgaacttccttgtcaatggggtccgtgctctggtgttcggcttccatgtccatgtcttcctccttcgcacaaaagtatacaagttggtgttgctagatctccccggcttgttgtttttctccacctacaccttgctcgtgctcttctgggcagaaatataccatcaggctaggagtctcccaacggacaagctaaggcctgcatacattgccgttaacgccatcatatacgttgttcagctttgcatatggatatacctcggaataaatgataatgccgcggttgagctggccagcaaaatattcattgtagctgtctcctttgttgcgcttcttgggttttcagtatatggtggaaggttgtttgtcttgctgagacgtttccctattgaatctaaggggcggcaaaagaagctgtatgaggtgactgcaaccctgcaacaactacctttactgttcaactgcccatga

SEQ ID NO: 3949 - DNA, 1518 bp, Zea mays
  Peptide Sequence Number=SeqID_45728
atggcacaggcacagccacaggcgcaggcgaccagtgaagtcgtcgtcaagtgtgccaccaaggccatgacgaatgacaaagacagggccgccatcgccagcgccagcgcggcggcgtctcaggggtcggtaggcagcggtgccgccacgcccttcaagttcaacgtccacgcgccggagttcgtgcctatgtcgcctgccgccgccagccccatggccagccccatgtcggcaccggcaggtggctactactcgcccttcatgcagatgcaaccgggcttggcgcccgccgattggagctttttccacgagcacgagcccgtcttcttcatgcccgacttagcgcacgctaagttcggcgcggccaccgccaccgccgctggcgctgctgggagcaacagcgcccaggccaagggggccgccaccaccaccgatgttgcacagaagattgttaagcaggttgagtatcagttcagcgacatcaacctggtggcaaacgagttcttgctcaagattatgaacaaggacacagaaggctatgttccgttgtcagtcattgcatcctggaagaagatcaagtctcttggggcaaccaaccagatgctggtgaaggctcttcgcacctccacaaagctcaatgtgagtgacgacggcaagaaagtccggcggaggcaggcattcacggagaagcacaaggaagagcttcagtcccgcatgatcatagcggagaatttgccagaggactcgtctcggaacagcctcgagaagatctttggcgtcgtgggaagtgtgaagaacatcaagatatgccatccacaagagcctaacaccgcaagggcttccaagtccgacacgcttgtcagcaacaagatgcacgcacttgtggagtacgagacgtcgcagcaagccgagaaagcagtggagaagctgaatgatgaacggaactggaggaaagggctccgtgtccgcacagtgctcaggcgctcgcccaagtcagtgacgaggctgaagcgtgcagacttggaccactttgtggcctccgacgacgactcgccgcactcctcatcagactccccgacggcggactgctcttcacctgccgaggcagcggcggctcacgctcacgtctatcaccagcagcagcaagaggagcagcagaatgggggcaattgcaagcacaaaggcagctgggctcgaggacgagctggcacggcgaccaagctgcacatcacggcgccgcagagcccccagtcggctcccgcgggcatggccggcggccacttcgacccgaccagcccccgcccgtcgtcgtcgtcccagaagcagtgcccctccagccccggcagcaggcagctccctgcttctgcctctgcctcctcccacaagtgccccttcagccccaggcaggctcagcatcatcctccccagggccccaggatgcccgacggcacgcgcggcttcaccatgggccggggcaagccaacgtcgccaccagcagcggcagcggtcctcgtttag

SEQ ID NO: 3950 - DNA, 1767 bp, Zea mays
  Peptide Sequence Number=SeqID_45729
atgaccccctcctccgccaccgctcgccgccggacctcccagaggaggcgtccctgcaatgccgcctctgcctccgccagggccctcgccgccggcctctggaggctgcgccacgccgagcggatgatggcggccggggcctcgccgccgcccgccgcccaaacgaaaccgcaaaagctcatgggacggagccggacgaggccaagccaccacctctgccgttgccgatgtactagcagcagcactaggaatggcatcctagacaagatcgacgcgtgcttggacggctcctcgtccatggagaaggccaccaaatgggatgccaaccactcgcatctgaggggaagaagagcacggggactccgattggacaacatcttcttcgcctcgacatcagcaatgtcttcccctctgctgctgctcatggaggcggagctggagaaggcgcgaggcgaagccagggagctggaggaggagcggcgccttatgaccaagcgcctggaccgcttcctgcggaggctggccgaggagaaggcggcgtggaagtcccgggtccgggacaaggcccgccacgccgtggccgccctccaggacgagctaggcgcagagcggaggcaccggaggcagctggagcaggccaacgccaggcttctgcgcgacctggcggaggcgcgggcggcggccaagcagcaggcgcagagctacgagatggagcgcaaggcgcgggagctgatggaggacgcctgctccgagctcacgcgggaggtggaggaggaccaggccgaggtggagctgctccgcggggagtgcctgcgcatgcgggaggagatggaggaggagcgccgcatgctgcagatggccgaggtgtggcgggaggagcgcgtgcagatgaagctgtccgacgccaagctcgcgctcgagaacaagtacacgcacctcaaccgcttgcaggcggagatggaggccttcctccgcaacaagggcgacgagtcagcctcccactccgccgtgctgcgggaggcgcgcctcataagcgacgccgctgcagccacaagctcggaccacttccgccgcaaggaaagcgaaaggcaacatgctgccgctgcggaaagggaaagggacggcgacgggcgcaggaacagcaggcccgcgagccccgcgtcgtccaaatccagcgacatgctgcagtccgtcagccccgcgaccgacctcttcttggccaaggccgacggcggcgacggcgacgacgacgacgacgacgacatgttcgccgacggtggcagctcggccgacctggaaatggcttcctgcagctgggtcggcaccagcgaccgctcagcttcggtggccaacggcaacggcggggtgacgacggaggctcgttcgtcaggcgcgagccggcgttcaaccaagaacaccgcgctcatacgcaggctctggaggtccgccatcaccgagagcaggaagaagaccgggaggacagctgccgactggtcgccgtcttattcggacaggaggatgtcgagcgtgaccgcggaagggccgccgccgccgcttcctcctccagccgtcgcaggcgagcagtgcagctcgtcaggcggctctggattgccacagcgggtagggggagggggaggcaggctgaagcagagcctcaaggagaagctgatggaggcgaggatggacgatcagaagcccctcccctccgtgtgcaaaaaccttgatgacgagcaacactaccaaaattcatcagatcacaaattctga

SEQ ID NO: 3951 - DNA, 1758 bp, Zea mays
  Peptide Sequence Number=SeqID_45730
atgaaccagctcatggacccgctccccctcgatccttacatcgaagctgctctatccccggtttcttctatggtacagttggtggtgtcggcagaagaggaggttatcaccaactcgcccaacaggtgtttgatgatttgcttcaacctcttacaaagatgtttcagctgggatgcaacaccacatcgtcagccttggccaccacctcatattcatgttgagttctggtgtggcagtgctgctttacgtccaattccatggccaccacccacttccttggatagtttgtatactaaagaattctattgtagagtgcaatttcctggatttggtagaacctttgtgttcaatgcagagattttaaaaagagttggacgtacatccgaagccaaagattcatctcgcgtggctctgaaatcatcatgggggacacttggctgcagtcatgaagaggctgctgaattagcttctttgttggatggatatcagctaatgcgtgcagcgtcagcatctgatcgggtgtcttcgctgaagaattatcaccacacactggggttatgcgaccattgggctgagaagaggtttaatggtcacaaatgtgtgcagttccacgccatcgaagaggtatgtgaatttttgtgtatggagggtagtccagaacagaaaccagactcaaatgaacagttgatattgacgctatattgtacagcgtggtccggagcgcatgcggctgctacattttgtcttcgagattcgattcagcaacagattcgacagcaagacgtattggtactgggtgatcagacatcgtttgtcaaggaaatcacgacaatcgtttgtcgagctggttcaggaattggtttcccaggtgttgctaacatgttgatgctccggcagcggcagcagcagcaggaggacgacagcgacagcaccgcaagcagaaggctgctggtaagggccatccatcagctgcagagccttggaatagcctaccatttccagcaagagatcagatgcatcctgctgccgtccatgcagcagcagcagcctcttgacttgcattcagctgcgctactgttcagaatgctccgagggctgggcattccagcatccacagacatgctgatgagtgcactactgagagaggaaagcggcaagctagctgctgacagcgatggactgctcgctctgtaccaagcttcatatcttgccttcccgggagagacggagctggaccaggcaagggcgttcgccgtcgccaagctagcaggacgacgtgacgacggctctgctgacagctgccccagctccacgcacttgtcgctgccgttacactggacagctccgaggctgcaggccatgtggtcgctcaaggaccaagtagagcgcggccgccccgaccaccaggaccaggccatcatcctgcagcttgctcagctggacttcaacctggtgcaggctctccaccggcgagagctggcggaggtgacgaggtggtggaaggagaccagccgcctgggcgagcacgccttcgcgagggaccgcgtggtggagtgcttcttctgcgccgcctgcatcgcgccggagccgcgcctggcggagtgcagggaggtgctggccaaggccggcgccctcatcgtccacctcgacgacatctacgacgtgtacggcaccccggacgagctccgggccttcaccgacgccgtcgccagctgggagcactctgcgacgaggacgacgcactccccgagtacatga

SEQ ID NO: 3952 - DNA, 1464 bp, Zea mays
  Peptide Sequence Number=SeqID_45731
atggagtcgccgcctgcgttgcagttgcacatgcgcaggcggcggtcggccaactaccagcccaccacctgggactacgactccatctgctcgctactcagacaggaccctctcggcagccaacaacaagaggaacaagcagcagctgctgccgccgtcaccgaggcggagtcggtccaagcaagcttgaaagacagcgactcgatggaggccgcgatacaggatattctggacgcactggcgcgcacggaggcacgcttgaccgatgtgctggctggtcgctacgacgaacagtcctcacgcgagcgcacttcctccttccacggatccacgtctccttcttccgtcgtcaacacacagtaccgcggcgaggcatgccttccacctctggtccacgacgacgctgcaaaggtggcgtccttggattcgggaaacaactttggcctgcagcagaccgccacagtgcttgcgttcctggggtccgatgagatgcattcatcgaccacgctcctcgccggctcggtattcgaccgcttcatcccgccactctacgacgacgaccgctacaccacgccacaatcgtctgtcgatactatcgccaaccccgacgacgacctcctccaggagctcgacgggttggacgaggacgccgcgagcgccaacgcggctgacgacgattcaggcgttgtccacgtccatgcgccgctcaaccccggcgcgacgctcgactcgaacgtcgacaccagtgggtcaccgcgctacccgtgcctccccgagggcgcgacgctgttccgtcggaacccggatgagaagatccacgacgggctcatcggcggcatcagccagcatatctggagcatcgcagacgaggtcgaacacacgacctcagggctgatccagacattcatcgtcgtcgacaggcacttcgacctcatcatcaaggcgaggatcaagcacctggacccgttacctccactcgtccccaacaccgatgcagaggaggaggaggttctcacgaccacgtccaccaggtgttcgagaatgggcctcaaccgtggcgcatactccgtccccaacctcctcgtggtctgcatcgtgggcgcgcccaaatccaacgaatacagcaccaaccgcgtcctgcatcgcacgcggctacaacgtcgtccgctccagcacctgaccgtcgaccccgtcagcgccgtccacggcggcggcggctatgagctgtcccacagcgaggcaggcagtgttcctgcgaccgccacgcttcccaacccgtgcaagaagatccgttgccagctcgtcaacaggacgaggctggcccgtgacgtgctcagccttcacatgagcacacatgacttcgactgcgccagcgtcgacatgaagtcctacttgcgggcgtacacgccgacgagcatggaggacgaggttggccacttcgacctcgacaccaaggagtactga

SEQ ID NO: 3953 - DNA, 306 bp, Zea mays
  Peptide Sequence Number=SeqID_45732
atggaggaggaggacccgaagagggcggctatatatagcgggaggatgaagaaggaaaggaagtgtcatgtagcctcgcgtggaggcaagacaggctggaagctgctcgtgttgccaaccatgcagcggctaaacaaagctgcaacagccatccaactagcactaacagcatgtacaaaatctaccagccgcaaccaatggaccgggctggacaggcagacagccaaccaaaacaactacagaaaaccagaagcgagcagaccccaacatgcacaaccactcttcccggcacctatattaatctag

SEQ ID NO: 3954 - DNA, 480 bp, Zea mays
  Peptide Sequence Number=SeqID_45733
atgccggactggctacagtccgtgcagctctggagtaaccagcaacagccctccgcctccccaccgcagcaccaggatgagctgctgctgccgtgcaggccggtggcgctcaacgcctgcaggaagcccgggggcgcgttccagccgttcgagaaggaggagaagaagaaggacaaggaggagaagcagcgcgccgagctggagctggagctgccgttgccggccgcggcgagctcggccgtggtcggggacagctgcgacagggccggcgccaccgacaccgacacggccgagaacaataaggccagcagcaccaaaggcggcaaggacaaggaggctcagctgtcgtcgcaggcgcccagccggaaggcgcggcggtgctgggccccggagctccactgccggttcctgcaggcgctttttctttataaacctgatattcacaagattaacaggttttatatcaaaacaacagtctga

SEQ ID NO: 3955 - DNA, 276 bp, Zea mays
  Peptide Sequence Number=SeqID_45734
atgacagtagaactgatcgaagttactaaaaagatgttagaattgcttaatcagaaatcttcagtccaagggaaagttctttcaggctattttaatgctctctttgaattaagtggagcttggttgactgatgccaaagagaccaagcatctagcattcgacggatatttcatttctttgtacaacttgcacctaaaggcttctccattagttcttcgagatgaagtaaaaaaggctgttccatcgaagtgggatcctattgcattatcatggtaa

SEQ ID NO: 3956 - DNA, 495 bp, Zea mays
  Peptide Sequence Number=SeqID_45735
atgagagggtttgagagaaaaggggtccggcagtacaaccggtcagaggtgccgaggatgcggtggacggaggagctgcaccggcagttcgtcgaggccgtcgagtgcctcggtggccaggacgaagcaactccgaagcgaattcttcagctgatgggcgcgaagggagttagcatatctcatatcaagagccatcttcagatgtacagagcctccatctccagcagcagcagtacccatcatcagcccagcctccagaagtcgacatcaaccgcagcgagcaacaacaagcgcgtgttcttcacgcgtgaagattgtgcgtcacaggaaggcaacgctccagcttcagacaagaacatctataccaccacggtccgtggttgcggccagtactcatcaccgtaccaaataccgtcgctacagcaagtgttcagatgctgggaacaaaagagagggcgtgttgcttggaactccgacgtgctaacaacagagaag

SEQ ID NO: 3957 - DNA, 405 bp, Zea mays
  Peptide Sequence Number=SeqID_45736
atgccggagaggaattgtgccaactccgagggtctccgctactcgccgaggtccccgaaagttgcaacacaaactggcgacccttctgagcaactctccaaggtccaggcgatggtgattcatgagttcgacgatgccgaacacctcactgctcccaaccgatcatgcaggcgatgcacaacgccactacggaaagaagatgacgacgtgaccccaccagtcagggacacgggcacgtgtgatcacaaggatgtgagcctgataaatgctccctacctgctagcgatggagtgcgggcaaccagtgtgggtggtgggcggccgggtgttgctaggccgctcgaccaacattagaagtagtgggccgactagagtacattgggcccaagtgccgtatcctatctaa

SEQ ID NO: 3958 - DNA, 318 bp, Zea mays
  Peptide Sequence Number=SeqID_45737
atgggagaggggctatccatggcaacaaaagagggggctggcgtccacaccatgggaaggagcaaggaggacgctggacagagggcaggggcgagcttcagggaggagcgtcggccaccaggaaacaggaagcagggtcgcgcgctaggatggatgccgagcagatcttggaagccatggaaggtgaggccgtcggccatggggagggaggagggagggacgaccgtggggagctgcagggaaggagctcggctgggcgagcgtcgcgcggggaagagagtggcctgcgtgaagggagcagcggccatggcgaggtag

SEQ ID NO: 3959 - DNA, 513 bp, Zea mays
  Peptide Sequence Number=SeqID_45738
atggacctcgcgttgttcatcacgtccgtgctcacgtcgttcgtcatcttcgtggcgccggtgctgctgttcacgtggctgtcgcgccgcccgaggaacgcgccggtctactaccccaacctcctcctgcgtgggctcgacctgtgggcgggccgcggccgcggcacgcgcagccccgtgggctggctccgcgacgccatctctgcctcggagccggacgtcatcgccgccgccgtctacctcgtcttcctctcctctgagacagaggctggtgaagacgacgggaagccaagcaggatgaggcagatgatgagcatgctgatgtggacggcggaggtgttgaggatggcgccggccaagaaaaacatgccacctatcagcatagagttcctccggcccatcgtcctcatcaagtggccgaataccagattggagaggatggccgcgagatataacgaggaaacgaacaagatctttatggacggattttcttcaattgttaacaagatctga

SEQ ID NO: 3960 - DNA, 1059 bp, Zea mays
  Peptide Sequence Number=SeqID_45739
atgatgacaaacattgttattattgttgacaccttttcgggcgccaatcactataacgagaaccggcggcggcgccctctgcagaggcgtggacggtacgcggccaggggccggacgccgtccaaccgctccttctcggcgtcgctcctggacaccatctaccactccctcgacgacggcgacggcgccgacgtcgttgttgacgccgcgcgtgggagtgtagaggagaaggcgaccgcgaccgcgacggcgcagttctggtgggcgaacaaggcggcgcccaagccctgcaggcaatcgtcgtcaaccgcggacagggacaggcgccggcgggaggcgggagttgcgcgcccgcgccactcggggtcggggtacgcgttgtcgtccgactcgtcggctgctagctacagcagcctctcctgctcgtcggggtcgaccgtaggtatcgagtctacgtgccgccgccacggcccgcccccgccgcgggtgtcattgtcagaggaatccgtcgccacggacgcggaggaggcgaccccgccgccacccaagagcaaaccaaagaaggccaggccatgtttccccgttgcaagaatccgaccaagggcctcagtgccaccaccatcgtccgggccacagccgccgtcgtcgccggcgacgttcgcgtgcgcactcaaggctctgttctcctcagcgcgcctccaaaggaagcccaaggctccggcaccggcaagaacgacccctccgcccaaaatctcgcagcctccgcgcatgtcgaccatgagcgctgcgaaggctgctgacgcaccacagccgtcggagccgacgacggtgcggctccaccctgaagccgaggcgtcggtggtgcgacgaagggtggaggagctggtgcggggcctcgaggagctggaggaggacgaggaggggagcgacgccagctccgacctcttcgagctggagagccttcgtggcgccggcgccgacgagctgcccgtgtacggcaccaccagcctcgtggccaactgcgcaatcgcgcagggtcaaacacgccctgacatctag

SEQ ID NO: 3961 - DNA, 2046 bp, Zea mays
  Peptide Sequence Number=SeqID_45740
atgccggaaccatcgaccaccgaagggcggcgtatccagggagagctcaagaatctcctggaggatgccgcggtccgacgggccgaaagctctgcctcccgaaggcaggggtacccctcggagcatcgcgtcgcgacttcccgattcatgtgggaagcctcggtccacaccgggcgcacgcgccacacagcgcctgcggccccgggtcgcctaggcaacgagcaccacccccgcaaccgtcgagcccacctcgacgagagggtgcgccgaggctaccaccccaggcgtgggggatgctacgacagcggggaggatcggagtccctcgcccgaaccacccgatccgcaggctttcagccgggccatacgacgagcgccgttcccgacctggtttcgaaccccgactaccatcacaaagtactcgggggagacgaggccagaactgtggctcgcggactaccgactggcctgccagctgggtggaacggacgatgacaatctcatcaaccgctacctccccctgttcctctccgacaccgctcgggcctggctggagcatctgcctccggggcagatctccaactgggacgacctggtccaagccttcgtcggcaacttccagggcacgtacgtgcgccctgggaactcctgggatctccgaagctgccgccagcagccgggagagtccctccgggactacatccggcgattctcgaagcagcgcaccgagctgcccaacgtcaccgactcggatgtcatcgacgcgttcctcgccagcaccacctgccgcgacctggtgagcaagctgggccgcaagacccccactagggcgagcgagctgatggacatcgccaccaagttcgcctctggccaggaggcggttgaggccatcttccggaaggacaagcagccccagggccgccaaccggaagatgtccccgaggcgtccactcagcgcggaaccaagaagaaaggcaagaagaagtcgcaagcgaaacgcgatgccgccgacgcggaccttgtcgccgccgctgagtacaagaaccctcagaaacctcccggatgcgccaacctcttcgacaagatgctcaaggagccgtgcccctatcaccaggggcccgtcaagcacacccttgaggagtgcgtcatgcttcggcgccacttccacaaggttgggccacctgtggagggtggcagggcccacaacaacgacaaggaggatcacgaggcagaggagttccccgaggtccgcgactatttcatgatctacggtgggcaagtggcaaacgcctcggctcggcaccgcaagcaagagcgtcgggaggtctgctcgataaaggtggcgacgccagtctacctagactggtccgacaagcccatcaccttcgaccatggcgatcacctcgaccgcgtgccgagcccggggaaatatccgctcgttgtcaaccccgtcatcggcaacgtcaggctcgccaaggtcctcatggacggaggcagcagcctcaacatcatctacgccgagaccctcgggctcctgcggatcgatctgtcctcggtccgggcaggcgcggcgccttttcacgggatcatccccgggaaacgcgtccagcccctcggacaactcgatctgcccgtctgcttcgggactccctccaacttccgaagggaaaccctcatgttcgaggtggtcgggttccgaggaacctaccacgcggtgctggggaggccatgctacgccaagttcatggccatccccaactacacctacctcaagctcaagatgtcgggccccaacggggtcatcgccgtcggccccacgtaccgacacgcgtacgaatgcgacgtgaagtgcgtggagtacgccgaggccctcgccgaatccgaggcccttatcgccgacctggagagcctctccaaggaggcgccagacgtgaagcgccatgccggcaacttcgagccagcagagacggttaagttcgtccctctcgaccccagcaacgacgcctccaagcagatccggatcggcaacgagctcgaccccaaatag

SEQ ID NO: 3962 - DNA, 270 bp, Zea mays
  Peptide Sequence Number=SeqID_45741
atggcggccggagctcggccgtggcgcccggtgtggccccccggcgttctgcgcagccccccaccccgcgagaacgatctggttgaggaacccgaagaactcgcaggagaagcccctgtgcagcagtcggtggcaatgagattgatggttcttggtattggctctggtaatggttgtccgcattgcaaccactgctcaggcgaagatgaagccgtggaaggagacttcgaggagttccaagactacgatgtgacggaacctcccaagtaa

SEQ ID NO: 3963 - DNA, 261 bp, Zea mays
  Peptide Sequence Number=SeqID_45742
atggaggaaagggagtttcagaaacatatggaatcgacaagactagctactcaagtatctattgcaagcccaagtagctcacaggggcttcccacatctgcaagggcaaatcaggaggaaactgatatggcaggtacggatgagggatatccgtggtcaagtttgatgcttcaggaccaatatcgttgtgtgtcgttgctggtggtatctgaatgggggcaatacaactttggagaatgcgagttgtgtttctgcctctga

SEQ ID NO: 3964 - DNA, 135 bp, Zea mays
  Peptide Sequence Number=SeqID_45743
atgcgaagctttacatgtcttcatgtcagtggtcgtcaaattttctccagtactgccttgagtagctgcagtggtgaccacacaagtgaacgagatgcaaagaaggcaggtgagaagacaaagttcttcagataa

SEQ ID NO: 3965 - DNA, 420 bp, Zea mays
  Peptide Sequence Number=SeqID_45744
atggcggtgagccctgttctgttgccagggaatcgatggggacgattgatatgtctggggatggagttcctcgccacgtcccttgcttatggcataattttttacacgttctctggaggatatggttgcttgagtaacttggccgtctaccttgccaccgggttggacagtcgagtgggaccctacctcagcagggccgagcatactgttgagtccagggctttgcatgtgctgaccaccttctgcggatttcaccccttagagttgtcaacccaccccattggcttgttccccgctgagaaggaggatgacccaatgtggaaggatcgggttgagcacgccaaggatgccttgcgaggtgaggcgatgtcccagcttatgggcctagtggagtctaccaagatcaccctggataactga

SEQ ID NO: 3966 - DNA, 360 bp, Zea mays
  Peptide Sequence Number=SeqID_45745
atgacgcagattggggcgcggccatggggtgaggagaggagaagggagcgtgcccgcgtggcttggagacaaccgggcaccatgggaggggcaaggagccgacgtgagggcagtcatggagataagcaacaacaaccaaggactgtgatgaacacgaactcaggaaattgggaaacggcggaggaaaaagtgagaactagggttcagaactcaaggggggacatcagcagaagtatgggttggcgtgttaagtcgggcgcaaagcagcaggccgataactcaggaaaagttaggatcgcaggaaagcaaacatcactcgagcattacctccaaaatgctattgagccatcaaatgcatga

SEQ ID NO: 3967 - DNA, 103 bp, Zea mays
  Peptide Sequence Number=SeqID_45746
atggaaatcagggtcggaacgaaggttgaaccagcgtcgaagctgcgcgcaagggagcttcggctcagtagcagaaaaaggaaccaacttaaggaggaaaatg

SEQ ID NO: 3968 - DNA, 552 bp, Zea mays
  Peptide Sequence Number=SeqID_45747
atgaccgtatccaatctgcctgagccggaactgagtgactgcataaaattaagttgtagcaatagcataactatgaaggaaaagctaagtgattcgtatataaggtgcactaaattctatgaaatcattaatcatgccataaacctagttaagaacaaattgactatagggaaggtgttcggcgaggggttgcgcagcacggtggtaagcagcagagaggaacggtcgcggtcgtcgattcggctccgtggttgggcgcaggggctcggccgtcggttggagtcaggggcgcgcggcatcgggctcgtggcagtcgggcttcggtgcgcaggcggcttccggtcgtgctcattcctaagcgcggggtcggcgtcctgcatggggattcaggcggctgggcgctctgctggcgcggcttggcgtgcagggcagcacggttcggcagctggcgctagagcgtggaagcagggggagggagagagaagggcaggtggggaggagggagaaggaggaatgggtgcggattcctggcttgggcgcggcggcggctag

SEQ ID NO: 3969 - DNA, 306 bp, Zea mays
  Peptide Sequence Number=SeqID_45748
atggcggcggccaatcttgaagctagcaaaggcctcgtctccaactaccgccaactgggttactcgccatcatcggccatatcgtcgtcaagggtcctccctcttcaaaccatggacaccagtgcaaacactacaacctccgtccttggcgatatgtccacaaggattactagtacatatattcatagagagacagaccttaccactaatgaggtggccgcaggggcttctaaagctgattctcaccaaatgatgtccaccgagcagaccattgaggtcccttcagagatctccatgttgctatag

SEQ ID NO: 3970 - DNA, 324 bp, Zea mays
  Peptide Sequence Number=SeqID_45749
atggcggcgcaccccaggtccggtggcgatggcggttacgcgaggcatggagggcgaccggcggcggcgctcacccaggatcgagcgacgacgacgctctcgaagcggacgagcggcggcggcgcaccccaggtccggtggcgacagcggttgcgcgagttgtggtatgcttcggcagtggcggtggccctgagggagcgcgacggtggtggatctgggaggcgcgcacacggcggcgcatcccagaggcgcacgcacgacgtcggctctttggaggcacgcgccccagagtggcacctgctggcgtcccacctccggcaatga

SEQ ID NO: 3971 - DNA, 246 bp, Zea mays
  Peptide Sequence Number=SeqID_45750
atgtcgtctttgtctaagtgggtcgggtgcctcaccttcatcaagctcaagggcctcaaccccgtcatggcggatgcatcttccatcagcgtcatgttccccgaatacgctgcacgaaatcgtagcgtgaagcccattttcaagcagaccaaggagatcgatgaccatctaggctgggtgttccccgccgctgccaatgaggagccaggtgccggaccgaccctctcaacagcgccaggagcatga

SEQ ID NO: 3972 - DNA, 246 bp, Zea mays
  Peptide Sequence Number=SeqID_45751
atgaagtttgttgctgcctacctacatgttgccctcgctgggaacccaatccctccgctaagaaatcatcatcattttggagttagtgtttggttccggagccagttaggatggtgcactgataaaattgggttttctctagcagatgtggaaatcctaaaatctgtactgaggaattcccttacttcacctggtgaggagttctggaatgcagcaattgaatgtgctgatgggatatccgcctag

SEQ ID NO: 3973 - DNA, 99 bp, Zea mays
  Peptide Sequence Number=SeqID_45752
atggtgcagaccaacctctccatcgacaagattaatgccatgcttaaggcattcgaccatacgagaggcgttatccttataccggttcatgtagcatga

SEQ ID NO: 3974 - DNA, 204 bp, Zea mays
  Peptide Sequence Number=SeqID_45753
atggatccaggatctggcaacctcttcaccccctgcttcctcgagaacctaggccgggagcgtgacgttggggaggagcgcgacttcctgcttgccaccacagccatgatgcatggcgagctagcgaggttgggcacgcccaggagtaggctgaggaatgggcgccgatgcaggctacggttcgccgccaataaggctgagtag

SEQ ID NO: 3975 - DNA, 1308 bp, Zea mays
  Peptide Sequence Number=SeqID_45754
atggaggccttcctagccggcctcttcagggcgcctccacgggccgtccccgcccctcggggcacgcctctccccagccttcctctcttctacggcaggcgccgcaggaggccgtcctcctccgtggtctgcatggcggagccctatctgattgccaagctggactctgcggagaaggcctggaaagaaatgtcggttaggttggcagatcctgacattgtctcggatccaagcgaataccaaaaaatcgcgcagtctgtttctgaactggatcaggtcgtgaccacatacaggcaattcaaggattgtgagaggcaacttgaagcgacaaaagctctggaaaaagagaacgaaggtgaccccgatatgttagagatgatagcttctgagttggaggctctatctaaccagctcgcagagcttgaagaaaaaatgaagtttctactgcttcccagcgatcctctagattcacgcaacatcttacttgaagtaagagcaggtgctggtggtgatgaagctgggatttgggctggtgaccttgttcgcatgtaccagagatactgtgagcgcaacaattggaagtttaagccagtttcttgctcagaagcagaaatgggtgggtacaagacatacgtgatggaggtcaaggggaaacaagtctatagtaaactgaagtttgagtcaggtgtacaccgtgttcagcgtgttcccttgacagaggctatgggtcgtgttcatacgtcaacagcaactgtagctattatgccagaggctgatgaagttgatgtggttattgatccgaaagatattgagcttaaaacagcaagatctggtggagctggagggcagaatgttaacaaggtggagacggctgttgatcttattcacaagccgacaggaatacggatattctgtacggaagagagatcacagctacagaacagagagcgggcatttcaattgttgagagcaaaactttacgagataaaattaagggagcaacaagaatcattaagaaaccagaggaaattgcaggttggtactggtgcccgatccgagaagataaggacgtacaactacaagattcagaggaaccctaaccctaatgagctggcagcccaacggtggtgccagtccatctacacatacatggataatataggaacacacattttaacattccccgcactcacatcgggggcaccacaaacgatgagactggaagaagagctgaaggtaggagccgacgagctgaaatcccctagcagtcgcagcgtcgtgaggatgcgaatgttgtgcctggagtag

SEQ ID NO: 3976 - DNA, 1332 bp, Zea mays
  Peptide Sequence Number=SeqID_45755
gtgtctcgaagtgggcatacggtgattagagccggtcctgttttaattctctttggaggtgaagatgccaaagggaagaaactacatgaccttcatatgtttgatctgaagtcattaacatggcttcctctgaactataaagttcattgttttaggggtgctggaccttctccaagatcaaatcatgtagccgccctttacgatgatagagtcctattgatttttggaggtcagtcgaagtccaagaccctgaatgatattcatgctctagattttgaaacaattgctgaaaaatttgatatctttatactattagatggtatggtcaagggtcaaaacccatgggcatcatccatcacctcgagcaggaggtggaagcaagaaaaaacatggtctgtttgtgtagtgcctcctagttcctcaatcactacaaagaaaggtttcagcatggttccattgtactacagggacaagatcgtgcttgttgcttttggagggaacaaaaaggaaccatccgacaaggttgaagtactagtggtgctgcaaaacgagcactgtttcagctggcggtctgcgcccgaggtggaacccttactgtacgacgagtctcctccaggctcaagggaactcgccgaccatctcagcagctgcgctccaccgtatcctactagctccgcggcgaggagcggtctcgccgccacagcggagaactcctgcgggaggaaacccctcccggactcactgctacggacctcgaacctcgggggctcgtcgctccgcaggcagttccgtcaggaagaggagtgcagcagcctggcgcaaaagctgcagaaaccgatcgacgacgacaggtacaaggacgccgccgacgagtgctccgagcatcaaccaccctcggccacgaaccctaaaccgcggaacgacgcgcggcggtcgtccccggaggtcgtcgtcgacgcaaaagcgaggaggctgctgggcaggagctcgtcggacatgaacaaccaccaggacgcaagggtggccgccctggtcaggaggaacgtggcgctggaagagcagctgtcggcggcgctggcgagcaaggacgaggcggagaagaacctgtccctggtcatcgacagcaaggacggcctggagaagaggctggccgagaaggacagggaggtcgaggcgctgagggagaaggcgacggggttggagctggcgcaggaggaggccaacagcctctccaacaccgtccacgccgacaacgtgcggctggagcgcgaggtggcgttcctgaaggccgtcatggacgagacccagaaggcaagagagttactctcttag

SEQ ID NO: 3977 - DNA, 486 bp, Zea mays
  Peptide Sequence Number=SeqID_45756
atgggcaaggctgcccagccgccgtcgcctggcctatgggccccacgctctagatgcctctcctccaaccaactcctctgctctgtctgcccgatatgtgtgtcggagctcgttatcgctgtttgcattgagcctgtcccaccaattgtcctcgcagtcaccgagaaggtaaagagcaaggtagagatgcaaactctcgtggatgacgctggtatttttaccgaggtaaagagcaaggtagagatgcaaactcccgtggatgatgccggtatttttaccgaggccttctccacgcgtaagtggtgcttcgcttctggctcctctcagacgctctccgtcgtctccactatcaagcttctggccgaaacgctgcgggcctcgttcgctctgcctgagggcgcccgtctacggacctctcagcgcaaactgttcggtgtcccaccggacagtccgatgcacaccagacaggtactgttcactgcctag

SEQ ID NO: 3978 - DNA, 2082 bp, Zea mays
  Peptide Sequence Number=SeqID_45757
atggaccctcctctccggctgctgcccgatgggcgcctcatggcagcgctgttgctcctggcagcctgcatgtccgcctgcagcgtgcaggcggtgacgagcgcggaggcctcctacatcgcgcgccgccagctgctggccatgaaggaggccggcgccggcgagggcggcgacctgccggcggacttcgagttcgacgaccgcgtcggcgccgccaacttccccaacccgcgcctccgccgcgcgtacatcgcgctgcaggcctggcgccgcgccttctactccgaccccaagggctacaccgccaactgggtcggcgaggacgtgtgcaagtacaacggcgtcatctgcacggaggcgctggacgaccccaaggtcacggtcgtggccgggatcgacctcaacggcgccgacatcgcggggtacctgccgcccgagctcggcctgctcaccgacctcgccttcttccacatcaacaccaaccgcttctgcggcatcatccccaagagcatgtcgcggctgtcgctgctgcacgagttcgacgtgagcaacaaccgcttcgtcggcgtcttcccctacgtctgcctcgagatggtgtcgctcaagtacctcgacctccgcttcaacgactttgagggcgagctgccgccagcgctcttcgacaaggacctggacgccatcttcgtcaacaccaaccgattcgtgggctatatcccggagaacctcggcaactccacggcgtccgtcatcgttttcgccaacaacgccttcgtcggatgcatccccaagagcatcggccgcatggtgaagacgctggacgaaatcatcttcctcaacaacaaactcgacgggtgcctgccgctggagatgggcctgctggtcaacaccaccgtcatcgacgtcagcgggaacatgctcgtgggcaccatccccgagcagctctccaacatcgccaagctggagcagctcgacgtgtcccggaacgtcttcaccggcatcgtgcacgagtccatctgcgagctcccggcgctcgtcaacttcagcttcgccttcaacttcttcaactcggaggccgtcgtgtgcatgccgtccgacaaggcgctcgtcaacttcgacgacagggacaactgcctcggcgcgctgcgcccggcgcagaagaccgcgctgcaggccaccatcgtcgtcggtgccagggaagccgccttcggtgccagggaagcctgctgcacctgcgcccatgccaaccccgcatacaccgccggatgtgtcgccagaaccgcttccagaaccttcgccggtgcctgcacctgcacccatgccgatgccgacccctcgttcaccgccggcggacgaatacattccaacgccacctgtacccgcgaagtcaccgccagcgacctcgccaccggcatcacgtggtgctccaccgcctcaggcacaacctccagctgcctcctccccgcctgcaacacctgtgaaatcgtctcctccgccagcagcagttgttttaccaccacctgcgaagactccttctcctccggcccctgttgcttcaccaccaccagaagcaccagtgagctctccacagcctcaagtaaaatcacctcctccaccagcaccggtggcctcaccaccaccacccatgaagtcgcctcccccaccagcgcgagtggcatcacctccgccgctgatgaaatcacctccaccaccagcaccagtggcctctccaccccaaccgttgaaatctccaccaccgccagtactggtggcctctccacctccatcggtgaaatctccaccaccgccggtaccagtggcctctccacctccaccggtgaaatctccaccaccgctggctccagtgagctcaccttctcctccggtgaagttgccaccactaccagctcctgggaaatcaaccccacctccagaagaggaaaaaccaacaccacctactccagtaaagtcatcgccgcctccagagaagtctctacctccacccactctgactacctctccaccaccacaagagaagcctactcctccatcaactccatccaaaccaccaccatctccagttga

SEQ ID NO: 3979 - DNA, 1281 bp, Zea mays
  Peptide Sequence Number=SeqID_45758
atgtcgttgaatgaaggtggaggtagggcttctgccggtggtgccgttgaatcttcttctttctttggtggggcagaggtgaccgcaggaggaggtgagcttaccggggctggtggtggtagcgatggtggcttcactggtgctggtggcggagagctaattggtgctggcggcggtggggacttcattggaggtggtggcgaactgaccggcgctggtggaggtggagacttcacagggggaggaagtgagctcataggggccggtggaggtggtgacttggccggaggtggtggagagctaatcggtgctggtggtggggaagactttacttcaggaggtggcaagcttacaggagcaggtggaggtgacgactttggcgctgatggtggtgagctaactggggctggtggtggagaggacttcagttctggaggtggcgagctcactggagtaggtggaggtgacgacttcggcgctggtggtggtgagctaactggggttggtggaggagaggacttcacttctggaggcggcgagctcacgggagtaggtggaggtaatgacttaggtgctggtggtggtgagctgactagtgttggtggtggagaagactttactactggaggtggtgagctcacaggagtaggtggtggagatggcttaggcgtcggtggtggtaagctgactggtgccggtggtggagaagatttcaccactggaggtggtgagctcacaggagcaggtggaggcaatggcttaggtgtcggtggtggtgagctgactggtgtcggcggtggagaagacttcaccaccggaggtggtgagctcacaggagcaggtggaggtaatggcttaggtgtcggtggtggtgagctgactggtgccggtggtggagaagacttcaccactggaggtggtgagctcacaggagcaggtggaggtgacgacttaggcgtaggtggtggtgagctaaccgttgccggtggtggagaagttttctctaccattggaggtgacgacggtgacttgggctctgatggcggtgagctgatcggtgccagtggcggggatgacttctctgcttcaggaggcgagctcacgtgtgcaggtgggcttgatgacttaggcgtcattggtggcgagctaagtggtgctggtggtggagaagacttcaccgtcgtaggtggagagctcacagaactaggtggagatgatggcttaggctccaatggtggtgagctgactggtgctggtggtggagaagtcttctctacttga

SEQ ID NO: 3980 - DNA, 432 bp, Zea mays
  Peptide Sequence Number=SeqID_45759
atggagacacaaggaaggcaaacacttcatcagtcttctcctccactcggtattgggacttgcctcaaccaccagctaggagttgggatcctcccctctcctgatgtgcttcacccttggcacgtcgacgtgacaatccggttcagaagtcatgagctcatgccccttaacttcggttatgacataactctcctcccacccggatatcccgccaacatcgtctaccatttctaccagctggggagagcacaatcacacttgcttccctggccaatagtaggatacctgaacacaatgatctggttcaggagtcttgagttcatgactcttggcatcagccacaacaagacactcccccccgccgggacacactttgggctccgaccaccattttctctagccaagaggagcgagaccaagcctgctccctag

SEQ ID NO: 3981 - DNA, 423 bp, Zea mays
  Peptide Sequence Number=SeqID_45760
atggctaaaaattttggcagcaaaacagtgcaaatagcaatgaatgctgtggtaacttcacacctactcgtctgtttatatagtactgcagcatttgagaacaagtccccaacagacctattgtcactatgcgcggaattaaaggacgaggtcgtggccacatgcgggagggtggtgccactacaagaggaggtgcgactgctgaatgagagagtggcgctgctggatcaggaggcgatgaagtcgctgagggagagggtggtcccgctggaggaggaggtgcgacgactgaaggaaagtcttctagcggtggccggtgaacgagatgagtctcggcgccaagccatcgatgcctttctccgtgctgactcccttgcgagggatctggagaccgagcgatctgcccaaagcctaagggcctag

SEQ ID NO: 3982 - DNA, 816 bp, Zea mays
  Peptide Sequence Number=SeqID_45761
atggtggctgccggcaggaacagggcggagcggtggaacctcgccggcgcgacggcgctcgtcaccggcggcagcaagggcattgggtacatacatacatacatacagcacgcgatcgtcgaggagctcgccgggttcggcgcccgggtgcacacgtgctcgcgcaacgcggcggagctggaggagtgccggcggagatgggacgagaaggggctgcaggtgaccgtgtccgcctgcgacgtgtcggcgcgcgccgaccgcgagcgcctcgtggccaccgtgggggccaccttcggcggcaggctcgatatcctcgtgaacaacgcggggcagtccctgttcaagcggacggccgagtgcaccggcgaggactactcccggatcatggcgaccaacctggagtcgtgcttccacctcagccagctcgcgcacccgctcctccgcctcgccagcggcggcgggggcggcagcgtcgtgcacgtctcctccgtcgctggcttcgtcgggctcccggcgctcgccgtctactccatgtccaagggcgccctgaaccagctcacgcgcagcctcgccgccgagtgggccggcgacggcatccgcgtcaactgcgtcgcgccggggggcatcagaaccgacatcagcagcgataagacgatagacccagagctggcgaagagggagatggcgcgggtgcccatggggaggatcggcgagccggaggaggtggcgtccatggtggccttcctctgcatgccggcggcgtcctacatgaccggccaagtcatctgcatcgatggcggccgcaccatagcttag

SEQ ID NO: 3983 - DNA, 698 bp, Zea mays
  Peptide Sequence Number=SeqID_45762
gtgagctagtcactcacagcacaggtgacagggtggtggtgggcggcgggattgcggttgcggcagtagggttcaggctcggataccagcctcctcctcctcctcctcctcctccgcctccgtttccagaagggggcgagcgctaccggggagctcgacagacgccgagccgcaatgcccaagatgttcgggttctctcggcgccggatgaagctgggcaggttgaagggccatctgcacgaccatttccatggccctcgaagcccgtctcggaccaccaagcgttccagcagtcatcacaacaggatccattggctacctcagtgagtgggcgcgccgacgacctcgcctggcgctgctcgtccgacactttcgatctcaatgggcgcgatttcgagagctccgagaactgggcggtcctgtccaccgagggtgacaagccagctcctcgtttcgatatattgagcttagacaagcttacctgggattctgttgctcctaaagttcgaccaccattgaacgggcgttctctgaagctgaggccatgcagaggtcattgcctgaggcctctgcagcagccacgcgctggagcaaagggggcgcagctgcagcagacggggcagtcacacgctggagaagggctgctgagggtgcgcaaccgcgcggacaacggctattgtgctgctactgtggtacag

SEQ ID NO: 3984 - DNA, 333 bp, Zea mays
  Peptide Sequence Number=SeqID_45763
atggaccgcgtggcgaagctggcgtcagagcgcgcggtggtggtgttcacggcgagcaactgcagcatgggcgacgtcgtgacgtcgctcctgagcagccttggcgtgagcgcggcggtgcacgagctggacagcgacccccggggccaggagatggagcgcgagcttgccaggaggctcggcggcggcagcgctgctgagcgcggaaccacagctctgccagcggtgttcgtgggcggcagcctcgtcggcgggaccaacagggtcatggcgctgcaccttgccggcgagctcgtgcccatgctcaagagcgccggcgcgctctggctgtag

SEQ ID NO: 3985 - DNA, 390 bp, Zea mays
  Peptide Sequence Number=SeqID_45764
atggcgatgctaatgcattcgtttctgtttgtttttcagcattgtgtggggatcaattgcttggcttatctagatggttccatatttagtacaagtgatcatcttttttgcgggagccgtgatggtaccttgaaaagatgggaattaaataatggggatgcaagcttctcaggaacttttgagtctcatgttgattggaggtttgatatagggggaaccgctgtagagtgtggagatatagggggaaagagaatgctgatgtgggaggcgcgcgagctgctgcgcacggatgagagggcgagccgtgggagcgggctgggaacggagcggcttcgtcccattgattttttggagtgggatggttccggatctgaggaaaatattccctaa

SEQ ID NO: 3986 - DNA, 237 bp, Zea mays
  Peptide Sequence Number=SeqID_45765
atgcacaagtcacccctgccccaattgttgaagaagagggatgttgtagctctgtctggtgttgaaacccctattgatgttgttatagtaacaaatgtggtggtcgacagtgatgaggatggtagagaggaggatattgttgatgctaattgggaagctcattgtgttgagatgcggatggcatatttttgcaagaccaatgatgggaaaaagtatatttcagttttgaaggcatag

SEQ ID NO: 3987 - DNA, 1512 bp, Zea mays
  Peptide Sequence Number=SeqID_45766
atggaggagctcgtcgccgccatcgcgcaccggcggaggcgcgaggtcgccgcgctcgccgagaggcacgccgtgtcccgcttcgcgcacaagggcaggatccagtccatgcttcgtctgagattgttacgccagagaggtacagttgaggatgaaccgtggagtctactaaagccggttaggccacaccaacaaaaacatgtgggcaagttgaggtacgatagcagggacacagacttacaaaaagcaaacaattcctgtcaacaaaataatagcaagtgcatgcctgacgaacaactttataacgatagagttccagctgaggaaaaatcaaatgatatatccgctgaaggccttgttgatggttcaggaaatctacagtgtgatgagcagatgaaagcaaagggggatacatgtcagaaagattgtgaaaacttttgtgttcatagtcaacactattctgaagcatcaagctttgcaaggtatggtgagcatagtactatcgatgagaatcagtttgtggaagatatctccccaagcactacaagcacgttgcatgaactagaaactccatcgtccagaggagataatcttcgcgaagaagacaaccaaagcataaacggttcctgggaagagagagggttatggataagcagcctaggttggcctgcaccaattgatactatgagtccggatagctggcatcaggaaacaatgggtgatattgagaatcataataatccaattcaattcaatgaccgcccctggatagagtcccctaactcgtggagatcactatgtgttgtcacgcaatcagactgtcatgctctgtcacacaatgctgacatttgcaaccttcttgagagaaaaaaggtctcaaagtctcttgagagtgacttcagcaataaaatgaaccagctgttgctaacagctctgcaaaaacaaaggcaacaacggatgatggatgactttggaggatactatgatgaacgcatgtactggagacaaaatgatgaaattcgtgatgctgataaggaggcatctgctccatgttcattagcccctgtcgcacatcttggagctcatcagcaagagagttggcagcattcttcatttggaagtcaacatcaacaccacgataaccaaaatttacttgaaatggaagtcagggtaaggggtgaaatgtcccagattcatcaggaaatatatcaactgcggaagttggtggaaagttgcattgcatcccaagtaaagatgcagcactccattaaagaagaggtgtgcagtgcacttcgtgaggcaggcttgatgcgaagccaacccgacacagcagcagcaaaaaggggtaactgctgcatctgccatcgaatgcaagttgactctctactttacaggtgtgggcatgtgtgcacctgttttgactgcgccgatcagctgaaatcgagcggcatgagctgcccaatctgtcaatctcctattgatgatgttgttctggcgcggttgaatttttga

SEQ ID NO: 3988 - DNA, 360 bp, Zea mays
  Peptide Sequence Number=SeqID_45767
atgaagctcatgatcatagtactgacacatgggcagcaccctgaatttaaatacctgacacatatgcacctaggatcctttggaaaaagaagatcatgcccaatgctcgagggcgccactgaagacatggacctcatgggtcggctcctcgatgagctcgacctgctgcagcgccactccccggatgtggaccttgacatggtggacatggaccttcttaaacatattgtagttcacaagaacaacacatttttgtacaggcagaacaactttcagaattttacctgcccgccagccagtttgaaccagtcaggaaccggtgatgatcttccagcatcatgtgagaacagagaggcatga

SEQ ID NO: 3989 - DNA, 789 bp, Zea mays
  Peptide Sequence Number=SeqID_45768
atggacaccttccccaacgacgggcgccgcgtctcccaggctcatccggggccagcttccagcctccggttgagcaggctcttccgtatgccgtcgttatcaaacaagaacgcggcgcacaccggcagggacgacgatgacgtagacagggcgctgcagtcgaagcgctcgagcgacaccgccagcgacacggtgctgggtcgagccgagcacacagcctgctccttggcagcgccccggaggagggtgagtgcgcgatcgggcgcgcgccgtcgtcccaccaggctggcgcagagggagcatttagaccgccggcatctgacgcgagcggggacgatgactcggaggccggagcccgccggaacactcgcgccgtggaaccgggacggaggggacgggcagcggcctatcggtgtcgacgcgggagaactggcggagcgagaaggggtcgacggccacgtccctcacccagtcaccctcgtatcttccggaaggcctcttcccacgtccctctgcatggctgagcgcgtacgcgctgcagtgggcagtggcgactggcggcgagaggaggagcaatcggagtttggagatccggagcccactcctgccatggcgcgcagtattcaatttctggtgctggcgtcatcaccacgctggaatcaaatttcatgggccagagttaggggagcagggaccagggacgaggagctccagcttggcggcctttggacattctcgacaacacttatgggcctgcgaagagagactgtctccaacagcgtcccctaa

SEQ ID NO: 3990 - DNA, 960 bp, Zea mays
  Peptide Sequence Number=SeqID_45769
atggtgccatgcctcgtctggtctgtgcgcggcgcgcatgccaactccgatccaactcacagatgggcgcagatcgccaagcacctgcccgggcgcacggataacgaggtcaagaacttctggaactcgtgcatcaagaagaagctcatcgcgcagggcctcgaccccaagacccacaacctcctgccggcctccaggactctcctccacggcaacggggcaaaccctagcagcaacaatcctgcccacttcaactcaaacggctgcgctgctgtcgtctccgtcgccacgacgcccttcaccatcagctccccgaccaaggccgccgcctacggcaccgtcacggccacgccgccgccggagacgatggcgccggcaacgtacgacgtccctaataattaccctgacggcatgctcatgaggcatgatcaggcagccacggcggctgcgattccgggatacccgtaccaccccggaaacggcggcggcgtgctgatgagcttcagggaccagaatgctggtctccagacatctgtggacttcgtgaacggctcctcgtcctcctcctccatggatcacgccgccggcatgcctaacggcaacggctttagccaacaaggcatgggcgcggccttcatggacgtgacggcgggaatgtggagcaccgcagccgtggattctggcatgtgtgcagggatggaagtggctcagccaccgccgccgccgccgcagcagccgctgccaccacaagggctggtgcagggggaggtgctcgtcggccgacaaactgtgatgaacggtggcggtgcagttgctgacaagggcatggacatgatggacgtctcttcagtgtatggcggcgccggtgcaatggcgttcgatctggagctgatggagtcatgcgcgttgttttgcggcagcaccggcaacaccatggagcagctgcaatgggactgctaa

SEQ ID NO: 3991 - DNA, 1095 bp, Zea mays
  Peptide Sequence Number=SeqID_45770
atgaggacgccgcggggtgtctcgtcgtcgttccttgccctctacgggttccttctcctcgtcgccgtctcggtggccgcgaccggctacgccgcttcgccgggggagagttccaacggttacggcgctgcagccggttcgaacggcggcggccaggagggaagctacacggtgccgccgtaccagaagtccgtggacggcctcgacgagcggtactacgagaggtcgtgcccgaaaatggaggagatcgtcgggacggccgtgatgaaggccgtgaaagccgacgagaccctcgccgccagcatcatccgcctcttcttccacgacttcgccgtcgggggcgtggacgggtcggtcctggtagacgtgcccgggcagagcgagaagtacgcggaggcgagcaggacgctgcgcgggttcgagctgatcgaggggatcaagaaggaggtggaggccaagtgccgcgccaccgtctcctgcgccgacatcctcaccgccgccgctcgcgacgccgccttctcggccggggcgccctactggtcgctcaagtacgggcgcagggacaggaaggactactccagcgccgaggcggccgaccgcgacgtccccatgggcggccagcgcgtcaccgagctcgtcgccttcttcgatacgaagggtctcaacatccaagacctcgtcgcgctttccggagctcacacgatcgggcgcgcgacgtgcggatccgtgaggccggggctgtgcaagcgccggaaggcacgcacgctggaccggcagtacggcgacttcctgcagcgcaagtgccgcgccggcggcgacgcggcggaggcgtacgtggagctggacggcgagacgcccacggcgttcgacaaccagtactacaagaacctgctgcacgggaaggggctgctggacacggaccaggcgctgctggcggactcccggacggccgggttcgtcaagtcgttcgcgtaccagaagccccaggagttcgcccaccagttcgccaagtccatgcgccgcctcggcgaggcgcaggtgctcaccgggaacgagggcgaggtccgccgcaagtgctcggccgtcaactactaa

SEQ ID NO: 3992 - DNA, 912 bp, Zea mays
  Peptide Sequence Number=SeqID_45771
atgcggcttggtggggacaatgtgctgtggtgtggtcgagtagctttcaaagaaccgattcgggtgttagggttcccgggatttgtgggtgattcgttgaaccgcaacatgtttgcctcattagtctgcatgctcaggggagtcaatggtgaggttcgcaaatggcgtcctgctggggcagaccgtggcttcaccttcctacgctataacctcactgtggcataccacagaacaaatctcttggtacgctacggtaggtggtcaaggaatccaaatggaggccctctagaatctcttggatataagcaaggttacagagttgatgtggatattcctgaccaaacatgggtagaggcatgtagcttccatgatgttcttattttcaacactgggcattggtggtgggcaccctcaaaatttgatccaatacggtcaccaatgctgttctttgagaaggggaggccaattgtacctcctttactgccaccggctggactggatctggctcttcaaaacatgatatccttcgcgaacaaagcaacaagaccaaacacagtgaaattcttccgcactcaatctcctagacatttcgaaggtggtgactggaatgaaggtggatcttgccaatgtaatcagcccttgtcgtcaaaagaggtggaagaaattttctctttggacaataacagcactaatgtagaagcacgcttggtaaaccaacacttggtgaaggctcttcaacagactagtttcagagttctggacatcactcgcatgagtgaattcagagctgatgcccacccttcaacaactggcgggaaaaaacacgatgattgcatgcattggtgtttgccaggaccaacggatacatggaacgatttgctagctttgagtctcgaggcacttgagagctag

SEQ ID NO: 3993 - DNA, 195 bp, Zea mays
  Peptide Sequence Number=SeqID_45772
atgggtctcggtgcagtgtttgtgaaccagctggtaaagtttgatgagaagctcaaggaggacctcgacaagatgcttgagcgcgccaggctagccaacgagcagcgctacattggtactgtgctaacttgccctggcatgttatgtctgcaaattcattttgctattgttgccggatgtaaatgtggaatatag

SEQ ID NO: 3994 - DNA, 1884 bp, Zea mays
  Peptide Sequence Number=SeqID_45773
atggtggacgtagaactgtttgttaaggagactagtgatcacagcatcagctctgaggaagaagatatccttgtcaggagctgtagcaatctcaatgtgagctttggataccattgtgattctcatcagagtttttctcctgaaaatgatcatggcaatggcatttctcctaagaacacgtttgggactaataccatgatggggtcacgaaatggctcattcacttgtttatctggtgctgctattagtgcaaatttcacactggcaaatacaaacatttgcaatggtcttattggcgaagaaattttaccagaactagattctccaaactcctttagaaaaattgtttcttctccatcaatgtcaagattggactcgttctccacctcacaaggaagtcctgtgtcaactgagagctctatatttgagatcagtaaaaacctttggaggtccagtgcaccaacaactgtatcatccaattttctgactaatacagaggtgaaaatggctgggggagctgctggagaggatagagtccaagctgtgtgctcagagaaaaatggatggctgatttgtgggatatatgatgggtttaatgggagggatgcagctgattttcttgcagtaactctatatgataacatagtatattacttgtacctgctggagaatcggataaagcaacaaaatggtctgtacaattcatcagaaagctctctcgatggtcttaaaagtgagttaacactagccatgagaaactcagagaatgaagacataaaattttctgaaacatttcgatctggcgtgctgaattgcctttctactgctgttgagcaagccgagaatgactttttatgcatggttgaacaagagatggatgatagaccagatttagtttcagtagggtcttgtgttctggttcttcttcttcatggaacagatctgtgcatcttaaatatgggggacagtagagctgtgcttgcttccatgccatatgtagaaaatggtgctttgaaggctgctcaactgacagagacccactcacttgaaaatccttcggaataccaaagacttttagctgctcatcccaatgattcttcagttgtcaggggtaacaaaataaaaggaaagctgaaggttactcgtgcttttggagttggctatctgaagcagaggaagttcaatgatgcactcatgggcattctacgagtccgcgatttgagcagccctccatatgtttacacaaatccacacacattgagtcacaaagttacagatgatgatttgttcgttgtgcttggtagtgatggcctatttgatttcttcagtaatgatgaagttgttctgttggtttatcaatttatgcacgataatccaatgggggatcctgcaaaatatcttatcgagcaacttatactcaaagcagccaaggaagcagctttaacagccgaagaattgatgaggatacctgttgggagtaggagaaagtaccacgatgatgtgactgtcgttgttatcacccttggaaatgcacagagaacgatgactgcgtcaacatccatcagtgagatcgaggagaggatggaggtgttcatccacgaggactacgtgaacaagcgcaacgagctgaggagggagcagaggcgccgggaactgcagaggctgcaggtggagagcaaccccgacgcgtccagggaggcgctggcaagccgggagagcccgaggacgccggcccagtgcctgacgccgaccggcgcgtcgccgtccagcttcagatccccgacttcgaggagcacgctgcagtcgccggccgcagcggcggggcaggctgccggttggccgtcggagcatcgccgcctctacgactgcctcaagccgtactag

SEQ ID NO: 3995 - DNA, 1014 bp, Zea mays
  Peptide Sequence Number=SeqID_45774
atgggcggtgattgctcaccgtcgtcaaatctgccgcgggggatctcctggatgcgtcgtcctcggtttcctgagcatcgactgcgacttggacgccgactccaacgggtacacggacaagattctgtcactacatctgaatttgaagcttcaatctgcagtgtttacggcactaagtccacaacctccagtctgctccagcaagacggcaactcaggtgaaccatcaagtgtaaactctgcttcagttactcaaaaaacatcaaatgctatcaagtcagatgaccctacatgggagcattgctttgtcccggatatgagtaagaagcatgcaatacagtgcaagtactgtgacaaggtgatccatggtggaattactagagttaagtatcatcttgcaaacattggaggtttcaatgttacaaagtgcaagaaagttccggcacctgttaatcaagagatggaggccttgcttacaaagaagactagtgaaaaagaacagagaaagaaggaaaagcaaagagaaagggatgaaattgatctagataaatcagatggatccaatgaagaagacaatgagcatgagaatgatattgttgtgctgaaatcaacaaggaatgatagaatgagggatcttgtctttgtgaaatttaattctaaactaagggagaagagaaacaacaagagcaaagatccaatagagaaggaattgaatgatattcttgaggatggtggcaatgaatttattaccggtgttgttccagatgaaaatgttgatcaagatgaagaccatgagggtgcacatgatgaaccatcacaggaaccatcaatatcaaaagcacaactaccagccaaaagaaagaggcatgggcatcctaggaaaaagaaacttaggagcctcaaatctctcttgtctggtgatttagagcctgcaacctgtgcttcatcttctgaatccgaagataatgaatctatgcaaattgaagcttcaaattcagattctggagatgagtag

SEQ ID NO: 3996 - DNA, 609 bp, Zea mays
  Peptide Sequence Number=SeqID_45775
atgggcatgggagctctcgcgttcggggtcgtctgccagggctatatatatgccttcggcaccctccgctcgcccctgaacgagaacaccctgatcccgcgcgattgccaacgaaaccaccattaccgccagccgagctgcatgatttcgcgagccgctgtcgcgcgtccaccgggaagcaaggagggtggctggactcacacctcggcaaggttcaccgtgcacacaaaggaatcaggtgtggccgaattttcattggaccggaatttcggcgttgaacaacgccggcaccaggacctcggggagggggaaataccgggtcacaccgatgaggttgtcacctcggggacgggtgcggcaccctcgctaccgaggcgggagtttgaagaagaacgacacgccgtagattgggaaattaaggacgagcaagctatagaggatccaggggttcagcaggtggagactgctgagcaggagctcgttgaaggcaagttgctgctaggtactcaacatcccaacgaagagatcttcctctcccaaatcaaggaactagaaactgtatatacaatgacactggtgaaccagtgctacggccctacggttgaatga

SEQ ID NO: 3997 - DNA, 552 bp, Zea mays
  Peptide Sequence Number=SeqID_45776
atgatggtcctcgcctcagttgccaccacttcatttgccattctacttcttttatctctcccctcatgcctccacctccgcgccaccccattctcggtagaggacgtaggagcatgtgcctcctccccatattcgtccgacaccagccccgacaccaactcacgcagtggctattgcacatcaagcgcgcaccatcattttcgcctcgtcggacgccccgttcgtcttcctggccttcgccctgttcttcctccccaacctgctgccctcgcccacggtcgcagccgcgagctgatcaacgctcgtcgacgcggggctgggaagacactcgcattctctcacccttcttggattgacgcctgcggtatactacctatgtcgccttcagatgcccaggtcttcgtcgtgtccttgtccggcaacgaacagggaggaggtaatggaagcccagggcttccattagtacgggaagccccagtcagcaaatgggtcccgaaattacggtgtaaaaatcgtgtgcatccgatcgtgtgcgggttctggctcgaatag

SEQ ID NO: 3998 - DNA, 486 bp, Zea mays
  Peptide Sequence Number=SeqID_45777
atggcagcttgtccctcaaagccgacgcctcagcaggctcagctcccaggcccaccaagccgcctgcgcccattggcccagtattgggatgacccatggagacgtgcgcaggcgcgtagcatctacactgtcggcaaggagcgtgggtggacgcgatggtctccactgcggagacagagacagagaaggagaaggagcaggaggaggcaacggtggccagcgaggacctgcccgtcatgccctaggccacctccttcgcaagggaggaaaagcagggtagccagaatctctgttggtttcgcctatttcattgtgttcatgatgatcctttcagtaataggcctttttagtctaggctccaacctttggttgataaacactctcaccataagtaacgaaggaataagaataaatgatgggaggcttacacaaacctgttttgacaagaaccgagcagcgatgcttccatttcggaccgcgacctag

SEQ ID NO: 3999 - DNA, 186 bp, Zea mays
  Peptide Sequence Number=SeqID_45778
atggcaatgggtacccgatacccgatggatatttactccattagggtatatatgtgggcgaaatattctacccgtgggcctgttattgggcaaaaatcttcactcaatagatatttaatttttgtgagtatgggtgacccgatgggtaacccatacccacatgggtataggtatggggtgtattag

SEQ ID NO: 4000 - DNA, 1935 bp, Zea mays
  Peptide Sequence Number=SeqID_45779
atggctgatgaagaggaggtgaagaaacagtacaggaagctaactctccagttgcacccagacaagaacaagtcggttggtgcagaggttgccttcagacttatctcggaggcatggagtgtattgtctgacaagagtagaaagatgctttatgatcagaagaggagagaccattgtgtggcgagtgtgtccaacggtttgtatgcttatgattatgatacaaagctcagtaagcgagcacgaaaaaatgccgttgcctctgcctcagcagctgttgaggctactactcgtcttgcaggggctgacacattctggacatcatgcaacagctgcaggatgcagtatgagtacttgagagtttatctgaaccacaaccttctgtgcccaaactgtcaccatgcattcatggctgtggaaactggatttccctgcaatggaaccagttcttcattcacgtggacaaccaagtcacagcagcagcagaaccacgatactgttgctgaccattcatatcaatcagcaagcagaacatcaagcattccagacaccggacatggagcataccagcaagagaacacttacgagttgtacaaaaaccaaagtttccagttcactcagtaccccaagacaacatgtgttgctgctacaaatggttacagtacacatgcctcagagaaatcgaagagaaaacatgaagaaaactacatatacaattatatttcaagtggcaagagcaatgagtatccatcagggcgtggacgacattcaaaaaggaggcagaatttcagtaatggctgtgcatctgtggaagttaatggtcagaatctggctgcaactgcaggtatgtctgggattgccgatggaggaagatttaatggtacatcaggggagaagttcaggtctgcagtgaatgcaagaaaagctaatgtcttgagggagatcttccaacttgacacccgtggtcttcttcttgagaaagccaaagcagaagttcgtgaaaaactacaagtctggaatattttgacatctagccagtttgtcgagaaaaggaaatcagatagaagagagaagcatattcaaaacaatattaaggctaatggcattctctctgacaatccaaccaataaatgcaagaaatgcatttcaaaagatgcagataccgagatccctgtgactgatgtaatgaatccagaacagatgcgtgtacctatgtccattgatgtccctgacccagatttccatgattttgataaagatcgaacagaaagagcctttggcaatgaccagatctgggctacatatgatagtgaagatggtatgcctcgcctatatgcaatggtacagaaagctatttcaatgaaacctttcaggatacgaatgagcttcctcaattctaagtccaacaatgaactggcaccaataaattggatcgcatcaggttttacgaagacatgtggtgattttaggattggaagataccagattactgaaacagtcaacatcttttcccacagagtttgctggagtaaaggtcctcggggaattatcaggattattccccaaaaaggcgatacatgggctgtgtaccggaactggtctcctgattggaatgaacttacaccagatgatgtgatatataaatatgagatagtagaagtgatcgatgatttcactgaagagcaaggtgtgactgttgtcccattgttgaaggtagctggtttcagggcagttttccacaggctcacgggctccagtgtggtcagaagaataccgaaggaagagcttttccgcttctctcatcgggttccttcttgcctgctcactggtgaggaaagaaataatgctccaaaaggttgccatgagctggaccctgctgcaactccagttgaccttctcaagattattacagatgttaaggatgacaccacacgttga

SEQ ID NO: 4001 - DNA, 621 bp, Zea mays
  Peptide Sequence Number=SeqID_45780
atgtccggtacacaccggatagtccggtgcccccttctagccgttgactcggccacgtgtcccgcgcagatcgcgcggccgaccgttggcccggccgaccgttggctcaccggacagtccgatgcacaccggacagtccgaagcctcacgattgggcctaccgcctacgccgacgctttgcaggtgccctcgcggaacatcgttgccgccgccgtcgaggcatacatccgtcatcgtcacatgctagggctaacacccatgtcgtctatgtctacaggtgccctcgccgaatgtcgttgctgtcgcagccgccacctgctggtcaccacgttcaaggactgctgcaacatggcagcgctgccaccagcatgctccagctgtggtggtttgacggagcttctcaacgccatggacgcgcaatgggtagccggccctagcagcagcgtggacgctatagactctgttctctttcaacccactgcttttgttgcaaccgaaactgaagctgggcagctggccgaggtgctgcgccagtctggacctctagacaatggcgacatcggtggggaaccgacattcagcgagttctttggcggaagtcggcaagaacggaggcgttga

SEQ ID NO: 4002 - DNA, 3315 bp, Zea mays
  Peptide Sequence Number=SeqID_45781
atgcagttcccgccaccaatagtcaacagatccagcatacccgccaattggaccgtcacatccccgacgcagccaccaccggtcaccagacgcagcaagccagcaatccaccggtccttcgccccgctgacgcgcggttctatcctcagaatggtctgctttcttgagagttataatactcatgcgtttcatggaagccaaatggagagaaagggaggcttgagaacgacggttaggccaattttgaacagagtcgactccctgaagaagaccaccatctcctgtgacccgggtgaccttaaagccctggagggcttctctgaagctctcgacggtggcagcgtcgctggctgggagcacccaaatgcgaccagctgctgtgcatggcccggtgtcaggtgcgacggcagcgggagggtcgtccggttggacctccatggcaggaggctgcggggcgagctgccgctctcgctcgcgcaactggaccagctgcagtggctcaacctctccgacaacaacttccacggtgccgtccccgcgcctgtgctccagctccagaggctgcagcgactcgacctcagcgacaacgagcttgctggcacactcctggacaacatgtctctcccattgatcgagctcttcaatatatcctacaacaacttcagtggctcccaccccacgttccgtggctcagagcgcctcaccgcgttcgatgcagggtacaactccttcagcgggcagatcaatactagcatctgtgggtcgtctggtgagatcagcgtgctgcgattcacatccaatctctttactggggacttcccagcaggctttgggaactgcacaaagctcgaggagctacatgtcgaactcaacagcatctccgggagattgccagatgacctattcaggctgccatctctgaaggtcctgtctctgcaagagaatcaactaacttgggggatgagcccaaggttcagtaacctgtccagccttgagagattggacatatctttcaattcattctttgggcaccttccaaatgtttttggtagcctccgcaagttggagttcttctctgcacagtccaacctctttgggggcccattgcctccctcactgtgccgttcaccctcactgaagatgctgtacctgaggaacaattcgttgaatggagaggtcaacctcaactgctcggcaatgacacagcttagctcgctcgaccttggcacaaataagttcattggcacaattgatagtttgtcagattgtcgtaatctgagaagcctgaaccttgccacaaacaacctcagcggtgatatccctgatggtttcaggaagcttcagtcgctaacctacctctcactttcaaacaatagcttcacagatgtcccttcagcattatctgtccttcagaactgttcaagtctaacaagccttgtgctcacaaagaacttccgtgatgagaaggccttgccgatgactgggatacatggttttcacaacatccaagtgtttgtcattgcaaatagccatctttcaggatcagtaccaccatggctagctaattttacacaactgaaggtgttggatctgtcatggaatcagttggtcgggaatattcctccatggattggtgatcttgagtttctgttctatttggatctatccaacaattcacttagtggaggaattccagaaagcttgtctagcatgaaggcccttgtaacaagaaaggtctcacaggaatctacagagactgattatttccctttcttcatcaaaagaaacaagacaggcaaagggttgcagtacaaccaggttagcagcttcccgccctccctagttctcagccataacaggctcactggccccatattatcaggctttgggatcctcaagaacctacacgtattggacctcagcaacaacaatatttctggcatcattcctgatgatctatcagagatgtcaagcctggaatccttggatttgtcacataacaatcttaccggaggcatcccatcttcattaacgaagctgaattttctatcgagcttcagtgtggcatacaacaatctgaatggtaccattccatcagcaggtcaattcttgacattcagtagttcggcttatgagggtaaccctaaactctgtggcattcgcctaggcctaccccggtgccatccaactcctgctcctgcaattgctgcaacaaataagagaaagaacaagggcatcatatttggaatagctatgggtgttgcagttggggcagcgtttgttttgtccattgctgctgtatttgtgctgaagagtaacttcagaaggcaggatcatactgtaaaggctgtcgcagatactgatcgagcccttgagttggcaccagcctcacttgtactgctgtttcagaacaaggctgataaggcattgaccattgctgacatcttgaaatcgacaaacaactttgatcaggctaacatcatcggttgtggtggctttggtatagtgtacaaggcaacattgcaagatggagcagcaatcgctatcaaacgactatcaggcgattttggtcagatggaacgggagttcaaagcagaggtggagaccctatcaaaagctcagcatcctaatcttgtgcttctgcaaggttactgcaggattggcagtgatagactcctgatatactctttcatggaaaatggcagcctagaccattggcttcatgaaagtccagatggtccctccagattaatctggccaagaagacttcagatagcaaaaggagcagcaagaggtttggcatacctgcatttgtcatgccaacctcacattctccatcgtgacatcaagtcaagtaacatccttctagatgagaattttgaagcccatttagctgattttgggcttgctcggcttatttgtccctatgccacacatgtgaccactgacctagttggtacactgggttacattccccccgagtacggccaatcttcagtagccactttcaaaggtgatgtttatagttttggcattgtccttctggagttattaactggaaagaggcccatagacatgtgcaagccgaagggagcccgtgagctagtttcatgggttacacttatgaaaaaggaaaatcgtgaagctgatgtcttggaccgtgcaatgtacgataagaaatttgagacacaaatgaggcaggtgattgatattgcatgtctgtgtgtaagtgattcaccaaaactgcggccattaacacatcagttagtgatgtggcttgacaacattggtgtgaccagtgatgaaccaaagtga

SEQ ID NO: 4003 - DNA, 1089 bp, Zea mays
  Peptide Sequence Number=SeqID_45782
atgccggccttcgcggggggcgcagcggagccgccgctggcagacagctactacgcgctcctccgccgcggcaatgacgatgaaggcgcctacacgacgtcgacagcgccatgggacgacgtctcactgcccgtggcggagtgcgagctcccgatgatcgacgtcgggtgcctgacgaccgccgacgacggcagctccccggaggcggaggcggagcgggcggcgtgcgcggccgccatcgcgcgcgccgccgaggagtggggcttcttccaggtgcgcaaccacggcgtgccgcaggagctcctggaggagatgcgccgggagcaggcgcgcctgttccgcctgccgttcgagaccaaggccacggccggcctgctcaacgactcctaccgctggggcaccccgaccgcgacgtctccgcgccagctgtcctggtccgaggccttccacgtcccgctcgccggcgtctccggctccggcaccacctgcgacttcggcgacctcaccaccctcagcagggatgtgactcgggaggtggcgggcgcgatgtcaaagctggccggcacgctggcgcgcgtcctggcggaggccctcctgggtcggcggcccgccggcgagcgcttcccggaggggtgcgacgagacgacgtgcttcctgcggctgaaccggtacccggcgtgccccatctccccaggcgccttgggcctggtcccgcacacggacagcgacttcctcaccgtgctctgccaggaccagcaggtcggcggcctgcagctcatgaagggggacagttgggtggccgtcaagccaatccccggcaccctcgtcgtcaacatcggggacctcttccaggcgtggagcaacaacagatacaagagcgtggagcacaaggtgatgacgaacgccaggacggagcgctactccgtcgcctactttctctgcccgtcctacgactcgccgatcggcacgtgcgaggagccttctctctacaggacgttcaccttcggggagtacaggagaaaggtgcaggaagacgtcaagaggaccgggaagaaggtcggcctccctaattttctcgcgcaaacataa

SEQ ID NO: 4004 - DNA, 264 bp, Zea mays
  Peptide Sequence Number=SeqID_45783
atggggcctcggttctggttgcagcatgcggctcccctacggtcctgcctgcgtaacgctctgcacggcttgcgtggctcctgccacgcatttcttggctctttgtgggtggatgcattcatgcatgcatcattcagtgatctgatcggatccgtcggcaagcagatgtgcgcgcgcatcggggacagaaactcagagctctgtgcatgtgcagtgaccatttccaacgatctttgggccacctgggcctgtttgattgcctga

SEQ ID NO: 4005 - DNA, 909 bp, Zea mays
  Peptide Sequence Number=SeqID_45784
atggcaatgttgaacactacatcttcaacaattgtatccactggttcaccaaacatggttgctgattcttcttgccagaacctcaagtatagtgcacccttggctgtggagtggtcctatccagagctgcaattgttgaacgatggcctcaacaagtatgcaaatgaaccaggaatcatgaagtacataaagatagcagccacgttaccagacaagacagttagagatgttgccatgagatgtcaatggatggcagcgagaaaagaagctacaagacgacggaaacctgaagaacgctatcttgggaaaaagataaaagataggaaggacaaaatggctcagccatcatcatggggtaccaatcctcctgttcaggctgagatgagatcttcctcttttatgcctcgtaacgccaaacacaatggatttctctctggagactctcaaattgatcatgaaatgctaaatatattggaagaaaatgctcgactactcaatcaaatagaagtaaatattttaacatctcaggctcataacaacattaatcttttccatcacataagaaggaatattaatggtcttctacaaagcatgtgccagattcccggaataatgagcaagatgcccccattgcctgtttctgtggatgaaaggctagctagctacatactccctcgtgctcatacggttgcgttcttgattaaagataatatccaacgcttcaacttcaatgatgaaaccggatccgacaccagtgatcgtgctatctcatatctttctaggatcttagaaccgggtaccgatacatcaaataatgatatcagaaatctaatttttgggtattcagattcagctatggtcggatataaatgttcgaattcagatacaaattatccatatatcgtttga

SEQ ID NO: 4006 - DNA, 222 bp, Zea mays
  Peptide Sequence Number=SeqID_45785
atggagttgaggggatgcgtctgccggatcaagagctcggcgcttgagcttctgtccatggaggaggatctgacgactgatctggatgatgacctatgggatctgctaggtgatactgtggcgaaccggagcgtctccgtcgtcaagtcgagctacggtgagggcgtgaggcgactcaggcgctccgcctccgcgaggtggtcgccgccggcagcagcctga

SEQ ID NO: 4007 - DNA, 732 bp, Zea mays
  Peptide Sequence Number=SeqID_45786
atgatttgtacggatgaaattcccaaaataactaactcccgccctgcccgctcggtcgcctcccgctggggcgacacgggcggccgaaaccctagccgccgccaccccatccctccgctccagcccacctcgccgtcaccggagggcgccgccggatgtccgcgcgaccccaaggaaggtggcggtggggcgattttgctttggtttggtcgtgtccgcccggatcttggcgggattccaggaggtggcagtggcgccaagtggacagtagtggccccagcggcgtttgcggttgtgcgcgtgccagcggatctggcgcgtcgcagcggctgctgccagggatggctggcgcgaggtgctgccgttgctagaccaggttcgtgggcccagccggagggggtggcgggcgacgctacttgcgactgttgtggcagccggagcgtcgttggccctctggttgggtctgtgtgggttgtctgggtggcggcgactgtggaggtgctttgtcctggggtcctggcaaaacgttgtgctggggggttttcttgggcgaaagccttagcgacggtgacgcccctgggcgccgcttcccctattgagggtgtcgtgttccccagctatgtcttccgtgggcaaaagcccggtccaccttggaccggcgacgttggcgtccctgacgtcactcccttccttaaggcgtcgctactgaagttcgtctcagccacgtcgtag

SEQ ID NO: 4008 - DNA, 300 bp, Zea mays
  Peptide Sequence Number=SeqID_45787
atgactttgagtagctcatcaaggctggactcaggattcctgaagaaatatcgggacaagacctctaccactaatgaaggatttggtatcgcatcagtgtcgtcgtcggctgctggtccaggttcaggggctgcttccgcgctactccgggctgccgatgatgtttatcgttcaatgggactgtccgaactggatgctcagtcatctgaacttctgaagcaggatgaggaatactcggtggagtgggactttgctcagattgtagtcaaagtccctgagggtttgcctcatccaaagtag

SEQ ID NO: 4009 - DNA, 2403 bp, Zea mays
  Peptide Sequence Number=SeqID_45788
atggctgctccgcggcagccgcacccaccggcagcggaggagggagccgcgccggcgggtcccctgcccgccgccgcgccaggtccgcgtccgtacgacgtgacggtcgcggcaacggagctccggccggtggactgcaatctcgccgcgctctgtgaccacgttcaggcggagggcttcggctccggggccttctccgacctcgtcgtggaggccatgggcgccacctaccgcctccatcgcctcatcctctcccgcagcgcctacttcaggaatatgctacatggtccttggagagagtcgggagcacccacagtggttttgcacatagatgatgccaatgtcgattcagatgcaattgcaattgcgctcgcatatctttatgggcaaccccccaagcttactgatagcaatgcattccgagtgcttgcagctgcatcatttctggatcttcaggacttatgtacaatatgtacagattttatcatttccgagctctggacatcaaactttttacaataccagttgtttgctgagagtcaagattatgggagccatggagaacgtgttaggaacgcttgctggggttatctttgtcaaagtgccacaatggaattacgagaggtgctaccaaagctttcttcacaaactttgcatgctcttcttacatctgacgaattatgggtacctaacgaggagaaaaggtttgaactagcattacttactctacttgcaaaggttgctatgtgtgagatacaagttagtggtaatgaaacaaatttaccaagtgctgatcgatccatgaggaaggggaagactccaatgaatgaatctggggaggaactgctaatggactctgaattgcagaacttgaagttgcatgataacttggggaatgaaatttcccataacattattgctatttcagatatgaatggtgaagctcccaagagaatggagattgattgttctaccggaggaccatcaggagaaagcacttcatatcaatttaatgaaaataactggatttctagtgagcaaactgcaaataattatttctcaagaacttccagtagtgttgttgttcctactgagtggggaaggcccaatgcaccactttggggtggcagggtcgttggacggcggcaaattagatacattagaggaagctcttgtctatctactgatgaatataatgcttttatgaatatatttgagagaggttctcttctctactgcaatatgtcctttgatgcactgctaagtgttcgaaagcaactcgaagaatttggattcccttgtaaagctgtcaatgatagtctatggctacagatgcttctgtgtcacagggtgcaagcgattgttgctgatacttgcaggaattgttgccttatgaatagttcttgtgcttgcaagcaagcatatgtgagctcgcatacacattacaggcaggagcatgacaggagcagtgcctccgacaacataggtaatgtctaccttgcggatggccagggtgatgggaatggtgtacttgggcctgtccgtgttaatgtaagaggagcagtcgatggacttgctggtattgggagagggaactcaaatgtgcctggtgcagcttgggctcctacacgatatgtcttctcccgtgtcccttatgggcttggttcaagaaatggccagcaatttgccattgatgaatcagaacctagaattgaccgcaatggagatatttcagcagatggtctgactgcattggttaaccttagccaagaaaacaatgctgctcatctgcaggatcaaagtctatttgagacagggatgcagacaagatatcgcagtgttccatctgtttccactccaggtggttcttctgtccagatgcaggagtcaaaggagcatgaacttggatcagattgggaaaccacaaaggatgcaactatatcattagacatgaaaacacctcttagccattttccacctttccgctttggggttgagttcgaggatgtgcacaggcttgctgatggtcaggtgaaacattcgactgaagtgttttatgcaggctctctatggaaggtgagtgtccagccattcaatgatgaggatcctcatgggcgacgcacccttggactatttctccaccgacgcaaggctgagttgttagatcccttgaggaaggctcacttgtacgttgacccccgggaaaaggtcactgctcggtatcagctcatctgtccatcaaagagagaggtcatgatatttggaagcctgaagcaggctgggacgctgctaccaaaagcgccgaagggctggggctggcgcactgctatactatttgatgagcttgctgatcttctccagggtggtgccctgcgaattgctgcagtggtccagcttgtctag

SEQ ID NO: 4010 - DNA, 687 bp, Zea mays
  Peptide Sequence Number=SeqID_45789
atgctggcgcgccctagtgccctaaactcgaatctaactggtgctatgcgagaagaagggaagcgcaatgacccagatgagctctcaccggtgattatgacgccgtggaggctggccacggcggggagtggttctacggcggagcttcaactccgcgaatcacccctaccaccgacaggacgccggaacgcgcgtgaatccaagtacgatggtagctaccttgttttctccgagctggcgacaatggtggctagcgcaaccgatgcaggcgagagggaggtgctcgggtttgatggaggggtgcagaacttcggcttatatgcaccacggcgaagtccgtgcgggtcgcgcgcccccgcaggaagccgcaggccgggaactcgccgcagatttcggcgtgactgttacggtgagcagccgagtccaagtccgttgcgagatccgcgtggaagagggatttctggatgccgggacccacggctgcctcgtgctcgttcgacggcacctgtacaaaccagcggcacagagacttcgcccgcttcccagatgcgtctacgaagtcaggatctggaggcggggcaccgggtgtgggagatggaagaccgctgtgacacccgctgtgttgaggacgatgagatcccggtacaccggcctctcgtgaccgacggtgcgcctccgccgatgtga

SEQ ID NO: 4011 - DNA, 1203 bp, Zea mays
  Peptide Sequence Number=SeqID_45790
atggtcctaggcaccagcattccggctatgccaacccctaacttctgtagcctggtgcttggtgcagtccgtcgtgtagtgccctatgggaggctccgccacacccggccccaggatcggtgccacgaggttcgaccggggcagcctttcatgactgaagacactttgaaggatccgaattgggtgatggccatgcaagaagagctcaacaatttcaagagaaatgagtgtagaccatctcctgcccccgcctcccccctctacgcacacgcccccatcatcaccgcgaaagctgtaaccaccacgccgagaaacccccccctgaatagctgtcgttcagtcccctccccattccgcgtctgcgatgctcgaggtccgcaaccacgcgcggtaatcgacacgccggtgcttgcggagggctggggaggcggaggcagaggaggtggaggtggaggggagaagcgaggaggactggtcgaggaagacggcgtggtcgaagtcgggattgtaggcctggtccccgcaggcggtgcagaagacctcggtgtggtcgacatcgacgacgatttggtggccgggccccatagaggcggaggcgtgcgtggcagcgtgggaggggcagaagatgacagtgcaggagaggcaggcgtagaggcgggaggtgggggacagggacgagggggcgcagggcgagcagcgcgggagctcgcgcgggtcccgtcggatctcggggcagccgagcgggcgcacgcgcgggcagcggcggaggaagcgcagcgggcgcgaggacaggcgatgcgcggagaggtgcgggcagggcggtggtacggacggggtagacatcggggaggggacagaccggggtgtgatgtggtggggacagcggcggcgggtgacggggtggccgggtcggggtgggggtgcggccagtggagtgtggcagcaggtggtgcggggggaggtggtgctctggtactctggtctgatggcggtggcggtgcggtcgcggcgatggtactcctctacctcgaccagcgagaggtctgccaggtggcccacctcaacagcgccttccatggcgcagcctcggcggactgcgtctgggccaccaagctccccgccaactaccgctaccttgcggccctagccgcgaccgccgatgacgagggctgtggcgatggagatgccagcggcaagcgctag

SEQ ID NO: 4012 - DNA, 960 bp, Zea mays
  Peptide Sequence Number=SeqID_45791
atgactgcactgtttgcagagtggagtttgaatatgggtatgagtatgggtgttttcgactctgcatattacactgacctactattgaatggtgttgatgaatctcaagatccaacacctcctactgatgcaagaagccaacatggacatgcaacgacaaagagtactcggggtagaagcaaaatttttagaaatgaggaggatattcttcttgtgtcagcatggctgaatgtggccatggatcctattcaaggagttgatcaaagtcatggcacactatggacaatgatacacgagtatttcattgcaaacaagacatttaagtctaatcgttccgaaggatcgttaatgaaccgttggattgaggctcagaaccatagtggttggtcggtttatgacaaggttgttaagcaatcttctgcaaatgcatgtgttatgttcaaggccaaagacccaaagaagacgaagttttcgtacttgcattgctggaagattttgaaggacaaacccaagtggatagacaggcggaaggaaatcataaatgccaagaagataagttgtaaggaaaagaagacgttggctacttcttcggcaatagtagcggcgcaagacgcccctgttggtggtccttgtgatggtgaaccagccacaagacctgacgataagaagaaggagaaacagaagctccgacaatgttcgaccatcgaagcagttgattatctaatggaaaagaagaaagaaactgatcacgagaaagaattgaagaaagaagagaggttcaacaaagcctttgctctgcaggaagaaagaataaaattagagaaagaaaagtttgagttcaagagacagatggaagaggagagaattattgggttggatttgagcaccatgaactacaaacaacagcaatattatgaacgacgtcagaatgagatccttgatagatgcttgaataattag

SEQ ID NO: 4013 - DNA, 522 bp, Zea mays
  Peptide Sequence Number=SeqID_45792
atgtgggtggcaactatagttcagtgtgctactggttctgatgtactaaggtggagatcattgtatgcatcctatgatatttcgtggagggttcactactatgaggtgtttgatcatggaatccgtgaggtcttatgttgcttaggtaccaagaaggtcgtgtccgacgacaagctcgccaagtttgcgctcctcgaccccaagccatcaataggtgagcaagtgctatccgcgaacagcttttcgcgcgctgtgacttgtgccggctccggcggtaaacaagacagacaaggagcaaaggaggcgttcagtttctcaggcacttgctgcctctgctccatctgttcagcggcagacattcgtgggagagagagttgtatggtcgcggtctcacggagttgtgcggagctggttttggaggctctagccatccaaattagctccggctctctatgcagagctggtggtttgggagggctcagacaagaagccagagccggagccactcataagccctcctaa

SEQ ID NO: 4014 - DNA, 675 bp, Zea mays
  Peptide Sequence Number=SeqID_45793
atggccatcaccaggatccagccgctctccgcccacctccacccgcgcgccgtggccgctactccggcggccgggaagcagcagcagcaggcggtctacacggtgtggatgaagtcgctggtgctgggcggccacgggtgcaccgtctacggcgacgacggccgcgtcgcctaccgcgtcgacaactacgcctgcagccgcagccgcgaggcgtacgtcatggacggcgacggcaggacgctgctcaagctgctcaagaagcacttcgcggcgttcgcgacatggaagggctactcctaccgcaccgccgactccgaccctgcaggcgcagcagctggcgtggagcaggaggagagccccaggccgtggttcagtgtccggaaggcccgtcgggtcctgaagcagaagggaaggcagcgcggcggcggagccgtggcgacggtctgcgtcggcggggaggtctacaggatcgacggcgtgccgcgcaagtcggagtacaggatccgcggccccggcggcgaggtcgtggcggagacgaggaggaagcagacggggtccggcgtggcgctgggcgaagacgtcctgagcctgacggtgggccctgcggcacacgcggagcgcctgcttctcgtcgggctcgtggtcgtctgcggcctcatcggccactccatctga

SEQ ID NO: 4015 - DNA, 746 bp, Zea mays
  Peptide Sequence Number=SeqID_45794
atggagggcgtccacccgacctcaccatgcccccgcccctcagtccgccaccatcacgcccgagcccccgtgattaggggtggtaatggattccctacccgtgatggaatttcatccccatccccaatccttgcgccgcgcctcccatcaacgctcgcctccacacctgtccccacgcgcgacacaggtagagcaatcagtgcccgaccccaggccgccttcaacgccgatggagccatcctcgccgcagtcgacgaccacctccaatctacgcccgcctccacactcgtccccacgcgcgacgcaggcagagcaattagccatcagcgcccttcaccatgcccccgcagcgtgcttccccaccgcgtccaagcccttccccaccggttccggcatggcacatccacagcgcacatcggcttacccaagggagaccgcaacattcaccacgcccgggattcggcagcgcgcatctgcttccccaccggtgaccgcgccattcaccatgctgtccagcatccattcaccaccgccgtccacgcccctcgccctgggacctccgccaatccgacatgcccgcagcgcacaatgatggaagacacatcccgtagtccccacccaccaccgccacccccaccctcgcgtcatcccccacccatctgcaaccttgctccctcgtcgtcccccacgatgggatcacccctcccatcgacgcccgaccaaggagcggacgcagttaatcagag

SEQ ID NO: 4016 - DNA, 417 bp, Zea mays
  Peptide Sequence Number=SeqID_45795
atgaagggcccttcttccctgatccattcttcttgccccgcgccggcccctggggttgtcgatctcgtcgtgggcacatggctggctcgatcgggcggggcggggcgggcctttatatatgggatgctgccgttgttggctagcgaagaagcgcacaaagggatggtaggcgacgtgaggaggtgcggcctaggcctggccatggcggtggccctgatgctcactgcactggttgtcgttgcaagcggcggcacagagacgaggcagaaactgcctgctggcagtggcaatgacgacgactactcaaccattcttagccacctgtccaacatcattgatccgccggggagttggcctgagcacgctgatgctgtcgtggtgaagcggtgcggcggcgtcgctgctctgccgctgtaa

SEQ ID NO: 4017 - DNA, 240 bp, Zea mays
  Peptide Sequence Number=SeqID_45796
atgcccgcccgcctactcggcatccacgcgcccatgtatcgcacgctaaaccaaagaatgccagaaaaaggacaagcaaaaaagccgtgtaggggcgatggagcactggagtcactgtggcgccgctgtggaggtgtggaagtggagccgtccgcgctcaacgagtcggcgagggtggacgacggcatgatgcagatccgtgcagactgcggttcgctgcgtcggatccgtgaagcgtga

SEQ ID NO: 4018 - DNA, 1212 bp, Zea mays
  Peptide Sequence Number=SeqID_45797
atgacctcctccgtatccccagccgcggccgcctcccagtcccaactgcatattaccaccaccggtacgggcaccgggtccactgcaatcatatcgccctcctcaaaccaaagcaccagcaacgccaacgcgcgctcctcctcctcctcctcctcctccccgcattccgcgagcagcccccctcgagctcgcggccccagcaccactggaggcactggcagcagcggcggaagcggaagtggaagcgggtgcacgaaccaggcgtgcgcggcgtgcaagtaccaacggcgcaagtgcaacacggactgcccactcgcgccctacttccctgcggaccagcaggagcgcttcctcaacgcgcaccgtctcttcggcgtcagaaagatcctcaagacgctggagaacatcagtccggagctctccgccgatgccatggcgaccctcattttccagtcggacatgcgcgcacaggaccccgtcggcggctgctaccacctcatcctcagcctggagcgccagctccagatcgagacggccgagctctccgccatgctccaaacactggcgctcttcggccaggctactactactaccacgatgccaccggatcaaggcggcggcggcacggctggcctcgactacaccgcgtcatccaacctcctccacaacgctcagcaagaggtgctttacgcactctacaagaacaaacacgaagaagctgacatcgtacattccgacaacgaggtcgtccgccaccacggtggtggaggccacggccccaacaaggatgatcacggccggcaacagcatcaggtccttaactatttttattgcaacaacgcaaccgcaagcgacgatgtcgacaacatgcaacagttccattttaacgatagctgtgccgccgccgacaaagtggatctgactcctccggcgggggctgacgaaatgagacatcatcatcagcacctcgacgagaactgccagattgaccacaaggattatttcgagattaaagcagcggccgcactcgtcgacgacgcgtttcacatgcgacaggaggtggtggacgtgagcgccgaggttgacatggaggacatcaagacggtggatgtgaataatgccggcattggcggcgtcgatatcaaggcgatggccatgaacgccaacgtcgtcgatgtcacaccacaaatggcagctgagtcatcgcactaa

SEQ ID NO: 4019 - DNA, 993 bp, Zea mays
  Peptide Sequence Number=SeqID_45798
atggcggccgagggcatcgtcgtcgtcgccccagagacggcagacatgcagagggacgaccaagtgcagacaggcacgcatccgctggctcgcggacccgacgaggtggggcgcggcgggccctgcgatgacatagcagtctctctggacggccacctgaacgacctccgtgaccaccttctggacgacctccgtgacgatctcggcaagagagcaacgtacaccaggtgcctcggctcctgcgccttcttcttcctgtgccatgccctgggggagctgttcctcgagctctgctgctgctcccgctgcctgccctgtctggaggtcagcacgccacggcacctggcgccggagaaccgcacgcagaagttcttcgccttcttcgccaagaacctctccaagctctgggtgaccacgctgctcgtcttgttcatacggtgggtgctcttccggccgatcgacgtgaagccccacctcggcacctccgccgtccacgagttcgctcttcttcagccgtcgtcgtccgacgacgccgccgacgccgacgccttcgcgggcttatcagctgctggtgttcctcgtctccgcttcaacctcaccgcctacctcctcttcaagaacgggcacgactactacgatatcaattacgacaatttagccgtgagcgtactgtacgcgggtgagaagataggcccagtcgatgacgagctcccgtctttcaagcagcatccccacggcagcaccgtgatgcggctggcgttcgtggggcagctgcgcaacgccagcagcacggtggccgagatgttctccggtgacagggacaaggggctgttcgagatggtggtgaggatccgcgtcacactaggatacaagtcttggccgttgaaggaggagtacttcaccatctacgactgcccggtttcctcgccgtttccgcaggtcggcgagcccgcgctgtcgtcgccagcgtggtgcacggccaacgacatctag

SEQ ID NO: 4020 - DNA, 315 bp, Zea mays
  Peptide Sequence Number=SeqID_45799
atggataagtacttcaacaataatgatgaactacattctactactccattaggtggcaatcacacggttgtgccactttttcaacaagatctcacaaaagatcgttgtgtttccaagacaatggacatagcggagctttacgagcagatcgacaagggcgctgcactcgccttcgtcgtcacccaacttcgcattggtatcgacctccacgcaccgacggggctccctcaaggcgcttcatccatggccttcgaaaacctaattaaagggtatgatgaggctatcggaggagtcgcgggcaccgtctcttcatag

SEQ ID NO: 4021 - DNA, 633 bp, Zea mays
  Peptide Sequence Number=SeqID_45800
atgaccggcgatgattgttcaagccgattaccggggaggctttaccgacctaagacggcctcggaacacccattaatttcactcgagtaccccgagaacagccggtccacgcacggcggcccaacacatgtcctccggccacggatagtaacacacgcgcatgcttcccacgtcggaaagggatacagtgagggagatggaggcatggacgacaccgcggcaaaatttaatgttcacggtggccgccggaaggtcgccgtcgacgagcaagccgcgctggcgatcatatccgttcagttactctactactactactgctactgctgctactgctactactgctgctactgctactgctactactgctgctactgctgctactactactgctactactgctactactgctactgctgctacttctactactgctgctactgctactgctactactgctgctactgctactgctgctgctactactactactactactactactactactactactgctactgctactgctactactgctgctactgctgctactgctactgctactgctactgctactactgctactgctactgctactgctactgctactgctactactactactactgctaa

SEQ ID NO: 4022 - DNA, 273 bp, Zea mays
  Peptide Sequence Number=SeqID_45801
atggcggcggattcggttgaagacgcgctgacagccctggcccacaagccagccagccaggaaacgctgaagagcgcgggggttagagtctccgccaggtgggcccggctgcgcagcgacaacgccgacgcgcgagcggcgcggaccagcgcgcggataccccctgtgggcctaggggagcgtaggaatgttagatttgagagaagtatgacaaaaatggatagacacacgttggtgataaaaacactagatagaaagaaaagagaaaactaa

SEQ ID NO: 4023 - DNA, 183 bp, Zea mays
  Peptide Sequence Number=SeqID_45802
atggtggacggtggtgtcggtacagggaagacgatgcttatcgatctgtcctatgaacagcttctctcactttattacgttcaagtttgtctcggcctcaatatatgcagacaaccatttgttctgtatttgaactttatgccatctgaaaagttcaacattcattcagtgtggttgacttaa

SEQ ID NO: 4024 - DNA, 201 bp, Zea mays
  Peptide Sequence Number=SeqID_45803
atggagtggggacggtgttgctggtggtgggtgcgctgcaaaggggaagtggggcggtggtggtgcacatggaggcacgcacgcgtgcggggagcacggcttattccaggcttcaagggtaagcttcccggtatcttcttgggctctagccaaagtgaagaaaaacttcactgcccaatgcatgcagaggactgggcataa

SEQ ID NO: 4025 - DNA, 255 bp, Zea mays
  Peptide Sequence Number=SeqID_45804
atgtcgagatctaccgccctcatggcccaaatggtgctgactacgataaggcgaagctcgaccaggtctggtgagccgacacaagtgacggagagagtcgtgtctggcagcagcgtgtcgactgaggacaagcccgtagcgacgcacgacggtgaggagctctacgcagagcttgcggtgcatgcaggcgttgaggagtacgcgactagcacggacgaacgcgacaaggcgaggccatccaccatggctgcttga

SEQ ID NO: 4026 - DNA, 141 bp, Zea mays
  Peptide Sequence Number=SeqID_45805
atggcgtcctcctctcctctcccatggctacagcagggagctcagctcctctcctcggccgctatggtgctcgacgcctctccccttcaggcatggcagcagcttcttctcctcccctatgtttttccgtttgagaagtaa

SEQ ID NO: 4027 - DNA, 255 bp, Zea mays
  Peptide Sequence Number=SeqID_45806
atgactactgtgattcccccgacaacactgaccaccccgccggagctctactgccgccgtggactttacccctcacgcgacctgagacgtggtctcccattttggttatggtgggtacaagtgcggtcactgcacgacgacagtcggggttctctggaggacatggttgctggagtgacttggctgtccatcttgccactgggttggacagtcgagtgggatcctgcctcggctgaggaggggcatgaggagtga

SEQ ID NO: 4028 - DNA, 630 bp, Zea mays
  Peptide Sequence Number=SeqID_45807
atggcgagaggagcagagaaaaccgcggcaacagggagctgggcgctgtcgaagctggagtcgggcatgcagagaagcaaggcgcgcgcggcaacagagagggaggaacgccggcgagctcggcagtgcacggcgaccatgggaatggaagatagagaggaaagcagggacgagcagggcgctgggaacttgaaggcgcgtctttggggagggagacggcggaggggaggggcgagcaccaggttctctgccgactgcatcgtggccgcgtcctgcggcgccacgggcttcaccttgaggccctcgctcagcgccgggaacacggccgaacacccgagcagggtggagggtgctgcagggagagaggagtggctaggcgagctggaggagcagggagccggcacgccagcaggggagctccacggcgatcttgagggagaagaggaacggctggttagagaggagcacgcagggagaaagaagactgcggctgcacgcgcggggaagaagacagaggctggggcgtggccaaaaaatcctaccgcggatgaggataagggcatgtacagtgggacaccaaaacgcatcagatcgatagaacagacgacaaattcgtacagtgggaagtaa

SEQ ID NO: 4029 - DNA, 207 bp, Zea mays
  Peptide Sequence Number=SeqID_45808
atgccgtgctccctggagctcacccagcccctagctcagtctctatgcgcgctgtgcgcgcagccgagctcctccctgcgtgtgctgcgcccagccaaggtttcccctgcgcgtgccctcaaatcgacgggtaccctcaaggctcctaattctcagctggtaacccccatcagcataaagctgcaaaggcctgatgggtgcgattaa

SEQ ID NO: 4030 - DNA, 243 bp, Zea mays
  Peptide Sequence Number=SeqID_45809
atggccggtccacgtccatctccgccgatctcagacagggtcgtggtggcggctcgagtgggggagaaagtggcggcaggcacagggggcgccgatctcggacgagggcgtggcggcatctcgagcgagggagaaagtggcggggtggcgagtatggtcgtggttgtggatggagcggagggagggggcacagggggcgccgatctcggacgagccttagattaccaaaatctcatattttag

SEQ ID NO: 4031 - DNA, 189 bp, Zea mays
  Peptide Sequence Number=SeqID_45810
atggtgctcgtgctcttcccaccacaggaacttgatcgcgcgccgctcaaattctcgccggaggagatcttcgccgaggatccgccctcaccaagaatgacaccactacaacaacattctccggtcaagaacaggtaccacaggatgaggcgcatggaggatgctgcgatgagatcattagaggtctag

SEQ ID NO: 4032 - DNA, 393 bp, Zea mays
  Peptide Sequence Number=SeqID_45811
atgatccagggccagtacgacggcaccagcgactaccgcaaagcaacgtggttgcgagccaaagcgatcgccggcgactttggcatggttgttacgggagcgaagactgagtgtgcggtcccacacgacagagggacgcgccgagcgcaagccaccgaacggcgggcccaggctgtcagagtggggcgcggcagcgcgggagagccaagcgcgcgcgatgaagagcgagggcgcggagcggctgtagggatttgcgttcggtcaggaggaagaggaatagtggaggctgacaaggtggccccaaattgcagcggtactgggagacaagtccacgcgttggggaagtcccgccaaggtggcccacccgtcagcggttggagaaatgtgggctag

SEQ ID NO: 4033 - DNA, 720 bp, Zea mays
  Peptide Sequence Number=SeqID_45812
atgtgcaccaatctttcatgtgcaccaaatatattctccatacaaaaaaccaagctgccgtcgcaacgccaacagcaacaagaactgccaccagaagatggcgtcatcgtgcaagctctcacgtcgcaagacgagcagcaacaggcggcgcaaggtcgccatggcaccgtgcaaggcgatcagcaccaccggagcagcagcaagctgacggtcctcccgctcatcttcctcatctacttcgaggtggctggcggtccgtacggctccgagcaggcggtccgtgcggcgggccctctcttcacgctcctcggcttcctcgtcttccccttcgcgtggggcgtcccggagtcgcttgtcacggctgagctctccgctgcgatccccggcaacggcggcttcgtccggtgggccgacctcgccttcggcccgctcgccggctcgctgctcggcacgtggaagtacctcagctgcgtcatcaacatcgccgcgtacccggccctcgtcgccgactacctgggccgcgtcatccccgccgtggccggcacgggcaggacgcgcacgtgcacggtggttggcatgaccgtgttcctgtccttcgtcaactacaccggcctgagcatcgtcgggtggggcgccgtggctctggggctggtgtccctggcgccgttcgtgctgatgaccgggatagcggtgcccaagatgcggccgcggcggtggacg

SEQ ID NO: 4034 - DNA, 660 bp, Zea mays
  Peptide Sequence Number=SeqID_45813
atggcagcgaccggcgccacggacgcgccgccggacacgtgggcgaacggctacctggtcgatgctgccggcgtcattggaggcccatggctcaagttctggatcgaggccggcgtggtgctgtcgtccatcggcatgttcgaggcccagctgagcagcggcgcgttccagctgctgggtatggcggacctgggactcctcccggcggtcttcgcccgccgcgccgcccgcttccgcaccccgtgggtcgccgtcgccgcctcctccgccgtcaccctggccgtctccttcctggcgttcgacgatgtcgtcgccacggccaacttcctctacagcctcggcacgctgctggaattcgccgccttcctctggctccgcgtcaggcagccgtatctgaagcggccgtaccgcgtgccgctatcgctgcccgcgctggccgccatgtgcgccgtgccgtcaacgttcctggcgtacgtgtgcgttgtggccgggtggagagtgttcgcgctcgccggcgcgctcacggtattcggcgttggcttgcacggcaccatgaggctgtgtagagccaagaggtggctcaggttcaaaaccggcttggttgccgcggcggaagatcgccgaggggatgtcgccgtttctgctggagatcgagtttga

SEQ ID NO: 4035 - DNA, 1350 bp, Zea mays
  Peptide Sequence Number=SeqID_45814
atggcgctcttcgtctcctccctcgccgccgccctctcccacctctccctcccatcgacctccacccccaagcctcacccggcctcgctcctgcgcctgcgctccacctaccgccgcgttgttagcctcgcgctccatacagaggagctagacggccaccggctcggtggccggagcaagaacgacagcaggatgaagctgctgctgtccaacccctacaccgacgtcttcaacagcgacggcgaggacgacgaacgcgccgccggccgcggcagcaagaggccaggcgagtcggcggtagagaccttcttctcctcgtcgcgaagcttctcgtcggactcctccgagttctacaccaataagaagcagcacaagaagaagacggcgacgaagcccaaagggaatggcgaggaggtgatggctgtcgaggaggaggcggaggaggatgcccgggctgtcgggagggttcgcttcacttccagatctggaagcacgagcacgatcgatcgtgcagtgcaggcgcagctgcacgtgctccaggcggatccggccacgttcacgtccgatctcgaggacgccgaggacttcgccgcgtggagcaaggaggcgctctcccaggccgccgcagagatgcagggtttttcctgtgaatctgataaagcatgggtagcgcaagcagagatgcaggataaggagctagatataattgagatggctatgtacggggacgtcattcgtccagggaagcaatgtcgctgcagaatagtagccgaggtgctcggtcaggtgaagccaacgaatcacatggctgcatggccattgaaggaccacatttatttgcatctgaaccatctgccgcctgaggttctcaaagaaaggctccctggtatttccgaaactgatgctatttttgctggtgttgacgtcaccaaggagcccattccagttttgcctactgtgcactacaatatgggtggtatcccaagtcccaacgaactaccgtggggaggtattatgggacgaagtccgcgccgaggagagggtgcaaaaggttgtggagaaggagggtatcaatgtgaagtacttctgggtagcacgttgtaccatgtggaagaccttcccttccgccttgacgacataccgtccaactatggtggcttcaaggaggctatgaaggggctggacatcagaaaggtgttggaggcgcccgaggaggtcaagtgcgtgcccatgaagaatgtgctcgagcccggagacatccccacgcttgctgagctcagtctcactactccaccaggcatggcacagatgagtcggcttcaagacatagatcactttcttttcctgtag

SEQ ID NO: 4036 - DNA, 309 bp, Zea mays
  Peptide Sequence Number=SeqID_45815
atgtccaaccacaaattgcttcatgtctactccaaaatgttagaaaagaagaaaagaaatctcggtctgcaaactctccatctcgcgtcgaagctcgtgagcgggagcggccacgacaacggcgtggactggtgggccttcggcgtcttcctctacgagctcgtctacggccgcacgcccttcaagggccacaccaaggaggccaccctcaagaacatcctctccaagcaggccacttacctaggttttagtttgtctggctttgctcgtcattttgtacttgtttttctcacatatttgttcgcttag

SEQ ID NO: 4037 - DNA, 1275 bp, Zea mays
  Peptide Sequence Number=SeqID_45816
atggaggaggacccgcagccgcaggtggaggtgccctgctacttcctgtgccccatctcgctggccatcatgcgagaccccgtgacgctccccaccggcatcacctacgaccgcgacggcatcgagcgctggctcctcactgccaccacctgcccgctcaccaagcagcccgtgccggcggactgcgaccccacgcccaaccacacgctgcgccgcctcatccagtcatggtgcgcgctccacgacgccgacagcgccgaccgcgtccacacgcccaagccccgcgtcgaccgcaccgccgtcaccgcgctggtctcccgggtccactccgccgccaccgggtcggcgccgccgcagcgcccacagctcctcgccgcgctgcgcgagctcagggacgtggcggccgagagcgaccgcaaccggaagctcgtcgccgccgtcccaggcgcggtggacgtcctagccgcggtgttcgcggcgtcggccaacaagtcgtcggaaggcacaggcaccgccgatgccgtccgcgacgatgcgctcgaggtcatcgccttgctcccggtccccgagcaatgcctgcgccgcctcgaggagacgaacgaggcgctggtctccgcgctcgtctccgcgctgcagtggtccagcgccccgtccagggcgcgcgcagcgctgctcctggagcgcgtcacggccgccctgccgcccagccggctggcatccctcccggagcaggtgttcagggaggccgtggagctgctccgcgacaggccggtgtccaggcccgcgaccaaggcggcgctgcaggtgctggtgcgcacggcagcgtggggacgcaaccgcgtcaaggcagtggacgccggcgcggtgcccgtgctcgtcgacatgctcttcgacgacggggcggagcgccgcgcgtgcgagctcgtcctggcggctctggaccgcctgtgcgggtgcgcggatgggcgcgccgagctggtggcgcacgccgcgggagtggcggccgtgggcaggaaggcgctgagggtgtcggaggtggccacggacaaggcagtcagggtgctgcggtccgtggcgaggcacgcggggacgtcggcggtggtgcaggagatggcgcaggccggcgtggcggcgatgctgtgcgtggtggcccagtcggagcagtacggcaagaggacgagagagcgcgcgcgggagacgctacggctgcacgcgagggcatggcggacctcgccgtgcttgaatcaccacctccaggccgtgtacccttgctag

SEQ ID NO: 4038 - DNA, 339 bp, Zea mays
  Peptide Sequence Number=SeqID_45817
atggagaggagcagggacgggagggggcgctcgcgtgctggcatggggagggcgcggcgagcagaacggtcggacctggcaaacctggtcggagcagggagggaaccagggggatggaggagctggacagaggaagatggagggaggggcatcggctggacacaacaacaggaaggggagctagttggacctgagcagggcgacgtcggccatggaggtttgggcattgacgctcggcttgggagaagccagggatggcgcttgaggaagagagatgctggtgaagggatctcacgtgtgggggaggaaaactgggctccatgcctccatggcggctga

SEQ ID NO: 4039 - DNA, 249 bp, Zea mays
  Peptide Sequence Number=SeqID_45818
atggccctacccgacacgtgcctccctgtgttgacgtgttgggtcgggtttttctggttgggtgtgcaatacaggacgacgacgaaggttaagatcatgtgggcgttggggccttcctctttcaaaggaagcttcggctttgggacgaagaacttccctcataatggaatgaagggagatgaagagtggacagtgaagctaaaagacaaggaccttcggcctaacatgttgacgaagctcaaagcataa

SEQ ID NO: 4040 - DNA, 1518 bp, Zea mays
  Peptide Sequence Number=SeqID_45819
atgagcaacagcggcaggtggcggaggaggacgaggtccgtagccccttcgccggccacctcttctccgtcgtctcctggcctccgagaagcgcagccgttccggcttccccagtggaagttctcccaggtcctcggcgaactgccgcccgcggccgaagcccgccgcgacggcgctccccgtccgcaggacgacgacgatgcggacgaaatctcggctatcgagttcgacggccgcggcgagtacttggccggcggcgacaacgccgggcgcgtcatcctcttccggaggaccgacggcgacggcgacgacgcgcggcctcgcgcggagcttgagcgcacggaccgtgccggagcgccgccgccgaggtacagctacgcgacggagttccagagccacgaacgggagttcgacgtgctggacagcttggacatcagcgagaggattaagaaggtgaggtggtgcgcgcggcccaacagctccctgctcatgctcgccgcgaacgaccgcacggtcaagctctggaaggtctccgaacacaaggcggaggcgccgaagaaagggaacggtcggccgagttggggcaccgcggcgctgtcggcagccacgaaactgccgaggggctgttcgtctgcagagcctgacgaacgtcctgaaaaggcagcaggcgatgtcggagacggctactctgcgaaatgccggagagtcttcggccgcgctcacgagttcaacatccactccgtctcgaccaactgtgacggggagacgctggtgtccgcggacgacgtgcggatcaacctgtggcatgcggaggtgacgcgccagtgcttcaacatcgtggacatgaagcccgcggacatggaggacctcgtagaggtgatcaccacggccgagttccacccgtcgtcctgcagcatgctggcctacggcagctccagcggcctcgtcaggctggtcgatctgcggcgatcggcgctgtgcgaccacagcgaccgcgagaaccgccctcagcccagcacatttttcagtgagataatctcctgcatcaccgaccttaagttcacaggcgacggggaacaccttctgactcgcgactacatgaacctcaagctctgggacctgcgcgtggaaacctcacccgtcgcaacgtacaaagtccacgagttccttcgcccaaagctgtcggagctgtacaccgacgactacatcttcgacaggttcggctgctgcgccagcaacgacggggcctacttcgctaccggatcttacagcaaaaccttcagagttttctcccgtgccgctgcgcagacatgcggcgctacgttggaggccagcaccaacccttacaggatacaattacatgctcctacgaagatcccagcgctgcttagcaatttctctctcggagttcatagaaaaggtcaggatggtcatccgaggtcagacggcaaggaacaagtctcgtgcaacatggcgtccaagagtgcaaatcacagaacagcgttcgtagctaattag

SEQ ID NO: 4041 - DNA, 1812 bp, Zea mays
  Peptide Sequence Number=SeqID_45820
atggcgggaaaccttcccactgagccactctgcaaaaatgcaggggcaaggcttgcctcggttattccttccgtagaccccactcgtgtgggaggctgggagcagccagcaccggttacccttggtgctcctggcgatgctcagcgactggattccattgttggtcctccaacaaagcgtttcatgcttcactatagctttccaccattttcaatagatgaagttgccaaacgtggaggccttaatcgacgagaagttggacatggcactcttgcggagaaagcattgcttgctgtgcttcctccagaaagtgattttccatacaccgttcgggtaaatgcagaagtcatggcatctgatggttcaacatcaatggcatcagtatgtggaggaagtatggctttaatggatgctgggatacctgtaagagaacatgttgccggtgtttcagtgggtcttgtaagtcaggtggatccagctactggagatatttctaattatcgcatattaacagatattctgggccttgaggatcacttgggtgacatggacttcaaaattgcagggacaaggaaaggtattactgctattcagctggatataaaacctgctggaataccattggacataatatgtgaaagtttagagcctgcacgtaaggctcgaaatcaaatccttgaccgcatggaccaggaaataagtaccgcacgtggtattaacgatggaagttcccctcgattagctacactgagcttcagcaacgagtctcttaggaaactgcttttccacaggaaaaaaatcgagcaagaaacaggtgcacgggtatcaatcagtgatggtacagtcactattgttgctaaaactcaagaaattatggataaagctattgagaaggttgagttcctcgtgggacgtgaaattgaagttggtcgtacatacaaaggaattgtttcttcgattaaggagtatggcgcttttgtggagttcaatggtggacaacaaggcttacttcatatttcggagttgtcacatcaaccggttacgaaagtctcggatgttgtaactcttgggcaatctctctctctgagatgcattggacaggacatgcggggtaacattaaactttcacttaaagcaaccttaccccaaccacgtatcaagaaggatttgaaaaataaggatcctttgccaagtgaagttactggttgggctgctgtggagaacatgagtagtgtggatgttgatgctcagctatcaagtaccgaacatgaaaatggcacaactgaggaggcagctgcattttcgactccttcagttataattcgaagtgctgctgactgtgatgctcaagatgatgcaaatggttctaagaagcgggcgaaggttgcaaagtcatctcctagaccaaataaaccagccagcgaatgccatgatgttaggaaagctaccgctaagaaagctacaggtgccactaccaagaaaactaagaaagtaaagattgaggaatctgtgagtaatggactagaaaccagtggttctgatgttccagaacagagtgctgacaacacttctgaccagaatcagagtcccacgaaattccaatctggggcaatgaagttgggtgatgtagttacagcaaaggtctaccagattcgagcctatggactagtacttgagttgagtgatggtgtgcgtggaatgcataaatttgaggcaaatggcctaaaggaatttgaagttggacaggaactagtagtgaaatgttctagtttcaatgcgaaggggattccgttattctcattgctggactag

SEQ ID NO: 4042 - DNA, 738 bp, Zea mays
  Peptide Sequence Number=SeqID_45821
agatactttggtacaggtggttatgagatcgatgattctggttatgactatggtgctgccgcctcagagcactcgggctacgtgcccactactgatcaggggttcgaaggctggccccccgaagggttcgacagccgccccagaacacgcagagcgagggatgactctgggtacgtccgatacatggacgaggctcgggctacgctcccgagtcaacaggaccgaagtgaccgcagtcacttcgcccctccactgactgacctgacaggaaaacagcgtcgcctgccctgctccgactgctgtgccacccgcctgggtgaggctgacagcagccgagtccagcctcaggcgccacaggaagctccgcctcgcccgaccccagggctcggcccccgcctcggcctcggaagatggtctccgcttcgcctgaccccaaggctcggcctcaacctcgacctcggaaggcggtctccgcctcgcccgaccctaaggctcggcctcaacctcgacctcggaagacggtctccgcctcgcccgaccccaaggctcggcctcaacctcgacctcggaaggcggtctccgcctcgcccgaccccagggctcggactcaacctcgacctcgggaggaatcacgtccttacccgaccccggcctcggcctcaggaggagtctccgcctcgcccgaccttgggctcggaccgaccacgccgcgggggtacatcattgccctacccttag

SEQ ID NO: 4043 - DNA, 2901 bp, Zea mays
  Peptide Sequence Number=SeqID_45822
atgcatggaacagccagagccagcaaagcaaaaattaatggcttcactggtccagtgtatttagagaaagagattcaaggtgctgacaagagttccagagaaaatctggagcctttaaggatggcgttggtgcagactgcagagattcctctgtcacctctttcgcacttgtctgttcagagtaagagtaaaacattcgaaatctgtgctcttgattgggtttcatgttccaaatggactgttttaagctggggtgacgatgacaattcttcaagcagaaaatgtaacacatcatcattaaaaatgttactagagaaggagatgtctaaagaagcagagtcaaagagaagacatccaagtgtcattgccagattaatgggtcttgaggaggatttacctactaaagaaccaactgtacaccataccgtaagtgacttgagtagagatttgaatgccacaaacaacaccttacagggaaaagaacaccatcactttataatgtcgaagacacaaaactaccaatcctgtcatgaaaaaatcgaatacaatgatgtttttgaagtatctgaaggacaaccgggaacagactgttttcatgatagaacttcacagaaaggatggtcttccgagaacaagagtgagcaattcaatattgcacgagacaagatcatggaaccagaacagttagctattgaagagaagctcctttgtacaaaggagttgcctgaagctcttgtttttccatgttcaaatagagatttatttcttgaatttcctgaagaacataaccccacattctcaagacagtcgagtgggcttcatgcaaaccaagcaccgcctcaaacaaaacgcattacagtgctgaaaccaattagatctgttgatagtgatggcataagacgacccagagcagaaattggtaagcaaaatgtattgaagatgagaaggttccatcagattcctagttcaaaggaagagataccttcccaaccaagtagaataatccttttgaggcctaccccagggaagccaggtatatcaaaggcaaagctgacatccagggcaacttcatttcagttacctaaccgtaacagtctcaatggatcattagatgataaccaggcatccataggatctgcaggactagtgcatggtatgatgcagtgccggcaagatggatgtcaccaaagagatgattctttattatcttctgcatactcaaatggatatgggggagatgaaagctcattcagtgattcagaagttgattataccagtggctctgaaatcaactatattgaagattgtgataccctcagtgactccgagggaggtagccctctgtcaagacactcatggaattacataagaagatatgaaggtcaatgctcaagttcatcctttagcaaaatatcccacttttctgagtcgtcagttgtaacggaggccaaaaaacagatttcagagcgatggtcaatggttacatgcaatgagatgagtcaagtgcaactgtcgagaagaaaatgcacgttaggtgagatgctctccattaaggaagcaaaggaagacgaggccaccactgggatgttttatgtttccagcaaccagtcatgtggcctggagaatgaactgactacacgttctacaaatgtaactacttctagaaaaaatggtgacaatggggagagatcttcgaaattgccaagatcaaaatctgttccagtgatttcatccacgtctgataacatgacggtgaacatgcaagcttcaaatcctgagagctgcaaacttaaagtggctgttgtgtcaaataaaggaaaatcagctttcaagggaagagtttcagattttttcttgtctaaaagtaaaaggccaagaaggcagatgcctgcttatcatcaatctgattgtattgctgaggggcttgaaggctgtattactcataatagacaggactgcaatcataaaatggatgccatcgagaaagcgatgcattacgatgatgaattcaatagtttttcgacacgaatatcaactagcataccagatagaacaacttctggtgcatctgtttcattgggcagttcaaccggaaacctggataaactaggagtaaacaaatgcctaaatggtaaccgtgatcaaccaagccctacctcagttcttgatgcaccctctgaagatagcagttgtaatgagcctgaaacacttggaacaactacttccaagaatgcgatatcaagatcttcagcaattgaaactgtggcccgtttcttgtcattggatgacaccgcctcagagtcacagtcactttgtaacccaagaccgagttctcttctccctgatgcagatgatgatgagtcagagtgccacgtccttgtgcaaaatataatgtcatcagctggattaggcacttcacagtcacgtatggttttcgccggctggcatttacctgatcaccctcttgacccggtgctgcgtaacaaagtatctcagctgcaggagaaaagttcatacagaaggcttctttttgactgcgtgaatgttgctctaattgagatcggtgagaacgccttactgagcgccctcccatggagtaaaagaagttccagaacatggaggggcacctcatctcctgatctgggggtggaggtctggagtattctcaaggactggatacacggggcacggatgtttgtggtgagcaagagagataatgctgggatcatactggacagaattgtgaagcaggaggtcgaagcaagagggtgggtgaaactgatgatggcgcaggtggttgtcatcaccgaggagctcgaagggggagtaatggaggagctggttgaagaagcggtgctggatttttacagtctgttttcagtggtgagatatcgattgtga

SEQ ID NO: 4044 - DNA, 1407 bp, Zea mays
  Peptide Sequence Number=SeqID_45823
atgtccatgggaagtgctgagttgtttcaaagaaggtcggaatttatagttggcatcctgcagagactaggcaccaacaacatcatgagaaagcaagaagggtccatgagtcacagaaaaatggactgcagacatgctcttgctattcccgaaggccattttgataacttgatagactacaagcgaagcaactttaatccattagctaagctgaggaatggtaaaattccatcctcttatgcaagtgatgaagcatgtgagttcatggctttaccatcaggatacaatcagggccctggaagtattgttgatcagaaaaatgacttatctcatgggggtagtggagcaagtgagtgcatggcattgccatgggcgtgtgttaatgatactctgagttctgatcggaagggagacattgttcacaaccaggtttcaaacttgttactagaagatgtcgatcgatacgtccatggaagacatgcttctgctaatgaattgagtttgaatggtcaaacagattcatatggtcaacacagatgggaccctatgttgtcagtaacgttcttgaagtcatttcatgacagactgtacttcccctgtcagaatgaggagcggcatgcagtaccatatgggatttcaaatacctctgagcaacctgaactatgcagctccatagaactgtgtacttgtagttcaataggactggagatagaagacccaaaagaggcgggattgtgtggtaattctgatgctgggtttccatcgtggcttgctcaattagttgggaaaccaactatttcaagcatttttgacagtgggaatgaaattctggatcacaatgacttcagatgcatctccaacttccacagcaacatgttcagttcaaactcaagttgtttgaattccatgtcgactccagagcagtcgtacaaggttggcgcaaagggcctgcttgattcttcatttggtctctcttgtttggctggactggaggagtactccacggacgcagaactgccagatgattctgatagatttcttcaggtgttggaccagttacctgtgaaattcatctcttcagggttttcaaacaacgattccagaatctgggaccatcggtcttcaaatgcagaacctccttttaaccaagattggggcactacacaaccgtggtcatcagtgcatcaactccaacctcattctgattcaggaaccgtgcttggtttcatgccaaatggaagtgcttacagtgatttggtggaacgccatcacagcctcatgctagtccaaggaaacctgagcactgacgttcttggtgctactgatttatcgttctttggatcttgctcaagtttggataacatcacggaggctcctacgttatcttctgatggcataacgtggtag

SEQ ID NO: 4045 - DNA, 402 bp, Zea mays
  Peptide Sequence Number=SeqID_45824
atgtggtacgagtatctaaccttgagctggtcgcgggagacgtcgagcgcgaggagaccgcagatccggacaacgggcttcggcagtaggcgcagttgccgagtggcgaggttcactcgctccaccaccttcccttcctccccatacttgagaaccagaggtgattggggcggaataggaggaggacgatgcgcgcagcgggcgcaatcgcaggcacggtgggcggcgacatctcgcgggctaggggcaatcgcgggcgagggagctagggcaggcgaaatccgcgggcgtgggcgcgtgtccgggcgtaggcgaggggtgcggggaggggtcaagcgagagtgtggccgcaagcggggacacgacgagggcataggcaaggtgacggtgcggggttggtag

SEQ ID NO: 4046 - DNA, 264 bp, Zea mays
  Peptide Sequence Number=SeqID_45825
atgcaggtggcatgcaactgcaccacgggggcgcaccctttcgactttgacgcatccagcatggaggcccaggcccacacgtcatggaccggaaaggggatatttcgaaagggatccttcttcgcgaaggaagcgggccccgagccccctactgatcaagggttcgaaggctggcccctcggaagggttcgacagccgccccagagcactcgggcttcaggctcattactgatcagaggttcgaaggctggtgtaacgccctga

SEQ ID NO: 4047 - DNA, 516 bp, Zea mays
  Peptide Sequence Number=SeqID_45826
atgtctacagtcagaaagcgacttgaagcagaaaaactatgccaaaagtatggttctactaatgccaaaaggggcaagagatctgcttctacgcatgtgaccaaccgaggtggcactaaccggtgggcttcaggtccagcccatcgaggcagtagtagcttgatgcttcacctgaatgaaaaaaaggaaagactgataaactcagctgatcccaagatggttgctgttaatcttggcagcgaagcgagggtggcctgcagctcacacttgacacagagctcattctttggcccatgtgcagtgctggatgcttgctgccttgtggtcgccgttgatcttgacagcgagggtggccaacagatctgggatgatgctcagcttagtactgaccatttgctcggtgtcatatactgtggcatcgagttaacacagctcgacgccatagcctatgacgccgagtttcattttaaaaaatggaccccaacctcggcgacatcatcattggcgccgaggtaa

SEQ ID NO: 4048 - DNA, 228 bp, Zea mays
  Peptide Sequence Number=SeqID_45827
atggcgtgggcggacgacggcggtccgagtgacgtcgtgggcgacgggtggcatggacgagcggcgggcacctgcccgtgggagctaattgcaaatgcgcagcgccagcaaaggaacaagcgcaaggtttattttgcaaaaagggagcgattcgttggttttaggatgaacgttctagttggaatttgtgcacttgtgcaccagatacgctgtcgcttcgtattttag

SEQ ID NO: 4049 - DNA, 990 bp, Zea mays
  Peptide Sequence Number=SeqID_45828
atggcgtgggtgatgcaccggtcgagctcggacggcgggtcgagcagcgggtggtcggacgccgcggcggccgtggtggcggcggcggaggagcgggccgggtgggaggtgcggccgagcgggatggtcgtgcaggcgcgggacgacgcggcggggtccggcggcgccccgccgaggccgccgccgccgccggagatcaaggtgcgcgtcaagtacggcggcgcgcggcacgaggtgtccgtgtcccccattgccacgttcgggcagctgaagaagctgctggcgccgaggacggggctgcagccggcggaccagcagctgagctaccggggcagggcgcggggcaacgccgagtacctggacgcatgcggcgtcaagaacaagtccaaggtggcgctcgccgaggaccccgccagcgtcgagcgccgctacatcgagcgccagaggaacgccacggccgagagcgccaaccgcgccatcggcgccgtcgcgctcgaggtggacaagctcgccgatcaggtaactagcatcgagaaatcgatttccagagggaacaaggtgccggaggtgcagatcacgacgctgatcgagctgctgatgcggcacgcggtgaagctggagagcatacctgcggccggggactcctcttcgcagaagaacattcaggtacacacacctacactacactactgcactcctggcgcatgctgccaactgaatggcatcccggcatgggcattgttcggaccagttccagactttcaccaggggcaccgttctattagttatgctacagctgccagtgccaccagctctgtttctgacgatgatatatcctctctgcaaagggcgaagcgggtgcagaagtgcgtggagacgctggacgtgctcaaggtgtccaacgcgcggctgcaggcggtggtggtgacgaccaaatgggagacgttcgacgcggcggccaccacgacgaagtgggagctcttcgactga

SEQ ID NO: 4050 - DNA, 333 bp, Zea mays
  Peptide Sequence Number=SeqID_45829
atggtcgcactgggggagagaggtaccggggccggagcgggcgccggcggagctcgggcggtgctcgggcgttgctctcgggcggagctcgcggcgggcctgggcggagctggggcaggcggcggcggccagccggagctggggcaggcggcggcggccagccggagctggggcaggcggcggcggcgacccgatgggaggcggcggcggcgagattttgtgggcggcggcgagttcctcggcgccaagatctgtggcgccgagctaggtgccacgcgggacggccacgtcacgaagctcggcgccataggctatggcgccgagctgtgttag

SEQ ID NO: 4051 - DNA, 777 bp, Zea mays
  Peptide Sequence Number=SeqID_45830
atggcgaggaccacgcggtcggcggcgacggagcgcgcgtacctccacttcgcgccggcgccgcacggaggaggcgtcgtcgtggtgccgacgagccccctagcgggcacgggcgaggacttcgacgagtcggacatctggggcgcgttcgccccgagcgccgctgctgcgcctgctgccgaggcgccgccgccgcgggcgcgcccgtttgtgctggccgcggccgggaaggcgacgacgaagccggcggctcctgcgcacgggtccctgccggtgaagatcccggactggtccaagatcctgggcgacgagtaccggcccgcgggataccaccacggctgggactgggaggtggacgacgccgacgacgacggctccgtggacgcgctggtgcccccgcacgagctcgcgtgccggcgccgcgccgcgtcgctgtcggtgaacggggtcgtcggtaggaccctcaaggtccgggacgcggtagtggtgcaggaagttgatgggtgttgtcttttatcgtccctcccgcatgcagcacagtctgctgctgcagtgacatcaatcatcggtgatctcatcctcgtcgtcgggagcccaggttggcagctgcaagaagatggaggaggtggaatctgctgcttctctctctcatccctgccggcgccaactgtctgcgaagaaaccattggcagtgcgctcggatccgcccagaaagtctcaccaataacagctcttgcttaccaagggaacattgctcttgctggcgtgtcgtcgtag

SEQ ID NO: 4052 - DNA, 402 bp, Zea mays
  Peptide Sequence Number=SeqID_45831
atggcgtggcgaccggatgaaggcaggcagtgctgctacaaggaccaattcatcgcgctggtggtggaatggctgaaggtgccgccgccggagccaccatggtcgatgcgcggcaggtgtggcggcccgccgcttcctgcagggcgagctcgtgctcgccggagaagtggaccgccgcggagcctgggtggaccaggtgcagagcatagtcgagacgctgcgcgttcctggcgctgtcggcagcagggtctcttgagcccgtccaggcgctcaacgccccgtagatgctcgccatgtgtcacagacacaatggaagatgcagcagagaagccgatcaataaggagaaagaacagcttcatgtatcaggttcgacagaagtcatacgtgcttttggtgaatga

SEQ ID NO: 4053 - DNA, 228 bp, Zea mays
  Peptide Sequence Number=SeqID_45832
atgtggcgcagggaacatgacattatttacaaccagaacaaatctgaaacaaagaatctggtcgccccgctgccagccgtgacgccggaggaaataggggagcgctacaaggatctggaggagagcatcaggggattcatcaaggatctggacgaggccgagaaggaggaggaggaggacggaggcacgagcgaggcggcatcgccgtcttcagtggacgatgagtaa

SEQ ID NO: 4054 - DNA, 2484 bp, Zea mays
  Peptide Sequence Number=SeqID_45833
atgacgcataccgaaattcacgggcctcaaacttccacacagctccacgcatacgtcgatccactgctccgtagctcagttacacacgacacccgctcgtcttcgtcagttcgtctcctccacctctgtatccctctcactccaccggccgccggccctcgcatcggcgcgttcccaatgatcacatttgcggacctgacggagccggccgccgccggcgccgagcggtgcgtggaccggcaactgtggctggcgtgcgcgggcagcatgtgcaccgtgccgcttgttggcgccagcgtctgctacttcccgcaggggcacgcggagcacgcgctcggtctcgacggtgcggccgacctctccgcggcgcgcgtaccggcgctggtcccctgccgcgtcacggcagtgcgctacatggctgatccagacaccgacgaggtcttcgccaggatccgcctcgtcccgctacgcggcggggaggcgcacgcgggtggcctcgatgacgatgtggccgcggcggacgagcaggagaagccggcgtcgttcgccaagacgctgacacagtccgacgccaacaacggcggcgggttctccgtgccgaggtactgcgcggagaccatcttcccgcggcttgactacgccgccgacccgcccgtgcagaacgtcgtcgccaaggatgtgcacgggaccgcctggaagttccgccacatctaccggggcacgccgcgccggcacctgctcaccactgggtggagcacgtttgtcaaccagaagaagctcatcgccggggactccatcgtgttcctccgcggtgacagcggggacctgcacgtcggcatccggcgcgcaaagcgtgggttctgcggcgctggtgggggcggaggcgacgaggcccctacgcccgggtggcatcattacgccggccttatccgaggtaatgtgagcccttgcgcggctgccaaggcacggggcaaggtgcgaccagaggacgtggccgaggcggcgaggctggcggctgccgggcagtcgtttgaggtggtgtactaccctcgcgcgagcacgcccgagttctgcgttcgcgccgccgcggtccgcgcggcgatgagggtgcagtggtccccagggatgcggttcaagatggcgttcgagaccgaggactcctccaggatcagctggttcatgggcaccgtcgccggcgtccaggtcaccgaccccatccgctggccgcagtcgccgtggcgccttcttcaggtgacctgggacgagccggaccttctgcagaacgtgaagcgggtgagcccatggctggtcgagctggtgtcaagcatgccggccatccacctcgcctccttctcgccgccgcggaagaagccccgcatcccagcgtaccccgagttccccttcgaagggcagctccttaacccggcgttcccgcccagcccactgccacacggccagcaacaccaccacaatttccttcacgcccacccaccgtcgttcttcccgttcccggacggcagtgctcctgcagccatacagggagccaggcatgcgcaatttgttccatctttatcagatctccaccttatccacctgcagtcgagcctgctgtaccctgggctccgccgtcccgaccatgtcggtccgacgatccctatcccgtcgggaatcagcaccgacctgaccatcggaggcgcaccggcgcgcgacggcgtcccgtgtgccctgtccgtcggtgccagcaagcagaaccccgacgccgtcaagccggcggggctggtgctcttcggacggaccatactaaccgagcatcagatgagcctcagcagctccggcggcgccacctccccagcggcgactggtaacagctctctgtgctggaccgccgagaagggccccaatgtctcggagggctcgggctcgggctcgggctccggcgtcatccagaacagcccgaccggcaagaacacgtcgtcggagaggctgccgtggttcggggacggcagcagccagcaggcctccgagcccggtcttgagcccggacaatgcaaggtgttcgtcgagtccgacacggtcggccgcaacctcgacctgtcggcgctgggctcgttcgacgagctgtacggccgcctgtccgagatgttcggcgtcgagggcgcggagatgcggagccgcgtgctgtaccgcggcgccaccggtgaagtgaggcacgccggcgacgagcccttcagaggagacagcaaccgcagtgagggaggagaaaaggtggccgtcggcgaggttgagtggccgcacgggggagcttcagccccccgccgtgcgggtgatctccggctggccgccacgcgggcgagcgtggggggagcttgggccctgctgccgcgcgggcaacctctggcggtctggcccacgcccaccatcgcgcaaggcgagcgcgggggaactccggcagtcaagcccccagcggccctcctcgtcgcttag

SEQ ID NO: 4055 - DNA, 294 bp, Zea mays
  Peptide Sequence Number=SeqID_45834
atgacgccggcagaaataggggagcgctacaaggatctggcggacaccgtcaagggattcctcaaggatctggacgaggccgagaaggagatcgtcgcaggcacgagccaggcggcaacgccacctgcttcagtggaagaccatttgttaatcatctggatgttgggtgataatttagctgttctgattatccttactgatgatgtgctgactgctgagtggagaaacaaggttcaaccgggcgaagaccatgcggcttatgcatctctcgcgtcctactgcacaaacggttaa

SEQ ID NO: 4056 - DNA, 441 bp, Zea mays
  Peptide Sequence Number=SeqID_45835
atggcgggagttgaggagaaaggaggagcgttgggagcgcgtgatgacggcggtggagcgtctgactggcaagatggaaggctgatgaggatcgggcgctcatggctcatcaactgcaggaaactgagaaagttgtctcgcgtcttcgactcgagttgctggcgaaggatttggaaggtaacgaatccaactctaagcgagaaaatcatgttcatcgctgggatgagaggggctgaggatttggcagggaaggaggtagagaacggagggagcaatggggtgaaggaagggagttcaggcccagttctctaccgaagtggtcgtttccaaaccaactgcaatggaatatttcacagtttattaggtgcccgagtggatctgggcaagcactgcctcgatgcacatggagggaaatgcgtcgaagtggctgcaggtgtataa

SEQ ID NO: 4057 - DNA, 753 bp, Zea mays
  Peptide Sequence Number=SeqID_45836
atggtggactggatggatatggttgtggtggacatggtggaggtagaggaggtggaggaagaatacatgtctaccgtcttcatgacccaactgccgcgtactctccgtctaatggagggagagcaggatcagggactctttccggcgtcgaccttccatgtcgcaaaggaccctccaatcttgttcccgttcatgatcaccagccccgtccatgtagatcagctccaagggcaaagcagctatggtgatcagcacttggggcagcatgtcttgtctgaatctactcaacagttcaccgatcggacgatgataagtgggtcagaagtcttccctaggcggccatcgccgttcgggcagactatccaaagcatcgatggtgatatgatccagccatctgcgtatgatccatatgatatagtggagaaccagcgcacggaaggattgagcggcggcggctggacagtgtcgtcgtcctcgtcgtcaccgccggcgaagatgaagatcatgcgcaaggcgacgagcgagtatcccgagggtggagctgcaagaaagccaaggagaagagcccaagcgcaccaagacgagagccagctactgacgatgcagcagcaggctatgggcgtcgtcgttagagtgtgctccgactgcaacaccacaaagacccccttgtggaggagtggtcctcgtggccccaaggtgaattaccaagtaattgggaaacgccctgatctgcgcgttcgtttgaggttctag

SEQ ID NO: 4058 - DNA, 1572 bp, Zea mays
  Peptide Sequence Number=SeqID_45837
atggacgcggcggcgaagaagatgacgcggagcatctcgcggcagctctcgtcgggggcggcgcggctgtggcgccagctgtcgctggacccgcacaccccgcgccgcggcggcccgggcccggtcccagcggcgggggccgggcagacgcggttcgcgatcgccaggcagtcgtcgctcgacccgacgccgcgcggcgggccggacgggtcgtcggcgcaccagcagctcgcggtgccggagaacctggacgccaccatgcgcctgctcttcgccgcgtgccagggggatgccgccggggtcgaggagctgctcaggagcggggtggacgtcgacagcatcgacctcgacggacgtacggcgctgcacatcgcggcctgcgaggggcagggggaggtcgtgcgcctgctgctcgactggaaggccaacatcaacgcccgcgaccgctggggtagcacgccagcagcagacgcgaaacattacggccattttgaagtatataatactctgagagcaagaggagcaaaagttccgaaaaccagaaagaccccgatggctgtgtcaaatccgaaacaagttccagagtatgaactgaacccacttgaactggagtttcgaagaggagaggagggtacatatctggcaaaatggtatggctcgaaagtttttgttaagatactagacaaagacagcttctcagatgctgaaagcatgtccctaaactcactagtggttcaatcgagaaatgcgttcaaacacgagcttaccttacttgagaaagcacgacatcccaatttggtccaatttgttggagctgtcacgcaaaatgtcccgatgatgattgtttcagagtaccatcaaaagggtgatttagccagttatattgagatgaaaggtcggctgaagcctcacaaagctataagatttgctcttgacattgcgaggggactgaattatctccatgagtgcaagcctgagccaatcattcatggaaatttgtcgccaaaaaacatcattcgggacgatgaaggacaacttaaggtggctggttttggatcactgagtttgagtaaagtttctgaagataaagtacaaatggctcagccagttacaaaatttgacaatgtatacatcgctcccgaggtctacaaaaacgaaccatttgacagaagtgtagatgtatttgcatttggtctcattctttatgagatgattgaaggagctcctgcttttcacccaaagccacaagaggaagcagctaagatgatttgcttagaggggctgagaccaccattcaagaataaaccgaaatactaccccagtgatgtgaaagagttgatacaagaatgctgggatccgatgccttccgtcaggccaacattcgcggagataattgtgcgcctgaacaagatacatgcgaactgtgctaagcagggtagctggagagacaccttcaagcttccatggtacatctcttatcatttgagcatcatcagttgccaatccccagtccaattactctttaaagtgttacctgtttggccgtttcctaccattgcttctccattctga

SEQ ID NO: 4059 - DNA, 2160 bp, Zea mays
  Peptide Sequence Number=SeqID_45838
atggcgtcgccgcgccgcattccctctgtgcctgccagatccggcaacaaagagaatatatctcaagatggagaagctcccttggattttgcaaccttgcctaaagaagggcctgccactacaaggcggaagaagaagcttgcaggtttcaacttgaggaaaagcattgcctggaatcctgcttttttaactgaagaaggtttaatagtaacatcaaagaactttgtaggtgttttggataactcggagctttctgtgcttactggctcccaaccgatggcaaataggagccctggatcagggatgtcaagaataccaaaacaattacgaccttctcttcctaaggtcccaagaagtacttcatctgtgacaaacaatttggaatcacacaaaaaaatagctccagttaaagctgaactagttcacagagtaactggattccctgctagattgaagatcaatcctgtatcttctggacctagcatagagaaggctgtggtgcctgctgttactgccatacatgaagaagccactgtgaaatgcaaaaaaaacccagcacacccacaaattagcccatccaccccctttgatagcactgtgtcaaaacttgctaagccatcagcacttcgattgccttcaccttcacttggttttttcactcaggaaaaagcgcatgtgccacatggtgatgctgctaaaagaaacgtggggaggtgtttctcttcaaatacttcagcgcttgatagacctcccagatacaggcagtctgaggaaagcagactccacctagcaaagcagctgtcaaccaatggcactgttgcttccaatcttgtgctacctgtgactagagagggccatctcaaatctttggtggttccagaaaatgaatcatcgtcaaaagttatcattacatacttagaaaaatctggaaatgtaaataatcaagcaatgccaaaggctgatttcttattggcaggaactggagctactgatactacacaaccaatgaatttagaaaagaaagatgacgctggaaatagtgagacattgcttgtagaaggaatggatgatatcaaagagattgaacctcttgataatttctacgctcctgaagctatttgttcctcaaccattcgacctgttgaggattctttctcgcttgaagccagttattcctcaactaaacctattgtagagagtaaattgtcactctcttgcatttcttctaaagtacactcctctagtgagcttagttgtcaaggcaagtcagtcagtgatcccagtgcagcgatggacatggaaaactctaatgttggagatactgcacttagcgcttctttgtcgaaaggcaggagttgcactccagctcttgatttgttgcaaggattttattcatttgatcgccagaatattgaatgtcctatgctgatggaatcagtatctacaatatgtgcagaccagctgccacattgtgacagtttaagcgatgaaacgccagccctagctggcagtcattcagatttgaatgattctttgtgtgatgaagctaaacctgctttgtcaaaagaaccaaatactgaaggtgaaatggagcttcaaacaaacagtaccatagctgtaaaggaaactccgttgttagatgtggggtgtgggcatattcacaattataggaccacagattgttctacgagattggaagcacctacaccttgtgtggaaagacgtcatgctttattagtagaaccaaatatggaagaaaaaatggtgcttgacacaaacagattgtcagctatacagtacacaccacatatagaaaagaacaaggcactggaaagatcaccggcaaatacaatccgtaaagatcatctgaagaacttgataccatttacagaagaatggcttgctgtcatggagtcttgtgggcaggaagttttggaacaaaagaccggtgctgtgcaaaattctcctcctgacaaaacacctccagaaccgagtccttggtcaccggttaaacggaaggcgcaagatgttggaccatttgactgtacgaagtactccaaaagcatccgaacctctgggcaactgaaacagttggagacagaacagctggaacagccacgtcctgttgccctattttgtccgtctaattctgacgaatag

SEQ ID NO: 4060 - DNA, 624 bp, Zea mays
  Peptide Sequence Number=SeqID_45839
atgtcgtcgtcgtcgtctatgggaggctccctggcgctcgccgccgccacggccgtcgcgttatccggctccctcgtcatcttctcgctctgccgcgcgcacctcgcccacggcgccgagccggagccggagccggagcacgccctgcgcccctgcctctcgtcttcggagaggcggacgcgcggcggggggaaggcgaaggcgaggagacgcaagggcgagaggcgggtgcggttcgcggccgacgtcgtcgacaatgagggcgcgacgcgcccggtcaggttctccccgcccgcgccgtcgtcgtcggcggccacgtgtggggacgcggcgcggtcggaagaccccatgatgcctgccaaccgggaggcgctctaccgcggcatgctccgcgaccgctccacgcaccggggcctcgattttgggtctggggcttcaccaagtctcacgggtcacgaccgtgactttgcttgggcagactacgttctgatcgactcgccttcctccctgcatcgtgtaacgccggtctgggtgggatactgcatacttgggcggagaatcaccttgcggccgcgtgagctcaccggaattctgggcggctccgtcgtgcttggccctgggtga

SEQ ID NO: 4061 - DNA, 1726 bp, Zea mays
  Peptide Sequence Number=SeqID_45840
atgcggtgccatgcacctggactactagtacgcttggggaatggggatgggtgcaacggtagaggaaggtcggtggtctcctccactatccccacagaggttccccttctccttccttccttcgcttcctttttttcccctgtcgccggcggcgatagggtcccgtttttcttgcttcggcgggctgtaaatgcttccggtcctctccggcggtccagatccggcggtgaccgtgctcctgttcgttctcctggtcttgattcgattgggaggggaaggggttccttcggtcttgggaaattcgaagacatgcctgcgctctacgcttattacggagatggcgggtgcctcgtctcggcgccggctgagctggccgggctcttctgccgcggcgccgtgcagcagcggaagcgcacgctggtgaccgcgtccgcggtcgccgcggcggcggccgagttcgtgagggcggccaagaagcagaggcagctgccgctgccgtcgctcgacgcgctcccagacgagtgcctcttcgagatcctgcgccgcgtgcccggcggccgcggccgcggcgcctccgcctgcgtctcccgccgctggctcgcgctcctcggcagcatccgggcctccgagctcggccaggccgcggcggcggcggcggacaccccgtcgctgcccgacctgaacgaggaattcgtcatggaggaggataatgaggagtcccccgcggatcggtgcgtcgacagggtcctagagggcaaggaggccaccgacgtccgcctggccgccatggccgtcgtcgccggatcccgtggcgggctggagaagctcgccgtccgcggcagccacccgacccgtggcgtcacggaccaaggactgtcggcggttgcacgcggcagccccaacctcagctcgctcgcgctctgggatgtgcctcttatcaccgatgctgggctcgcggagattgctgccgggtgtccctcgctcgagcgtctggatatctgtcgatgtcccctcatcacagacaagggcctcgtcgctgttgcgcaggggtgccccaacttggtgtctctgaccattgaggcatgccccggtgttgccaatgagggcctgagggcgattggccgcagctgcgtgaagctgcaagctgtgaacatcaagaactgccctcttgttggtgaccaaggcatttccagcctggtgtgctctgctaccgctgctcttacaaagatccggctccagggattgaacataactgatgcttcgcttgctgtgattggatactatgggaaagccatcactgaccttacacttactcgtctcgctgctgttggtgagaggggtttctgggtgatggctaatgctgctggcctgcagaatctcaggtgcatgagtgttacctcttgccctggagtcaccgatcttgcgcttgcttctattgccaagttctgcccgaacttgaagcagctgtacctcaggaagtgcggatatgtgtcagatgctggcctcaaggcgttcacagaatcagcaaaggtgtttgagaacttgcatctcgaggaatgcaaccgggtttctcttgtcggtattcttgctttcctcctcaactgcagagagaagttcagggctctatcgttggtgaaatgcatggggatcaaggatatctgctctgcgcctgcacaacttcctctttgccgatcacttcgtttccttacaatcaaggattgcccag

SEQ ID NO: 4062 - DNA, 711 bp, Zea mays
  Peptide Sequence Number=SeqID_45841
atgtcgcagccgttgatctcaattctcatccacgtccttgatgcagccgttgaccaggataccagcccacccgttgttctgcgcatgctggacggggttgccgccaaggatggcgcagcgcatgctgccgccaccgtcaaccacgaggaccctaccgtggcctttctcctcgaggaactcgcggaccaggacgttgtcctcctagaccttgagcgtgacgatggggccggcgaagacctggcaccgtccgtagatctggaagatgggctggagcgcgcggagctcgccgttcatgatcaggtgaggggaaatcagagactggacaccaggagattgattccccgtcactcagtcagcggtgtgcattcgattcttggcccagaggaacatgggacgggatttgggaacggacaggaggggaagtggccagtgggtggggtcaagacaggcggcagacctaggcagctgggactgggactgggaggactggccgcctgggaggctgggactgccggactggccggctcacggctgctggtgcgccgtgcgcgtgtgcgcgtgtgcgcgctgccgcgggcccgcggtgcgcgtgagttcgtgactgcggcggtgcagccgcctgccgcctggagtgaggacgccacccgatgctgggaagattggccgtctgggactctgggagtacgccgccggccgcctgggaagacttga

SEQ ID NO: 4063 - DNA, 186 bp, Zea mays
  Peptide Sequence Number=SeqID_45842
atggccggaggtgaccgtgatgggccgtacgcggggagggggaagaaggacaacgaagtggctgacaactgggggccgcaatatcataactacccaaatgattcagggataaacaaggtttttctcactgtctggactgtgcctcaatttccagagaagccagggccaactcgcaagttttcctaa

SEQ ID NO: 4064 - DNA, 414 bp, Zea mays
  Peptide Sequence Number=SeqID_45843
atggatgtacaatggtggatcaaggagacagacgacgtactgctggatctcgcgctgctcaatgggcagcagtaccggccagtcgggtcaaacgacgacgccgtgatccagatgacttccatggagacgagatcctcgtctgtcaccatcgatgtcgtcatgacttccagtcgccaagaggttactatcgtgtggatcgtcacctccccaaagtgtgtcgcacccgtgaagcctagatctaccgacagcacacctctggaggccgtgtcgccgtcatcagcgatgaccgggaaccttgactggaagagggcggagcagcacgagatcctggaggcgctgatcgacaagaaaaccgtggggcccggcggctctgggaccatgtacaagatcgagctagcagcggcgagctggtag

SEQ ID NO: 4065 - DNA, 477 bp, Zea mays
  Peptide Sequence Number=SeqID_45844
atggaggtggatacgctggatatccacgatgaagctgtcaagaagaggcgttgcaccaccaagaagccatacttcaggtcaactgtgggtgcttccttggaagttatccagaagaatagagctgagaagccagatgtccgcggtactattagagaagttgcggtaactctgcacgtggacaaaatcacatctctgttagcactgttttatcaaggtgttgaggattacttggtgaatgtcgagcatgtccttaagactaacttcaccaattaccccaaggtaaatatgtcgaagtcagtgatgttcagtcttgctcgatgttgtgctaaaggggacatgtacagatcctacatggacttgctccttggcgaggacatcttcaacaccgacggcgagctttggaggaagcagaggaagacaacgattttcaagttcacctctaagaccttgaggtcgtctgtaggacagaggtggtga

SEQ ID NO: 4066 - DNA, 1350 bp, Zea mays
  Peptide Sequence Number=SeqID_45845
atggagactcgcgagccggtcggatccggatctcttccaccgcgggcccaagcatcgactgctcagcagagggagcgggttcggcgctcccttgtgtctcccgcggcactacgtcctactcctcctgctcctgcctccatccgtgcagcaacgccgccgttgtcgccatcgactacttcccctttggatgacccaaacggctcagcagcaacgcccagccctctaattagaatgctattttgccgcctaggactatccaccaacgatgatggccgtgtgccaggtttgtctagtgatgattgcaatgcagaaggggaagccgcagtgttgggttcaactccctcatgtcctgctagtttggatggcgaaggagcaagtcttgagagcactgcgggtggtgacaacaagagaatgaggaccagagcatcaacatctgaggtttggaaagatctaaagcctctattcaaaatcttaaatggtaagcaagtcaggtatgctgctgtatgtaagatttgcaatgtagaactgtctgctaaatctactgggggtactggtcatttattgaggcatgttgctgcttgtactagaaaggctgaggctgctggttcattatctcaaactcatttacattatacagctgatggtcatgtgcatcattttgagtatgatcctgtaaatgctaggactcagttgtgtcggttgattgctagacttgatcttccattgaacattggtgctactgatgcttttgaggaatatattaggtttgctcataaccctcgttttcaacgtgtttctagacagagcactactagggatcttgaaacttattttcatgctaaggtgtctgaggtaaaaaatttgttagctaaggctacatgtgtttgtttgacatcggacatatggagtggtaacgctaaggaagactaccttagtgtggtagtgcacttcgttaatgatgcttgggagttagaaaaaagaattattgatagtgatcctcttactgagtttgatgattcatttagcgtacttagttggtggcgtgatcataaaagaacctatccaattttatcaattctagctaaagatgtcttaactgtgcccgtatccactatttcttctgagtcggcttttagtttatgtggcaggttgatcgaggaacgacggcgaagtctaacaccagaacatgtggagatgttgtccctggccttggattgggagcaagctgctgttcggcagcaacactgtgttgagaacaaagatcttgaagagctaatggcaaacatgtatcttgatgcacaagaagaaggatctacttgtgttggtggtggagatggacatgatcactaa

SEQ ID NO: 4067 - DNA, 1074 bp, Zea mays
  Peptide Sequence Number=SeqID_45846
atgaactggtcaccggtcagacacccaaccatccaaacgcctcttctcactcccttcccgccacctcaacaggcttcacttcccatccacggctatatatacgccgagctctcattcaccagccttagccccctcctcaccgccaccacgttcgtccgcatccgcgcgctctgccaccgcatggcgcccttcctcctcgccctgctcgccgtcctcctccccgcggcgccgcccagcctcggagccggctacggggaggggggcgcgggcaccatcaacatcaccaagaccctcgccggcttcccggagttcagcgtcttcagcgccatgctgaccgagaccagcgtcgcgctcgccatcaacagccgcgacagggccaccgtgctggcgcccaacaacacggccgtcgccgcggcgttcggcggcctgccccacatcccgcgctcgttcctggcggacctgctcgcgctccacgtcgtgctcgattacgtcgacgagcccaggctgggcgcgctggagcgcgggcgcacgggccgaggctccgtggtcaccacgctgctgcaggtgatgcgcgccgttccgcggggcaccggcttcctccgcgtctacgccgggcgcgacgggcgcgccaccgtctcctccgccgcgcccgcggggctccggaacgccaccgtcgagcgggtggtcgccgcgcagccgtacagcctcgccgtgctgcaggtgagcggcttcgtcgtcccgccgggcatcagggtccccaagccgttcccgccgccaagggcgaggcacatggcagcgccccccggccaggcgccggtggctgcgcccggaccccagcaggaaccgttcgttggttccggcccgctggtcccgtccccgatcaggccggtgcctacgccaaacctcacaaatactccgccggcgctaggtgagacaggaattattccgattcctagcgtgcacggcggcatggcagccaaggttccatcgcccgccggacgcagtgctacgagctggtggaatggagtagctgtggcgttcggtatcatgacatgcctcaatttgcatttgtaa

SEQ ID NO: 4068 - DNA, 1263 bp, Zea mays
  Peptide Sequence Number=SeqID_45847
atgtcgccaccaagtaccgacgtcgtcgtcgacgacttctccctcggcgccatgcatcagccgtacgtcgtcggcttccacgccgacgccggcatgcgcatcatgcccagcgtcgtcgtcgataggccgctgctccagcagaacaccgacctattagaagagtacgacagtttcgacttcgcggccacggggctactaccgttaccgttccaagaactacctggtctcctgccccccgcgaattacctgccgctgccaacgccaagcatggccatgtcgccgccgtcgctgaggctgctgacgctcccgggcgtgccagtgcctacggcggcggcggatgtcgtgtacggcggattgggcgggggcggcgcgggagggccgtcgttcctgaagcgggagcacggcgtcggcagcggcggcgggaggatcggcggcctgaacctaggacgccgcacctacttcacccccgccgccgtggaccggctgctcggcggcggcctaggcggcgtgggcctcggcatgagcgtgctggggctcggggtcggcgccgctcaccaccaccagcagcagccgccgcggtgccaggccgagggctgcaaggccgacctctccgccgccaagcactaccaccgccgccacaaggtctgcgagttccacaccaaggccagcgccgtcgccgccgccggcaagcagcagcgcttctgccagcaatgcagcagaacccagatgacgcgcgtcacgtcagatatggcaagcttggatgagaacgacagcgggtttcatgtgcttgcggagtttgacgaggccaagaggagctgccggaagcggctcaccgagcacaaccgacgccgccggaagccgatcagcgcacagggcaataatgaccactcgtcgccgccaccgccggcgccaaagaaagcggatacttgcataaccacctcgtacaacgatgaccccaagaataacgagcagcgcgacggcggcggcaccgacggcgctatctctggcagcgccgcccccgccgctgcatcacgagctgcatcacgagaaggacgggagcctggactccgtgctgatgcagcggcgggttcattattggtccatggccggcggcgggacgacgacgacgaagagcatcgctgtttcatcacctcgctggtgacgcagacccagcagcaacagcagcacggcggcaacgtcttgtcgtgctcgtcgatcggtgtcagatcagcgcagaacggcggccagcaacggtttctttga

SEQ ID NO: 4069 - DNA, 1806 bp, Zea mays
  Peptide Sequence Number=SeqID_45848
atgcccacgaccgttggcggtacatttggggatctgacaactactcctctcaaaaagcttacagattttttatgggccagatgcaggttcaccctatctacagactcttatggaaaagcaaatgcctttgtggaacggaagtggaaattggagattattttgcagtacttttcaaaatattgtggcaagcttatgctggtttcttgtaggcttattggtatcagctgtcgatctgggtctgaaccagtagctttcatacttattgttgattcaataggcgcagtccgtactcgaaggtctgataattcacaagaagatttgaaactggaaaatgttctgaatttctttgtgacagccacaagtgcaaaagctattgtcagaaagatgagtgcagaaattgcccagcttcttttaacacatgcttaccaggcgtgcctttctgctgaagatgccaacagcaattctgctgatacacccgaaaaagttggagctactctccaagagatatcttccaacttcatagctgcttttcaaaacatcaggaaagttagcccggatatccagatatcaccgttcgagaaagaagctctgtttactgctgcaacgttggttaggaaattgaagagcaaagaaagactttatgtgcaagtgagtcttaaaaggcttgggcaatcacttaatcccccatggggtttccttgttgcaagcgaaatctttgtgattaatggagatgatgatattgctatgcaatatgctaatctctttaattgtcaaattggttcttttccaatgatgtaccttggagtccctgttagtccgaatcggttgcatattgctgattggaggaaacttgaggaaaaattggaaaaaagacttgatagctggaagggtagttctttatctgttgctgggagaattaccttgattaatgcttgcttatccaattccccaatttaccatatgtcgatgtatttgcttccgaaaacaactattgataatctggataagagaaggaagaagttcctttggcaaggtggaggggataaaaagaaatatcatcttgttagatgggataaatggtggtggaaacttgaaaacgagaaggggatttggcaagaaattatgaatagtaaatacatacatggtaatagtatccttaatattggccccagggtgggtgattctcagattcttgtgattgatgtcattaagaaaaatgtccaactggatttcagaagatggttcagtgatgatgacaggaaaaaatgggatgaaattcttgaaaaatttcagatgtttgaatttcaggagttgggtgatgatgttaaatggaaatggggcaataagaaagaatttactgtgaaaactctgtatgttaacattgatagtaactgtttttgtccagatttcgagtcggctaatcatttattttttacctgtcacactgctagatcagtgtgggggtgcgtagctaaatgtttcaattctgatcatgttccaaataatattgagcagtgctggatgtggcttaatcgtaatctgtttgatggcaaagaaattggaattgtcggggctgctgccatttgctgggccttatggaaagcaaggaataaagcttgctttgaaaacattgtgatcaattctccgatggaaattgtttgtcatgcttgtgcgttgattatgaaatgggcaggtttaagcaagagggaactccaggacttgctgcatgatggcgcgaagctcctgttgaaggctgctaatgcaaagatcaatccgcagacgccgagcgaggatggtgggcactga

SEQ ID NO: 4070 - DNA, 240 bp, Zea mays
  Peptide Sequence Number=SeqID_45849
atgaagagagaatatgaagaattcaaagttagggtaaatggccttgttgctaaggcacagaaagttcccgaggaaggatggatcatgcaagatggcacaccatggctaggaaacaataccagggaccatcctagaatgattcaggttttccttggtcacaatggtggccttgatactgagggcaatgagttaccccgtttggtctatgtttctcgatatgccaacaggaacaccgtgtaa

SEQ ID NO: 4071 - DNA, 906 bp, Zea mays
  Peptide Sequence Number=SeqID_45850
atgcagatgattttcgatcttaccgcgaagaagctgatcagctacgagccgtccaagtcgtcggaggatctgaggaagaacttcgtggccttcattcgcggcctcatatcgttcccggtggacattcccggcacagcctaccatgagtgcatgcaggggaggaagaaggcgatgaaggtgctgaggacgatgatgcgggaacggatgccccatccggggaggcagaacgaggacttcttcgacgtcctgatcgaggagctgaggagggagaagcccgtcatgacggaagccatcgcgctcgacctcatgttcgtgctcctcttcgccagcttcgagacgacggcgctggcgctcacgctgggcatcaagctcctggcccaaaaccccagggtgctccgggcgctgacggaggagcatgaggcgattgtcagcagcaggaaggacagggatgccgggctcacgtgggccgagtacaagtccatgaccttcacatctcaggttacgctcgagattgtacggttggcaaacatcgtgccaggtatttttcggaaggccttgcaagacattgagttcaaaggttacaccattccggcaggctggggagtgatggtgtgtcctccagcagtgcacttaaaccccgaaatctatgaagatccattagcgtttaatccgtggagatggcaggacaaggtggaaatcaccggtgggacgaagcatttcatggccttcggtggggggctccggttctgtgttggcacagatctcagcaaggtcttgatggcaaccttcatccactgcctggttacaaagtacagttggaggacaatcagaggagggaacatagtccgtaccccagggctcagcttccctgacggctttcacgtccagctctttccgaaaaactga

SEQ ID NO: 4072 - DNA, 561 bp, Zea mays
  Peptide Sequence Number=SeqID_45851
atggaaccactgctctgcgcagcggtgtgggctgtgaccttggccgtggccatggcttgggcatacaggtggtggagccacccgaaagctaacggccaactgccaccgggctccctcggcttccctctcctcggcgagaccttgcagttcttcgcgccgaatcctacctgcgacgtctccccgttcgtcaaggatagattggacaggtacggcaacatcttcaagacgagcatcgtggggcggtcggtggtggtgtcggcggacctcctcaactactacgtgttccagcaggaggggaagctgttcgagagctggtacccggacaccttcaccgagatcttcggccgcgacaacgtcggctccctccacggcttcttgtacaagtacctcaagaccctcgtgctccgcctctacggccaggaaaacctcagggccgtgctcctcgccgagacccaccgcgcctgccgcgccagcctcgcctcgtgggcgacccggcccagcgtcgagctcaaggacgccatctccaccgaaggcctgcttcagatcaccagcctgctgtag

SEQ ID NO: 4073 - DNA, 393 bp, Zea mays
  Peptide Sequence Number=SeqID_45852
atgacctcttacctttatcacggtcaggggcgagggacagttatatacagatggcagcaagcagcgagcagttcattactaagcggtatcctggcctttctaaattttgcttatacattgctggtgcttaactactcctgcatcgggttccaggtactgagcttcaaagaaaccttggcatcctaccggagcgtatattatgttggcacaattgttcccattgtgtgtcttctgctgggcaatgttatcaagccagcaaggaaggcgaaggctcggaagaccgactttagttttgatgtagtgcgcatggagatggaggtgatgggcgctttccgcgtggtcatactactaggaaccgacgagcccgacgtccgatttttatgggtcatataa

SEQ ID NO: 4074 - DNA, 639 bp, Zea mays
  Peptide Sequence Number=SeqID_45853
atggggacacaaataaagtctatgtcgggatttgaactcgagacctctgacttttataccatgttagagtggaccagttcaaaccaaaagcttaagctgatgaaagaaggagctttaatggttttaacgctgaaagtcatttcgtgctcaataaactacagtgatggtatcttgaaggaagagggtttacgcgatgctcagaaaaaaaaccgattgactaagcttccttctctaattgaatattttgggtattgtctctgttgtgggagccactttgctggaccggtatatgagatgaaagattatcttgaatggactgaaaggaaaggaatatgggctagcccaactccttcgccattgttacctactttgcgtgctctagttcaggctggctttactggttggtcggaatcttctcccccaaaagccaaatgggatcgtgcaaaaaatgttgatgtattaggtgttgaattagctggaagttcagttcaattgccccttgtgtggaatattcaagtgagcacatggctacgatactatgtctatgagaggttaattcagaaaggaaagaaaccaggtttccttcaattgttgggtacacagacagtcagtgccatctggcatagtaaccggtgttag

SEQ ID NO: 4075 - DNA, 912 bp, Zea mays
  Peptide Sequence Number=SeqID_45854
atgacagcgttggatgccgacgaggacgacgagctcatgcaccaggagtataggagtatgattggctacctccttgggtgcggccgagtggtgatcgacgagatcgaacaccaacgcgctctcatggtcgacctgcatgaccttatcctaccaatacttgatccctgcagtaggcaggcgaagcatgttcagcagctcttccaagatatttccagctcctcaagcaaggtcatctccttcgtcctcgagcttgctgacgataacagtaagaaacagcaggccagtaaagttgtcaaagacagaagaaaagcaggtggtaagaatgtcgtggagagccacatgttgttggaggaagctaaagaaatcgggaaaaacagaagatctgtcgcggttagtagcaccagccaccacggctccaagatgagcaatgcggtggcctcgctgctggcgctggcagtggttagagcaacctgtcgaggaagacctccatcctctctcctcctcgacttcccaccccttgcgccgtgcgcgtaccactcaccaccggccgtcagtggaagaagatccgttgtggttagcagcatgtgctaccacggctccaagatgagcaaggcgccctcctcccaaaccaaggcggatccccgggccccggcgttggcactttcctccacaacgaacctagccaacttgctcccaaccggtgtcctgctcgccttcaaccttctggctctcaagtccccattcgacggttgcgtctactacgtcgtcaccagctgcaccggcctcaggctcctcaactacctgccagacgcgtcgccgctgcccgagggagtcaccaggcgttccccaccacaaggcacaggcacacgacatcgggatacccatcgtcgccaacaccgtcgcaaagtataa

SEQ ID NO: 4076 - DNA, 483 bp, Zea mays
  Peptide Sequence Number=SeqID_45855
atgacgaactatctgcacaggccaaaaaagaactactatagatgtgccaacagtaaagaccaagggtgtcctgcaaccaagacagtccagcagaaggaaacagacgggagcggcgcagtgaagttgttcgacgttgactactacggccagcacacttgcaacaaggacggcgtcatccatccgtacgttgttgacacagcacatgacagcgtgccgaccgtcgaccacaaccaaagctgcagcaccccaacgtcgtctgctcacaacaacggtgttcatggaattcttcaggatgacgaaagcttcgagaacctgttcatggtgccaagcataccagaacatctgacggatgaaagcttcgaaaacctagtcatggtgtcaagcataccagagtattatctggcagacttcacagatgttgaaatggccgaaggggcacttgaggttgcctctatgatgatctctgaagatatatgggcgtga

SEQ ID NO: 4077 - DNA, 279 bp, Zea mays
  Peptide Sequence Number=SeqID_45856
atggatcatcactatcctgtgtcaggcaatggtcacatgaagggtgataaggtacactgtcgagccatcgcaccatcacgaagacatccaccattgggactcagatctttatgctcagcgcgtcagctaccgggagtggacgatgttgatgcagaccattctagaacacctaccataggtggtgattccattgagaccctgctagatgtcaataacatcttcgtccagaaggttgcacaatggtgtaagttagcgcccgtcctcgataatctgggatag

SEQ ID NO: 4078 - DNA, 1008 bp, Zea mays
  Peptide Sequence Number=SeqID_45857
ttctgcatgcatggtttatttcaccgtatggacgactgtgacgaagagcaacgtcgttgcgcagtgggctcggagacggagacggtcaatgtggaaggcatcccgttcccggcggagatcaccgtcggcaaccctctctccctcctaggcacaggtatcacggacatcgagatccacttcctgcagatcaagtacaacgccatcggagtctacctccacaacgccggcggcggcgacagcaccacgcccacgctgctgggccacctcggggcctggaagggcaagacggcggaggagctcctagcggacgccgccttctgggccgcgctggtcgcggcccccgtcgagaagctgttccgcgtcgtggtcatcaaggagatcaagggctcgcagtacggcgtgcagcttgagagctccgtccgcgaccgcctcgccgccgccgacctctacgaggacgacgaagaggaggcgctcgagaaggtcgccgacttcttccagtccaagtacttcaagccgggctccgtcgtcaccttccacttcccggcaccggcctccgcctccccgggacccgcggcggagatcaccttcgcgacggagggcaagggcgacgccaggatcgcggtggagaacgggaacgtcgccgggatgatccagacctggtacctcggcggcgactccgcggtgtcccccagcaccgtccgcagcctggccaaccgtttcgccgcgctgctcgccgtcgccgcacctccggaaaccccgtctccgcaaaccttcgcgatagccatgtccgccacaaacatcgtcgccgcaaaacgcccgcccacccgcctcccgccgctccgcctgcccgccacagctcacgctccgcgaatcccgcacgcccgcctgcgcgaaaccctcgcctaccacacgaacgtcgcccgccacgaagcgcccgcgcgaagcactcccgccgccgcgaatcccgccaccacccgtcgtttgaggtttaacatgagggggcgctag

SEQ ID NO: 4079 - DNA, 474 bp, Zea mays
  Peptide Sequence Number=SeqID_45858
atggcggctgtgctgaacagcaggaagacgccgcaggcggtggtggccgtgctggtggcggcggcgctgctggcttcgtccgcttcggcggcgatcacctgcgggcaggtggggtcgtcgctggcgccgtgcatcccgtacgcgacggggagggccagcgcgctccccgcgtcgtgctgcagcggcgtcaagagcctcaacagcgcggcgcggaccagcgcggaccgccaggcggcgtgccgctgcctcaagagcctcgccaacagcgtcaagagcgtcaacatgggcaccgtcgccaccatccccggcaagtgcggcgtctccgtcggattccccatcagcatgtccaccgactgcaacaagtacgtgatccagcttgcttgcttgtttgctgtcatcatccatgcatatgcatatgcatctccatctttcattttctcaattcttttgggacacgcatgcaggatcagctaa

SEQ ID NO: 4080 - DNA, 375 bp, Zea mays
  Peptide Sequence Number=SeqID_45859
atggcgtgctggctacagtccacagcgtcctccattgccggtgttggcaggttcaccaaggtcatcgagtggttcaagcgaatgtacgccgtcgacaatgtcctacccgacgaggtcacctacaccgtcgtgcttgatttctacatgcaactcgacatgaagagggagctcaaggcactgggcaagactagcaagctcggtctcacgcgcaacctgtttgaggaaatggtcgaccgcaacatcgaccccaacgtgcacattctcactacgcttgcgaaggtctacaattggacacactcgggccatgatgccctccagctttgggacaagatgagggagctgaagctacccatccaacaagatcagagacattaa

SEQ ID NO: 4081 - DNA, 234 bp, Zea mays
  Peptide Sequence Number=SeqID_45860
atggccaacttcagggctggtcctagaccatttattccccaggagttcgtgatcgatgatggcggcaatgatcgcagctctagtggatggtatgttggtgattgtgagtttggtgatcaccctaagagcttatgggggacccaattcaaggtgtacatgattgtgggaggttcaccatacttgagtgatatagaatcaacacatagaaagaacttggtcctgcatggatcatag

SEQ ID NO: 4082 - DNA, 201 bp, Zea mays
  Peptide Sequence Number=SeqID_45861
atggcgacagtgaaagacgccagatgcgaatcccgccgagatgtctttgaagtgtggcaaggtcgattttgggtgcttgttcctggtcagacaggtggatctctctccatcagggttcctattgatgtatttaaaggaatcatagatgaggatgcaactaaagttgttgatggtgtagctctaaagtcaacagatagatag

SEQ ID NO: 4083 - DNA, 156 bp, Zea mays
  Peptide Sequence Number=SeqID_45862
atggagtcatggaacatcgacaggagtggtgcagcagcggcgaccaatgtatcccttgaacaatctggttttgacaagatgcaaatcaatctggtcgaggatcttctctttaacattgacaagaaaaagcaaagaaagagaggatggttcacatga

SEQ ID NO: 4084 - DNA, 975 bp, Zea mays
  Peptide Sequence Number=SeqID_45863
atgtccccttccaggacctgttcatggctgatcgttctctcggttcttctggtgtgcactactgccaacggggaccgtctaaaggttggctactacgacaagacgtgccccgatgtccagcagatcgtgcagtccgtgatggcgttcagggtcggccgcgaccagtcggtggcacccgctgtgctccgcctcttcttccatgactgcttcgtcgacggatgcgacggctccgtcctcctggacgagacgccctttttcgagagcgagaaggacgccacgcccaacgccaactcgctccacggcttcgacgtcatcgacgagatcaagtcttacgtcgagcatgcctgcccggccacggtctcctgcgccgacatcctcgcgctcgcctcccgcgacgctgtcgccctgctcgggggcccatcctggaaagtgcagctcggccgcaaggactcgcgcgtcgccaacaggaccggtgccgaatacggtctcccagctcccaactccacgctcgccgagctcattaacctgttcaagcagtacgacctcgatgcacgcgacatggcggcgctctccggcgcccacaccatcggcacggcgcggtgccaccactacagggaccgagtctacggctacaacggagagggcggcgccgacatcgatccctcgtttgcggagctgcgccggcagacatgccagtccgcttacgacgcgccggctccattcgacgagcagaccccaatgcggtttgacaacgcatactaccgggacctggtagggcggcgcggcctcctcacatccgaccaggcgctctacggctacggtggacccctggaccatctggtgaaaatgtacagcacgaacggcgaggcgttcgccaaggatttcgccaaggcaattgtgaagatgggtaaaataccaccgccacacgggatgcagggggagattagactcagctgcagtaagatcaaccggtga

SEQ ID NO: 4085 - DNA, 450 bp, Zea mays
  Peptide Sequence Number=SeqID_45864
atggcgaatctcgcggggtctgttgaggtcacccgcaaaccgacctcgggctaccataagaggagcagagctaggtccttacctccctttttcttcgtcaacgcgcaaacaaccacaccaggaccgacctttcccatagccgcgaaaagaaaaataggaatcggcgccgccgttggggaaatcccgtcagtgccgttgccgacctcgaagtacggaatcaggctcctccccaaacaacggagaaggtgccctcgactctccctcattttaatttggccctgcgcggcacaaatcgttcgccggagcgggcgaaccctacggcgccgcacctcgtcatggaccggcgactgcgcaactcaaaattccgacgagcaagctactgcagattctgaggttcagcaagtagaagtagctgagcaggagctcattgaagacaagttgtgcccttaa

SEQ ID NO: 4086 - DNA, 390 bp, Zea mays
  Peptide Sequence Number=SeqID_45865
atgcccaggcacttggtcggtgactctgtgggaaacttgtcactcaaagagctgaagcagctggagagccaccttgagaaaggcatctctaagatcaggttgtttatttgtcagactctgattgctgaattcttgtttcagagtgagctgtcggctgccgagatcaatttcatggccaaaagggagactgagcttcagaatgaccacatgaacctcaggaccaaggacccaagaacatgccctacaggccgctcaagtgccagtcctgctgcccaggattcttctgcccaggattgtttagatgcgcctcatccattagtacggaacagtccgagttgggcagattgtttagatgcgcctcatccattagtacggaacagtccgagttga

SEQ ID NO: 4087 - DNA, 396 bp, Zea mays
  Peptide Sequence Number=SeqID_45866
atgcaggcgcagggagccgggcaagcaagtagtgcagcaagcaggcaagcaggcgtagcgcaggcggccgggcaagcaagcagcgcaacaagtaggcgcatggggccaggggccacacgtgaccagcagccagcaagcagcgcaggtgtagcccggcagtctatgcgcggtacacaggatatcaggctcattgttgatagcaaacgattgggtttcctaaaccagtcatgcatggagaagtacagaggaattgcacccaagaagtccttggtatccaaggaccacgagcacgcctactttgattctgcagactgggtcgatctctcgatgattatcaaacgcaaaaaaactatatgcaccaatcaatttataatgcctgttggtcattgtggatga

SEQ ID NO: 4088 - DNA, 246 bp, Zea mays
  Peptide Sequence Number=SeqID_45867
atgacaccccgtggctccaaagggcagcaggacagggcagcccgaccggttggtgtccacccggggaatttgcctggcaaggatttgcctcctcggtgtgggctcccccaggtttttcctagccgggctgccaaaggaggggctgcccgactggacccttactgctgcactggtatggggattgggaagatgctattcactgcccgcccagacatgtctgcttttctcaacatcagtcctaagtag

SEQ ID NO: 4089 - DNA, 1326 bp, Zea mays
  Peptide Sequence Number=SeqID_45868
atggcggcgctagcagggcggggggaggagctcctggagcagctccgggcgctactgttcttacctgctgcttcctcggcgacaccggcagctaataaggtggagtccgccgccgtcggaccaggtggtggtgctgttgctgctccgtcgtcgtgcggacgacggcgccgacgacagggccaggagggcggcaagagagaccgggacgacgatggcgtcagggatggcgagcatgcagctgatgatgatggtgcacggcctcagcatcctcctcctccccgctgctgcaaaagaaggaagaagaagaagcaagagagcaagtcgactgtgacgtcagtgctcgacttcgatgggtaccggtggaggaagtacgggcagaagcagatcgaaggtgccatgtacccgaggctccgtagtcatgccagccgcgcggagaaaccgagggaggtggagagccggacgttactcttggatgaggaggcatgtgagaagaatgaggtggaggccgaggtgagggagaacatggcgggcgacagaggcggaggaggatggttgcaaagagggagtgggcgaggacaacctcacacatggaggagcgaagcacgatgcagcggtgggaggaaaagaagacgatggtggaaagggcggagttactacaggtgcatacggagcgcggagcagggctgcccggccaaacggacggtgcaacgcaacgacgaccacggcggcggcgccgctgtcgccccagagtacacggtggtgtacatggcggagcacacctgcactgccgatgatgactacctgcaagcggcgccggtcatccttgacaccgccactgtcgtcgtcccatccgctgctgctgctgctgctagcagcgccggcgccaccgctaatgagggacgacgacgacctcaagatgataacgacagtacctacaccgatatcagcatcgtcattccgactacgtcagctggctcttgttctaccaccagtaccaccatcaccaccggcactgaatctcgggcgacctcgagcgacgacgtcacctgctggagtagcagcagcggcaccagcagcgattataatagggcccattataataataaaaccgatgacttctactacggcgggttgttcgccgccgctgcccatgacggcggcggctggaccatcggaccggcagacgactcggcgtcgttgcaggagatctgggacttgaccggaccgatccggtcaccggtgcacgtccccgcgcttggttggaattggaacatggaccagcagctcctactgcagctcgttaatgagcctggctgccatttctga

SEQ ID NO: 4090 - DNA, 2454 bp, Zea mays
  Peptide Sequence Number=SeqID_45869
atgaccttaattaaacaacaaaatgatcatatagcaaaattagatgctaaaattgccgagcatgaacttaaaaatgaaaattttaaatttgctcgtagtatgctttatagtgggagacgcccaggcattaaggatggcgttgatttccaacagggaggcaatgtcaaacttaatgcccctcctaagaaattgtctaattttgttaagggcaaggctcccatgcctcaggataacgagggttacattttataccctgccggttatcctgagagcaagattaggagaattcattctaggaagtctcactctggccctaaccatgcttttatgtataagggtgagacatctagttctaggcaaccaacctgtgctaagttgcctaagaagaaaactcctagtgcatcaaatgatcatgacatttcatttaaaacttttgatgcatcatatgttttaactaacaaatccggcaagatagttgccaagtttgttgggggcaagcacaaggggtcaaagacttgtgtttgggtttatgcatccgggggctcaagttggatcctcgacagcgggtgcacaaaccacatgacaggggagaagaaaatgttctcctcctatgagaaaaaccaagatccccaacgagctatcacattcggggatgaaaatcaaggtgtcactgtctttagaagaagtgatgattcaatagcatttaagggagtgttagagggtcagctatacttggtagattttgatagagctgaactcgacacttgcttaattgctaagactaacatgggttggctctggcaccgccgactagcccatgttgggatgaagaatcttcataagcttataaagggagagcacattttaagattaacaaatgttcattttgagaaagacaggatttgtagcgcatgccaagcaagaaagcaagttggtactcatcatccacacaagaacatcatgacgactgacaggccactggagctcctacacatggatctattcggcccgattgcttacataagcatcggcgggagtaagtactgtctagttattgtggatgactattctcgcttcacttgggtattctttttgcaggaaaaatctcatacccaagagaccttaaaaggattcttgagacgggctcaaaacgagttcgacttaaggatcaagaaaattagaagcgacaacgggacggagttcaagaactcacaaatcgaaggcttccttgaggaggagggcatcaagcatgagttctcttctccctacacgccacaacaaaatggtgtagtggagaggaagaatcgaactctattggacatggcaagaaccatgcttgatgagtacaagacttcggatcggttttgggccgaggcggtcaacaccgcctgctatgccatcaaccaattgtatctacaccgaatcctcaagaagacatcatatgaactccttacaggtaaaaagcccaacatttcatattttagagtctttggtagcaaatgctttattcttgttaaaagaggtagaaaatctaaatttgctcctaagactgtagaaggctttttactaggatatgattcaaacacaagggcatatagagtctttaacaagtcctccggacaagttgaagtttcttgtgacgttgtgtttgatgagactaacggctctcaagtagagcaagttgatcttgatgagataggtgatgaagaggctccatgcatcgcgctaaggaacatgtccattggggatgtgtgtcctaaggaatccgaagagcctccaaatgcacaagatcaaccatcctcttccacgcaagcatctccaccaactcaaaatgaggatgaggctcaaattgatgaagaagcagatcaagcaaataagccacctcaagatgacggcaatgatcaagggggagatgcacatactcaagacaaggaggatgaagaacaaaggctgccacacccaagagtccaccaagcaatccaacgggatcaccccgtcgacaccatcctcagcgacaatcataaggcggtaactacaagatctcgtgttgcacatttttgtgagcattactcttttgtttcctctattgagccacacaggatagaggaagcacttcaaaattcggattgggtggtggcgatgcaagaggagctcaacaacttcactaggaatgaggtatggcatttagttccacgtcctaatcaaaatgttgtaggaaccaaatgggtgttccgcaacaagcaagacgagcatggtgtggtgacaaggaacaaagcacgacttgtggccaagggatattcccaagtcgaaggttcggatttcggtgaaacctatgcacccgtagctaggcttgagtcaattcgtatattattggcctatgctacttaccatggcttcaagctttaccaaatggacgtgaagagtgccttcctcaatggaccaatcaaggaatag

SEQ ID NO: 4091 - DNA, 873 bp, Zea mays
  Peptide Sequence Number=SeqID_45870
gctcctaattctcgctggtcatttgagaaccactggaaggccggagacgccgcgtcccggatcagacccgaggctctttctgcttctgtcaaccagcttagtggaaaaataaagaatgctttggaagaagggctcacgatcgtggataacaagacctccagtattattgaggaaacaaagaaaattcagatcaggaggaaacctgctggctcaagccctcatgtgccgaattcagcggtagataagcatacgcttagcacccctgatctttcactccggcagcctgaatctgctgcccaggagactggactgaaagcttctcgcgacgttgctaatgcaatggctgctaaagcaaaacttgtactccgtgaactaaaatctgttaaagcagatctagcctttgcgaagcagcgatgcgctcagctggaggaagagaacaggctcttgcgagaaacaaagcagaaagggagcaaaactgaagaagacgatgacttgattcgcgtgcagctggagacattgctgtccgagaaatcgaggctggcgcaggaaaactcgacgtatgcccgtgaaaaccgcttcctgcgtgagattgtcgacttccatcagttcaccacccacgacgttgtctcattggatgacggcgacatggaaggcaccgaaccagaagaagacgacgacaacgacaacggcctcatatgtgctgagaacgttctgcctgcggttgaagaaaatccagtagacgaagaacactgccctgtcccctccaagctagaatctccagtggccagcctgggcgagccatcatcgtcccccaggtccagcgattgtcacagtgcctcgaagccagacgcgtcagcgtctgatgtagcttga

SEQ ID NO: 4092 - DNA, 255 bp, Zea mays
  Peptide Sequence Number=SeqID_45871
atggagcctttgccgagtgctgctcggagcacttggcaaaggggtctggtggcactcggaaaagctttagccgagtgctcgacaaaaagtactccgcaaagaagtcgttgccgatgtacagttcgtcaagacttctttaccgagagtcacactcggcaaagagttcgccgcgtgttttccaggctttgccgagtgcctgaagcactcggcaaagcagttgtgtccgatagtgattatggcgatttattagtgtaa

SEQ ID NO: 4093 - DNA, 336 bp, Zea mays
  Peptide Sequence Number=SeqID_45872
atgccccacatgctaggagttcggctccactgctctatgcatcgacgcaggcgtggaccccggcacggcagcatcggtaatggccctcgtcgtggtggcgtgggtgctggcctcgtatcggctgcgggggcatgtcccctggcgtgggcgcgagcccctggcatggcggcacaggcgttgaccctcgatgcagatgactgttgcagcgccgagccagttggcgcaccggacactgtccggtgcacaccagacagtccggtgcccctgccgaccgttggcgcgggccacgcgtcgcccgcggattgcgcagccaaccgttgcggtggcggccgttag

SEQ ID NO: 4094 - DNA, 601 bp, Zea mays
  Peptide Sequence Number=SeqID_45873
gtcagagccctgctcgggcgaggcggaagtcttcccgaggcatttggttgagccatcccttgacgtgtgccacaatcggtggagtggccgcccgcgggattcacggtggagtaggtggccgaggctgagctcaggcgaggcggagaaatcacccgaggccgaactcaacgtcggacgagacagagaaatcacccaagggacggactcggcgtcggacgaggcggagattgcgcccgagggccgcttgggcgagacggacagagcggtggtgacttcgggcgaggcgaaggtctgcgtgaggtggaaggctctagtggagaggcctcggtttagaaggcgacgtcggcgagcggtgccccaagacatgagcgtcgcggcgaccgtgactacacaaggtacgagtgtcgacactagctgctgcggtggcaaccgcccgacaccaagcggtggcgtgagcgtctacggcgacaactgcccgaagccgagcgagacgatggtggcggttacctcccgcggcagcattcgaacgatgatctcctctgttccggcgcttctcgggcgtccttcaatgaagaccacctacaatctggtggcttcatag

SEQ ID NO: 4095 - DNA, 225 bp, Zea mays
  Peptide Sequence Number=SeqID_45874
atggcatcaacggtgctggaggctacgcgggcggcccatgaggatctggacaggctggattcgctcttggtggaaatttacgaggacaaggacaatgctaggaaggatgagatcaacactcatcttactgcacccacgcaaagtggactgtttagcaagtactatgaaaggctcaaagaggtaccttacctatctgcttgcttggatgtgacaaaagtgaaatag

SEQ ID NO: 4096 - DNA, 300 bp, Zea mays
  Peptide Sequence Number=SeqID_45875
atgtcgacggcgaaatccgcccaatgcagacacgaccacccgaccgcaagtcccaggaaacccaaggtcaccacctcggtgcgccagtcgaaggtgacccgaagcctacgtgcggcggcacaagactaccctggcggcggtgaatcgtggtcggggtgccaagcaattgaggtgaaagatacgggaagacgtgcgcaggggagatacttgtacacccacgacgcggagtccgtggccgagccaagtacaccgaccacgcgagatccatggagttcccccgccgcaagactcggtccgtag

SEQ ID NO: 4097 - DNA, 1315 bp, Zea mays
  Peptide Sequence Number=SeqID_45876
ctgtcgtgctggctatgagagtgatggtgatccaaaggaaaagccgtgccgtccaaaactttctacttcagcgaagcttatcataggaatcactgttggtgcttccgtattgtttttcattatccttgggactggggtatgctatatgctgaagcggatagaactggaagcgatcgaaaggaagaatggaagcgagaagcttaaaaacgtgaggactctacaaatattcagaaaagaggaactcgacaaaataaccatgaacaactcggtgcctcttggcaagggaggatttggcgaggttcacaaaggagttttacccgacaagaccgaggtggctgtcaaggcctcgatcgaggtgactaaaggtacgctggacaagtttgtggaggaagtagagatccagtcagggatgatgcacaagaacatcctcaagctcctgggctgctgcctgcgggtcgatgtcccactgctggtgtacgagtacgctgccaaagggagtctcaaggaccttctccatggaaaaaacgacgatggccagccgcgtgagcctctgacgcttaggtcacgcctagacatcgccattgggtgtgcccagggcttggcttacatgcattcgtacacagaaaatggcatacagcatgcagatgtgaagccagacaacatactcctggatggcgggttggtcccgaagatctccgactttgggctgtccaaggtttctgtggtgggcaaggactataccaagaatgtggtagggtgtttgccttacatggatccggtgtacaaggaaacagggaggttaactccgaagagcgacgtctatagcttcgggattgttctcttggagctgatctctagaaggcccgctgtagatggtagtgaaagcagcatcgtcaggcagtttaagagtgtttatgaacaagcagatgataataacactgggaaggagttgtttgacaaggatattgctgctgaagaagatatacctatgcttgatgaaattgccaaactagccatgagtacacgctcgatggctgccgcccttcaagtgttcgtcgctgtcgtcctgatggcgtccgctcttgtgtcggcagagatcggtaagaaggagtgcaccgatgtgaattacgactgcaaccgtttcccaggttcccgaaagtgcggagactcgtgccgggacaaggcccgcgccgagggcagcagcaactacgcgtcagcatgcgagcctgccgtcgcgcccttcaagtgctgctgcaccgtcaaggacccacaccacccctggcctccaagctcctcctccaagaccaacgcctaa

SEQ ID NO: 4098 - DNA, 240 bp, Zea mays
  Peptide Sequence Number=SeqID_45877
atggacagccaagtcagtccagcaaccatgtcctccagagaacagaccccaagccttaggatggccctagtgctttctcctgaaccactagactctcgaccgaagtctttggactttgttcttctgagaggagttggagaggagggcttagtcatgggcagacatcttatctttgaagtcttggtccccctcttacaacctaccgtgcctcttcaagttttggacattatctactattag

SEQ ID NO: 4099 - DNA, 165 bp, Zea mays
  Peptide Sequence Number=SeqID_45878
atgggcaactgctttggctccaacgtggcggaggtgggggccgtcaaggcgatggcgcaagcccatcacgcgcacccgcaagtggcgctggcgaagcacgtcgtcatgtccgccgcgccgtccagtggtgcccactcccaacacgactgggcgaggcaccatggg

SEQ ID NO: 4100 - DNA, 408 bp, Zea mays
  Peptide Sequence Number=SeqID_45879
atgggcgcgagctgcctcaccttgcgcgcgctgaggagctccagcgtgcacaacttgcagcgccctccagtaggccccgtagggagcgaaggcgaagtcatggccaccgtagccgatgatctccgtggcgagcaggactttggctacaatctgagcaaagtctcactcctatgtgacaatgagagtgcaatccgcatggcggataatcctgttgaacacagccgcactaagcacatagacatccggcatcactttttgagagaccaccagcaaaagggagatatcgaagtgttctatattagcaccgagaaccagctagccgatatctttaccaagcctttagatgagaaaaccttttgtaggctgcgtagtgagctaaatatcttagattcacgtaacttagattga

SEQ ID NO: 4101 - DNA, 228 bp, Zea mays
  Peptide Sequence Number=SeqID_45880
atgggcagcaacaggctaacagctatagtgccatactacaacatgaagcaaataatcactggaaggtttcaggctttcagcatcaaacttctgctcaagtggtgggaattgggaaaaaggaagctgggctgggcctctgggcaagtgaagtgggccactgggccgaaatttcaatcaccgctcttctctggtacagcgggtactactactagatcaccgatgaactga

SEQ ID NO: 4102 - DNA, 303 bp, Zea mays
  Peptide Sequence Number=SeqID_45881
atgactcctacatcatgggcacagatggttgtggatctttatcctccagggtcaaacagcaggtacattgctgtaacaaatcaaacaacctacgaagttgccagaaggaagcgaatattctacctaaggggagtacctgaaagagtccacccattcagtagaggcatatgcagaaatctctatgacttctgctgttctagccagaagggatatattctggaagctgtgcccccaagggaggagctggaagctagagctgctcgttacacgtgccgagacgtcatttgctgccgttgctgctga

SEQ ID NO: 4103 - DNA, 435 bp, Zea mays
  Peptide Sequence Number=SeqID_45882
atggccacggcgccgatgaatccatgtctaagagcaattccggcgagccaaggcgatttcccagaccgagacgtccacgcgaaaatcacaaaggaccctgacgaggctcccagcccatgggttcgagttcaaccgacggtgctccctgattccgccattacggcgctacccctcctctcatgctcgacagcggagggccttcttctccctaccgaactggtgactctaaaatctcggcacggcttggggtccaatgggggcggctcggcctttattgcgcggcagccaagcttgctccgaattcaactccgatttgggggggggaatcgatcggaggtgcgcgcgctatgcgttgccgcggggaagacggtgggttctgtttcacccgtgcgcgcgaataggagggagccaacactgacacagcggtcccactag

SEQ ID NO: 4104 - DNA, 285 bp, Zea mays
  Peptide Sequence Number=SeqID_45883
atgccgtacctcgccatggccgccacaccagaagctcaacagcgtcggcatatccagcttgggagttggatctgtgagcttcaccgtggttcgctcatcgccggccatggctccgccatgggggctgtccgtgccgccgcgtttcctgactggggagatgagcaagggggattgcgcctggccgttggatatggggtaggtggatattatgttaattggaacatggagaaccacacgggaaaacagtgctacgacaagggtttatggacgcccttggctgattaa

SEQ ID NO: 4105 - DNA, 231 bp, Zea mays
  Peptide Sequence Number=SeqID_45884
atggcgcagtcgaccgttggcagcctgagagccattggcgcaccggatatgtccggtgcacaccggacagtccggtgcccccttctagccgttggctcggccaccgcggggcggatctgcgaggaggagctcgggcggcacgatggctcgcggggagcacctcatcttgccggctgtcaaggagctgtggtggagctcgcctggctaggcagacaggcgacctgggactag

SEQ ID NO: 4106 - DNA, 1275 bp, Zea mays
  Peptide Sequence Number=SeqID_45885
atgtcgggagatcacgccaagaaggagatggagaccggcgaaaagcccactacaagccacgggagcacttcatcggaagagtcccgcaccaagagaagggagaagaagaagagctcctccaacaaagggaaggagaagaaatcttcttctcaccacaaagagaagaaggaaaaatcttcttcccacaagccgcatcgaagtggagacaagcaaaagaggatgaggaaagtggtctactacgagaccgacacttcatcaacatcgacctctggctcagatgcgccctccgtaacttctaaacgccaagagcgggataaagactatgatgaggatgaggtggcccaaatcgagcacttcaactctcaagcgacaacaatactcctcgcctcactaagtagagaggagtataacaaagtacaagggttgaagagtgccaaggaggtttgggatgtgctcaaaaccgcgcatgagggagacgagctcaccaagatcaccaagcgggaaacgatcgagggggagctcggtcggttccggcttcgcaaaggggaggagccacaacacatgtacaaccggctcaagaccttggtgaaccaagtgcgcaaccttgggagcgtaaagtgggatgaccatgaagtggttaaggttattctaagatctcttattttccttaaccctactcaagttcaattaattcgtggtaatcctagatatactaaaatgacccccgaggaagttatcgggcattttgtaagttttgagtgcatgatcgaaggctcgaggaagatcaacgagcttgatgatccatctacatccgaagctcaacccgtcgcattcaaggcgacggaagaaaagaaggaggaggctacacctagtagacaaccaatagacgcctccaagctcgacaatgaggaaatggcgctcgtcatcaagagcttccgccaaatcctcaaacaaaggagggggaaagactacaagtcccactccaagaaggtttgctacaaatgtggtaagcccggtcattttattgctaaatgtcctatatcaagtgacaatgaccgaggcgacgacaagaaggggagaagaaaggagaagaagaggtactacaagaagaagggcggcgatgcccatgtttgtcgggagtgggactccgacgaaagctctagcgactcctccgacgacgaggacgccgccaacatcgccgtcaccaaagggcttctcttccccaacgtcggccacaagtgcctcatggcaaaggacgacaaaaagaagatgtag

SEQ ID NO: 4107 - DNA, 1440 bp, Zea mays
  Peptide Sequence Number=SeqID_45886
atggaggaggactcgatcaaggggatgatctccgcgatatcctgggtgcccaggggcgccgccaagagcgtgcccgtcgttgccgacccgcccactcaggaggagatcgccgaggccatgaagaccttcgacctgggcagagactccgggagcgacgctgacgaggatgatgatgctgccaccatggaactcgacggtgcggcggaaacggtggaggaggttgatgaggctgcccgagccaaggccgtagccaaggcgctctgcaagggctctagcaaggcggacgacgtcgctgatgagctccgcgaactcaacatggacgcgtacgatgatgaagatgaagaggtcgatattttcggctctgggctgggggacttgtactatccgagcaacgcaatggacccatatctgaagaagaacaatgaggatgatgaggaggacgacgatgatgatgaggaaatcgaagataagatgatcatgcctactgattttgttattgtcaacattcttgaagaaacaaatgatggtgaacaaaatatctttgtgcatcatgacgttcctctcgctgattttccgctatgcacagcttggatggattttaatctgaaaggtggtgaaaaagggaattttgtagccgttggaaccatggatcctgccatagaaatatgggacttagatatggttgatgaagtgcaaccgcacatggtgctaggaggactttcaaaaaagaagaaaaagacaaagggcaaaaaggggaagaagtataagaaaggaagccacagaagttctgtgcttggtcttgcatggaacaaggaagttaggaatgttctagctagtgcaagtgcagacacaactgttaaaatctgggatatagctgttggtaaatgtgcagtcactctagaacaccatgatgacaaggcaaggattgatacctattttctttgtcattctggactgattctgtggaattatgttactgttcaagcagttgcttggagcccacagtcacctgaagttctgcttagcggatcctttgataaaacagttgccatgggccaacattttaatttacagaatgatatgaaagatggtgggcagaattgtcataaatggtctgttgaagcagacgtcgaaagtttagcttggaatccacacaatgaacattcatttgtggtcagtcttgaaaatgggatggttcaagccttcgataagcgaacagcttcatcaagttcttctggccagtctatgtatacccttcatgcacacgataaggctgtttcttccatctccttcaacccgtctgcccctaacggagctattttttcggtatcattttcaaatgacagccccttcttgttagcatgtggaggttcaaaaggcaaactgaaggtttgggacacgcttacggagcctgcagtagccaacaagttcagcaaatag

SEQ ID NO: 4108 - DNA, 2643 bp, Zea mays
  Peptide Sequence Number=SeqID_45887
atgtctttaattaaacaacaaaatgatcatatagcaaaactagatgataaaattgccgagcataacttggaaaatgaaaagtttaaatttgctagaagtatgctctataatgggagacgcccgggcatcaaggatggcatcggcttccaaaggggagacaacgtcaaacttaatgcccctcctaaaaatttgtctaactttgttaagggcaaagctcccatgcctcaggataacgagggctacattttgtaccctgccggttatcccgagagcaaaattaggagaattcactctaggaagtctcactctggccctaatcatgcttttatgtataagggtgagacatctagctctaggcaaccaacccgtgccaagttgcctagaaagaaaactcctaatgcatcaaatgatcatgctatttcattcaaaacttttgatgcatcatatgtgcttactaacaaatccggcaaggtttatgcatccgggggctcaagttggatactcgacagcgggtgcactaaccacatgacaggggagaaaaggatgttctcctcatatgagaaaaaccaagatccccaacgagctatcacattcggggatggaaatcaaggtgttactgtctttagaagaaatgatgattcaatagcatttaagggagtgttagagggtcagctatacttggaaaaatctcatacccaagagaccttaaagggattcttgagacgggctcaaaatgagtttggcttaaggatcaagaaaattagaagcgacaacgggacggacttcaagaactctcaaattgaaggcttccttgaggaggagggcatcaagcatgagttctcttctccatacaccccacaacaaaatggagtagtggagaggaagaatcgaactctattggatatggcaagaaccatgtttgatgagtacaagacttcggatcggttttgggccgaggcggtcaacaccgcttgctacgccatcaaccggttgtatctacaccgaatcctcaagaagacatcatatgaactcctaaccggtaaaaagcccaatatttcatattttagagtttttggtagcaaatgctttattcttgttaaaagaggtagaaaatccaaatttgctcctaaaactgtagaaggctttttacttggttatgactcaaacacaagggcatatagggtctttaacaagtccactggactagttgaagtctcatgtgacgttatgtttgatgagactaacggctctcaagtagagcaagttgatcttgatgagataggtattgaaggggctccatgcatcgcgctaaggaacatgtccattggggatgtgtttcctaaggaatccgaagagcctccaaatgcacaagatcaaccatcctcgtccacgcaagcatctccaccaactcaaaatgaggataaggctcaagttgatgaagggcaagatcaagaagatgagccacctcaagatgatggcaataatcaagggggagatgcaaatgatcaagaaaaggaggatgagcaagaaccaaggccgccacacccaagagtccaccaagcaatccaacgagatcaccccgtcgacaccatcctcggtgacattcataagggggtaaccactagatctcgtgttgcacatttttgtgaacattactcttttgtttcctctattgagccacacagggtagaggaagcacttcaagattcggattgggtggtggcgatgcaagaggagctcaacaacttcactaggaatgaggtatggcatttagttccacgtcctaatcaaaatgttgtaggaaccaaatgggtcttccgcaacaagcaagatgagcatggtgtggtgacaaggaacaaagctcgacttgtggccaaaggatactcccaagtcgaaggtttggatttcggtgaaacctatgcacccgtagctaggcttgagtcaattcgcatattattagcctatgctacttaccatggctttaagctttatcaaatggacgtgaaaagtgccttcctcaatggaccaatcaaggaagaggtctatgttgagcaacctcccggctttgaagacagtgagtatcctaaccatgtctataagctctctaaggcgctttatgggctcaagcaagccccaagagcatggtatgaatgccttagagattttcttattgctaatggcttcaaagtcggaaaggccgatcctacactctttactaaaactcttgaaaatgacttgtttgtatgccaaatttatgttgatgatattatatttgggtctactaacgagtctacatgtgaagagtttagtaggattatgacacagaaattcgagatgtctatgatgggagagttgaagtatttcttaggattccaagtgaagcaactccaagagggcaccttcattagccaaacaaagtatactcaagacatactaaacaagtttgggatgaaggatgcccagcccatcaagacacccatgggaaccaatgggcatctcgacctcgacacgggaggtaagtccgtggatcaaaagggtccacctcgaagcaaaagtccgtggaatttggtacgggaattcctggggaaacccccaagagaccagcgggttctaattggtgtcgggggaaatatttctcagtag

SEQ ID NO: 4109 - DNA, 207 bp, Zea mays
  Peptide Sequence Number=SeqID_45888
atggagtcattaagggtgaatagtcaactgaagaagatcttcctcgccgccgatgtgtcaagcaccgtgatccgcgctcagcgtcgtgattcacgcaaggctaaggacggcatccgtgtggcgatgtggccgagcggcggtcattttggtggctgtcgacttcctcggttgcgccacgctagggagcaattcaccatgttagcgtaa

SEQ ID NO: 4110 - DNA, 756 bp, Zea mays
  Peptide Sequence Number=SeqID_45889
atggtgcctccccattaccagtcgcggttggtcgagttggcatcacaggagctcaccatttccccggctatgacaggctgtgattcatccaccacgtcgtgtggcgatgctcaccaacacgggcaattgaactctacgcaactgatctcggggaacaccatctcgccgtcgctggacgccgctgaagaccacctccacgtcgacccacttctccaactcttcacccgctttctcggccgtcgttctagccttctgaacggacaccagagccttggctccaccgtcgtcgtgggcaggtcgggcgaggcggaggctcctccgaggtcgaggtcgagtccatcttccgaggtagaggctgagtccgagcactgggggcgggcgaggcggagtccgtcttccgaggtcgaggttgagtctgagccctgggtcgggcgaggtggagaccgtcttccgaggccgaggctgtgtccgagccctagggtcgggcgaggcggagtccgtcgtccagtgtcgaggttgagcccgagccctgggtcggtcgaggcggagaccgtcttccgaggccgaggctgtgtccgagccctggggtcgggcgaggcggagcttcctatggcgcccgaggctagacttagctgctgtcagcctcactctgtcgagtggcacagcagtcggagcgacgcaggcggcactgttttcttgtcaggtcggtcagtggaccggcgaagtgactgcggtcacttcggctctgtcgactga

SEQ ID NO: 4111 - DNA, 525 bp, Zea mays
  Peptide Sequence Number=SeqID_45890
atgggagggattgacaaggaagaaaatattgttaataatgatgatgatggctgggatgcttggccagttcagcaagctcagcctcccgagccggtgcacctggagcaatccatccctgaccctgcatatgaggactacttggctagaaagtgtctcaactcctgggctgatattttcccctgcaactcagaccttgtcactgttccaaaggtgtgggctgcttttttcatgggcctgttgttgaggtcgaattcctttgactgggccaaaaaattcttaacgtcaggtgctatctctgctcttgtggagcccagcatggaaactgtctcgcttaagattcccccaaagtgtctgcctcctcctagccaggagctgcatgtggaaccacagtcccccactgctgcagaagccgtatccaagcataagcaaccaattatggttgaactgaagttagaaggagtgccagacttcgggagaaggctaggggcttcaagaactgctcaaggattggaaaaatgttcttga

SEQ ID NO: 4112 - DNA, 4738 bp, Zea mays
  Peptide Sequence Number=SeqID_45891
ttctgtcctggcggcgcatccgcacttcacccggcgcgcgaggatggcaggagcggaggatccgagcgtggccgcggcgattgcagcgcaatccaaatctatcgagacccaatcgaagacgatcgcgactcaatccaagttgcttcagcagctatgcgatcgcctggagacacaggatgcccgttggacccagctggagaaagcggtcagcgcgaacaccaacaacatctcggctatatcgacgaagttggacaccagcgaaggccacccaagttttctcaccacgcaggtcgacgctcaggtggcggcgattgagacagtggcgatggagcgcttggatgcgatggcagcggcggcttccaccagggttacggctttggagaacgccacacaggcgtttgaatcatggaaaccacgcatcgaatcttctgtcgatgctatgcggtcggagctcaccaaactcacccgtcttctggagcgaggggcgttcgaggatcgcggcaccaagccagggattctcggccactactcgtctacacaagatcgtcctcctccagttcagcaggtggggacgcatggcgaggcccatcggcatcgagatcaaggtggaggaacttcgatcgggcctaaccatcatcaggctcctggtatgaacgattggatttcttctcatgatcatccatcgttcgacacatttgctgctcacaatcaccctccacctagagatgtgggtcgatcctttgagtcatcatccagtcagtatttgggaaatctaccaaagctccaggttccatcatttgatggtgaacatcccaaattgtggcagtcgcgctgtcaggcttattttcgcatgtatgatgtggattatagcatgtggatcaaggtgtcatccatgcagtttacagggcctgcggccaggtggttgcagtctattgaacccaagctgccttatctgtcttgggaagaatttggcaccttgattcaggaacgtttcgccaagaatcaacaccagtttcttttgaggcaactatttcatatcagacagttgtcctcggtttcagcttatgttgaagaattttcacaactggtcgaccaattgactgcctatcagaatcaatcagacccattgtactatacattgaagtttattgatggtcttaaggacgacatcaaggcagtggtgatgttacaaagacctcaggattttgattctgctgcagtgttggcacagttacaggaggaggctgcggatttattaagaaagagggactcacggcgtgcatactctggagtttcgtctgctgctagagactctaaaccacccttgaacagcaagcaggaggatcagaaacctggtaacaccagcactgaggccaaattggcttcgctatatgcatatcgcaaggcacagggtctttgttacaagtgtgggctgcagtattcaagaggacataaatgtgctgacacagtacaactgcatctagtggaagaattgtggaacatggtgcctgtagccgaaccagaattgattacctcagatgatgaacaagaggctaagttgtgcatgctgaccctgtctcaaacagcagtcgagaatggcaactctcctcgcaccatgcgattcatgggtcatatagcaggaatggagattttagccttgttggactcagggagttctcattctttcctcagtgaagcagtggcagcacagttggctggcgttacactgatggacaaacctgtcaacgtacaggtagccaatggctcaaagttatcttgtgcttatgaattggtgaatgccaaatggtcaatcagtggagtatcattttcttcgacattgaaggtgttgccattacctacttatgatctcattataggcatggattggttagaggctcatagccctatggtagtgcattggtcacagaagtggcttcgcatatccttgccaacatctatggtaacactgagtggtttggcttcatcagtgctccacagctcagttattcaggtctgcagtttgttggagttaccagacaaagaacaattgattcttcagggccttcctgcagatattcaggaccttattcagcactatgcgccagtctttgaattacccactggcatgcctcctgccagagattgtgaccaccagattgagttgttaccaggcgctagtccggtccagatgcgaccttatcgatatgccccagccttgaaggatgaaatagaaaaacagatttcagagatgttacaatctggtattgtgcagcccagcaagagtgcattcgcttcatctgttattcttgtcaagaaaaaagataacacttaccggttttgtgtggactatcgacatttgaatgctcttacagtcaaaaccaagtttcctgtaccagttattgatgagtttctggatgagctacatggagcaacctgctccggcaacgtttcaaggggcaatgaattccacattggcaccactattgaggaaattactcaaggtgttgctactgatccagcaaaggtgaaggcggttcaagcatggccagtacctactaattgcaaagagcttcgaggatttttaggtctcgcgggatattacagaaaattcgtaaggaattttggccttattgccaagccattgaccaatcttctgaaaaaaggggaattatttgtttggacccatattcatgagcaggcattctctgcgttgaaacagtccctaacgacggcaccagttttggcattacccaattttgataagccttttgccatcgaggcagatgcgtcgggaacaggcattggagctgtgttgttacagcaagaacatcccttggcctttgtcagcaaagcattgggtcctcgaaatcaaggtctgtccacctacgaaaaagagtatttagctatcattttagctgtggatcagtggcggcagtatcttcagcattctgaatttgttatatattcagaccaccgtagcctgtcacatctcacagagcagaagctgagtactccatggcaacagagaatgttttcaaagttgcttggtcttcaataccgcgtggtgtacaaaaagggggtggaaaatggggcagcagatgctttatcacgaagaccacctgcttcggacgatattctgttcagcctgtcgtcctgcaagcctcaatggctgctccaagtggtcgacagctacacaaatgatgaccaggcacagaaattacttgctcagcttgctcttcacaagtccagcacagggccatacaccttacattccggcctccttcgttataaagggagagtgtggattggtgctgattcacgtctacagactacaatcgtttcgtcgctgcatgacagtccaatggggggccattctggatttccagtaacctacagaagaatcaagcagttgttcgcctggtctgggatgaaagctcagattaagtcatatgttgcttgttgctcagtgtgccaacaagctaaggctgacaggagtcgatacccggggctgttgcaaccccttccggtgccggagcagtcttggcaagtcattggtctcgactttattgaaggacttcccaaatcagctaatgttgatacgatactggtggtgattgacaccttttccaaatatgcccactttctaccattgtcccatcccttcacagcctttaaggtggcacaattattcttggattcagtttacaaacttcatggcatgcccacatccattatttcggatcgggacagggtgtttacaagtcatttgtggcaagatttgttcaggctttcaggcaccactttgaagatgagctcctcctaccatccacaaacagatggacagactgagcgtattaatcaatgccttgagacatttcttcgcagtttcgtccatgcttgcccatccaagtggtcatcgtggttatctttggcggaatattggtataatactagcttccactcttcattgggacgttctccatttgaagtgctttatggccatcctccacgccactttggaattacagtggcagatgcttcagtgtcggttgatctccagacttggctgacagacagagagcttatggttaaggtcattcgccagcatctgctgcgggcgcaacaacgtatcaaacatcaggctgataagggcaggtccgaacgcgagtttcaagtgggtgattcagttttcttgaaacttcagccttatgtccaaacctcggtggcaacaagggctaaccataaattgagcttcaagtattttggtccctatactgtcgttcaacacattggcaaggtggcctacaagttgcagctgcctgctactgctgcgatacatccagtttttcatgtgtctcaactcaagcgtgctttgggggtgcctccacctttggtcagtggtactcttcctgatgatctgggccatctccaggtgcctgtgcagattttaaatcggcgtgtggtgttccgcggtgggcgacaagtaccacaagttcacgtccgctggtcacagtctgatgaagctttggccacttgggaagatgaagactccttgcatgctcgttttccagcagctgccgcttggggtcaagcggcctctcaagggagggggactgtcagcgaccctgttcgtcgctcgactgaagatgaggcagcgcttcaggaatcaaggcagccattgggccgacgggtgcgtaggcccaatatccgtgtgacagggaaagagtgggccgcctga

SEQ ID NO: 4113 - DNA, 819 bp, Zea mays
  Peptide Sequence Number=SeqID_45892
atgccggtaacggacgcattgagagccttaacaatcggacatctttacgtgactcctgcgctcgttcatgggctccccaaaagttcatttggtggcccaagaagatattgggccagcaccctttgcctctggaggctgctaggcaggcggtcttttgattccttccttagtaagtttgaaaatgcaatttgggtatcttctcagcgattgtggtttaggtccccctcgctctcacttgctagtgggccttcatccccgccttgttataattgttttggtgagttcgcgcaggcggttctctcaagaagtgcctcttctccctccacggaacttgcactgttcacaaaaccctctcccatttcgcttctgtggaagagcccgtcgcaccctcgctcgctgcttcgcgtgaaacgattgtcgcctctgcgggttgctcgccaggaagtttgtgaggaaatggtgtttcatagagttgatcttgtgtcgtttcttcctcacgatttcgtggcacaacaggttgatcattgggaaatcatggttcgtacagtgacccgccctcagcccaccactcatgattggggcatcgtccttgtgcagccgctgctggagcatgaggttaattttcacatttttgatgatattatccgagaatatctagtggggttcagaaatgttcaagtcaggagcattcagcgctcccatttgggtcaagctctagtgaggttcagattcgcatccgatagagataattcggtggcaatgggtccgcaacaagctcttggattttcttttacagttattaggcataatgaagcctag

SEQ ID NO: 4114 - DNA, 1347 bp, Zea mays
  Peptide Sequence Number=SeqID_45893
atgcgcaccaaacacctcatccctaacaacgccgccggactcacctacgcggcgcgcgactactccgccggcgaggatcacggcgggggcgacggagtcggcggcgacccgtttgagggttttcccgacgcggtgctggggctgatcgtgtccaagctgccgttacggtccgctgtcgcggcctcggctatctcgcgccggtggcgcggcgctgtcgccgctgcgcccgcgctggacctcgacttcgccgcggcgttccccgccgcgccgcgccgcagggcggcgttcgcggccgccgtcactgccgcgcttgggtcctccgctccgccgcatcgacacccgctccgtcgcctccgcctcgcgctcgagggtttctttgaccaggcgtttgctgcctccgccgccgaccacctcgcctcgtggctcaccgcggcggcggcacgcggcgtcgagcggttagagctccacctcccgcgctcccgcctcgccgttcttccgccctccctcctggcctgcaccagcctcacgtccctgacacttcggctcgaccgctacgcacttccgctcccttctttcaccacattcacccgcctatcccgcctccacatcgcttgtgtctcgctcaatgcggaggatgacttcttcggggacctcttcttgcactgcaaagaggtccgctacctgattcttgaaaaatgccgcgtcggtgctcttcgccttaccggtccgtcgcggctttgctcgctcgccatcacggactgttcttggacggaggagtcggctcttgctgtttttgagatgccggagctgcggatactccactactccggcgcaatagcagctaggcacattattgatggggaagtttctttggaggacgtcctccttaacatcgagaagccattggtcaagcctcgggaggctgctctcagagagcttcttactttggttggcaatgcacgaagacttgctctttcaccctggtgcatcgaggtataccgcatatctcaacttctctttgatagaaatgtggaagagctctgcgtgtctgttgtgccatcgcagggcaaatggaggcggaatagtggcgatggaggaagtcatggtgtgcttggtggtaagagggtatcggtgaaacatctaaaggtcgttaggatgaagtacattgatgaaagcagaagtggatttaaactggtaaaggtcctgctcaagaacgcctctgcactggagaccatgacaattgttccttccatggatggccttgagcaggccaagtttaggcgtagggtgttgaagctgaggaagtcctctcaaaatgctagcgtccagttttgcacagctggatga

SEQ ID NO: 4115 - DNA, 261 bp, Zea mays
  Peptide Sequence Number=SeqID_45894
atgagagagctttcaacggtgtcgtaccaggcggcggcagagatgctagggagtgtgaaagtgtgcagtcgttggcatctcctgaaccggatctgcagcctcacgttcgccgcgacggctagaggatgcaggaggttgaggccgacagcgggaggttcctccaatggcagatgggcggcgctgcagatcaagctctcgacgattgagtgtccctgcgaggtgcattcaaaggtggaggagcacccgggactccctgcgtag

SEQ ID NO: 4116 - DNA, 294 bp, Zea mays
  Peptide Sequence Number=SeqID_45895
atgtgggttttccaagttgatgatgtgcccttcaagcaatctgttggtgcactttttgatcggatgtggggtagtcacagtcgctccgtggctagggagagggttgcctgggcgatggagcaggcgcagaaggatgaggaaaccaaatatttggattgcttggaaggctcgctggctactctggacgatgtcggtgttgaaacgggctcggaggagcagtcttcgcgggcaggggttgatataggcgagcccagcgctacggagacttctcaccgttctgctggcgaagtttag

SEQ ID NO: 4117 - DNA, 2008 bp, Zea mays
  Peptide Sequence Number=SeqID_45896
ggccgtggtcatcaacgggcagcgccgcatcctcatctcggggtccatccactacccgcgcagcacgccggagatgtggccgggcctgctgcagaaggccaaggacggcgggctggacgtggtccagacgtacgtgttctggaacgggcacgagccggtgcgtgggcagtactacttcggcgaccgctacgacctcgtccgcttcgtcaagctcgccaagcaggccggcctctacgtccacctccgcatcgggccctacgtctgcgccgagtggaacttcggcggcttccccgtgtggctcaagtacgtccccggcatcagcttccgcaccgacaacggccccttcaaggcggcgatgcaggcgttcgtggagaagatcgtgtccatgatgaagtcggaggggctcttcgagtggcagggcgggcccatcatcctggcgcaggtggagaacgagtacgggcccatggagtccgtcataggcgccggcgccaagccctacgccaactgggcagccaagatggccgtcgccaccggcgccggcgtgccctgggtcatgtgcaagcaggacgacgccccggaccccgtgatcaacacctgcaacggcttctactgcgactacttcagccccaactccaacagcaagccgaccatgtggaccgaggcctggaccggctggttcacggcgttcggtggcgcggtgccgcaccggccggtggaggacatggccttcgccgtggcgcgcttcatccagaagggcggctccttcgtcaattactacatggcaccaacttcgaccgcacctccggtgggcccgttcatcgccaccagctacgactacgacgcgccgatcgacgaatacggtctgctgaggcagccgaaatgggggcacctgagggacctgcacaaggccatcaagcaagccgagccggcgctggtctcaggcgacccgactatccagtccctcgggaactacgagaaggcgtacgtgttcaagtcgagcggcggcgcctgcgcggcgttcctgtccaactaccacaccagcgccgcggcgcgggtggtgttcaacgggcggcgctacgacctcccggcctggtccatcagcgtgctgcccgactgcaaggccgccgtgttcaacacggcgacggtgagcgagccgtcggcgccggcgcggatgagccccgcgggcggcttctcgtggcagtcgtacagcgaggccaccaactcgctggacggccgcgccttcaccaaggacggggctggtggagcagctcagcatgacgtgggacaagtcggactacctgtgtggccgcagctgaccatctactctgccggccactccctgcaggtgttcgtcaacggccagtcctacggcgccgtgtatggcggctacgacagccccaagctgacatacagcggctacgtgaagatgtggcaggggagcaacaagatctccatcctcagcgcagcagtcggcctccctaaccagggcacccactacgagacgtggaacgtcggagtgctcggtccggtcacgctgtccggcctcaacgaggggaagcgggacctcagcgaccagaagtggacctaccagatcggcctccacggcgagtcgctgggcgtgcagtccgtcgccggtagctcgtccgtcgagtggggcagcgcggcagggaagcaacccttgacatggcacaaggcctacttcagcgcgccgtccggcgacgcgccggtggccctggacatgggcagcatgggcaagggccaggcgtgggtgaacggccgccacatcgggcggtactggtcgtacaaggcctcctccagcggctgcggcggctgcagctacgcggggacgtacagcgagaccaagtgccagaccggctgcggcgacgtctcccagaggtactaccacgtcccgcgctcctggctcaaccccagcggcaacctgctggtgatgctcgaggagttcggcggcgacctgtccggcgtgaagctggtgaccaggacggcgtga

SEQ ID NO: 4118 - DNA, 345 bp, Zea mays
  Peptide Sequence Number=SeqID_45897
atgggttggccctcaggaggaaactatgcctcacccgaagctggcctcggcctcggaacaaacttcgcctcgcctgagcccagccttggctacctgctccccacgaatccagcaagaggccactccttcaaacatttcatgcacatctacgaatcccagagcgggctcgatcatggcctcgggcagacttctgcctcgcccgagcatggctttgggatcgatattatcaatgaaagggcgcccgacgtcaccagaaatagcagagctgactcaaagattcaaatacaggaaccgaacgtctccaccgagcacaagtcaacaacgggtacaaaggccataccatag

SEQ ID NO: 4119 - DNA, 423 bp, Zea mays
  Peptide Sequence Number=SeqID_45898
atgttcccggcttcgcccgaggccctgtcttcgccaagaagcaaccctgaccaaatcgccacaccgaccgaccaagtcgcaggagcgtttaatgcaaaaggctcggacttgggctcagccccagaagacgacgaactccgctccgcccgaccccagggctcggactacgccctgacctcagccggcggtctccgcctcgcccgacccaggggctcggactcgacctcggccacggaagacagactcgacctcggcttcggaggagcttccacgtcgcccaacctagggcgcagaccagccacgtcaacaggaggcaccatcatcaccctaccccgagctcactcgggccacggggacaagaccggcgtcccatctggctcgctccgccagataggcgatgatggcgccccgcatactctgtga

SEQ ID NO: 4120 - DNA, 1575 bp, Zea mays
  Peptide Sequence Number=SeqID_45899
atggcgttgcccatcttcctatatctattcatctccacactagccctaactgtatcatcctacttgtacatcaggtcaagaggatcatcagacaactccttgctccgcaaaaactggccaatagctagaatactccccttcttggccaatctccgcaacttccacgactacctcactgccattcttgccgcatcagggtgcaactcctcagtgcaagttgggctaacgagcaggccattcatcctgacaagtgacccatcgaatgtccagcacatgttcaccacgaaccatgccaactacgtaaagggagagatattccctgaaatcttcgacatcgtgagcgacacgatcttgaccgtcgacggtgaggcctggcggcagcagagagcgaagggtaagaccatgctatgcagccagaagatgacttcgtgggtggcttcgtgttgccacggcaaagtggcgaagggcctcctcccgttcttggcccgtatggcgagcacgcgagctccgttcaacatgcaggagctgatggggaggctggtgttcgaccagactgccacgctagtctttggcgtggaccctgggtgcctgtcactgctggacgagatgccgtccatgcgtgtcgcggatgccatggacacggtgatggaggtggccttcttccgtcaaatcgtcttcaatcatctctggaagctaatgagatggctgaacattagtttcgagtggaagctcgcagctgcgcatgtcgtgctacatgcattcgtcacggagatggtggagaagaggaactttgcaaggcatcaccaccaggatattgatggtgacaaagtgacctgcgtcgacgttctttcttactacatcactgaccctgagtgccgcagcgacggcaacctgctgcgcaagatgcttctagtctacatgatcggcgggcgggatactgttggcacggcgcttccatgggtcttctacaaccttgcaaagaacccaggcgtcgtctccagcatccgcaaggagctagcgcctctcgcctctcgcaaaggtggcaccaccgtcgtctccactgatgatgctggcaaccagatggtcgtgttcgagtcagaagagacgaagcctctggtctaccttcaggcgacgttgttcgagtccctgaggctgtacccgccggccccagtcgagggcaaggctgtggtgaacgacgacgtcctaccaagcggtcaccaggtgcggcgtggtgaagtcatcctgatctccatctacgctatgggtaggatggagagcgtgtggggcaaggactgccatgagttcaggcccgagaggtggctctccgaggatggaaccaagctgcagtatgtgccgtcctgcaaattcttggcctttaactcgggcccaagattgtgtctaggcaaggacattgcgatcatggagatgaagaccattgttgccgccgtggtgtggaacttcgatgtggaggtcttggaagggcagagcgtcaagccgaagctatcgttccttttgcagatggagaacggactcatggttaccgtcaagaagagagaggaatgcagtaagctatga

SEQ ID NO: 4121 - DNA, 147 bp, Zea mays
  Peptide Sequence Number=SeqID_45900
atgaacgggaagtcgcgatcccttgacaaatgggtaacacgacttgtgggtaaagatgcgcaatctctacagagtgtaaaactgaaggttacttgcatcctcacccctgaggatcttcactcaaatctcgggacgagattcttttaa

SEQ ID NO: 4122 - DNA, 2403 bp, Zea mays
  Peptide Sequence Number=SeqID_45901
atggctccgttcggcgacggcggctggggtggcgacggaggggaggcgctgctggggcgggacccgctgcgcagtggcagcgcgccgccgacgatggaggccggcgcggaggcagcggtggcggcggagagggtgtttggcagcgttggtggcggcgcctcgttcttctccggtatcgacgggcgcgggttgggcgcgaggatggacgaggtcaccatgcgccacggtgctgccggagttcaggtaaggggtgttgctgctcttgagctcatcgatggttttggtttggtggatgtagtttggatcggaactacattttctgtgttcattcgccatatcccatcagataggatggaacattttggcaattctgcatctttatctgttagaccacatggccaacagtttaatggtacaggagacttggatgaacagcagtttggactgagcagagttcatagtggtggtgttatggcaaactactctgcatctgacatgggtcccctttggacagatatgaatccagacaatgttgactattgcagaaatatccagaatcgctccatgtcaaacattggaaagatgaatgcttatggcaatagggatcttagtgcttcctacatgtttgattctaatcttttagatgctttatctgggctgaggctgtctaatagtctagtaatggaccaatggaatcatggggaagggcaactagacgaaatactcgagtgtcaaagagatttctcaaaaattggtgatgaaaatcgatcacctttggttggtaatgtttttcgtgcatctaggtcggatgtgcatccactgccaatatatggacatggcatttcacagaggcagaccagtgcattagatggttccaatgtttcaaggttcagtcgccatcacataaagggtgttgatcacttatctttggctgctgaacgggtagctgcaatgcaatcaggcaacctgcgtagaggaaccaatctttctcgcaatgcgtatatgactaatatggtcaaccccatgagcaacagatactacagtaatacagacttggatttggttagtagtcgaagggcgttccttgatgatctacttgcacaacagtatctgcaggaggataatctgtcatatgatgatagtaggatctatcatggcgagcctcgtttttcctcttcaagaatgcaaagacctggatctcatttttatccaaattcgaggaacattctatcccatggtgatcggcaatcacggttcttctccctcaatagaaaggcaatgggtagaaatattggatcacaggtctatcatgacaatgcattagcaaactacctggatgtgccttctttggataatgcagatagaaatggagctgattcagtggatatggatcaatatggaagccggtttattcaacaaaaacttgaaattgcatcaccggatgaccgggaaaaaatatttccagagatattatccaacgtcattgttctaacaactgatgtttttggcaattatgttatccagaagtttttcgagttcgccacagaaagtcagttaatccaattggcagatcaactcaaaggtcgaattttggaacttagcctccagatgtatggttgcagggtagttcagaaggttttggaggtagttggtatggatcaaaaggtcgacattgttcatgagctcaagaattatattctgaaatgtattggcgatcaaaatggtaaccatgtgattcagaaatgcattgagtgtgttcctgaagaccgcattccatttgttattgatcctatactttcacaaatccttgttctgtgtacccatcaatatggctgcagagttattcagagagttctggagcattgccatgatcctgtgactcaaagtgctattatgaatgaaattatgcagcagaccttccatttgacagatgataagtttgggaactatgttgttcaacatgtgttggaacacggaaagccagaagagcgttccgtcatcattcaaaagctgtctgggcaagtggtcaccttgagcaagcaaaagtttgcttctaatgtcattgagaaatgtttggaatttggaactcctgaagaacgtgatagccttattggggaaatcatttcttctggtcaaacatttcaggagctgatgaaggatcagtttggtaactatgttgtacagaaagtccttgagacatgtgacgacaaatacctagagatgatcctctcgagcatcaaattgcacttgaatgaactgaagaactacacgtacgggaagcacatcgtagcacgtgtggagaagctaatcgttacaggagagaatcgagcaaggatggcgtccatgagtggccagcatcagcagcagcaacctaacaactgtacagctgtagacgaacactag

SEQ ID NO: 4123 - DNA, 315 bp, Zea mays
  Peptide Sequence Number=SeqID_45902
atggggtggggaaggtgctgcgcgcggctcggtggatggtcggcgcagagagaagggatagggggagagagccagggagggaaggagctggcggccgccatcaatggcgccgggcgtttccacttggagagaatgggggagaaggagtgggggagaagaaggggagagggtggccgttactcggcgcggagagccgagcggtcgcgacgtgggaggcacgggctgggtacagaagttgaggagacgagggggagcgcggacgtcggggcggcggctgaaaggggaaggggccgggttggccccgcctggaagtga

SEQ ID NO: 4124 - DNA, 400 bp, Zea mays
  Peptide Sequence Number=SeqID_45903
cgctagcagcgaggaagccagggaaggtgttggggctgcaggaacaacagcgtctcgccgaggagctgcgcagcgaggggaggtggggcgagctgctgctgtgtcccgccgtgaggaggaattggagctgagctccctgtttgctgcaagccgtggacagcagagggaggaagaaagacccggctgctgctgtgcgagggagaaggagcaggggaacaggggcgccctacgtagaggaggagaggtcggccatggaggctgctgcccctgcgcaagggaggccaaggaggagggggactggcggtcatggggagaggagccaagctccatgcttgctgccgtggggaagaagggctgctgcgtgagagaagaagacagggaggaagaaagtggcggctag

SEQ ID NO: 4125 - DNA, 132 bp, Zea mays
  Peptide Sequence Number=SeqID_45904
atgattcacaagaaaaaggattaccagatcaaggtgaaaggaaaggtttcactttctaaactcaaggttgttaggatgggggtctttttatgggcaaaacaagcaacaatttttattggcaacaagggttga

SEQ ID NO: 4126 - DNA, 252 bp, Zea mays
  Peptide Sequence Number=SeqID_45905
atggggagaatctccgaagcttcagtttcttctccctcgcgctcaaccctggcggaaaacagtgcaaatagcaatgaatgctgtggtaacttcacaccttccctgagctcgtctgtttatatagtgctgcaggtcttcaagggagaagctcaaaagatacaaaggttgacacagcgccgaagctgtgaagcaggaaagcttcggcatgttcgcagaaaagggaaccgacttaaagatgaaaaggccatttag

SEQ ID NO: 4127 - DNA, 495 bp, Zea mays
  Peptide Sequence Number=SeqID_45906
atggtgcgcactctccagaccacccatgtgaacacctgtgtccctccacctcagcaggctccttcctacctagttgcggcgaaagaaatccctatggagttgcaccaccttgctgtaaggaatggtgtaattttggaggagagttctaaggagattctggtgacacctactccattaacagattctcatgcctttgctgctggactttcttcttcagcactacctgtgctagtcgctcaagctcccactcctagaggtgatgaccctgatgattttggcaatgatggaggtcataacactgacctagacagtgctaccctggatctctcaaggatacatgaggagcctgaagatgcacatgcaaggattgcaccactagaggctcagcttgatggaaaaaatccacctgaggctgaagaccctaccatagctgtgtcctcgccgcgcaagaggattcgctatggagccccaggatctattaccaggctactctag

SEQ ID NO: 4128 - DNA, 1263 bp, Zea mays
  Peptide Sequence Number=SeqID_45907
atggcagaccggaagggggcggacctacaggggggtccgggtgggccctggcacaccctaagccaggcccaccagggaccccacccggccacctggttcgcctgttcagctgacgcccgacgttccctcccgagcgttcggctaatgggcttcctgttcccagttcctggcgagtgcactgtgcgcggttgttcctcagttcctggcggctggcgtatggccaccagcatcctgctcagtcggctccaaagccttcacccctccggtcctgcaaaggttgcaagtctgcaacgcatcttgctcggtcttcaagacttcaagcaactacatcttgcaacggcatcctgcaaggcttgcatgcaacgcctactgcctgcgctcactaacgctcgcgcggagctgctgccactgtcagatgcacattgcccacaactggcgcccgacacagcacagcacaggtgtaaacagcagaatttacagccggaagccgtaaaccgcgggttaaaagtcacagacggcggaccatttcgcgcgccagatggaagcatccaagagattctttctggggcaacaaatcggtcggtccagaccagatcccagatcccatgcgttgctctgctccgcagctccgctccgcctcctttttatgcgccgctcctccgcaaaacccctcctcccccgcacggccgcacccaccagtctccctcgcccctccgccaccacctctccaaatctcgcccatctcgaaccacagcgcgcggagggccgcgtacaggagaagaggggggtatggagcccgccgagcgaatcgagtccggtacggcgctggggaagcggccgaggagcagggcgctgccgcggacgcccagcatggtgacggtgccgtcggcggcgaagcaggggcgccaggagcggcgcgccgcctcgctgccggctgccggcactgggacgggagccgctggcgccatgccggtgggttactgttactactacggcggctcattcgccgcggtggagacggcggccttcttgaaggcgtgcggccgatgcagccgccgcctcgggcccggccacgacaccttcatctacaggggcgaggtggcgttctgcagccaggagtgccgggagaagcggatcgagtacgacgagcgcatggagaagacctgctgctcactgacctccatcaaggaggccccgtccgtgtccggcgccagcggctccgaccagtccggcagcggcggggagaccgtggccgccgcctag

SEQ ID NO: 4129 - DNA, 1344 bp, Zea mays
  Peptide Sequence Number=SeqID_45908
atgggcgttgggcgagcagtcccccccttccacccgcgttcgcttcttccccagcatccagcaaggaaggaggaagaagaagagggaggagaggggacggtccgcgaatcctgcctagccttcgccgccttcctccgctcgagcggctcgccgagcgatttggtgactgcgcgagggacccccgatcacgcggcagcagagcagagcaccgtgaccgtagcagtgacgcagaggtgttccgtgcttgacctgggattttgctattctgggctctgctcgtttactcaaatggaattggaagcgaatggtacaaccaatgtccatgggaaagaagcagcaccgtatgaggagcagctgttcaagattggtaaagttagaactgacctaggacaactatctggaaaatcagctctatattgctcagatgcttcaattgcaaggtacctgatagcaaggaactgggacataaggaaggctactaaaatgctgaagaaaaccttaaaatggcgttcagaatataagccagatgaaatccgttgggatgacatatctgatgaagcggtaactggaaaaacttaccgaactgattactttgacaagatcgggcggagtatccttgtcatgagacctggatgccagaataccaagaatgccaatgggcaagtcaagtacttggtgtactgtatggagaatgcaattctaaatctgccacatggtcaggatcagatggtttggctcattgattttgctggtttcaatttaggcaacttgtcaattcaggtgacaaagatgacggcagatgtcctacaaggccattatcctgaaaggttgggtgtggcaattctttttaacgctccaaagttttttgagcctttctggaagatggcaagcccccttcttgagaagaagaccagaaacaaggtcaaatttgtatactcagatagacctgacaccatgaagatcatggaagaccttttcaacatggatgagttagaatgtgcgtttggtggcaagaacccagctactttcaatataaatgattatgctgcgaggatgagagaagatgacaagaagatgccatcattttggagccctgagaattcagctcttgcttctgagccatatcagatgagcagccaaaaagccctaggaagcgtttcaggtgcgaagactgaagatgctggatctggaaagatggacgacatggagactgctcctgaaaagagtgaagaatcgggtactgaatctggagaggaggtacaaacacggactgaatcaagcacagttgagcagaaaaacttgcctggagaagataatgccccagcagataaaagtggcctttaa

SEQ ID NO: 4130 - DNA, 1242 bp, Zea mays
  Peptide Sequence Number=SeqID_45909
atggggtgtgtcgacaggcacgaaagaaagatccagaattccagattcagccgtgcacaaatcgtgcagctcaactggatgtcaaactcaaaccacaacacgccctgtgacatccccaagccggcgtccgtcgacgagttcctcgccaggaatggcaagaagaagaagtccttcatgtcgggcctgttccgcaagaaagggaggggcgtggacaggaagctgctctcgcggcgcgacatcatcttcgatttggagggtaaaggcggcgacaggatggacctcctggagacgtccgccgctgtccgcaagagcttctcagatcggcactgcacggcgcggatcgagaacctgaccctcagctgcctggattctcccgggagacccaacgtcgatacccgggaataccgggtgtttgtaggcacatggaatgtgggagggaagcctcctgacagcagcgttaacctcgaagagtttctgcagattgaaggattgcccgatatatacgtcttggggtttcaggagatcgtgcctctgaacgcgggcaacgtgctggtcgtggaggacaacgagccggcgggcaagtggatggagctcatctaccaggccctgaacaggccgccggcccaccaggacggggagtcctcgggcgacgagctctcgccgccggcgtccacctcctcctcccgctacccccagccgtcccagggccggcaagtcggccgcgaccccagcaacaacgccgccatccccaagtcctccagcggcggcgtgctcttcgcgcagaggcccccgcccccgcccctcaggatggtcaacaagagctaccgcgtcgacaacgcgctggccaagacgtgcacctgcatgtccgacccgcccggcatgcagcgccgggcgcgggagatgcgcgagttcctctaccgcgtcgaggccgccgccgcctcgccgggccgcggcgccgacgaagaaacgctggcctccatcgaaggcggcggcatgaactactgcctcatcgcgaggaagcagatggtcgggatcttcctgtcggtgtgggtgcggcgggagctcgtgcagtacgtcggccacctccgggtcgactgcgtcggccggggcatcatgggccgcctcgggaacaaggtctccgagcgcgcgtttcttctctcgtgcttcgtgcatgccgaaccttacgatcgagcgagcgagcgtctgacggaccctgaaatcaccagggatgcatcgccatga

SEQ ID NO: 4131 - DNA, 396 bp, Zea mays
  Peptide Sequence Number=SeqID_45910
atgcgcttcccgttccttttcgccctccagctggtcgccttggcggcggcagcgtcggcggccgaggtcgcggtgacgcgctcttcgaggatggtgcaccgtctgtcagacgaggcccggctggaggtgggcccgcgtgtggggtggtggccgcagcgaggaagcggggagtactaccgcgcgctagtgaggagcgatatccagcggcagaagcggcggctcgcggtcctctcgctctcaaagggcggcagcaccttctccccgggcaacgacttaggctggtgcgcctcataccctgcggccccgttggatcttacgctcctcgactttttaactgttttactccactgtgaatgttataatgttacattttgtattcatactacgagacagtag

SEQ ID NO: 4132 - DNA, 480 bp, Zea mays
  Peptide Sequence Number=SeqID_45911
atggccgccccaccccagggagaagacgaacgacgacgctgcggcggcgcctggtgcgggacggtggagctgagggtcaggatgaactgcgagcgcgaggtcaagaatgctttctccggcatgcatgagaggtggacccggtcgtggtgctgcggcctgcggagggcccagcccacggggaagaaggcggcggagccgtggactggcccccataacactgccggctgctacgccccggcggccgtggccctctaccgcgtcgggccggcccagctgcaggcccacgacggcaggtgggcagacccgtacctggtctcggtgaggagcgtggaggcggacataggcgccgagcatatcagcaggttgttcagcgacggcaaccgcaacgcctgctcccagtgggtgagctccgtaaaaattgttgagaactacgttaccgcggatcaccagatccgctcccttttttcccgtcagcagtag

SEQ ID NO: 4133 - DNA, 1356 bp, Zea mays
  Peptide Sequence Number=SeqID_45912
atgggcgagacaatctcgttcgcccctcggaaggccatcaagtcccaagttttggcggactttgtggctgaatgggtcgacacccagcttccagcagctccgatccaaccagaactctggaccatgtttttcgacgggtcgctgatgaagacaggagcgggcgtgggcctgctcttcatctcacccctcgggaagcacctccgctatgtgctgcgcctccatttcccggcgtccaacaacgtggccgagtacgaggctctggttaacgggttgcgcatcgccatcgagctaggggtccggcgcctcgatgctcgtggcgactcgcaacttgtcatcgaccaagtcatgaagaactcccactgccgcgacccgaagatggaagcctactgcgatgaggttcgacgcctggaggacaagttctacgggctcgagctcaaccacatcgctcgacgatacaacgagactgcggacgagctggctaagatagcctcggggcggacaacggtttctccggacgtcttctcccgagacctacatcaaccctccgtcaagaccgacggcacgcccgagcctgaggaggcctcggctcagcccgaggcaccctcggcccccgagggtgaggcactgcgcgtcgaggaagagcggaatggggtcacgcctaatcgaaactggcagaccccgtacctgcaatatctccaccgaggagagctacccctcgacagagccgaagctcggcgactggcgcggcgcgccaagtcgttcgtcttgctgggtgacagaaaggagctctaccaccacatcccctcaggcatcctccagcgatgcatatccatcgccgaaggtcaggtgctattgcaagaaatacactcgggggcttgcggtcatcacgcagcgtctcgagcccttgttggaaacgccttcctacacggtttctactggccaaccgcggtggccgacgccactaggattgtacgcacctgccaagggtgtcagttctatgcaaagcagacccacctgcccgctcaggctttgcaaacaatacccatcacctggccgtttgctgtgtggggtctggacctcgtcggtcccttgcagaaggcacccgggggctacacgcacctgctggtccccatcgacaaattctccaagtggattgaggtccgacccctaaacagcatcaggtccgaacagacggtggcgttcttcaccaacatcatccatcgcttcggggtcccgaactccatcatcaccgacaatggcactcagttcactggcagaaggttcctggacttctgcgaggaccaccacatccgggtggacttggccgccgtagctcaccccatgacgaatgggtag

SEQ ID NO: 4134 - DNA, 999 bp, Zea mays
  Peptide Sequence Number=SeqID_45913
atggcgccggcgacaggagaaggtcgaagggtgaggcgctgctgcgcatcagcgcgggcagggaggggtggccgacggggaggcggcaccactggacatgagccggggctttggcaacggctagcccgcgcgtggttggctgcaacgggacacccgtggttgcacgcccgcacgtgcacaggtcgatgggggcggggaaaggcctgccggtgccggagcacaggcgccaccgccgctggggagcgtccatgcctaggcgcagccgacggcgcagttggaggcgtcctggcagcatgtgtgcgtgcagcagcaagagaggccactagggaagttgctggcggtggctgcagggggctgggccggcgactagagaagggagggaggccggccgccaacgaccgggacgccggcggggagggcccgatggcagggactggccctgggcagcgacggggaggggcagaggaccccccgcgtggccggtgtggagcgagcctgacgtggccctggcggacccagtctgagccccggcggccacggcgcgacatggtctggccctcgacggcctcggcgcgggcgcgcgcagccccgccaggtcgtgaggcgacgcggccgggcaaggaaggtcacgggcgcgcgcggtcatcccgcggcggcgcgggcgcggtcggtggtggcccgtggctggtggcggcgtgcgcgcggccaggcagggaagggtggcggctaggctggggccagcaaccgccggagccaaagggaggggaggggcttcggcgtgagggagaagggtcgccgaccacgacgttgctggccgtggacccgctgagcaggaacttcccgcagagggagaggctggagacggagcccgcgtggacccgcagcaccgccagcgccttgcacggcccggcgggaaggcggacggggtgggggaaagaccgaaagagggaggcctcggcggccaggggagagtgccggcggctgggggccagaggctga

SEQ ID NO: 4135 - DNA, 189 bp, Zea mays
  Peptide Sequence Number=SeqID_45914
atggcccatggcaggattttgctcttcagatttccatctctaatccccggtatagaggcaggtgttagatccaacagaccagcaggcttgaattgctcctgtcaccgttccctgttctcggctgttgtattacgcaaggactgccgtggggacgtggggtgggacgagtccaaacgttggagtcactag

SEQ ID NO: 4136 - DNA, 357 bp, Zea mays
  Peptide Sequence Number=SeqID_45915
atggcgattatgtggaggaggcccatatcacccaccgcattcgcaagctacaacgaacccaggtacgaggtgctgacccttgaggaggtgcttgggaaattccttagccatgagatgatggtaaggaatccaagaatgctgaggacctggttcaaggacgaaggcaaaaaagaaaagaagaagatggagaagaaaaaaatattccacaagaagggtggtaaatcccacgttggcaaagagtgggacttcgacaagagctcctccgactccgactatgaggacatcaccaccgtcaccatcaacaagggcatccccttcccacaatgtcgaccacaagtgcttaatggcaaaggatag

SEQ ID NO: 4137 - DNA, 318 bp, Zea mays
  Peptide Sequence Number=SeqID_45916
atggacgctcacttatggtgggtcagtctcgggctgggcaagggatccattcgagtggttttccttcagttctcttggcccccctatctagctctgccaagctcgaccgcgggctcggtgcctcagggttcgtacgagggcgggtgcttccagatcagacatttccttcctcctcctgctgatcgatgggccctagttgccagaggcctcttcccagcgccctcgctggtcgatgcccccaaggaccaggggtcttgtcctcgacattccctcactctaattgttataattgtcgttctaacgcccaaccatggttaa

SEQ ID NO: 4138 - DNA, 2387 bp, Zea mays
  Peptide Sequence Number=SeqID_45917
atgacgagcgccaataaggcgaagctccagctgcaggagagggtcccgctcccccgcacggcgtggaagctggccgacctcgccgtcctttccctgctcctggccctcctcgcccgccgtgcgtcctcgctggtgtcgtcgggcggcacggcggccgcgtgcacgtggtgctgggtcgccgcgctcatttgcgaggcgtggttcacggtggtctggctgctcaacatgaacgccaaatggaaccccgtccgcttcgtcacgcaccctgaacgcctcgccggatattgggcgggcgacgacgagctgctgccggcggtggacatgttcgtgacgacggcggacccgaagctggagccggcggtggtgacggtgaacacggtgctgtcgctgctggcgctggactaccccgcgggcaagctgtcgtgctacgtctccgacgacggctgctcggcggtgacatgctacgcgctgcgcgaggccgccgagttcgccaagctctgggtgccgttcaccaggaagcacggcgccaaggtcagggcccccttcgcgtacttctcctcctcctccggcggcggggcggcggagcgtggcggtggcggtggggccgccgacgccgacgccgagttcctgcgcgcttggacgtccatgaagaacgagtacgaggagctggtccgccggatcgagagcgccgaggagaagtctctagtccggcgcggcgacggcgcgttcgccgagttcgtgggtgctgaccgcgggaaccacccgaccataatcaaggtcctgtgggacaacgacagcagcaagagcgagagcgatgagcaggcggcaggggatggagtcccaagcctcatatacgtctcgagggagaagagccgcacgcagccccaccacttcaaggccggggccatgaacgtcctgacgagggtgtccgcggtgctgaccaacgcgccgatcatgctgaacgtggactgcgacatgttcgccaacaacccgcaggcggccctccacgccatgtgcctcctcctgggcttcgacgacgaggtccacagcggcttcgtccaggcgccgcagcggttctacggcggcctcgcggacgaccctttcgggaaccagatgcaggttatattcgagaaagttggacacggaattgccggactccaaggcatattttactgcgggacgggttgctttcaccgcaggaaagtcatgtacggcgtgccaccgggctccggcaccggcgccaccaaaggtgagtccatgaacttgactggttgtgcaatacaagctctggcagcagcagattcaccgtcctacaaggagctacagaagaagtttggcagttcgaaagaactgatcgagtcggcgaggagcatcatcacgtcgaaagaagcgccagctgcggtggcagatctaacgagccgcgtcgaagtggcgaagcaagtctctgcctgcagctacgagacgggcacgagctggggtcaggaggttggctgggtgtacgggtccatgaccgaggacgtcctgacggggcagcgcatccacgccgccggctggaggtcggcgctcctgagcccggacccaccggcgttcctcggcggcgcgcccaccggcgggcccgccagcctcacccagtacaagagatgggcgacgggcctgctggagatcgtcctcagccgccacaacccgttcctcctctccgcgtccaagcgcctccgtttccggcagtgcctcgcctaccttgtcatcgacgtgtggcccgtcagggcgcccttcgagctctgctacgcgctgctcggaccctactgcctcatcgccaaccgctccttcctgccaaaggcatcggagcccggcttcgtcgttccgctggcgctgttcctggcctacaacgcgtacaacctgggcgagtacgtggactgccggctctcggcgcgcgcctggtggaacaaccagcggatgcagcggatcacgtcgtcctccgcatggctgctcgcgttcctcaccgtggtcctcaagacggtgggcctctcggagacggtgttcgaggtgacacgcaaggagcagcagcagcagcagggctcgcccgacggcgacggcgccgacgccgacccggggcggttcaccttcgactcgtcgccggtgttcgtcccgccggcggcgctcgcgatgctgagcgtcgtcgccgtcgccgtcggagcgtggagggcggtcaccggtggcggcggcggcccgggcgtcggggagttcgtgtgctgcgcctggcttctgctctgcttctggccgttcgtgaggggcctcgtcggcggcaggggaagctacggcatcccctggagcgtcaggatcaaggctgccctgctcgtggccgcgttcgtgcacctgtccacacgcaa

SEQ ID NO: 4139 - DNA, 309 bp, Zea mays
  Peptide Sequence Number=SeqID_45918
atggtcgaagctctggcggcaatggcgggtggaattgagctcgccggagctaaggagagggggctggccggtgaagtagccggacaaaatatgcagatacactgcacttcaccgccggtgatctccgcgctgcgatccgtgctgtccgccgcgattcgtgttcggctcaggcaggatattaccgtggatgtgaaaagatcggagggggagtggattgagccggcttcaccatacccacttgcaccggcgacgtgcccgcgtgaccaccgtcgtcgtgccgccgtttacctcggtcatgacacgccttaa

SEQ ID NO: 4140 - DNA, 237 bp, Zea mays
  Peptide Sequence Number=SeqID_45919
atgaggttttcacaaaatacacttaatacaaagcaacctgctaaggtttctaagttggtgtggaggccctctgggcgaggcggtgctgaagttgataatccagctgcgaaagctagtgactctgccaacgcggtgggcataggcagaagttccttcgagctgtcctccaagatgactccattctccacacgaaggcaagggagatccactggaatttcctcgactactactgggtag

SEQ ID NO: 4141 - DNA, 594 bp, Zea mays
  Peptide Sequence Number=SeqID_45920
atggcgctcagcaagtcactggtgaataaggccggccagcaccatcggcacgggtacaagtgctccgtgtgcgacaaggtgatgacgagccactggaagctgtcgtcgccgctggcggccacgccaagagacaaggtgttgtctggtggcaccgcgcatgcaaaggaggagaagctgcaccagtgctcgctctgtcaccgcacgttcccgtcggggcaggcgctgggccggcacaagacgagccactggaagccgccgtcggccgtgccaagagacgaggacgaggcgtcgttcggcgatacagcgcacacgaaggaggagaagctgcaccagtgctcgctctgccaccgcacgttcccgtcgggacaggcgctgggcgcctgggcgggcacaagcggctgcactacgagaaggacaaggacaaggacgccgccagggaccaaagaggccagcgtggccgcggtggcgacagcagtggtgcgggatttcgacctcaacctgtcggccgaggccgatggcgtgccgccggatgccaagcgggcatgcacggacgattctgcggcgatgatggccgtgctgcgggacttcgactga

SEQ ID NO: 4142 - DNA, 402 bp, Zea mays
  Peptide Sequence Number=SeqID_45921
atggaccgggctttcgcccacaaaagacggtgcagggaatacgacgtcgtcaacagaggttgtggggcccactggagcgctgggcgggtacaagacgagccactggaagccgccaccattgggctgcggccatggccgtggcagtgccaagagacgaggtgtcatccgacatcaccacacacgcgaaggaggaaagctgcaccagtgctcgctctaccatcgcacgttcccgggcaagcgctgggcgggcacaagcggctgcactacgagaaggacaaggacaaaggcgccgccaggaccaaccaggccaacacagccgtggtggcgatagccatgcttcgggacttcgacctcaacctatcggccgacgacgcgccgccggatgccaattcttcttcgtga

SEQ ID NO: 4143 - DNA, 141 bp, Zea mays
  Peptide Sequence Number=SeqID_45922
atggccatgatgggatcaacatcagaaaagatgtacctctgccaggtgaagaagcgacaaacttttgttgcttctgttctaaggtggtaccaaaggaagagcaccaagagtgaagctataggaggaaaggatactccataa

SEQ ID NO: 4144 - DNA, 708 bp, Zea mays
  Peptide Sequence Number=SeqID_45923
atggcgctcagcaagccaccggcgaccgacgacgaccaggccgagcgggagtacctcgcgtcctgcctcatgccgctatcgcgcggcctctgcgacggtggcgcgaccgacgccaagagggcgggcgcggcgcctacggcatcgaataaggccgacggccagcaccacccgcacgggtacgagtgctccatgtgcagcaaggtttacgcgtcctaccaggcgctgggcgggcacaagacgagccaccagaagccgccagccgcggcagcgccaagagacgaggcgtcgtccagcggcaccgcgcacgagaaggaggagaagctgcaccagtgctcgctctgcctccgcacgttcctgtcggggcaggcgctgggcgagcacatgacgagccaccggaagccgccgcccgcggcagcgccaggagacgaggcgtcgtccggtggctccgcgcacgcgaaggaggagaacacgttcacgtcggggcaggcgctgggcgggcacaagcggctgcactgcgaggccaaggacaagggcaaggacgccgccaggaccaacaaggccagcgtggcggcgacggccgtgctgcgggacttcgacctcaacctgtcggctgaggccgagagtgcgacgccggaggccaagcgggcacggacgatgctgctggtggctgatgatccagcgctctttccaacggcggcgaggtgttag

SEQ ID NO: 4145 - DNA, 207 bp, Zea mays
  Peptide Sequence Number=SeqID_45924
atggtgtcactgatatatatttgggaagtgattgccagtcctcgaggagatggttactttgttgtctgttatttgctatttttcgtcttcgtccttatgctgcaactaggtttggatagaccttctattacaaagttgttcacctgcaaggatattgttcgagtgcttgtatttgagatcctagagattagagaagtttctggatag

SEQ ID NO: 4146 - DNA, 336 bp, Zea mays
  Peptide Sequence Number=SeqID_45925
atggccgctgccgcccccgacgccgacgtctatgatattccgtggctggagaagtaccgccccacccgcgtcgctgacgtcgtcggaaactccgatgccgtcacccgcctggaggggcctccggggaccgggaagatgacgagcatcctagtgctagcgcatgaactcctcaggcccaactatcgtgatgccgtgttggagctcaatgcctcagatgacaggggtttggatgttgtgcggaacaatatcaagatgtttgcacagaagaagtggagattctacgagcatgcttggtctcgtattggttataagcttgggttggttaacttaacttga

SEQ ID NO: 4147 - DNA, 375 bp, Zea mays
  Peptide Sequence Number=SeqID_45926
atgccatgcatgcgccgcgtacggttgctgccgattcgtccgccatgcggttggttggctctgcctggctggcagccaaacggacgtgcgcggcccgtcacacaggggaatggaatggaaccgaaccgatccggaagcaaacgtaacgtcgcgcgcaacatgctggccgcggcgcgcgcgtttcggccgctgcctggcgctttcaggggtggggggcaatgcccatgtgggcgtgtggccctggcggtgcaggccgcctcgccatcgatcaccatcatcagcgggctccgccttcccccgtggtgggcgacggaattttgggggacgcacgcacgcacgcgttgccagcgccagaagccaacggggtttcaataa

SEQ ID NO: 4148 - DNA, 438 bp, Zea mays
  Peptide Sequence Number=SeqID_45927
atgacacgcttcctcgaggagattagcgtgctgctcccacgatcggcctacctccgccgcccccgcgtgcaccaccaccatcgggtgggagaggcagtaacgactcgcccgaggccaacccccagtgggagggtcagttatgactcgcccgaggcaaagccaaaacgggacaggcaaccacgactcttccaaggccactctcgggcgggagacacagtcatgactcgtctaaggccaagcccgggcgggacaggcagtaacgactcgcctgaggtcatccgcgggcgggacagacagtcactactcgcccgaggccaacccccaagtgggatacacagttacgactcgcccaaggccaaccccagtgggatacaaagttacaactcgtccgaggccaagccaagacagaataggcagtccgcccgaggcaacccttag

SEQ ID NO: 4149 - DNA, 423 bp, Zea mays
  Peptide Sequence Number=SeqID_45928
atgtcgcgcgcgttcgacgactactatatcgaggactgtggcgtcatcttggcgtcggaggtgacacagaggaggaccgacaacaataaccagttcgagttcgtcatcctcgccaccattgggatatcggggcatacactatggagggtgtctcaccagtcaccagcggtggcgaggctgaccatggtacatggcggcttggcgactatatgcaacttcgagaagaaattctttcgtactttggtactctacgggcttgaatcagttgcccactcgttctactgctcggaaaactctctaggaccactcgtcgagggctattccactatcccgcttgactttgatgaaggtgatgtcaagtccatcactctcagttcactctgctcgctcggaaatgttgagatccagacgatattggcctga

SEQ ID NO: 4150 - DNA, 183 bp, Zea mays
  Peptide Sequence Number=SeqID_45929
atggacaaagtacaaatcaaggataaaggcgaactcgtcgctctcgggaattcatcggcgacgtacggctataattcaccggactgtccggtgtgcaccggactgtccggtgagccaacggtcgacagggccaacggtcggccgcgcgatctgcgcgggacacgtggccgagccaacggctag

SEQ ID NO: 4151 - DNA, 1881 bp, Zea mays
  Peptide Sequence Number=SeqID_45930
atgaccaccatatgctgtgagtctgcgacgctggccgcgctgcatctgcatgtgcacgacaaaggaccacagacaggatggatctcgaaatatatgaaagatttctctaccgacgagaactcaaagaatccgcactggcgcgcgatcgggtacagcccgcccccggcggacgacgagccggcgccggcggaatcagaacgtcccgagaagcgtcccctggacgacggcatcgttgagacgaacaaggagaacgacgcgtccctgcccgcgttgctagccgagaagggcctcagggtggccgatgacgcggcgcggaacgtgtgcagggtcgagtgcgacgtcgtcatcgtcgggtccggctgcggcgggggcgtggcggcagcggtgctcgcggcggcggggcacaaggtggtcgtcatcgagaaggggaactacttcacggcgcgggattacacggccatcgaggcgccgtcgatggagcacctctacgagggcggagggttcgtcagcacgctcagcgccagcgcgctgctcctggcaggctcgacggtcggcggcggcacggcggtcaactggtcggcctgcatcaagacccccgacgacgttcgcggggagtgggcgcgcgaccgggggctcccgctgttcgccaccggcgagtacgccgccgccatggacaaggtgttcgagcggctcggcgtgacggccggttgtgcggaggaggggctccagaacaaggtcctccgcaaggggtgcgagaggctcgggtacaaggtggagtcggtgtcgaggaactcgtcggaggggcactactgcggcagctgcggctacggctgccgcaccggcgacaagcgcggcacggacagcacgtggctcgtcgacgcggtgagccgcggcgcggtgatcctgacggggtgcaaggccgagaagctgctgctggagcctggcagtgccgcggacggcagggcgaagcgatgcgtcggcgtggtggcgaggagcaccaacccggcgatcacgaggacgctggaggtgaccgccagggtgacagtctcggcgtgcgggtctctcctgacgccggtgctgctgcgcgggagcgggctccgcaaccggcatatcgggaagaacctccacctccacccgacggccctggtgtggggctacttcccggacaccgtgccggacctcaggggcaggatgtacgagggcggcatcatcacgtccctgcacaaggtggaaggcggcggtccgggcgcgccggcccgcgccatcctcgaggcgccggcgatgggcctggccggcgcggggacgcagttcccctgggtgtccgggcgcgacatgaaggagcggatgctcaggtacgggcgcacggtgcacctcttctccatggtgagggaccgcgggtccggcaccgtgcacggcgagcggcgggtggcgtaccacctggacgccacggaccgggagaacatgcgcgacggcatgcggcgcgcgctgcgcgtcctggccgcggcgggcgcggcggagatcggcacccaccgcagcgacgggcagcggttcgcgtgcgggggcgccacggaggccgcgctggaggagttcctggacggcgtggacgtggtgcgcgggccccagtcgaaggccgaggcgtggaccctgtgctgcaccgcgcaccagatgggcagctgccggatgggcgccacggcccgggacggcgccgtggacgcgcgcggcgagagctgggaggccgggagcctgtacgtgtgcgacggcagcgtcctgcccggcgccgtgggcgtcaaccctatggtcaccatccagtccgtggcctactgcctcgccacgggcatcgccgagtcgctcaggcgcggcccggtttcacgaaaggattga

SEQ ID NO: 4152 - DNA, 435 bp, Zea mays
  Peptide Sequence Number=SeqID_45931
atgggtcggcgcgaggccgagcgcgaaggggggaaaaggcagtcggagacgggcgtgagagaggtggagatcccgcggccttcgtgttcgtcccgcgcccaggtcgggcgtaaggagaggatccagcctgaatcagcttggggtagggaaatgatggcgcctcccgttgacgtggtcggtccgcgccctaggttgggcgatgtggaggctcctccgaggtcgaggtcgagtctgtcttccgtggccaaggtcgagtccgagcccctgggtcgggcgaggcggagaccgtcggctgaggccagggctgagtccgagccctggggttgggcgaagcggagttcgtcgtcttccggggctgagcccgagtccgagcccaggggtcaggcggatcggagttcaccatcttccagggctgagcccaagtccgagccctag

SEQ ID NO: 4153 - DNA, 381 bp, Zea mays
  Peptide Sequence Number=SeqID_45932
atggcgccggtaatgggagagttagtggggagggagaaggggaaacggcagccgttaacggctcagcatcaaggggcggacgtcgtcccggcgcgcggggtagccgggcgcgggcagtcggccgcgggggagggcgtcaggcgtggcagctgcgcaggctggagcgcgtcggggcgcgggctcctgggcgcgctcggggcggggctggcagctcgggtcgcggcgccggttcctgacgtcggtgcttggcgcggctggggctcggtcctgcgggcaggtgagagcagagggaaggggagagaagggaggagagagagtcgggtgggggaagagtacacagggcagcggcggctgccagggaggctagaggcggccggctag

SEQ ID NO: 4154 - DNA, 141 bp, Zea mays
  Peptide Sequence Number=SeqID_45933
atggctgtgctgatgtggcacacactggacagtgaacagtgcctgtctgatcatgccaagagggagatcgtcacaggcgacaaggccatgggctcggaaaggactctatcaagggagttcggtgataagtacaaggagtaa

SEQ ID NO: 4155 - DNA, 1923 bp, Zea mays
  Peptide Sequence Number=SeqID_45934
atggggcagtgctacgggaaggcgcgcggcgcgtcctcgcgggcggaccacgacgccgacccctcgggggcggggtcggtcgcgccgccatccccgctgccggccaacggcgcgccgctgcccgccacgcccaggcgccacaagtccggatccaccacgccggtgcaccaccaccaggcggcgacgcccggcgccgccgcctggcctagtccgtacccggccggcggcgccagcccgctccccgcgggcgtgtcgccgtcgccggcccggtccacgccccggaggttcttcaagcggcccttcccgccgccctcgcccgccaagcacatcaaggccacgctcgccaagcgcctcggcgggggcaagcccaaggagggcaccataccggaggagggcggcgcgggggccggggccggggccggcgccggcgcggccgttggtgccgccgattccgccgaggccgaccgcccgttggacaaaacgttcggcttcgccaagaactttggggccaagtacgatctcgggaaggaggtcgggaggggccactttggccacacctgctccgccgtcgtcaagaagggcgagcacaagggccatactgtcgctgtcaagatcatctccaaagctaaggtgagaggggatcatggctctagggagaggggtatgctcctcatgtcaaattccacatatgggaaatttcaaatagtagctcttgctgtccagatgacaacggccatttccattgaagatgttcgtagggaggtcaagattttgaaagccctatcagggcacgataatctcgtcagattctatgatgcatgtgaggacgccctcaatgtctacattgtcatggaattatgtgaaggtggagagttgctagacagaattttagcaagaggtgggagatatacagaagaagatgccaaagcgatcattgtacagattttgagcgtagtggccttctgtcatcttcagggagtagtgcatcgtgatttgaagccagagaattttctcttcacaacaagagatgaaagcgctcctatgaagttgattgactttggtctgtcagattttattagaccagatgaaaggctcaatgatattgttggaagtgcttattatgttgctccagaggttctacacagatcatacagtatggaagcagacatttggagtataggtgttataacatacattctgctctgtggcagtcggccattctgggcaaggacagaatctgggatcttccggtccgtattgagggctgatcccaattttgacgattcaccatggccttcagtatcggctgaggctaaggattttgtgaagagatttctgaacaaagattaccgcaaaagaatgactgctgtccaagcactgactcacccttggttacgagatgaacaaaggcaaattccattggacatactcattttcagattagttaagcagtatctccgtgctactcctcttaaaacgtttggcattaaaggtacagcactatctaaggctttaagcgaggatgaacttttgtatcttaggttgcagtttaagctgcttgaacccagagatgggttcgtgtcactcgacaactttcgggcggctctgacaagatactcaactgacgccatgagagaatcaagggttcttgagtttcagcatgcgttggaaccacttgcgtacagaaagatggactttgaagaattctgtgctgcagcaatcagcccgtaccagctggaagctttggaaaggtgggaagaaattgctggaacagcttttcagcactttgaacaagagggcaaccgagttatatcagttgaggagttagcacaggtatttggcattgggtcaacattttcagcattggcacttggagccatgtggaagatcatcaccttatttgacattgttcgttgtgcgtag

SEQ ID NO: 4156 - DNA, 678 bp, Zea mays
  Peptide Sequence Number=SeqID_45935
atgacggtccactcgagagtgcagcggaaaagcttcagctatggtgggaaggtgaatcaccaagttgacccgcacccgctgaacggtggaccactcggcgcctggaagcccacggcgggtggcggctcccgtggcggtgagaccaccgatgaggccacacagtgcgacaagggaggtgaaaatggtgccttgggaccgtggggaggtggtgaagctcaagagctaactcaattggaccctaggctactagagaggggagggagcactcactggagcggaggaagggcacggtggcgcggctcgattgagctcgggggagggtgtggggaggccgaggccggtgtgggcagttgggggagctcggggcagtctttttataggcggccggggaggggggaggagaggtggcgagcaccggcgacgcttgccgcggcggcgatgatggcacacagtggtgacgggacagctcagacaggcggtggcgacgggacggctcgggaacagtgcgcggggacgcaaggtgccaaacgagctggcgagcgtgttaatggcgaggcgatggggcgggtggtggccgacggcgaacgcaccgatagcctgatcacgggcgcggtggatggggctgacaagcagggctcgcctgccagggagagggcggtcgcgagggagcgagggtga

SEQ ID NO: 4157 - DNA, 1383 bp, Zea mays
  Peptide Sequence Number=SeqID_45936
atggcgggaggtggcggcgccgccacggcggtggcggctggggcggcggttgggatgccgtcccaggccacgctgccggtgcggcggcggtgcgagggcacggccatgggagccatcacgcttgacctccgccccgggctcggcgtcggccccttcaccctcggcatgccgatatcggatgcgtttacacagatagagcggcagccgaatatctacgacgttgtccacgtgaaatacttcgacgaggagcctctcaagctggactttgtcattagctttccggaccatggatttcacctacgctttgatccttggtcccagaggctccgtctcgtagagatttatgatgttaagagattgcaattgcgatatgcgacatctttaattggtggcccgtcaacattagccacttttgcggctgtgtatgcactctttggaccaactttccctggcatatatgacaaagagaggggaatttatacgctgttctacccaggtttatccttcgcattccctattcccagccagtatacaaatctattcactaatggagaagtggcagatttgccactggaattcccagatggtacaacccctgttacttgtcgggtttgtatatatgatagctcgacagatagcaaggttggggttggatctttgatggacaaagcaatggtacctgcactgcctgcaggcagcctgtatatggaggaggtgcacgcgaagcttggtgaagaactttggttcacaataggggggcaacatattccttttggtgcatcaccacaggatgtctggactgacttgggtcgtccttgtggtatccatcagaagcaggttttgtttggtaaagatcaatataaaaagaatgacattctctctggaatcgttggtgcattctctgctggaaagctaactatgtttgttctcccatcttgcaaggtggaccaaatggtcatacactccgcatcagaagccaggcctcggacgaccctttgtggagattacttttacaactacttctcacgtggaattgatatcttatttaatggacagacacataggataaagaagtttgttttgcatacaaacttccctggccactcagatttcaattcatataagaaatgcaactttgttatatacgacgctgaagctgaaggtacatgtcagcctaataatgcctcaaaaaattgcataacacctagtacaaaatgggaacaagtcaaggagatcctcggtgactgtggccgagctgcaatccagacacaaggctccatgaacaatccatttggatcaacttttgtatatggttatcagaatatcgctttcgaggtgatgaaaaacggatatattgcaactgtcaccctcttccaatcatga

SEQ ID NO: 4158 - DNA, 339 bp, Zea mays
  Peptide Sequence Number=SeqID_45937
atggtggcggtggatggtgaagttagtttagaggtccccactactatatcagaaaataatcacacgcctatccatggatccttaatagaaaaacaaaaggcgtcatattcaatgggggctgtgatcatcacgtgtaaactggcgagcagaaaggagagtgtgcataagagcgggggagcacgcaagcgggaaggaggcatacgagcagaagcggaaacaagggagggcaagagaaggggaagaaagaaaggaacaaagaataagggcagtgctgaagttattaaaaagttgggtgatgctactctacttttcgctgaagaaaaatttaacgaggtctaa

SEQ ID NO: 4159 - DNA, 396 bp, Zea mays
  Peptide Sequence Number=SeqID_45938
atggcgtctacgacattcggtacactatggcttgggaagagacgaccgagggagatccagggccgtgctttatgggccagagcaagtccgcgtcaggggagtaggggaaggggtaacactggcgagcggggcccaatcgtcggtgggacatccacgggtattgggctgatgcaaagaagagagggtgatggccgagtgatgggggagcgcaagtgggccgaaaacaagaaacaacaaagctgcgcactggtgccagaaatagcgcgcgaaacagctagagcacgtgctagggcgattggggaaggatctgactcgcgaaaatatgcgggagggagagtcacaaattcgagatgtgaatcttttgggaagaagatgaacaagatgttggaggcataa

SEQ ID NO: 4160 - DNA, 216 bp, Zea mays
  Peptide Sequence Number=SeqID_45939
atggcccagaagtgcccagaaacgctgttgatattcatccaccgatgtcttgaaggcccaaaggggaaacttggcgggttattggaggaagatgttgttgatgatgctgcactctccaaggctgtcatgcgggtgtacaacgaggacatctgctacaccatctgtcggtggaagtcaacgatcatcatcttcaagtcccccacatcattggtttga

SEQ ID NO: 4161 - DNA, 1464 bp, Zea mays
  Peptide Sequence Number=SeqID_45940
atggaaacgaagccaattgtcgaacataaatccctctatgaacttcttacagttaacccatatgatttcccggctgtaaccaaggacgattcaggcatgcggacgcttcccaatgggagtttgagtgaagatatgccttctagaacacggagtgggctggtcaggagaagccctactgttaagactgtaagcaaggacaaaagggctgttgagggtttgcctgatggatggcgaaaagaatacaggccaaggaagaatggttcatttctggatgtgtactacattgatccagtcagtggatatgaatttcgctcttttaaggatgtgcaccgttatcttgaaactggagatattagacagtgcgccgtgagaccaaagaagagtaccatctgcgaagttcatataatagaaagtcaaactcatgcaagtgcatcaccacaacacacgaggcctggtactgcggataagggtattcagtgtgaaatattaacttcggatggtatcatggtaccattgggggaactgattgctccatataatggaaatgatactgaacatactgtgttaccagagcctgagaacttgaaagcaattcaagggtctgacaacaagcttgagacttcggaacacgtgagtgttcaaccggtttctgcacgtaatggttcaaggcaaaccaaatctgttaaaaggaaagaacgaaatgcagaggtcaaatccaagaagcgcaaaaccagttctgctgtgactgctgttcgagcgtcgccccgcttagctgcattgaaggttcagcttgaagtgagcatcaaacatgaagatgccatggttagcataaatcatgtggaccaggtacagactatagaagagagcgccattgatcaggcacacaaaagccaatcgggctctgttgatgagatacatggtaatctggaaagcactttcagtcagttacagttgagccaagcagacactgctaatggaatgcaggctatgcaggaaaacactaccattcattcacaaccaagccaattggatactctgaatcctacacacagaagccaggagaatagtggcaatcagttacaatcggtgctcacagattcttcgattccaaaacgaaccacacaggaatgcactatagacgagccaagccagccaggcataaatcatatacacacagatcaggagttcactgggaatcaatttcggtcgaacctaccagatgacactgttatttcattaagggatattgaagaatgcacagcccactcaaagccaagcaataccgacagtactggacaaattcaggccaatgaggaaaacactgccaatcaagtacagtcgagcctaacagacacagttattccagtaccggttattcaggaatatgctactggttattcacagctgagcaaagctaacacctcaaataaaaaacaggccaatcaggaatacatagctgatcaa

SEQ ID NO: 4162 - DNA, 2457 bp, Zea mays
  Peptide Sequence Number=SeqID_45941
atggcgtttcacgtcgcgtgccccatcacttgcaggagggtgtgcgactgcgagctagggttcggcgccgcagcggcgaggaagggaggagggggtggtgctgcggcggcggtatgggcgggcacggcggcggtgctcgaggggttcctcgtggatccgtggctgctgcggccggctggggccgtggacgaggatgcggcgacggtgcaggtggaagtgccgcccctggagccggaccctgaggatggggaggacgaggcgcgccgggcggcagcgcagcgcggcgccgccgcggcagaggacctcgccaggcgcttcgagagcggtgcctacggatcgccggaagcaggagaagatgaagacgagtgggatcgagaggatcaaggaaatgctgctgtcaaggttatgtgccgtttatgcttttcaggagaaaatgagggcagcacgaaagctgccaaaatgcttccttgcaaactctgcagcaaacggtatcatagaaactgtttgaaaagctggggggaacatagagaccttttccattggagttcatgggtatgtccttcttgccgcagttgtgaggtatgccgacgtcctggtgaccccaacaagttgatgttctgtaaaaggtgtgatggcgcttatcattgttactgtcagcaaccatcacacaagaatgttactcatggaccatatttatgtccaaaacatacaaggtgccacagctgtggatctggtgtgcctggtagtggacacagcacaaggtggtttttggggtacacatgctgtgatgcgtgtggacgattgtttgtgaaaggaaactactgtccaatctgcttgaaggtttatagagactctgaagtgatacctatggtttgctgcgatgtttgtgaaaagtgggtgcatattgagtgtgatggcatcagtgaggaaaagtaccaacaattccaagctgatcaaaaccttcagtacacatgtgcagcatgccgtggtgaatgctcccagatcagagacactgaggatgcaatccgggagctttggaagaggagggatgttgccgatcatgagcttatggctactttacgggctgctgctgcactgccttctcttgaagatgtctcaccaccttatcaaaactctgatgatgagaaactcggtgcatatgcattgaaaaatgagagtagaaatactctaaagttttcattgaaaagtaacagtagtaaacctccaccagatacacctgagcaagagaagattgtttttaagagctctggatcaaataagaagccttccaaaaagaaaagtggtcaggctaataaaacagttgatggccatgatgaaatatttctggagagaaggcatgctgttaaatcatcaaatagctgtttgggagatcaaactataaatgagaatcatgacaggagcccttttaaaaatgatgataatgtctatgtttcatcttcaactcgaagtttagaaaagaatttgaaatctccatccatgaaagctgtggcaaacaatgctgatatgatacccaaagtcaagattaaaggcagtaaggtttcgagtttgcattacaaagatggtgaagaaaatactcctaagaatgacactggaaaagctaccaagttggttatccatcttggttcacggcataaaactaggagtggctctcctaagtcggaactgtccaattctcaaagagagcaagatttgggttcaatacatggagggaaaatagatgtcacaagccagctgaaaagttcaagaaacgaggtaaaagagagaagtgtaatgaagttagttagagatactggggtgcaacaaagaaatagccttttgggcgatcttggtacctcaaagaagcatgcaactgggaaaaggagcaatgctctaatttctggaatggaaaatgcaaatgaaactggtactagaaacagatcatttgcacagaaacaatctcattctagtcaggtggagaaccatggaactgctgactctcctgatagcttgaagccatcattgctcaaactcaaatttaagcgtccacattttgagcagctaaacacccaggcctctcaaccagaggagccgacctcctgggtttctcagcaggaggagcagttaaatgttgctaaaggccagagatcaaagaggaagaggccttcgatggagaaggcagatggtttggacggtataactccagccaagaggcatcagcagagcacagatgaagtgatggacgcaaactggattctacgcaagttgggcaaggatgcgatcggaaagaggattgaggtccatctaacttctgatggcaaatggcatcaagggatggtgtctaatgtcatgggtggcacactgtgtattcggttagataatggcaggtctgagaacgtggagctggggaagcaggccatccgcttgattgcttcaagatcgaagggcgggaagcgatga

SEQ ID NO: 4163 - DNA, 657 bp, Zea mays
  Peptide Sequence Number=SeqID_45942
atggccaacgggcgagggaggagggtgaggacaaggggtgggatccgggccaccatgccaacagacgaggggagggtaaggagaaggggtggggatccgggccgccgcgcgaggggagaaggggatggcggtcgacgaccggggagggtaaggagagggtgcgctaagccaccgctgacggccacaggaacctgcgggttatggcggcgagcgctttcgctgatggaggcaagcaccatggtgagcgcggcggtgagggtggtcttgtcatgctcgaatcttcccctcgttgcacgcaccaccccacgcgctaggaacgatgcagcagagatccagcacattgctaattgggcgtcgggggcgagggaaacgacgcgtgcttgtaggagggggagtgacactgagaacggccgcgggcgacgagaagtggcgggcggggagcaagtgcgcctatcgcggcggcgattcgggcaacatgcgcgggctggaagggggaagggcgcggtctctggtcgcgatgccgcggtggggaaggggatctcggtcagagcagcgcgtcgagggttttgggatgagcgctgttggtggggaggaagtcgcgcgtgggaagataagcgggggcacgcctgggtgtggacgccctcactgtcaacttaa

SEQ ID NO: 4164 - DNA, 270 bp, Zea mays
  Peptide Sequence Number=SeqID_45943
atggcggcccgtcgcccgcccggccccgctcgccctcggcgcccctccctcctgacgcccgtggcaacgaggttgatggttcttggtattgactctggtaatgctagtccactacagccaaacaggacacttgctgagtatgttgatgtgtactcacccttgatctacacaccaaaccccccaggttgtccgcattgcaaccactgctcaggagaagacgaagccgtggaaggagacttccaggagttccaagactacgatgagttctag

SEQ ID NO: 4165 - DNA, 600 bp, Zea mays
  Peptide Sequence Number=SeqID_45944
atgccaacatatgcgatgcagcctctagactttgcactgccggcgccaatgttatcgcctccacctccgccacacttccctgtgggctttgagacacctcccgcttcagttgtcgcacctagagatgtgtctggtcaagacgacgcctcgacttcttgggtgaacaacattttcaacatccagagtccagccggaggaagtggttacaactccaaccaaccagatttggaactatatgttgatgtcaaagacttgttgcaatgtgtttgtgaatgtgaggtcatgtttgagaatgtgaatgctcataagcagcagaatttccactcacgtcacttgaagcgaatgcgctcttgggctatgctccttattccggggagggaaaaggatgtcctaaacaaaaccaatagtaagaacaagatgatgggtgttgaccaagacatggaaaagataataatatcggatgactgcagtaaggttgaagctaagaagaaggtccacaccacatcccttgagaaggagaggaagaagaaacttcacaatgccagcactgggaagaacatgcaaagggatgatgacgaggagggggaggaatatgagtaa

SEQ ID NO: 4166 - DNA, 1683 bp, Zea mays
  Peptide Sequence Number=SeqID_45945
atgctcgaggcaaccttggtggtggtcgacctcgacacacggcggcgcgacctcgccctgtcggacgactatcagcaaccacattggctcgctgtctccaagtgcgagcatagtgcgtgtcccgcgggcgacgaactccagctctacagcagaggcgccatttcacaggagcaaaaacgagtggattttgaagagagaaaaaaacttgatcaacaacgagcgaaatttaagtcgcagacagctcagtatgaggatgagctaaagaggaagcgactgcaggctgaacatgaggcgcaaaggttaagaaaccaagagctcgtgaagatgcaagaggaatctgggattaggctagagcagatcaggcgggcgactgaggagcaaatccaggaacaacggaggcagacagagaggcaaagggctgatctagagcaggcgaccctttcaaagaaagccatggcagaggcggaggggagaatactagtaacaaagcaaactgaagatgtgaagaggcgattgcttttggaggagataaatgctgacagggagaagtggatccaagtgataaatacaacctttgagcatatcggaggtggtttgcgaacgatactaactgatcaaaataagctagtggtagcagtgggaggtgtaacagcacttgctgcagggatatacaccacaagggagggtgcaagagtagtctggggctatgttgatcgtattcttggtcagccatcactgataagggagtcatcacgggggaaatatccctggtctggttccctatcacgtgctacaagtaccctgactagcaaattgaagagtggaagcaacctagggaaggacgggaatgggtttggtgatgttattctaaatccttctctccagaagagagtgaagcagcttgctaatgccacagccaatacgaaacttcatcaagctcctttcaggaacatgcttttctatgggcctcctggcacagggaaaaccatggcagcacgagaactagctcgcaattctggattagattatgcactaatgactggtggagatgttgcaccattaggatcacaagcagtcaccaagatccatcagttgtttgactgggcgaagaaatctaacaggggtttgctcctcttcatagatgaagcagatgctttcttgtgcgaacgaaacaaaacttacatgagcgaagctcaaaggagtgccctgaacgctctcctcttccgcacaggcgaccagtccaaggacatcgtccttgcgcttgccaccaacaggcctggcgatctcgactcggccgtcgccgaccgtatcgacgaggtcctggaattccccctgcccggggaagacgagcggttcaagctcctgaagctatacctggacaagtacgtcatcagagccggcgacaagcgcgagaagagctggctccgtttcttccgccgccagccccagaagatcgtggtgaagggcgtcaccgacgacctgatccgcgaggcggcggccaagacccagggcttctccggacgagagatagccaagatgatggccagcgtccaggcggctgtctacgggagcaaggactgcgagctaacccctggcctgttccgtgaggtcgtggactacaaggtcgctgagcaccagcaacggagaagattagccggtgaggagccaaagcaggatgcctag

SEQ ID NO: 4167 - DNA, 399 bp, Zea mays
  Peptide Sequence Number=SeqID_45946
atgtttcagctgatgatcaagtgggaaacctattgggcgttgccagttgtagtgatgctcaacatgtaccataatctattgagagtgaacatccagaacactatcaggaaaaaagatgtaaatgctgaaaataacttggagatcggttctaaaaataacttggaacaaatatgcagtctgaggccccaagaatctaataataatctgaagcgtaaagtcaatcaagagctcgaggaattggatgagtcgaaaaaagagcagtactggaaaattcttgttctgtctccacaggttggcgtaggcagacttgaggatagcatcactgtcggggatggggcgatctcaggagggaggggctgcaatgttttggctgacaatgggttgaagaacacagggtga

SEQ ID NO: 4168 - DNA, 486 bp, Zea mays
  Peptide Sequence Number=SeqID_45947
atgtggaggtcccggttcgtgcggagacacagcttggcggctgtcgtcccaagccggggccaagacgcgcggcgaagaagctctatcttcctcggtcagcgcacacgaacggagaattcgcctgacgcgcagcgcacgacccaggcggagcgccctggcctgccagcgagaccccaccgacggcgcgattttcttcctcccgggacaacgaccacaccaagcagcccagactcctttggattcggtttggatggaggagcaaggaggacggctgtcgggttttatacctgcattttccccaaccgaatgcgccgggatcaacggatgcgtcccccaggctcggcgaaatccgttgcgccatccacatttcgcggcgggcacatcggtcgatcgttgaagaggaagaagctgtccaccgggacccacatggcagcggggacagggagacaagtccgcacgctggagcagtctcgcccaagcgcttag

SEQ ID NO: 4169 - DNA, 255 bp, Zea mays
  Peptide Sequence Number=SeqID_45948
atgtctagttcggccacgctcgaccctgtgctcggtgtcgtggggttcgccgggggcgttgccagatgccttttcccagggtactcgctgatcgttgggcctcggagaccagagatcattatccccgacagggagacacatcaaaatgttagcggtgactctatgctacctagggatgttccgggtggcctaccgatcccggagcaccctagaactctcctccctgatggggtccctctcgaggacgagttatag

SEQ ID NO: 4170 - DNA, 348 bp, Zea mays
  Peptide Sequence Number=SeqID_45949
atggccgcttcctgccgctcccgcgtcgctctccggcgcctgccgctcgccgaggcttgtggctctcgtcccgtcgcgcgccagttccccgtgccgaaaagcacacgtcctctgtttctggatcctgatacgcagacggcagacgcagagtatgcaaaggaagattttgctatcgtcgtgttgtgtcagcgcctttcctcaccaccgacgaagcctggccgcgcgtttcgctccatcgtcgtttttctcctctatgctggttattccaggcttcccacggagcaggagtacgtagtgtggactgtggcaagagaagtcgaactattcactgaagccaacaagaagtga

SEQ ID NO: 4171 - DNA, 771 bp, Zea mays
  Peptide Sequence Number=SeqID_45950
atgtggggtcctacgatacagctgtcggcgccgtaccggtcccaggcgccccccccggaggcggtccgccgtcaagctgccgcccccaccctcggcccagcagcagccgcggcgtggcgtcctcgccggcctccaccgcctgccgctgcggccgccggcccgagctcgtgcagcgacgacgacgaatacgtgaagaaaccgacggctgccgtccgcgcccacgacaagctctacgcccaagtgatcacctccgccacggacatcgtcatcgacctgcggaccaaaaggaggcccgaaaagacgctcccgccgatcatgaccaagaccagaccggcgaagcccgacgtattccggctcgaggacaagcacgtcgacgtcctcgcacacgcggcccgacgagcctcacctgtccccgaacagggcaagctcagaccgaggcggtccgtgtcgtcggcgcgccgcctgaaaacgcgcgcgaacactccgcgcttagcatcgtccatgaagtgcaagtcgcccacgacggccacgccgccgaccaagccgccgcctctggctgagagcttcgcggtggtcaagtcgtcgcgggacccgaggcgggacttccgggagtccatggaggagatgatcgtcgagaacgggatccgcaccgccaccgacctcgaggacctcctcgcgtgctacctggccctcaacgccgccgagtaccacgacctcatcgtcgaggtgttcgagcatatctgggtcacactctctgacgccaagctgtag

SEQ ID NO: 4172 - DNA, 192 bp, Zea mays
  Peptide Sequence Number=SeqID_45951
atgtgcatagtttatctggccagaggcgattttgacggcactgttgagaaggtggccttggaattacgtatcacttatcaaaacttcgtactttactgtgttcagatattttttcagtccaacacatacgatggagagaagggcctgaaatatatggttttctactttgttgtcctcaagttagaagtttag

SEQ ID NO: 4173 - DNA, 285 bp, Zea mays
  Peptide Sequence Number=SeqID_45952
atgacgacggcggttctcagcccctacggaagcaaggagacatcagcaaggtcccggcaaccccgcattgttctcattggtgaaattacagcatgtttgcaacacccatcccctcatggttcagcgaagttccatgccgacatggacaacacattgaaaacaacagagaagaaagggtctagcaacaactttggtcctaatggaaaggccatctccgagagggatccaatgccggtagggaaacaatctctgaacgcgcgagaagccgaaaggaatgatcggtag

SEQ ID NO: 4174 - DNA, 159 bp, Zea mays
  Peptide Sequence Number=SeqID_45953
atgatgttgaggggtgatatattcaatgagggtgccccttggcctattctgcatggaatcctcctccgagacaagcctattgtgaaggtagaggttctaaggaagaataagaagagaaggctacgacgcttttcaagcatgtgtgtctgttcagtctga

SEQ ID NO: 4175 - DNA, 321 bp, Zea mays
  Peptide Sequence Number=SeqID_45954
atggggccgcgccacaagttccggctgtcagacatgatcccgaacgcgtggttcttcaagctccgggacatgcgcgcgcggggcgggggcggcgccgcggccagcccccgcgtggccgcgcaagccgcgtcgcgcacgcccccgaccacgccgaggacggccacggagcgttcgcgccgccgccgccgatccgggtcccacacagggcggcccactactacagtcggaggggggactcgtcctggactcgcgctggcccgggggctccgctcccgcttctctttccgcagcttcgctctcgacgttcaggagggtaaataa

SEQ ID NO: 4176 - DNA, 276 bp, Zea mays
  Peptide Sequence Number=SeqID_45955
atggccggcaccgacgcgtggagcagcaacggctccatctctgttgcccctcggacgccagcatcatccgtcgagctgccatcgctcgccttccttgcgctcggacccgcaatcgatccaaccgccgctcacctccggtccgctccgccgtgtccagccgttgccggcgagccgtggccaggacggctggccgatccattcctgtgtcctctcgtgaggaagaagaagacccccttttgggtctatggcaggtgggcccaggttggcatgttttag

SEQ ID NO: 4177 - DNA, 216 bp, Zea mays
  Peptide Sequence Number=SeqID_45956
atggatccgctgcggtgctccctgcgtcctactaatgtcccgccatcgatgggaggcaatagagggttgcctggccacgtggagtatcgacatgacatcgattggccggaagggcccttggggcactatgaattgctcaccggacttactccttccccgtggtccgcctcctaccgcgaccggctatgtacctgccgtttctgcccgaaaggttaa

SEQ ID NO: 4178 - DNA, 129 bp, Zea mays
  Peptide Sequence Number=SeqID_45957
atggccaggacgactctgaccaccactgatcgccacccgaccatcgacgagttcgccaggacccccccgatctctgtgaccacttcaccggagttagaccgccgcatacttagaaaaagcataacttaa

SEQ ID NO: 4179 - DNA, 3963 bp, Zea mays
  Peptide Sequence Number=SeqID_45958
atggggatagaggattaccatgtcatcgacctcgtcggggagggctccttcggcaaggtttacaagggcaggcgcaagtacactcggcagacggtcgccatgaagttcattcttaagcacgggaagaccgataaggatatccacaaccttaggcaggagattgagatcctaaggaaactcaaacatgagaacataattgaaatgatcgatgcctttgaaacccctcaggagttttgtgttgtcacagagtttgctcagggagaactgtttgaggtgctcgaggatgataaatgccttccagaagaacaagttcaggcaattgctaagcagctggtgaaagcattgtattacttgcattccaatagaattattcaccgggatatgaaacctcagaacatccttatcgggaaaggatctattgtaaagctttgtgacttcgggtttgctcgtgctatgtcagctaacactgttgtattacgctccattaaagggacacctttatatatggctccagaactggtgagggaacagccatataaccatacagcagatttatggtcccttggggtcattttatatgaattgtttgttggacagccccccttttatacaaattcggtctatgcacttatccggcacattgtcaaggatcctgtaaaatatccagataatatgagcacaaactttaagagcttcctgaagggtttactcaacaaggtgcctcaaagtagattaacctggccagcattgttggagcacccatttgtcaaagatgattcaatgggatcggcagctgagtctcgacccgcgccttttgaagctagagggtctgaagatactcagaaagcagaagaaacacaatcaaggaaccaaccttccccagccggcccccaaagtaggattactgctaccaatagggaaaatgcttctgataaaccaaaaggaaacagaaaactggatgaccctatgcaagcaactcaggaccgccatggttcacctactgagtgtacggctttggataaactggaaaaagcctcacaaacagtagaaggtgcaagcagcattgttcaagatattgaagcactgtcaaccattctcacccctatcaaaatttggcttactaatactccaagttcaaccagggaactcaacattgatggagcaaatcagtcgctcagaattattaaaaatttgattgatgctggttcatgccaatcttatgctgcaattgatataagtctgcttcttgagtttacaaatctcattatcaaaactaagctttcaaatgcttatggacttgtggtgaagtgcctggcaattgcacggaaactacttgatacaagtgatgaagttattttaaattcttatgacagacactggttatccctatatgaactttattcacagatcctggtttctacagtggattcatctggaagaatatctcgtgagtcaactgcctgccttgctttgatgttatctcgggttatctctggcttgaaagctagcatgtcatctgaagacccaaagccagtggaagaaagtcttctcaagatcattgatcatgcgaggacatcacaactactagagctcttgtgtgaatgtctgatggcttcaggttcagacacactatctggttctacgaacatggtacctgctgcttgtgaggcatgcaaggctatttggtacctagctcatgctgttgacattatgtccattggtgcacaccatttttcatttcccttagctaattcatggcgacagatacattcaatgcaagagcaaagttcaaaggcagattcaaactctaccaatctgattaacatatttgtcaaatcatttctcgcctcacgaccaattcaggttgcagtttaccactgcttgcataatggtctagaatcagctattcatgcttgtcttcagcttatctcaagggcctgtcttcagaatgtgactttctgtgccattatgtgtcgtccatggaattcaccatctgatgttgacgtagtagaatatggtggagatggaacaatagtatctgacatgttttccttattgtcactgtgtggatcatatttaaataaggaatccaggcagaatagcaatcagaaatgcaaactatccaaccctcatgctcttgtagtgcactgctgccttgcactagcgacaatagctgcatgtttgaaatcagagggaggatcttcagcatcacttgtcctaacaagttcccagaaaaaacagcggtcccggctctcagttcttgcacacctctcatcagttgatgatacagtgaagagttgcctgcagccacactgtgcatcagcaatgcttgcgctctcatcacttgtttctcttgaaaatggtggacaaaccagatcgtctctttgtgaaactgcccttgctttgtttcctcgtatggcaacactgcacacactgctgaagctttggttatctgatggaagcgaggcactgtgtcgatataatgctggtcttctgaatctttttggactccgcgatggaagtattggactgctggagacaaggttgaaatggggcggaccattggccattgaacaagcctgctcagttggcatcccacagctcctaattcgcttgcttactgatggtttcataaaagaggtttctgacggaaaagatggttcgacgagccgcagtgggttgtctccattgggagttgtctggactctttctgctttatctcaatgccttcctggtggagtttttcgtgaaattttgtacagaagggaacagttaaagctcttaaccgacttgttgtctgatacacatcttaaggcattggccgcctggacgggtcttggtggtgggaagaggggagttcgggaactgataaactcagtcgttgatatcttggcatttccatttgttgcagtgcagagttctccaaacatgccgtcagcatctgcatccatcaatagtggtttcctgcttaatgttgcatcacccggtgggcgcattggtactgagaataaggaaatgctcaaaactatagagcaaaacatgcctcagtacattcaagttctactagaggttggaattcctggatgtatgctgcgttgtcttgactatgttgacatggaagatctaggtaggcccttggccattgtggccaaaatggcaggctacaggccacttgctttgcagcttcataaagaaggtcttctagatccaagtagagtagcagcattactcgagggtcctatagcaaaggagactttgcttgatttcctcatgattatttctgaccttgctcgcatgtcgaaggacttttatgtgcccattgataaagctggacttgttgttcttctgaagaacttcttatcaaatggagaccctgatataagggcaaaagcttgtagtgccattggcaacatgtgccgccatagctcctacttttatggcccacttgcagcaaataaggtgatccagctcgtggttgacaggtgttctgatcctgacaagcgcacacgaaagtttgcatgttttgccgttggcaatgctgcttatcataatgatatgctgtatgaagaattgagacggtccatacctcaactcaccactttacttcttggtcctgaggaggataaaaccaaaggcaacgctgcaggcgcgctcagtaatctagtgaggaactcagacatgctttgcgaagacattgtctcccaaggcgcaattcaggcgctgctgaagatggtcggcagttactctactgttgccctgagccccagcagacgagatgctctaaccgaatctccgctaagaatcgtgctcttcgccctgcgcaagatgtgcgaccacgccatctgcaggaacttcctacggtcttcggagctgctccccgtcatcgtccacctccggcagtcacctgatccaacgatctccgagtatgcttctgccatcgcgaccagagtgagccaggcctga

SEQ ID NO: 4180 - DNA, 1254 bp, Zea mays
  Peptide Sequence Number=SeqID_45959
atggcggcgccggcgccggcgttgatgcagctcaaggtgcggatcccggagaacgaggaggtggctcgctgcctccacgagaagcggctgtctatgagggagcagccggccggtttcaaggagcacctggaccgcacgttcgccaaagcctaccgcaatgtctgcgccgccaatgagcccatccggactctcaaggagttctccaaaatcaatggtgtaggaccatggctcatacgctgtatgaaaggcttctttgcagagtccaagcaggattctccagcgaaaggcaagggacctccttccaacttaaattgtcagaatgctcagttttcttcatcccaaggaacattggagctgcaaccatctggtaaaacgggttctactgacttcaatatgctagacaaggatgttgtatcaatgaacaattgtatactggctatgccacctcgtcaatcaagtgaagagtttcttgaagcttacgaggttgttctgatattggatgatcgtgagaattttgggtattgttcaagaaaagttgcttcaaaaaaggttgctgataacattggctcgcagtttaacgtacctgtagaggttaaacgtttgcctgtaggtgatggcatatggatcgctcgtcataaaaaaaattttacagaatatgttctagattttattgttgaaaggaaaaatgttgcagatttaggtagttcaattagagacaatcgatacaaagatcagaaaacaaggctgcagagatgcgggttaaggaagcttatgtatcttgtcgaaggtgatccaaatacttcaaaaggatcagcagcaagcataaaaacagcctgctttaccactgagattttcgaaggatttgatgttctgcgtaccaatgggtatactgataccatgagaacatatggttatcttacactctcgataatggattactacagcacaaatttctgcagacttgataaaagtgcctgtatatgcccaacctatgatgagtttgagagacactgtcattgccttcagaaaagaacagtgccacaagtaacagagaaagttgcattaactgttatagagttctatccaactcttttctcactcgcaagggcgtactccatgcttgaaggtgatatccatgcccaagaggagatgttgaagaacaagagcaagatgataaatgcaggggctagtagaaatatcttcaggcttgtctggggtgatggatgtcaatcttcagggttaattttggactag

SEQ ID NO: 4181 - DNA, 255 bp, Zea mays
  Peptide Sequence Number=SeqID_45960
atgggtttcatcatggagttcgcagagaacttgatcctccgtttgatggaggacccggacaagcgtgaccaggttcggcgggagcatgtctacaagacgaaggagcgcttcccgctgcgccccaacggcttctggaccttcgaccgcttcaactcgcagctctcctgggacccgcagatcaaccaggctgccggccaccgggacccttacgacgacctcatcacccgccactccggctccccgccgtcttcctaa

SEQ ID NO: 4182 - DNA, 450 bp, Zea mays
  Peptide Sequence Number=SeqID_45961
atgggcaagagtaacaaacgcaagcgcgagccgactcctccatcggaggacttcggcgactcggaatactcggaggaggagttctcctccgagtccaaggggtctccggctcccgtctctcccccggcgtcgtctgacgattcagacgactcccaggggtttgccgcggaggtctggacttatatccgggtcgtcgagcgctccgggctcgagggctcggatgagtcggagtactcctcgggcgaggaggactcttcggactcgtccgaggagggcggtggcggcgatggcggagatgacgacgacgatgatggaggcgacggtgacgacgacgacgatggcggtgacggcggcagcaggggcggcaacggcggcagcaagggcggcaacgacgacagcaggggcggcaacggcggcaacagcaagggcagcaacagggccagtggctag

SEQ ID NO: 4183 - DNA, 216 bp, Zea mays
  Peptide Sequence Number=SeqID_45962
atggcgcgcgccatcaccgtcgtctcttgtcctcatccctcgccgatgactagagatggcaacgggcatgagatatccgcctgcccacggatactaaacccgatgggcacggatacggatgttgccgatgaaaggtttaacagcttctggtcatgtcttgaagacaatgaagaagaaatgaaagaatcttgcatcactatggcggactccgactaa

SEQ ID NO: 4184 - DNA, 498 bp, Zea mays
  Peptide Sequence Number=SeqID_45963
atggaaaatgtaccaaaccgtttggtgacggcgccggtattgcacgccaaaataaggcctagtttggatactttgggattgaagaagctccgcctcgcccgaccccagggctcggcccccgtctcggcctcggctccggaagacgacgaactccgcctcgcccgacctagggctcggactcggccttggctccagaagacgacgaactccgcctcgcccgaccctagggctcggactcggcctcggctccagaagacgacgaactccgcctcgcccgaccctagggctcggactcggcctcggctccagaagacgacggactccgcctcgcccgacccagggctcagactcggcctcggctctggaagacaacggactccgcctcgcccgaccccaaggctcggactcaacctcgacctcggaggaatcgccacctcgccccaactcgggttcggaccagccacgtcgccaggagggccatcattaccctacccctag

SEQ ID NO: 4185 - DNA, 342 bp, Zea mays
  Peptide Sequence Number=SeqID_45964
atggcaacagcggtcagcggcaggtggacgcgcgtccgcacgctgggccgcggcgcgtcgggcgcggtggtgtcgctcgccgccgacgccgcctctggcgcgctcttcgcggtgaagtccgcccccgcgtgggccgcgggagcagctgcggcgcgaggggagcatcctgtcgtccctccggtccccgaaggggtcccctgcctcggccaccgccccgcggcgacggcggggggagctgctcctcgagatcgcgcccgggggtcgctcgcggacgtggcggctagagcgaggcggttaatcgacgatatcctgccatctcgagatcgcatggacatttactga

SEQ ID NO: 4186 - DNA, 303 bp, Zea mays
  Peptide Sequence Number=SeqID_45965
atggcgtgggagtgggaatcccgtattcagccgcttggcccaacagagatgatagaggaggtcaattcttcaaatgttttcaattcggcgatgccgatgctcctgttggaaacacggatgctacgcgcttccttcatttcaattataagtattttacatgagcatgaggccatgacactcaaggcgccgcattcagtacgcacagattcatggccaaagttttgttccaccaactacatgcatgttttcactcaagtcaagcccaacgtggcgttgaaaagaaacttgagacgtagtacgtag

SEQ ID NO: 4187 - DNA, 878 bp, Zea mays
  Peptide Sequence Number=SeqID_45966
atggagcggcgcgccgtgagattgcccgtgaagaaggcacgggcgctgctggtatgcgggcgacgtggctttcgctcagaggctgccgcgccgcgcgcacagaagcaaacgcttacgcacgcggctatttccctccgccacccctcggtttccgcacgtgttccacgcccccgcgctgcccgtagaaatagaccttcccctcccggcctcccctcgccaccacagtgccagacgcacgcaagcacaccacacgccctcacaactcgcatccatcgggcctcttccactccacatcgggagccgcaagcagaagcagaaccaatgacgacgacgaccacggcgaagcagctccggcgcgtgcgcacgctcggccgcggcgcgtcgggcgccgtggtgtggctggcctccgacgaggcctcgggcgagctggtggcggtcaagtcggcgcgcgccgccggggccgcggcgcagctgcagcgcgagggccgcgtcctccggggcctctcgtcgccgcacatcgtgccctgcctcggctcccgcgccgcggcgggcggcgagtaccagctcctgctggagttcgcgccgggcgggtcgctggccgacgaggccgccaggagcggcgggggccgcctcgcggagcgcgccatcggcgcctacgccggggacgtggcgcgcgggctggcgtacctccacggccggtcgctcgtgcacggggacgtcaaggcccggaacgtggtcatcggcggcgacgggcgcgccaggctgaccgacttcgggtgctcgaggccggccggcgggtcgacgccccccgtcgggggcaccctttcgttcttgcgcccgaggtggcgcgcggccaggagcagggccccgccgccgac

SEQ ID NO: 4188 - DNA, 597 bp, Zea mays
  Peptide Sequence Number=SeqID_45967
atggcccaaaagctagctagatgcctagatcttcctactgttttccgagggcaaaggagcacgtcggggcttcgaccacggcgtcgtgacgacaagggagaagatcacgacgcgagcgaacttgacgtggagcagcgtacgaaggagaagcgacactcgacacagcttcagatgtcaggcgcacatggctcgaccacgcaacagttagtgatgatgacgaacttggacgatggcaacggctttccagcgtcgcgaacagagggtgcacatgaacagcgagctcggcgagactttcggcgtcgcgaacggagggcgtacgtcgagctggcagcaagtaacatgcgatgcaaaaaggagaagcgagcaggggatatggctcggttgaggtgggggaagaagaccgtgatcttgcattttatacagcagagagaggtgagggcgtcgagaaaagagatcgctgctgccattaatggcgtgcaagagaagaaaaagtctgatgatcgtggaaacaaatattggaaagataaaaggaattcacgtacaagggaagtagatctaaagagggggagactttttgcatcaaattcagtagtataa

SEQ ID NO: 4189 - DNA, 264 bp, Zea mays
  Peptide Sequence Number=SeqID_45968
atgggggttggtgggctgaggtggcgcctgcggcccctggaccccgcatcccagcgcctccgcccatgcctagatctcgtcatcgccacacagcttctcctccaacttggggaccacctccccaccatcttcacctccattgaatttgagtatgacgacaaggtgctcctctccatcgacaacgaggtgctcaaggtcgtcgtcacccagttcctcaccggagttggcctcgctcagctccaccacgctcctgtgcctgcgtag

SEQ ID NO: 4190 - DNA, 483 bp, Zea mays
  Peptide Sequence Number=SeqID_45969
atgacggcggccgcaccctcaaggcggtgccatcaccggcgagtcttccaggagcgattcccggccccaaactctaatccgaaggcacatgcgcaaagcggagatgaaggcgaacatgcgaggcacggactcaccggctgcgatgctgcgtggaggtctgaccgcggcaagaagcgatccgcggcggcgcttgagtcgatggcgagaaattacagccgcaccgcgggtccctgcgcccggttaggcccatgcacgcggtataccctcctgttaggtcgcctggagccgcactacagagcttggggagcggcaatggtggtgcaccagcggagcaatggctccttcacgcaacggtcggctgcaaaagccgctgactccgtgaacagtgaagaacagtgcgtgcagaagtcagagcagtcgccagaggcacaccgaacagtgaacactacctgttcggaaggcatacttcaggacaggtggtag

SEQ ID NO: 4191 - DNA, 111 bp, Zea mays
  Peptide Sequence Number=SeqID_45970
atggcgcacagtggtggcgacgggatagcttgggcagacggtggtgacgggatggctcggcacaggcgcaaggcgccaatttggctgttggccaatagaaaccagacctga

SEQ ID NO: 4192 - DNA, 435 bp, Zea mays
  Peptide Sequence Number=SeqID_45971
atggatattctggaccagggtagaatagcacaacgaacaatcaccccgacacctccgccctcaaagggggacaagaagaagcacaccgctgcacttgctcctttcttccccaacatcctcttcattcaggggagactggagtcatcacccatctctgacgatgaacccaccgtgctaggaagatttcaaacaatgagaaaccgtatccctgaggttgttgaggcggctgtgatcgaagacttctatcagggatccaacgatccgattttcgctcaagccatacttcaaaaagcacctgccacctctgaacaattgttctgggaggtggacgtctacatcacggcggatgagcgggctcaagacctcattggaggcacaaagctcgtaccactagcaccacgaagggacacaaaccagcaaccagacaaacgctag

SEQ ID NO: 4193 - DNA, 747 bp, Zea mays
  Peptide Sequence Number=SeqID_45972
atgtccccgggcgaggagctcctgccgggccgcacctactttgtgctccccgccgcgcgcctcccctgcctcaaggcgctcacgcccgccacgctcgccgcgctgtcgcaatcgcacggcagaaagaagcagcagcctatcttcgcggtcgcggggtgcccgttcgagcacgtcaagggcgcccacggcggcgccccgctcatcagggtcctcccggagttcatcgagaagctcatcaccgcctgcgacgccggcgcgaacgcgagcgccaacaaggacacggcggccaagcaggccgcggagctgtgcagcacgcccgagctgaagcggcattacgcgcagctcgtcggggccggcaggagccgcccgtggtcgcccaggctggagaccatcgccgagcgcggaagaatgacgaaggacgaacagcaaaatgctgcaaagcgcggccatggccgccgccgcgtgcgggagaccaggaaatggtcgcacacgcgtggtagggaggaactcggcgcgtcgagcgcagtctcatcgtcttctccggttgaccggaccgcgtccgcgtcccgccgtctgacgtctcttggtgtagtggggttggggtggtcggcgtcggggaaggaaactgcgcggaaagagagcatcggacaggtgggctgggccatcttatgcgggcgaatggtctggtccacgggccgtgaacgaacgctggcgctcgcgcacggctccggcaggccgcagctttga

SEQ ID NO: 4194 - DNA, 477 bp, Zea mays
  Peptide Sequence Number=SeqID_45973
atgtccggtgcaccagaggactccaactcaaactcgtcgccttcgggaaattccagacgcaactccgctataaatcaccggactgtccggtgtacaccggacagtgtccggtgctccaaggaagagcggcctccggaactcgccagtctcgggaattcgcttcggctgctccgctataattcaccggacatgtccggtgtaactgcggggcaacggctccttctggcgccaacggctacctgcggcgcattaaatgcgcgccagcgcgcgcagaggtcaggcacgcccatgctggcgcaccggacactctacagtacatgtccggtgcgccaccggacatccaggcgggcccagaagacagagctccaacggtcggaacccaacagctttggtgacgtggctggggcaccggactgtccggtgtgcaccggactgtccggtgcaccatacgacagccagcctgcaccaaacggctag

SEQ ID NO: 4195 - DNA, 909 bp, Zea mays
  Peptide Sequence Number=SeqID_45974
atggaccaccagatgttcgacgaccccttcgggagcagcggcatctcgtcgctggaggcggacatcttctccgccgccgccggcagccagctgccgtcgccgccgtggccggacttcgacgacgactacgacatccccgacctctccgcgctgcccgccaacgccgccacctcctcgggcggcggctacggctccggcggatccggcggacaccgcaagctcagccacaacgcgtacgagcgtgaccgacggaagcagctcaacgacctctactcctcgctccgctccctcctcccggacgctgaccacaccaagaagctgagcatccccaccaccgtgtcccgagtcctcaagtacatcccggagctgcagaagcaggtggacaacctggagaggaggaagcgggagctgaccaacgccaactgcaagccgggagttctcaacaccagcgagatcgtaactactcccattgtttctgctacttgcctcaacgacacggagatcatggttcaggtcagcctgcacagcaatgtggcagccacggctctccctctctccaagtgcataaaggtgctggaggacgcaggccttcacctcatcagctcatcaacctactccacctttgggaacaagacattctatagcctccatcttcaggttcgcaccctactccagtgtattgttgatcgctatattgcttggggcgtgttacaacaagtgtgctcatgtgggaagaaggaggggaccctccacttttatatctcaaggccatactcttgttatggcgtcatacgttactcaggctcctgtagcgagttcgtggccgacgtccccgcgatggccccacgtcgtccttccgtgcacatggatttgcctgctcagtatggcaccccatcctgtcgcttctga

SEQ ID NO: 4196 - DNA, 510 bp, Zea mays
  Peptide Sequence Number=SeqID_45975
atggctcggggcaggcgcaaggcgccaattgggctggtggcgagtaatggcgaggggatgtggcggagcggtggccagcgctcagtcaccgagaacaggaaacgtgatatcaggcaaaatgctagacccgatgaaagcgaagaagaagaggaggaggaggaggttgggactgatgaaagcacaactaaccctggtgaaggtggttgtgcagacgacaatgatcctagccacagggaaggtggaggtgatgttgcaacatatggtgctagggacgagcaagtgactgaggagcctggagcacagcaggtggaaaatactgagcaggagcttgttaaaggcaagttggaccgggagtccatctccttgctcactcatcttctgctccggcgcgagctccactcctcccatcccatgggcgacgtgacattaatgggggcgtccactgaccaggacacaagcttctcaaataagcaagccaagttgctcaagacgcagaagttcgcgtcctag

SEQ ID NO: 4197 - DNA, 324 bp, Zea mays
  Peptide Sequence Number=SeqID_45976
atgcgggccctccaggtcagtcgcgctcgcgtcctctctccgttacgccggccattggggcccgcgtgccagccactagctatcgtgtgtgcacattgcctctgctcggactggctcgctgccaggtggggatctcgcgccagtgaccatgggcgaagtcatgtatatcttctcgcaaacggcttcgccgaacgttcacgccgcgagaaccctctccgcattgagcgtccacgaagtctgtacctcgagactgcaccgtcggggcggcgcggtgactgctcctcgatggttgtgggagttaccggaggcgaggggcgtttctag

SEQ ID NO: 4198 - DNA, 765 bp, Zea mays
  Peptide Sequence Number=SeqID_45977
atggcgcctcccattgtcgtggctggtctgcgccctaggttgggcgaggtggaagctcctccgaagccgaggtcgagtctgtcttccgtggccgaggccgagtccgagcccctggtcgggcgaggcggaggtcgtcggctaaggccagggcggagtccgagccctggggtcgggcgaagcggagttcgtcgtcttctggggctgagcccgagtccgagccctgggtcgggcggagcggagttcgccgtcttccgggacttagcccgagtccgagccctgggtcgggcggagcggagttcgccgtcttctggggctgagcctgagttcgagccctggatcgggcggagcggagttcgtcgtcttccgggacttagcccgagtccgagccctaggtcgggcggagcggagtttcctgtggtgccttctgcaggacctgactgcctgtcagcctcactctgtcaagtggcactgcagtcggcgcgacgcaggcggcgctgtccttctgtcagtggactgtccggtgtgccaccggactgtttggtgcaccagcggagcaatgactccttcgcgcaacgatcaactgcaaaagccgctgactccgtgaacattgaagaacagtgcgcgcagagtcagagcgcagaagtcagaggcgcaccggacactgaacagtgcctgtttgatgtgacaccagactgtccggtgccactagaagacaaagcctccaacaatcacctgctcctgaaccctaacagttgggtgacgtag

SEQ ID NO: 4199 - DNA, 381 bp, Zea mays
  Peptide Sequence Number=SeqID_45978
atggacaagggcagcgtcgtcgtgcccccggcccctgccgccgccgccgcgaagaaggccaagcgcttcgagatcaagaagtggaacgccgtctctctctgggcctgggacatcgtggtggacaactgcgccatctgccgcaaccacatcatggacctttgcatcgagtgccaggcgaaccaggcgagcgccaccagcgaggagtgcaccgtcgcttggggaatttgcaaccatgcattccacttccactgtatcagccgttggctaaagacccgtcaaacaacagtgagtgggagttccagaagtatggtcactagagagaatggcttcggcgtggagttgcttcatcgtttctcgtcgtttagcagtagtggttactga

SEQ ID NO: 4200 - DNA, 300 bp, Zea mays
  Peptide Sequence Number=SeqID_45979
atggagtacaacgtgcttgctatcttaatccttcggcgagtttatagagctcatgaagagcaacagattgtaagaaaggggatcaggggagtacttgaaaagagctcaggtgttgtcccgcactcaatagctgcctgttctccttgcattgtagaatttgcggtaaaacttttggcgcaacacaatgagactgtgtttaatgagaaggtggtcaatttcatgcctgatgttactgtgatatcaatggacaactacaatgacacaacttgcatagtcgatggcaattttgatggtagttga

SEQ ID NO: 4201 - DNA, 546 bp, Zea mays
  Peptide Sequence Number=SeqID_45980
atgggcagaacggaggcacagggatgctcgcggccatggctagagctggcgtgcggggggggggagtgcgaagctatgccgggtggacatggccatggtggagtagcgactggaacgacttgccacaagggaaaggaggaggggaggcgcccgcgtcgagggactagggagaggatgggcgcatggcttacctgggcgtcgatgtcgcgcgagctgtggatggtgctccgggtcccaggtgatggttgttgcgcgtgtgaggaggggaaggagcaaaggcgctgggcggggtggttggcaacgtgggcgagatgggtgggggaaggcggtttggagaagatgaataggagatggggcgacctggtgggtggggcccacacgcaggcggcggcgctgggtggctccctggctagagcgtgcggtgctcagctcgagcactgggtcgcgcgaggccgaacgggccggcggggcaggcctgggtggggagcatgggaggggatattcacgactactgatgcaattcttgagggtctcttggacttgtga

SEQ ID NO: 4202 - DNA, 1236 bp, Zea mays
  Peptide Sequence Number=SeqID_45981
atgggcactactgccgcgcatcgtcgtcgaccgggcagtatcgtcgtcctctcaccatccgccgtcgcgctcgcgctgctgttcttgtcgacgacccttcgcctcgccgccgccgtccagccgtacggcggcggcggaccctgcgcgctggccgtggcgccgctcggctacccttgtgaagagcaccaggtgacgacggcggacgggtacatcctgagcctgcaaaggatcccgagtggcgggcgtggcgggcacggcggcggtgccggtgccggtgcctcgtcctcgcgcgcggggcagccggtgctcctgcagcacggggtcctcgtggagtcgctgccgttcatcctcgccgaccgcggcttcgacgtctggatcgccaacaacaggggcacgcgctggagccgccgccacgtctcgctcgacccctccagccggctctactggaactggtcctgggatgacctggtagtcaacgacctgccggccatggtcgacttcgtcgtcaaacagaccggccagaagcctcactacgtcggacactccatggggacgctggtggcgctggcggccttctcggagggccgggtggtgagccagctgaaatccgcggcgctgctcacgccggtggcctacctcgcccacatcaccacccccatcggcatcctgctggccaaggcgttcgtcggcgaggtgctctcggacttcctcggcatggccgagttcgacccgctagcgccgccggtgacgaacctcatcagggcgttctgccgccgcccgggcatgagctgctacgacctcgtcggctccatcaccggcaagaactactgcctcaacagctccgccgtcgacgtcttcctcaagtacgagccccagccgacctccaccaaaaccatggtccacttcgctcaaaccgtgcgcgacggcgtgctgaccaagtacgactacgtgctgccggagcggaacatcgccagctacggccaggccgagccgccggtgtaccggatgtccggcatcccgccgagcttcccgctcttcctcagctacggcggccgggactcgctcgccgaccccgccgacgtgcgcctcctcctgcaggacctccggggccacgaccaggacaagctcacggtgcagtacctggacaagttcgcgcacctcgacttcatcatcggcgtctgcgccaaggactacgtctacaaggacatgatcgacttcctaaaccgcttcaactag

SEQ ID NO: 4203 - DNA, 693 bp, Zea mays
  Peptide Sequence Number=SeqID_45982
atggtgcaggtgcacgcgacgcaccgcggcaccggcggccaccacgacaccgcccgtccggccatccggccgtccccgtccgcccgcccagcgcccaggagcaggctgcaggcccacggcaccgcgccaccgtccgcccgcccaggagcaggccgcacggccgcacctcgcctgctctccttgcttctcctcctgctctggttcgccctctcccttgccctcttcctctccgccatgccgccttccaccgcgccgctccgccgctcctcctccttcctccgctccaagccccgcgccctcgccgccaccaccaccgacgcagccgccgtggcaccccgcgtccggatctacgtctacgacctccccgcccgcttcaaccgcgaatgggcggccgccgacgcgcggtgctcgcgccacctcttcgcggccgaggtggcggtgcacgaggcgctgctggcctacgtcggccgcgcagcgcgccccgaggatgccgacctcttcttcgtccccgtctacgtctcctgcaacttctccacgcccaacggcttcccttgctgtcgcacgcccgaggtctgctcgccgacgccgtcgacctcgtccgggcccggatgccgtactggaaccgcttcgcgggggccgaccacgtcttcgtcgcgtcccacgacttcggcgcctgcttccatcccatggtga

SEQ ID NO: 4204 - DNA, 315 bp, Zea mays
  Peptide Sequence Number=SeqID_45983
atgcccgtggccaaggagaagggggagaggggcgagtgggcacaagaaccggcgtgggcggcttttggcgacagtggggctagcgagggggcgctcccggctaggccgccactgggccacgcgagcgcgcacgccgtgggcagagcggaggcgcagggatgctcgcggccatggctagagctggcgtgcgggggggtgatggttgttgcgcatgtgaggaggggaagaggaggggaaggagcaaaggcgctgggcggggtggttggcatcgtgggcgagatgggtgggagaaggcggtttggagaagatgaatag

SEQ ID NO: 4205 - DNA, 694 bp, Zea mays
  Peptide Sequence Number=SeqID_45984
atgcaggcggcatgcaaccgcacgaagggggtgcaccctttcgacttcgacgcatccagcatggaggcccaggcccacacgtcatggactaggaaaggggatatcccgaaagggatccttctccgcgaaggaaacgggccccgagcccccctactgatcagaggttcgaaggctggcccctcggaagggttcaacagccgcctcagagcactcgggctccgcgcccacttctggtcagaggttcaaaggtcggcccctcgaaagggttcaacggccgcctcagaccacttgggctccgcgcccattactgatcaagggttcgtaggctggcccccgaagggtgccaaaggttcacacttagccaataaaaagaccaagaatcgggttcaacaaagagagcaagggataaccgaagaaagagcaactctggaactcgccagcttcgggaatttgctccgctataattcaccggacatgtccggcacgcgcgaagtggcgcaccggacactctacagtgcatgtccggtgtgccaccggacatccaggcgggcccagaagtcagagctccaacggtcggaacccaacggcctggtgacgtggctggcgcaccggacattgtccggtgaccgttggcgccgaatagccgttgctccgctggctcaccggacagtccggtgcacaccggacatgtccg

SEQ ID NO: 4206 - DNA, 354 bp, Zea mays
  Peptide Sequence Number=SeqID_45985
atggactcagtggatgcccttgtagcatgcctcaaggcacgtaccctggtggggcagctggcaacagcgtggctcatgcatcgtcgccgcctcgagctccgacaccggtcgaggctcaataatcaagtcgcctacagagttctctcgaatcatcgctgtcaatgtgtcgccgctgcgggcccatgtactcactaccatgaggtgggctcctcagctccgacgactgcacacgaggttgtctccgcgcccgtcaccaccgaggccaccattcaagtttgcatcgccgtgcatgtggagtcggcggcgccagtcatcaccatcatctccgacgatgaagatgagaagatcgattag

SEQ ID NO: 4207 - DNA, 327 bp, Zea mays
  Peptide Sequence Number=SeqID_45986
atgaacgcgatcggttcccaagcttcagtgaatcgacgatcaagattgggtgatcctgagatcaaactcttcgagttctacaagattgaagaccctaggcatctttttggtgaagtgtttacgtgtctggacaacctgaggcaaaagggatcatggctcatgggtaaagtatgcgacctctgcagaggaatgaaacttatatatcagtcatgctcactactaagagcggccttgggatcctctttgattagagacacagatggttcgagatactatggttctatttttgggttttgttacgatgatgataatgatattctttggtga

SEQ ID NO: 4208 - DNA, 801 bp, Zea mays
  Peptide Sequence Number=SeqID_45987
atgaccaaagtcattaagatggagctcatcgagggtgaacttgggaggttcgccacgaagaggggcgaagggccacatgaaatgtacaacagactcaagtccttcatgaaccaagcgagccccgccaatcggcgccgacccgcgcccctcttccctttctccctctcgctgttcagtggggtcgccctgtcggcgcttcagcctgttgtgcgctcgcgcgtctatgccgctgtcccgtgggccccgctcgccagtccctccccctccttcaaccgctcacatgcgcgaaccgcgcacacgcacgccgagatcgccgcgtccacgtcgccatccagctccaaaccggcacccgaccccctctacaagtccccgcacaccccacttccccctgcctctctcatttcgcctctgcccactcacccgagctgcgcgcgcccgttcttcaagctcgccggagcttccccgtcgccagaccccctgcacctgaactcgtcgccggtagagctcggtcacagtccgcggtcgtgctccggtcacagtccgcggtcgtgctccgccaccgtcaggcccagccacgccatcgtccctgccccacccaaggtgtatttccccgccagaccttctcttctctctcccccattttctcggttccgtcgattagtcaccggtcatcgtcggtaccagtcccacgccgtcaaactaagaccgccctgccaaccgcggccgccccgtgccttcttcgcccgcacggagtcgccggctccggccatggcgctcgcgccgtgcgcgctaccgaggtag

SEQ ID NO: 4209 - DNA, 474 bp, Zea mays
  Peptide Sequence Number=SeqID_45988
atggcggagcagctcgcatcccaagatgctcccaatccccctgctccggcacagagggtactgatgacgaacacgcatggggagaaactcgtcggcctgctgcaccacatggggtctgacaaggttgtagttctctgccatggctttacgggctccaaggactatagcctcatcactgaccttgcggccgcactaacaaagcaagggattagtgtgtttcgctttgattttagtggaaatggagaaagtgaaggtgaattccagtacggcaactacaagaaggaggctgctgacttgcactctgttgtcttgtatcttcgccaggagaagtacgacgtagcagcaattgttggtcacagcaaagtgttccattggattcatgtcattggattcatgtcattggttgatataatcatggaattcatatctcctattgttttggaattccatgcctatatcaacccaatgacatga

SEQ ID NO: 4210 - DNA, 420 bp, Zea mays
  Peptide Sequence Number=SeqID_45989
atgcgatgcctgtaccgcagccccgtgcccgccactcctcgcgcaaaccccccgttcctcctcccagccacgaaaccgaaacgaaggtcaggcgatcagccgcagcccgaggcggtggaaccgcaaaacgacgcctcctccagcgccgccgggagcaagaagatcaagaaatccaaggcccgggggaaagtgcacagcgggctgggtgtgaagctggtgaacctcgacgccggcaacaaggacctgctactgtcgcgggtgggagagcagcaacggcacaatcgtaaaggggcaaggccccgcttccgtctcttcggcaaggatatctttggcgactatctcctgcatttactcatcgtcaagaaagacgaccagccgcaacagtgccgctactaccgtccgatcatgatgagctcatga

SEQ ID NO: 4211 - DNA, 2748 bp, Zea mays
  Peptide Sequence Number=SeqID_45990
atggcccccgcggcgccagcgggcctggcctccgtcgcggtcgcggtcgcggttgccgtgctcgccgccgcggcgtcggcggccgtcacctacgaccgcaaggccgtcgtggtgaacggccagcgccggatcctgatgtccggctccatccactacccaaggagcgtccccgagatgtggccggatctgatacagaaggccaaggacggcggcctcgacgtcgtgcagacgtacgtcttctggaacggccatgagccctcccgtcgacaggtagttaccgacgctgctacgctgtactacttcgagggtcggtatgatctggtgcacttcatcaagctggtgaagcaggccggactctacgtgcacctccgcattggcccctacgtctgcgccgagtggaatttcggtcgaaatgttctggccgacattgatgttcttgcatcttgctgtgaccattggtttcttgtagtcaatcttgaacaggctgagatgcagaatttcaccacaaagatcgttgacatgatgaagtccgaagggctctttgaatggcagggagggccaataattctttcccagattgagaatgaatttgggcccttggagtgggatcagggagagcccgccaaggcctatgcgtcatgggcagctaacatggcggttgcgctcaacacaagtgttccatgggtcatgtgcaaagaagatgatgccccggatccaattattaatacttgcaatggattttattgtgactggttctccccaaacaaacctcacaagcctacaatgtggactgaggcttggacatcttggtatacaggatttggtattccagttccacatagaccagtagaggatctagcatatggtgtggccaagtttattcagaagggtggctcttttgttaattattacatgggttcagcagttttctcgttcgccgagcaccagatccacgctcctccatgccagatctgtggctatcagggatctggtacccccagcccttcctgggccccgctgtcctcgatgtggcccacggtggtggtgctgtgctgctgcttccgtgtgcgcgttcgcgggctccttgacgtgggctgctctcgtgtctggtgggcactgggcggcggctgcactgtcactagcgcttcggcaggcacgcggccatgcggctcctccctttgggggctggttctttgtggtgcagtggctcccaatcaggttcccgcgtctgccgcgcagctgtgggacacctccacattggctggtggctgcggccgctgttcctggcccacagtcgctgctttgcagctagctgctgctggcgacgatggcatccttgacattatgttcctcccctcgggggcagatgtgcagatgccttaccgcctagatcacatccttgtggcagatggtttgctgagagaaccgaaatggggtcacttgaaggagttgcataaagctatcaagctttgtgaaccagcattggttgcaggagacccaattgtaacttcacttggcaatgctcagcaggcatctgtttttagatcaagcaccgatgcctgtgtggccttccttgagaacaaggataaagtatcttatgctagggttggaagtcagatttcacaaatgaaaatggaatgggctggaggattcacatggcaatcatacaatgaggatataaactccttgggtgacgaatcatttgcaacagttggattactggaacagataaatgtgacaagggataacacagactacttatgcgttgatattgctcaggatgagcagtttctcagcaatgggaagaatcctatgctaactgttatgtcagctggtcatgctttgcatattttcgttaatggacaactaacagggactgtgtatggaagcgtagaagatccaaaattgacatatagtggaaatgtgaaactttggtcaggcagtaacactatttcatgcttaagtatagcagttggtctcccgaatgtgggagaacattttgagacttggaatgctggaattctaggtcctgtgacactggatggcctaaatgagggaagaagagatctcacatggcagaaatggacctataaggttggtctgaaaggtgaggctttgagtcttcattcacttagtggcagctcttcagtagagtggggagaacctgttcagaagcagcctctgtcatggtacaaggctttcttcaatgcacctgatggtgatgagccattagctttggatatgagtagcatgggtaaaggtcaaatctggataaatggacaaggtattggaaggtactggcctggctacaaagcttctggaacctgtgggatctgtgattaccgtggagagtatgatgaaaagaagtgccaaaccaactgtggtgactcttctcagagatggtaccatgttcctcgttcatggcttaatccgacggggaaccttttggtgatatttgaggagtggggcggtgatcctaccggaatttcgatggtgaaaagaatagcagggagtatctgcgctgatgtctccgaatggcagccatcgatggcaaactggcgaacaaaaggctatgagaaagccaaggtccacctccagtgtgatcatggacggaaaatgactcacataaaatttgccagctttggcacaccacagggctcctgcgggagctactctgaaggcggttgccatgcacacaagtcatacgacatattttggaagagctgcattggtcaagagcgctgtggg

SEQ ID NO: 4212 - DNA, 2105 bp, Zea mays
  Peptide Sequence Number=SeqID_45991
atggagggaggcgaggctggaggcttgagattcctcctccggttcgacccggcaaggcccgggctcgaccgcgcgctgctcggcttctccttctccgccctcttcagccgcctcgtcgttggatggagcaagcatggccagacgggaggaggaggaggaggagggtttccggcgatcgcggcggagggtgagggtggggagggctccgggaacgccgccgtgtccgtggccgcgcttgccgccgccgccgccgccgcttctctctgcctcgcggcgatgtacgcgtccgatcagcggcggcctcgccatgctcgcgctcgacggctgccggcgctggcttcagctccgcggtcccgtgcgctgcatgctcctcatgatgggctcaggattctgtcgtcagacgacccaaacgacgaatctccggacaaggtgatccacggcgcgtcgatcggcgccggagacgacgagccggatatcgtcgcgcgagtggagatggacgctaccccgccggcagttcccgtgccaaatgccgacgacgacgacgacgacgacgaaaccgaaacggaagcagaggaggaggaagaagaagaggagcggcaggagctccagcggctgagggagctgtggctgtcgctggaggagcgggagcagaggctggagctccgcctgcaggagctggagggcctccggtcgcaggaggccgccgcgcgggagctcgaggcccgcgtcgccgccgccgacgcggaggtgcggatcctgcagctcagtgtctccgcgctgcaggaggagaacgggaggctcagggcgcgggcggaggacctggacgccgcccgcgctgagctggcgcgcgccaaggagaagctgcgcgcggtcaaggcgcgcgtgcagggcgagcaggaggcggcggcggcggcgctccggaggaaggtggaggagctcgagagcggcgggcgggagagggtcggcgcgctggtggcggaggtcgcggagctgcgcaaggcgaacgccgcgctggaggcggacaatatggagctcgccctcaggctgcaggacgcagagcagcaggctgcatccggcgcctctgctagtaatctggcccctgaggagggcatgattcaggagatgacgtacctgagggagagcaacgagcgactgacgaggcagatcgagcaactgcacaacgaccactgcgcgcacgtcgaggagctcgtctacctcaagtgggtcaacgcctgcctccgccatgagctccgtgaccatgacggccagcccaccgccgagcaacaaggccccagcgccggctccagagacctgtcggccctggagctgagcaagagcatgagcttccggtccagcgagagggccaagcagctcatgctgaggtacggtagccccggcctggaccgcttcgaccctgccctcttctccccgctgcacgagtcagtcgacggcgacggctacggctacgagcggtcgccggcgcacagctacgagcccgagcggagcccttgcgctaggcccgcgacggcgacggcctcgtcctcccccgccgcagcaccggggaagaaagcggggccgcgcaggctcaagcttctcggtaacatcaagaagctgctgccggcggtcggcaagagaagccactcaaaccacgggcacgggcacgccggccacgatggcaggaaggcgccggcgccggctccggctcggagggacgagtacctcgacaaggccatgcagtggctgtcggcccacgacgtgctcgacggcgaccactcgtacgtgagcacgccgctgtcgtcgtgcgagaggacgccgctgagcagcgccacgaccagcacgaccgcggactcacgcgcccgctgcggcgacggtggtggtggccgcagcgagcgcggggaggcgacgcggccggaggcggagccgaccttggcgagatcgaagagcgacgccggcggagcgtacgggcgggaggcgagcaggtaccacgcgctcagacctgaacacccgggcagagaggcggacgagcccgacgggttccgtgcgccggagaagcgggaggcaaggaggcagtcggcggaggagctgaggactccggcggtggcgta

SEQ ID NO: 4213 - DNA, 117 bp, Zea mays
  Peptide Sequence Number=SeqID_45992
atggagggcagccgaaccctttctccatggccgccaatcgtcctgctcctttcccctgctagatgttgccgcggcgcctcgtgcgatgcatggtttggtgaagcgcctaaaccttga

SEQ ID NO: 4214 - DNA, 2379 bp, Zea mays
  Peptide Sequence Number=SeqID_45993
atggagctggcggttggcggcgggatgcggcggtcggcgtcgcacacctcgctgtcggagtcggatgactttgagctcacgcggctgctcagtaagccgcggatcaacgtcgagcgccagcgctccttcgacgaccactctctcagcgacgtctcgcactccggcggatacggcaggggtggcttcgacggcatgtactcgcctgggggcggcctgcgctccctcgtcggcacgccggcctcctccgcgctgcactccttcgagccccaccctatcgtcggcgacgcctgggaggcgctccgccgctccctcgtcttctttcgcggccagccccttggcaccgttgccgccgtcgaccacgcgtccgaggaagtcctcaactacgaccaagtgtttgtgagggatttcgtgccgagtgcactggcgtttctgatgaatggcgagccagatattgtcaagaacttccttctcaagaccctgctgctgcagggctgggagaagaaagtcgaccggttcaagcttggggagggagccatgccggctagcttcaaggtgatgcatgacgccaagaagggggtcgagaccctacatgctgattttggagagagcgccattgggagggttgcacctgtggattctgggttctggtggattatactcctccgggcctacacaaaaagtactggcgatttgacgctggcagagacaccggagtgccagaaagggatgaggctcatactcagcctgtgcttatctgaggggtttgataccttcccgacattgttgtgtgctgatggttgctgtatgatagatcgcagaatggctgaagcagctgaagtcctcgccaacatggcttcgcaggagctgacccagcagatgtgggactccaagaacatgatgtgtgctgctgaccctcgtcacggtcgctacctcacggcatctgctatgttctgtgggaagatgagcaccaaggaagtggatgagcaaatgttgaacatgcagaacaagaactcttcctactttgtggagtggatccccaacaatgtgaagtcgagtggtgtatatggctaccctattgagattcaagcccttttctttatggcactaaggtgtgctcttcaaatgcttaagcatgataatgaagggaaggaatttgtagagaagattgctacccgccttcacgctttaagttatcacatgcgaagttatttttggctcgatttccaacagctaaatgacatttatcgttacaagacagaagaatattcccacacagctgtcaacaaattcaatgttattcccgattcaattccggactggttatttgactttatgccttgtcagggtggttttttcgttggtaatgttagtcctgccaggatggacttccgatggtttgcacttggaaacatgatcgctatactttcttctctcgcaacacctgagcaatctaacgctataatggatcttattgaggagcgctgggaagagcttatcggtgaaatgcctctgaagatatgttatcctgctattgagaaccatgaatggcgaattgtgactggctgtgatccaaaaaatactagatggagttatcacaatggaggatcgtggccagtgcttctgtggctgctgactgcagcctgcatcaaaactggacggccgcagattgcaagaagagcaatcgacctagcagagaggaggctgttgaaggatggctggccggagtactatgatgggaagcttggtcggtatgttggcaagcaggcgaggaaattccagacttggtccatcacggggtatttggtcgccaagatgctgttggaagatccttcacatcttggcatgatcgccctggaagaggacaaggcgatgttgaagcctgttttgaagcgaggtgtcttgggtggcctgttgattccaagacaaaccctaggatctctcctccctgacggggtccctcccgcgggcaagatccaggtgacgtttggtgaacgcttccaccctacgcacgcgcggaccgtccagccaccaggtgtggaccattcggctcgcgcgcagggaaccctgctcctgctatccaggttgtggaccttccgcgccaccgcagagagcccaacgagtgaaaaattcccaatatttggtgtccggattggcgccaacacactttttggcaattatgttttggaaactgagattggatttaccagatcgacccatatggccggtctaaaggataacttcaatgtctcccctagcaacatcatcaagtcaactatggataacctgtcggttgaagaatatcagaggctggaagacgccgggacaaagatgcaggcagaactcgatgagctgttcttggttgatttcaaggttgactga

SEQ ID NO: 4215 - DNA, 705 bp, Zea mays
  Peptide Sequence Number=SeqID_45994
atggagtccgactactacactagagttagagagagtccctatgactataaatatgtatctgtagacacttatgaaagggatcataatttctccacaagttgtgtccgcaagccttggcgcatcgccaccttgttctcaggggttctctacgggtggcatcagtttggagtggggattgtttccggagtcggctcatgtcggcttttaggcctctgttctagatggcgtttgggtgcctgccacgatcatttggcccaaccacgtgcaggatgttctggtcatatgggaactgactcgaaacacctcgacaccttcctgatcaggggtgctttatttcgtgagaatgctccgatccccgagggtacaactgaggattgtccagcacttgagggtgtgactaaagataatctagcccccgagggtgctactgaagatgatccagcccccgagggtcctgaggctggttcttcctcggctgtctccatgaatgttcatgttgtatcaccgctggttcgatctaaggaggttgtggtgatgagtcctagttttcctgctgtccctgctggcctggcaaccttagaggttggtgatccgggcactaagggtccgatttctgctactacagccgagatcccgctgggcatcacgcttagcatggattacaatcttcctttggtgttcaaacctactcctgatactgcttaa

SEQ ID NO: 4216 - DNA, 357 bp, Zea mays
  Peptide Sequence Number=SeqID_45995
atggtgctggcaaccgagtccggggatcacacgggatccgttgagatcgcacccaagctgcgcgagaggggagaatggggaaagggggagctcctgtctgtggggtcccacatgacagacgttggccgcgtttatatccagaattcaaatttgaatttggattcggttatgaaattcacccttgataaaaaatgtattaattcaaatatcaacggaaggtgtagcatagaaaacaagggtacatcatgttttagctatttggttaaccttcttcttgggtctgatttagggaccattggtcgtggtgttaaataccattatccgagttggggtaacaattgcgggtatatggggtag

SEQ ID NO: 4217 - DNA, 1617 bp, Zea mays
  Peptide Sequence Number=SeqID_45996
atgtacctcgagtgcgggatgctcgccgaggcgcgccaggcgttcgacgggatgcccgaccggaacggcgtcacgtgggggatcatgatgggcggcctcgtcgaccggggccgcccccgggccgcactggcgctgttccgggagatgtgggcggaggccggtggggacgctccgccgaggtccctcgtggtggctgtccgtgcggctgcgtcctcggggtcggcgcgagccgggcggcagctgcactgctgtgttgtcaaggcgggggcgtgtggtgacgtcgctgaccggtacctgacgtgcgcgctgctcgacatgtacagcaagtgtggccggattgacgaggcgaggcgggtgtttgacgggctgccacgtcctcatcggacgactgtcgtggcatggaactccatgttggcggcgtatgttctccatggccacagcgaggaggcgctggagctgtaccaaaagatgtgcagcactcatgtcgccatggaccagttcacgttctcgaccatgctaggggtgttctctaggctggggctgctggagcacgcgaagcaggcgcacgctggcttgatccagagaggattgccactggacattgttgggaacacggcgcttgtggacctgtactgcaaatggggaagaatggaggacgcgagaaatgtcttcgagaggatgcctaggaggaacttgatctcatggaacgctctgatagctggatacggctaccatggcatgggagataaggcgatcgagatgttcgagaggctgatagctgagggtgctgtgccaaaccatgtaacttttctggcagtgctgaatgcatgtaggttttcaggtcttgttgacgaagggaagaggattttccagttgatgactgaaaatctgaggataaaaccacgggccatgcattatgcatgtgttattgagctttttggtagagaaggtctacttgatgaatcctattcaatgataagaagagcaccgttcactccaactgcaaacatgtggggagccttgcttactgctagcaggatccacaagagcatgcatcttgcaaaattttctgccgagcagctattggcaatggaacctgagaaaataaacagctatgttgtgctcctcaacttgtatgttagctctggtagacaggacagcgcctgcaaggtagttgaaacactgaagaggaaaggtttatatattggtaatgcctgtagctggatcacagtcaagaaaacggatcacaggtttttctttaaagatactttgcatccacaaagtgctgaaatatacaggaggctggacacattaatgaaggaggtacgagaagctggctttgttgctgaggagaatgaattgctccctgatattcatcctgacgagcaaaagatatcaagagcttaccacagtgagagactggcaattgcttttggccttatcagcacagccccacagactcccttgaggatcagtcaaagccatcgtttgtgcagtgactgccacaatttaattaagtttgtgtcaagagttaccaagagggaaatcattgttagggatggtagcaggttccaccactttaaactcggggtctgctcttgtggtgactactggtaa

SEQ ID NO: 4218 - DNA, 513 bp, Zea mays
  Peptide Sequence Number=SeqID_45997
atggcgaggatgggagttgctattctggtctgcgtagtggttttagccctggacgtcacagctggcatactaggaattgaggcgcaggctgctcagaacaagactaagaaggtgacgatcctcttcatccagtgcgagaaaccagtgtacagagcgtaccagcttggcctcgcagctgcagtgctcctggtagttgcccacgcggtagccaacttcctcggcggctgtgcctgcatctgctcccagctggagttcatcaaggcaattcccttggagaggaccagtgctaatgattgcgcttgcgcttgcgctgcgacttggggtaggatcgccctgattgccggattctcgctgctgctcgccggcgccatgtccaactccaagtccaagacgtcgtgcgggttcactcacggacacaccttggccctcggagggatcatgtgcttcgtccacggcgggatcaccgtcgcctactatgtcaccgccactgccgcagcgcacgaggttccttag

SEQ ID NO: 4219 - DNA, 3105 bp, Zea mays
  Peptide Sequence Number=SeqID_45998
atggcgggcatatattacagcaggcagaggaaacctgagcgcaatggcagtgtatttacacctatagctgcaatgtattccagtggtcatgcactccctgttgcaaataggagccacggtttggtatttggcagtctgagcaaggactgggacgacattcgccagcgcaaggatcagttggtcaacttccttgctagtcttgaacgagcctctggagattctgcggcagctggcaaaatcgaagatagcaaattggccagtcctgtggagccaactgaacaaaaagagaaggctgccataatcgttcttgattcagacgatgaggacggaaatggttcaggaaacagtaagttggcatctgagactaacaaagaactcggaacatctggattgattaataatatcgcagaaaggatgacgtttaatgggagccaagcatttggaaccgtgcatacttatggagataagaacacacagattgttccgtatggtcaatgttctgctttagtgaatcagtttcctttgcaaaccagttggcaaccatctattcagtttgagagagtcgtgctgcagaaaaggcctgaggagcagcgaatgcaagatcttgtggctgctagcatagccgagaagagagcagaaacacaagtgttcctttcacttcccacagagaaaaagcgaaggagatcagaccccagtctgcatgccagtgacgatactgctactgtccctaaacaaagaaaaagtaaaggtgccacagttgtagcagcagctaatttgtcattggtttcacaacaaactgctacatcaccagaacctgacatggttatagaggaagaggagaaacataaaaatgaaagtgatggtcttgacgattattggaaagattttgcattggctgttgaaagcacaaagggaggagagagttacatgcttgctggcggtgggctctgtccagtagaggttcagtggctgatatgtacaaccgtagtggtaggtatcggagttcatgttgttgagtacgacatagttggtaaacagtgcacgcttgccgcttgcggggccctggatttagtaggaacagggcatgccctcctggggcttggggctggtatgagccgggcccactgcgggttttcttctgctgacaggatctcagaagtcgtattgctaatatccgggcttgacgaagttgatgaggcggcaattgaaaaggaagataatggaaagatggaggacatcgattgcaatcatgacatccggattcatgaagatttgggtcatgtatgccgtgtgtgtggtatgattgtgagaagagctgattcaataattgattatcagtggaaaaaggcttcaaggagaagaacgaatggctatggaggacattcaaaagatgctgatgagatagattgtggtactgttaaactgtctgaagatttcatagtcgcagatattgctattcatcctagacatgctcggataatgaaaccacatcagttggaaggtttcaactttttggttaagaatttgattggagacaagcctggaggttgcattctagctcatgccccaggtacagggaaaacatttatgcttataagcttcattcagagcttcatggcaaggtatccatctgcaaggcctcttgttgtgctgcccaaagggattctaggtatatggaagacagaaattaaacgatggcaagtgcaggatataccagtgtacgatttttactctgtcaaggctgaaaaaagagtagaacagttgcaaatcctcaaatcttgggaagacaagatgagtatactatttcttggatacaagcagttctccacaatcgtcactgatgatgggggcagcaatgtcacagctgcatgtcgagacaggctgcttaaggttcccaaccttctgatacttgacgaaggacatacacctagaaatcgggagactaatgtactcgaatcactaaatagagtggaaacaccacgcaaagtggttctttcgggtacacttttccagaatcatgttgaagaagtgtttaatatcttgaatctcgttcgcccaaagtttctcaggatggaatcatcccgtcctactgccagacgtataatgagtcaagttgaaatagttggtagaagttcgaaagggcttgctgatggcgcattcactaaggcagttgaagaaaccttattgaatgatgagaacttcaagagaaaagctcatgttattagaggtcttagagaactaacaaaggatgttcttcactattataagggtgatatcttagatgaactacctggcttagtagacttcagtgtgtttttgaagctcacacccaaacagaaagacattatttataagttggaagcacatgatcggttcaaaagaaatgcagtagggagtgcactgtacattcatccatgtctttcagaactttcagaggttaatgctgagcatagggctaacacctttagagatgatttagttgatagtctggtagattctatcactgtgagagatggcgtgaaggccaattttttcatgaatatcctgtcacttgctaattctgcaggagagaaagtgctagctttcagtcaatatatatctcccatgattttctttgaaaggctgctggtgaagaagaaaggctggcatgtggggaaagagatctttatgatctctggtgatactagccaagaagacagagaattggcaacggaccattttaacaactctgctgacgcaaaaattatgtttggttctatcaaggcatgtggggagggtatctccctcgttggtgcgtcgagagttgtcattctggacgtacacctgaacccatctgtcacccgtcaagcgattgggcgtgcattcaggcccggacagcagaagaaggtgtttgtgtacaggcttgtagctgccgattctgacgaggtaaaggtccatgagacagcattcaagaaagaagtcataccgaagctgtggttcgaatggagcgagcactgtactacggaagacttcaaacttggtcaaattgatattgatgactctggtgacgaactgttggatactaaagcaatccgcaaggatatcaaagcgctgtatagaaggtga

SEQ ID NO: 4220 - DNA, 1563 bp, Zea mays
  Peptide Sequence Number=SeqID_45999
atggcgaccccgtcccacggcatccccctccgcgcgctcctcctcctcgcgctgtctcttctctccatccccatcgtgttccagctcctccaccgcccgactcccagtcccatgccccctccgctcctccgaataacctgcgccgacgcggcgtcgcagtcgccccgcgcgaaccctcctccactcgcctccgacgtacacgtaccaccaccggcgcctaagccggaggaggcgtcggagccgacgtccctgcgccacgtggtattcgggatcgcctcctcccggcgcacgctgccgctccgtctccctctgctccggctctggctgcgcgcccccgcgcgcgccttcctcttcctggacgcgccggcgccggacgcccgcgacctcccaccgggcctcgccctccgcgtctccgccgacgcgtcgcgcttcccctacacccaccggcgcggcctcccctcggccgtccgcgtcgcgcgcatcgccggggagctcgtctccgcgctgaatcagcaggaggaggaggatgtgcggtggctcgtgctcgccgacgacgacaccgccttcgtcctcccgaacctgctccacacgctgcgcaggtacgaccacggcgagccctggtacctcggcgcgcgctccgagtccgcggcgcagaacgcgttgcacggcttcgccatggcgtacggcggcgccggcatcgcggtcagctggccgctcgcgcgccgcctcgcgcccgcgctcgactcgtgcgtgctcaggtatccgcacctctacggcagcgacggcaggatctacgcctgcctcgccgagctcggcgtcgagctcacccacgagccgggcttccaccagcccctgcatgtaggaagcataaggctactaccgatcgacctccacggggacatctcggggctgctgaggtcgcaccctctgtcccctctagtctcgctacaccacctcgaccacgtccacccgctctacccgggaacggaccgggcggggtcggcgcagcgtctgttccgggctgccgacgccgacccggccagggtcctgcagcagacggtgtgctacgaccgcgcaaggtctctcacggcgtcggtctcgtgggggtacgcggtccaggtgctcagcggcaacgtgccgctccccgacctcctcgccgcgcagaggaccttcgcgccgtggaggaggtccggcggccgcggccgcggccgcaacgccacggacgtgctgtacatgttcgacaccaggcggtaccctggagacgagtgcagacggggggcgctgttcttcctcgagagcgtcgccgttgctccggccggggaggaaggcgggacggcgacggtgaccacgtacgggagactggcgcccaggaagtgcccgcctggcttggtcccgctgaagagcctgcgtctggtcaaggtcacgtcagaaccactgcagctggctcctgggaaggcgttaagacgccattgctgcgacatcgcgccttcttcgtctgatgctagcatggacatcaacatcagaaggtgcaaagacgatgagctgatcgccatgcattcatag

SEQ ID NO: 4221 - DNA, 255 bp, Zea mays
  Peptide Sequence Number=SeqID_46000
atggcgcatcatttggggtgtcccagtggctcccaagggcttggtctcgacaggtgcagacgttcctccatcaccatttcaaccaccgattttactaatggatctgttggggcacggttgacgagagcgtcttctcaagtgcctaagttagcagtggtgacaccaaatctcccggaagagttgtcaacaccctatcacaacatcattcttgtcataattatcttctttacatgtacacgaaatacattagactga

SEQ ID NO: 4222 - DNA, 675 bp, Zea mays
  Peptide Sequence Number=SeqID_46001
atgagcaaggacaagcaccacaagcacgagcaccacctgcggcgttgctgcgggtgcatggcgtcgtgcctcctggcgctggtcctcatcgtggccttcgtctcgctggtggtgtacctggcgctgcgcccctcgaagccgtccttctacctgcaggacctgcagctgcgcaggcccatctcgctgggcgacccgtcgctgacggcgtcggcgcaggtgacgctggcctcccgcaaccccaacgaccgcgtgggcatcttctacaagcgcctggacgtgttcgtcacctaccgcgacgaggccgtgacggtgcccgtgtctctgccgccgcagtaccagggccaccgcgacttcaccgtctggtcccccgtgctgtcggccgagtccgtgcccgttgccgcctacgtcgccgacgccatgaagcaggacgtcgccgcgggcttcgtcgcgctgcaggtcaaggtggacggccgcgtcaagtggaaggtcggcagctgggtctccggcagctaccacctcttcgtcagctgccccgccgtgctctccgcgggctaccccggcgtcaacaacaccgtgacgtcgctcaagttcgcccagcccacaggatgcagcgtcgaggatgatgtcaatgttatactgatgattgtttctgtccatgtctccaataatagatag

SEQ ID NO: 4223 - DNA, 903 bp, Zea mays
  Peptide Sequence Number=SeqID_46002
atggcatgtcctttgagattcaatattgatgcctactcagcaattcaacacttctgcaggcgttcaggccaaagatctagggtccggaaacttcaatacattgctgaacttgaaagaactgttgactcacttcagaacattggtgctgatttggctgtcagagtgtcatcacttttccagcttcataatgctctatctatggaaaacaagcagctgaggatacagatttctagtcttcagcgtgcaaaactgattaaggatggtcagacgcaggccctaaagaacgaagccgaaaggttgaagcggatgtccgcccgccggagcagaagcgccacggcctcctgttacgacccgggctcgttctcgttcggagcagatgcttcgtcagtcagctggcagatgcctgacatggcaaggctcagcctgaacggcggctccccaagaggcagctatggcctgagttcggcgcttccattctccgccaccgcacagtcaaggatgcccgcctccaggacgtcaaccattgatcccatcggcaagaggtgtccccttttgatacggtacctccgttccccgctgccctgcctccaggacgtgaatccgcttatccccgccgacaagggtgtctctccttccatccctgctgctaggaaggagatgaagatggatgagacggaggagagacaggagtggagaggccccgtctatctgctctgctcgtgtatgccgcgttctgtggaacccaacagcgtgctctgctcgtgtatgccgaacccaacaactttcagaattttgtccaacaggcttcatggatccacggggctatgctcgatggggtcaggatcgatggaccggggatggagagaacaactgcagtcggcgaagaaggacttgttcgactag

SEQ ID NO: 4224 - DNA, 969 bp, Zea mays
  Peptide Sequence Number=SeqID_46003
atgacgcttcctgttgacgtgtcgggtctgtgccctaggcggggtgacgtgggggctcctccgaagccgaggttgagtctgtcttctgttgccgaggccgagtccgagccatggggtcgggcgaggcggagtttcgtcgtcttccgggtcttagcccgagtccgagccctggggtcgggcggagcggagttcgccgtcttccgggtcttagcccgagtccgagccctggggtcgggcggagcggagttcaccgtcttccgggtcttagcccgagtccgagccctggggtcgggcggagcggagttcgccgtcttccgggtcttagcccgagtccgagccctggggtcgggcggagcggagttcgccgtcttccgggtcttagcccgagtccgagccctggggtcgggcggagcggagttcgccgtggcgcctttggcaaggcctgactgtctgtctgactcaccctgtcgagtggcaccgcagtcggagtggcgcaggcgacgctgtccttctgtcaggctgctttatgctgatgggggttaccagctgagaattaggcgtcttgagggtttgtcaatgatgaaagaaaatgtgattgagaggttccttcgaattaaacatgtttttgacaacacaccacatttcactaaaaagaagcattgggtattatgcttagaagggaaaatatctgggatgatattttataaggggccaaaagcttttgtccaaatgaagatatacattcctgacatggaagatatgatactagttagagatcgttcgaaatgtcgtggtgccaaattaatgagttactaccatcattttcattatgggatgttcattgttatgatttataaggttcttaatgagtttaatactcaatttctagaaacatcagctgaactctttatatgtattgcttgtcttaatcccaaggaatcttttgccaactttgagaacataaattag

SEQ ID NO: 4225 - DNA, 441 bp, Zea mays
  Peptide Sequence Number=SeqID_46004
atgaccaagaccgagaggttggaaaaccgtatctcatcgcgggtaaaaagaagagcgagggcgagggcgacattgacgatgaccaagaccgagaggttggaaaaccacattgaagccggccaagatcaacaggatagaaaaccccagctaacagtatgcgttgttggggaaggaaaggttgtggagacgaacgaaatagtatgcgagggagagtatgcgatgctggacaaacctgtacaagctgtggagacgaacagagcagacgaggagacgggatgcacgctagtctccgacgccgcggtcgtcagcgctgcagacggcagccctttgagtggccctttgggagacgacacagaagaagaaaccgcgcccgtcgatgagaaatcgaacatttgctggggcaggtccacgttgggcattcgctacgatgtcatcggctga

SEQ ID NO: 4226 - DNA, 1164 bp, Zea mays
  Peptide Sequence Number=SeqID_46005
atgccccgctggactgcactacacgtgggacaggtaatgcaggtattgcccccgctggttgtggctggccgggaagtgaagccgttccgccgtgaagcagcgccaccccttgccatccgcccgaccgctgggaagcagggcccacgtctccaagcttcctacaggaagagcctgcgcccctcccaaaggacaaaggtcactgacaacatgcagctgcaaaattcaagaaagtatatgtttgcttgcttcaatgagttcaatatctgttccctgaatttaagatctatgatccacggtgttacttattgttgttatgatattaggatggatgaagtcacacaagctgttgaaaatctgaagaaagaatggagccaagctgtttcacagcttgaggagagcattgctgcaattgaatcatgtggaaaaacagggaaaggaacagaggaagcaacttctcttccaaggttgaatggttctgcacaggatgctctgcagttgctcaagtccctgcagttccggcttgatcttctagctcagcagctacctacttttgatgaagtgcagtctgggcaagcaaccttagggtcgtgggatgaacaatacaagaagttgcgtgctagcctgaggaatgctaacttacaagcgaaagagaacattagaaaagctgctcaggaggagagggagcttcttctagggggtggagaagagtcaacaatccgtaggcgtaatctccagacaaaggttgggatgacatctgctgctgaaagtatcaccgagagcctccgacggtctcgccagatgatggttcaggaagtggaaaggagtgcaagtaccttggcaacatttgatgaatcaacaagtgttctccggaaggctgaaggtgaatatcaaggacaccgctctttgctaatgcgtacccgtggtttgctctccacgatgcaacagcaagatgttcttgataggatcatcctgaccatcggctttatcattttctccttggcggttctttatgttgtctcaagacgtattggtctattgacgctgcaaaggaaactggccgatgccatcagatccggttcattatcagccgatgacatcgtagcgaatgcccaacgtggacctgccccagcaaatgttcctgctcccatctacgatgaactgtga

SEQ ID NO: 4227 - DNA, 186 bp, Zea mays
  Peptide Sequence Number=SeqID_46006
atggacttcgtggtgaccgtgaatcctcccctcatcgtgggcttgcttccccaccttgatatcactgcaccggttgtaacgaagtttcgggttggggtcaccggaagtgggctgctccggcgggagccagcgctgccgcgggcatctgcgggttgtcatggtgtgatgtgcaccgttgaatcctag

SEQ ID NO: 4228 - DNA, 132 bp, Zea mays
  Peptide Sequence Number=SeqID_46007
atggcgcgaccacccacacgcctcgagacttcaccgttcacccacaacggctctggcgaggatcccaaagcaagaactacgaccggatttgactacgagcgtgagattcaccagcgatttcctaatgtctaa

SEQ ID NO: 4229 - DNA, 264 bp, Zea mays
  Peptide Sequence Number=SeqID_46008
atggtaaacaccccaaaacatcacaattccaacctcactgacggagagtacgtgctcatccccgagcaaggagttgctcaagaggaagtccaggagtcagctccagagcctgccaccgagggtcttcccacagcctcagcttttgaaggcaagcctggtacgctacaggatatggttgacggtgtgacttggccttccaccctgccaccgggttggacggtcgagtgggatgctgcctcgataggagaggaccaggaggagtag

SEQ ID NO: 4230 - DNA, 267 bp, Zea mays
  Peptide Sequence Number=SeqID_46009
atggggctctgcatgtcctgctgcaagggcgccagacagggagcagggggcgccatggcaagcttcgaggaggaagaagacctgctcaccggcctaggggagaagagcatcgccgagccggaccagggggacgatgaccggatgtggggaagaaggaccctgctgctgcgccatggagcaaggaggagagagttgtgcgtgtgggagaggaggaagaagagagtggcggctggaaaaagtggaggggtgggaatgcaaaatgactaa

SEQ ID NO: 4231 - DNA, 396 bp, Zea mays
  Peptide Sequence Number=SeqID_46010
atggcgacacagactccagcggaggtggttacaaccacctctgcgccttccctgctgagtgctcggagccccagctccatgaataaaagtccgtcatctcggctttgcgtagaacgtattggcgcgggcggtggggcacttgtgcgccgattcatcgtgctccggagagctaaccagtggagctccaggcaccctctcccagtcgcggccgggaggagggagacgatcctctggccgtccgatcctgaacgtgcgggcatgattaggtctttagtataccctttggtctggactcctcaggtccgtggatcggcagttgaacggaccggatccaatcagggtgataccagttcgatctgtggagccatcaccgttgagatgtgtatcaacgaatga

SEQ ID NO: 4232 - DNA, 327 bp, Zea mays
  Peptide Sequence Number=SeqID_46011
atgcagcgcgaagtagttgaggaggaggcggggctgattggggttttaacccccggttggtttcggtcagcagcacttttcgcgggggaaaggatccgagcaggtccgcacgagccgcgcctcgaccggaaggcctcggcctcagcctcggcctcgggagaaggtctctgcctcgcccgaccccaggcctcgccctcagcctcggcctcgggaggagtcatgtcctcgcccgacctcggcctcggcctcaggagaagtctctaccttgcccgacctcagcctcggaccgactacgctacaggggatacatcattaccctacttctag

SEQ ID NO: 4233 - DNA, 408 bp, Zea mays
  Peptide Sequence Number=SeqID_46012
atgttgaggggataccatgaactgtcagctaagacaaaaatattcttctctactgctcttggcatctgggatgctgatttgtacgtcaaggttgatgatgatgtgcatgtaaacttaggggaactaatgatgccagtgatatttatcaggcctatcttgcacaaatatgcaaatgaagacgtgtcgcttggatcatggttcattggtttggaagttaatcacattgatgaaaggaacatgtgctgtggaactccaccagattgtgagtggaaagggcaagctggtaatgtctgtgtagcgtccttcgattggagctgcagtggcatatgcaagtctgttgagaggatcaaagatgtacatgctcgctgtggtgagggggattcagcagtttggagtgctcttttctag

SEQ ID NO: 4234 - DNA, 321 bp, Zea mays
  Peptide Sequence Number=SeqID_46013
atgcaggtgaccccggtgcacgccctgggcgctggcatcagcccgatgcagggcctggtgatggcggtgatcctcaccttctcactgctcttcgtcacctacgccatgatcctggacccgcggagccaggtccgcaccatcggcccgctgctgacggggctcatagtcggcgccaacagcctcgccggcggcaacttcaccggcgcgtccatgaacccggcgcggtccttcggtcccgccatggccaccggggtctggaccaaccactgggtctactggatcggcccgtttaggttcagcaggggtctagacgcaccatga

SEQ ID NO: 4235 - DNA, 234 bp, Zea mays
  Peptide Sequence Number=SeqID_46014
atggcctcgcgagttcatcccgagcatttccagtccaagggggcactcaacctgatgcgcaacctgctcggatggagcgcgctggcgttcgccggaagtatccgtgccaacgccactccccttggcgatctcgccgccggggagttcgtgctcttcatctcctacctctcctgcgggttggcgctgccgatctcgcctttcttcttgctgctgctggaggagctcggcctctag

SEQ ID NO: 4236 - DNA, 324 bp, Zea mays
  Peptide Sequence Number=SeqID_46015
atgtcggcctcggtgcaccggattgttccccaccgcggcgggattgctcgccagagcactctccgatccgccagggaccctcccccatcgtctgcccgccctcggtcccgttctcgcgacctaagctccgccatagtgcttgttaggttctccccaacagccctagcctgcccagaccgccccagaacccccagatccctggccttcctcgtctccggtggctacgccaccacgggcacgagcggcgctgcccttggtcggtcagagactgttaagtccctggacgcccgatcttggccgcccacccttgttccgatggcctag

SEQ ID NO: 4237 - DNA, 411 bp, Zea mays
  Peptide Sequence Number=SeqID_46016
atgcggcggcccaacaaggagcggctccggcaaactgaaatccatcgcggtgagacaaaaattagtgcaaaacaagcgttgggtgaagttccttacctagaggcggtgctcggggcagcttgtcacgacgctgggaggctccagttgaccggacaacaagggaacgcgacggcggcgacctccggtctgcgcaggggaggagttaggcgtggacggggcagaggggacggtgaaaggggaaaccagagcgggttcctggtgcactgtgctcaggcgaagctcatcgtggccaaggcaatggcaaaggcccgtcgaggacgacataacgtcggtggccgcgctgcgagctgggagagggcaaggggtaggggtagagtgaatgaggggcaggggcgtgccaagggggtctga

SEQ ID NO: 4238 - DNA, 1083 bp, Zea mays
  Peptide Sequence Number=SeqID_46017
atggcctccgccggcgacatcggggaagcagaggcgacgcttacaacgaacaggatgacgatctacgactgcctaggcgaaggcgaggaggcatcgccgccttccccggagacgccgccgcagctgcggctcccgaggttcacctgcgccaggatccggttcggcaggctcgggaggaagcgcggcggaaggggtggccggaaggaggtcgccgcggccgagaagagcgaggacgcgtcggtgggctcctcaggtgcgcgggcgcgtgatcattctctctttgtgcagtcgtgccgtcgatcggtccctgcctgttccagggccttgatcccggccaccatatatatcgcaggatggaagcaagcggcggcgggaagcagcggcggcggcggtagtagtgtggcgaccggacaaaccggcatggggctaagcatgctcttcctccttgcgaggacatgtgtggagctcaaccggatggccgaggtgcgcgcgcagatggagacgctgctcaaggagatccgagacgaggctagcagggtgaaggccggctccgcggaccacgtcgtccttgtcgcaccgaaaacctgcaacaacctgcggccgtcgtcgacttccactgtgtcgtcgagctgcgtctcggacacgagcaccaactgcctggagatccggcgcggcgaggacggggagtggacgtcggagccagagtggaagtgcaccaccgagcgagaaactcccgatcagtgctgggtccagtcgccgtccgacggcgagttcatcgagctggagggagggcgcttcggcaccggcggcgggaattcccagcgaggcgccgcggtcgacgagagcgacgacgacgacggcgagtcgtgcgggaggcggcacgaggttggagtctccgcgacggagctggagcggaggctgcacgagctccagcaccgccgggacagggagcggatcgaggcgctggagtcggcgctgcggcgcgcgcagcgaaagctgacagagaaggagatggaggcgcgactgtggcaggacacggccacactggcgctggggcagcccacgccgcgggacggacagtga

SEQ ID NO: 4239 - DNA, 408 bp, Zea mays
  Peptide Sequence Number=SeqID_46018
atgaacagggggcggcttgggcacctacaggtgggccccaccggtgccgacggcggctgggcaactgcccagcgcgcacacgcgcgacggaagcggggcaagccatttgggcggctgggccgcgagccagccggcctgtgggctgcgcgcgttaaccttgctgacggagagtacgtcctcgtgccggagcaaggagctgctcaggaggtagccccagatccagcaccagagcctgcaccagaggacatgcctgccactgctttggaaggcaagccccggaatcctgttgagatgaatactagttctctggaggacatggttgctggagtgacttggccgtccatcttgccaccgggttggactgtcgagtgggaccctacttcggttgaggaggagcatgaggagtga

SEQ ID NO: 4240 - DNA, 378 bp, Zea mays
  Peptide Sequence Number=SeqID_46019
atggcggccggagcttggccgtggcgcccggcgcggccccccggcgtcctgcgcaggcccgccctggctgctggcgcgcggccatggccccgccgtggcttcggcgcgcccgcgcggcttgctcgtggaggcctacgcggcgcgtggcatcctgcatgcgacatgttcgcagcagcaactcgctcacagaacgacctggttgaggagcccgaagaactcgcaagagaagcccttgagcagcagtcggttggtggaggcaaagatgttcggattacaggtggcaatgagattgatggttttggtattgaccctggtaatggcgaagatgaagccgtggaaggagacttccaggagttccaagactacgacgagttatag

SEQ ID NO: 4241 - DNA, 276 bp, Zea mays
  Peptide Sequence Number=SeqID_46020
atggagcgcggatccgcagcgaggcacagacccagggctcgtctccttctccccgcggtcgcccagctcgatcccacgaccaagcagacgggatggtgcgccacggaaatccctccaatgtcgaccgcacgtagccacggaactcccaggagttgtgcgagttctccgcgcacgaatcggcaacgaggaaacctctctgttcccaatcttctctcgatcgctccctgtggtggtctttttggctctcggcagcaaaagcctctcgctgcatgctaa

SEQ ID NO: 4242 - DNA, 411 bp, Zea mays
  Peptide Sequence Number=SeqID_46021
atgacgcaggatggcggcgccgccggccaaccacgacggcaacctcaccggtgcacaccaactaggcaaaatagagacctaatcgacactctgactagtgctatacgtagagtagaaagtaacagaggtgatgaggtacttcttaccggcgatctagcagtgaagcaggcgggccacggcgcgaggggttccgcggcagagctaggacttctgacgaggaattccacgtgcgcagagacaccaacggagaaattagcgaccgccaaggtgtcaaggggtcacagtgcaactctagagtgccccacggatatcccagagcctgtggtttacgtgttcgacggcggggacctcgtgctctcccgacgagctcacggtgtgctggcggcgcgaggcttgactcagggtgggtag

SEQ ID NO: 4243 - DNA, 855 bp, Zea mays
  Peptide Sequence Number=SeqID_46022
atgcccggcataccgagggatgtcaccgagcactcactggacatccaagccggagcccgacccgtgaagcagcatctgtgccgtttcgacgaagaaaagcgcagggccataggcgaggaggtccacaagctattgctgcagggttcatcaaagaggtattccatcctgaatggtgcaacataccaaaggtgcatgaaccacgtgttcggagaacacatcggccaaacggttgaggcttacgtcgatgacatcgttgtcaagacgaagaaagcctccgatctcctctctgaccttgagacgatgttcaaatgtctgagagcgaaaggcgtaaaactcaatcccgagaagtgtgtcttcagagtcccccgaggcatgctcctggggttcgtcgtctccgagcgaggcatcgaagccaacccggagaaaatcgcggccatcaccaacatgggaccgatcaaagatttgaatggagtacaaagggtcatgggatgccttgcggctctgagccacttcatctcgcgcctcggcgagaaaggcttgcccttgtaccgccttttaaggaagtccgagcgcttcacttggacccctgtggccgaggaagccctcagaaaccttaaggcactccttaccaatgcgctcatcttggtgccccccgccgcgggagaagccctcttgatctacgtagccgcaaccactcaggtggtcagtgccacgatcgtagtcgagagacgagaggaagggcatgcactgctcatccagaggccaatctacttcatcagcgaggtgctatccgagaccaagatctgctacccacaaattcagaagctactatatgcagtaattctgacacggtga

SEQ ID NO: 4244 - DNA, 411 bp, Zea mays
  Peptide Sequence Number=SeqID_46023
atggccgcccctctcggatttctcacggtgggtgacgctaaggcgatagtgtgcatagacggatggaagaaaaggagaagtggacgacgcgctagacattatatgcccaaggtaggggaacgagctgacgactgggcccacatgaaagtgaaacgggagcgtgcaatgaggatggcgagcgggtcccactggacagccagaggacttgctgaacgcgcgataggaagcgagacttgccaaaggggcccgcagtgtcggtctcgcgatgatggcgtgcgcacgttagcgtggcgcccgggcccacacttcagcgacccaagtggtgtgcatgctgagagggcgactggcattccaggaccacccgtcggcaccgtgacctggagttgggctatgcggagagggaattgctag

SEQ ID NO: 4245 - DNA, 366 bp, Zea mays
  Peptide Sequence Number=SeqID_46024
atggcggttgcgcggcgagtggagcccgaccacggtgctgctcggcgcgaagaggcgctgcgcaggggcgtcgatggccgtgagcacgacgagtggcagcggcaggcgcggaaccgctgcgcgcggtgcgcggacgtgggcgcgcatgcaggcggcggcggcggcctccacgcgggcgagcggttgcgcgcaggggcgcgctacgcgcggctgggcgtgcggcctgggctgtggtcgcggctgggctgccttgctggctgcttgcgcgcgtgggctggggctggctcgctgggtgggccgagcgcggagctgggctggcgcgctggctgcttgcgcgcgcggggggaagaggggctggcgcgctag

SEQ ID NO: 4246 - DNA, 648 bp, Zea mays
  Peptide Sequence Number=SeqID_46025
atggcggcgtgggtgaggtcctacagttatgtgcagttgcgatgcggcaggcgggatcaggtaggggaacgagctgacgactgggcccacatggaagtgaaacgggagcgtgcaatgaggatgaaccgcccgtcgcgcagtttgtttcgccagacgcacagtttttcctcccgagtgcccagttccctcgccagcgacctcgccagtgacctcgtcgtgctcacgaccatcgacgcccctgcgcagcgcctcttcgcgccgagcagcaccgtggtcgggctccactcgccgcgcaaccgccatcgtcgacctccgttcgccggcctcgctacaccctgcccttatcgccgtcgccgaggtgaactcgtcctccctttcctctctctaccgctcgcttcctcgccgctcactcgccatggccggggttctgcggagccgacccggacgcccatgtccctctccatcccgtcggtccgcaatcgcctcgccggtcagcctctgcgcgatctccggccagtgcgcagcccagctccctcgcgcgcggctggactccctgccgtcgcggcccgcaacgcgcagcaagcccgacgtcccgacgtgcagaccccacgcgccttcgcctcgtccctgcgcgcagcggccgagtag

SEQ ID NO: 4247 - DNA, 375 bp, Zea mays
  Peptide Sequence Number=SeqID_46026
atggggggcctccctgtcagtgacccctccctcacttatccacgcactcaccgtggcctctatggattggggcctagtgggaatcgctgtggcaccctgatgatgcccgtggtcttcccaccttgggaattggaccacaagccacacaatttatcgctgtcgaaccgatgccgccgtggagccgtgactttccgtgggcagggattgggcaccacttacctcttcgtgccaggaaatcatgaccatcgtatccaatgggaacggtgtagattagtcaatggctggggcaaacctcaaccatggattcaaaatcaagcgggtgtgagcgcttacctcttcattgcacactcagatctaatcgtaaccactgattga

SEQ ID NO: 4248 - DNA, 315 bp, Zea mays
  Peptide Sequence Number=SeqID_46027
atgccgaacgatggcgtcatgtggcgggttgcacctgtagtggtcatcgtagaaggcgcaggccaccagcctcaccagtctgtcaaaaaaccaacccacccgatcccgcacggaggtcaaaaaaacggcggcgaccaagctttcgagaatgaagtagggtcggggctcaccgcagccgccgtcgtgctaggaggagagcatggaagccctgacggcgagtgtggcggtctccttgcaccgcaggcccgcgatagcgtcactgcgaacgagattcgtgcgagcgggacgatggaggaaggagggcgaggccgttga

SEQ ID NO: 4249 - DNA, 858 bp, Zea mays
  Peptide Sequence Number=SeqID_46028
atggcgccgccgcgtccacccacaggaccgatcctcttcctgcccctcgtcttcctcttcctctttaccaccgccgttgcgtctgcggcggcgcctgaggatgaaaagttcactgaggagctgctcctgcggtcgctcccggaccgcaaggcactggcacacttccacttccgctcctctgctccccccgctgcctccgttggtcggcaccaccacctcttccccaaggccatctcccagctggttaagaaatatcatattagcgagttggagctatctttcacccagggaagatggaactatgaacagtggggtggatttgatcctatgtcaactaataatgcaaagcctcctgtttctgctcctcgctggggcttcaaactgaacgaaggcaatttgcgatatggtgcattgcctcgtgaagcagtatgcactgagaatctgacaccttggttgaaacttcttccatgtcgtgacaaagctaggataacttctttgctgtacaggccttcaatttacaaaggatattaccattcacaaaaactgaaactgagatcctcccagtcacttggtattattcttgatcaaactctgactgttgtgctgcaaccaaataatgtacatggtgaacagctacattccaatcatggtcaacttcagcccaactggtccatgagacatcttttcaacagaaagttatcagggaaatgccttgtttctaaatccagcagagtattcattgaggttgataaaggcattgctgacaaagttaacatatctagaagtgttcattcttggagtaatgaattctttgtattgtccaatagcccggacaagttgatcaaaggtaaagtttag

SEQ ID NO: 4250 - DNA, 123 bp, Zea mays
  Peptide Sequence Number=SeqID_46029
atggacctatctgcaacttgtggacagcctgcagaaacagctcgtattggagctactaacaaattgctttcgagttgtgggcatatggatatgttctcctttgactacatgttagatatctga

SEQ ID NO: 4251 - DNA, 468 bp, Zea mays
  Peptide Sequence Number=SeqID_46030
atggtgggtgcaagtgcaaccactgcacgacggcgaccgaggtcagtgggggcattggacgccaaggcggtttaccttgcaaggttagaaactcgattcgaatcgtctgcttctcgtaggtacatggtgcagttgtatgaggagcaccgggtgccacgctccctgcaaagcgatgccatgacgaacctcactaggctcactcaaacagcaaagaccaccctcgacgatagggaggacttcatggtcgatctaccttcagagttggtggagaaggatctacaggttgaacagatgagcaaccgcatccaagagttggagcagcaggtggaaatctgggacaacaccattgaggtcctggaaaatcagctccatgatgtgcaagaggagcttgatgaggccaacactcacatagaaatgcatcaccaagacatgaacgcaatggaggcaggcaggccaacgctcacatag

SEQ ID NO: 4252 - DNA, 2601 bp, Zea mays
  Peptide Sequence Number=SeqID_46031
atggcggtcggggacgcgctgcgacggctgtgcgaggagatcgggtggtcctacgccgtcttctggaaggccatcggtgctgcagaccccgtgcatttggtgcaggaggacggctactgtggccacacgtcatgtcctgtcggatctgagccttccgaatctctgcccagcgacgccgggtgctctgttcctgctgctaacaccatctgctcgcttgttcacagcgttatggcgtcgcaggtccatgtcgtcggacaagggaccgtaggccgtgctgcgttcagtggcaaccaccaatggatcgtccgcggtaccgccaatggtcacgggctctcctccgaggttgctgcggagatgaacaatcagttcagagttggcattcagacaattgcgatcattcctgtgctgccacggggtgtcctgcagttaggctctgctggtttggttatggaaaacataaattttgtgatgtttgcaaagaagttgtgttctcagctaaacaaccgttcaagcatggctgcatctgcttcggctaaaaacgctttaagtcagcatggccagtcacgtcctgatactgcaactgtgtcaactaggacaccaccaaatgcattgctgaatgcatctttgcttaaggttgcacaacagagtggtcaccctgttagagagcacgttgtctatgctgagcctgaccttaggtttagacaacaagcatccttctgcgagaaccaatttggaagtaatttacagagtgttgttatgaactcaagtttgacctccccaagcttggcatcagttaaaaagcagccactcttgatgaacagcattgggcagttacagttcagtaattatgtgcattcatcggcagatttggcaagagatgtcatattaaaatcccttgtgcgccaggactcttctgtctgcgaaactacaaacatgaatatgcatcgtggaagatatatggtatccaatgatataaatggttctggggattttgattttctccctgtaggtgccaaagcaagcagagccaacttatcaaccagtgtgtcgagtcaaatattggaccacacaacaagaacactgcagcaaaaacagtctcttgtcccattcaaagtcacccaatcttctgaattcaataagaaaatggagaaccctgaaaatggatcatttcaaaccccttcagttccaacttctgaatctggtggtcaggtttctaacagtttcaacatggaccaagagaatcaattgattatgtcaaacaatgtacggcaagttcaaaagattaatagatttagtgatccaagtgctaatgtaagcactcagagaatgaagaacagggatgtatgcgagtcgggaatgcccattgagagaggttcctcgttgctagtggagcctggtgcagataatgacttgtttgatatgcttggttctgaatttcatcagttctcccacaacgttgggtctgatttggtcacctggagtggtacagagtctcagaattcagatagagatggccctgaatcatcaatatatctcaatagctcaccccttttcagttcgttagacaacgagcttcactattctggtatcttatcactaactgatactgatcaactattggatgctgtcatctcaaatgtcaatccaagtagtaaacagtgtcctgatgatagtgcttcttgcaagactgcattgacggatgttcctagcacatctcatcttggttcaatagacttgaagagatgtgagtcctccggcgttccttcagtgctaattaagcacgaattggcacagcttgttaagcaaccatgtatttttgacaaatctgagaactgtctttcccaaaataatggaatgcacaagtctcagatacgcctttggattgagagtggtcagaacatgaaatgtgaaagtacttcagcttctaacagcaaaggtcttgatacgccaagcaaggcgaatcgcaagagatctcgacccggtgaaagtgctaagccacgacctaaggaccggcagctgatacaggaccgtattaaagagcttcgtgagcttgtaccgaatggggcaaagtgtagcattgatggtttgttggagaagacggttaagcacatgcttttcttacaaagtgtgacgaagaatgcagacaagctcaaggactctaccgagtctaagatacttggtagtgaaaatggccccctttggaaagactacttcgaaggtggggctacctgggcttttgatgtcggctctcagtctatgacatgtccaatcattgttgaggatcttgaccgacctcgtcagatgcttgtggagatgctttgcgaggatagaggaatcttcttggagatagctgatttcatcaaaggactaggactgactatcttgaggggtgtgatggaaatgcgcaaaagtaaaatctgggcacggttcactgttgaggcgaaccgggacgtaaccagaatggagatctttctatcgcttgtgcgcttattggagccaaactgtgacggcagtgcagcggcggagaacgctagcaacatgaacatgcctcttggcttggtgcaccaacctgtcatcccagcaacaggcagcatccaatga

SEQ ID NO: 4253 - DNA, 192 bp, Zea mays
  Peptide Sequence Number=SeqID_46032
atggatggctttggtggacgtaaagcgactggaaagctcaggaataatcgaaagcttagctgcatgtatccaggaattgattgttattccaaggaattgaagatgaaacacatgtcgtttctgccgcgtgcagaacaacaacaacaacaacaacaaaaggagcgtgatgttaatgtcgtcctagcttgttga

SEQ ID NO: 4254 - DNA, 432 bp, Zea mays
  Peptide Sequence Number=SeqID_46033
atggcgctagggcttggttgggtgaacagggcgctacaacgcgaaaacgaagaagaagtaagtgttgaagaagaaaagactgcaccaccaactgaaactccacctgccgggaactgtttttattttgatatctggggaacaaagcccgaatcccctacaatacaaggcaagccccgatggaatgggatgttttcaaaaataaaacttgatggtggatccatcatggccgtgatgggttcaacatcggagaagatgtacctctaccagactaataccagaaaggccaacgcgcaatgggagtggagagatggcgagagtagcgtgtaccctccgtggcaagaggttggacgatggtgtatctgtgctctcggttggcgtgaacccggtctggtcttaagaacccggttgcaagttgacatatgcaaggtttaa

SEQ ID NO: 4255 - DNA, 771 bp, Zea mays
  Peptide Sequence Number=SeqID_46034
atgtccgaggccggccttggctgctgtcagcctcactctgtcgggtggctcatcagtcaaagtggcacaggcggcgctgtcctcttgtcagaccggtcagtagagcggcgaagtgactgcggtcacttcgactctgtcgactggagggcgtgcgtcaggataaagcttcgtgttgatgggggttaccagctgagatttaggggtcttgaggcagtccatatgaacggcgccttacaaccctacgcctccttcaatcgacgacgccgctcccctcccgcgtcgcctctgctccccacccacgtcgagaatgccggcgacctctacggctctgagtcacccccactccctgcccacaccgagcccaatggcgaagttgtcgacgaggctcgcatgacggcagcctcagcgtctccaatcctcatccgtgtcgcccccactttctgcccttatcacccccgcgtggagcccaacagcgaggatgtcgacgaggcccgcgtgacgatggcccccacagctccaatctgcctctgtgtcgccctagctccccgtccatatcgagctcaagtaggacaaggacgaggagggcagtgccaacaatgtggaagggacgggctcaacaccttcatgttcatctacaacgtcttcaccgtcaccgatcccaagtgcgacggtcgcgactcacatcccaattcttcaccgccaagtgcccgcgcccccaccggccattgccactctgccaaggacagggaagagaggaaccgatttctttag

SEQ ID NO: 4256 - DNA, 213 bp, Zea mays
  Peptide Sequence Number=SeqID_46035
atggaaaagcccagatcttctgggaagactaatggaggcaagactccatcaaaggaggccggcgacaagcacaaggaagacaaggaagaatctgttagctctatcaaatcacacaagatgggcgacaagaagaaaaagaagatgaagaaggtgttctactataagactgactcatccacgccctcaacctccgacgccgagttgacatcttaa

SEQ ID NO: 4257 - DNA, 504 bp, Zea mays
  Peptide Sequence Number=SeqID_46036
atggctgccttcggtttaactttgctccttttatttgaaccctttcttggactttgtattgaagggtggaatgatgagtctatcagcctaggaaaaagggcatcggttgatgttcagagaactggaaaattaatgatggagaagagtgggaaaaaggcaaaaaatgaagagttagggacagaggaaaatgatatgatcattgaatatcattctgggtcaacttctaaaatgattgggactttgatcactactgacaaatctgataaactatcagatgtggcaaaagatgttggtgaaaaagaaggtagtgaaggggatgtagaatttaacgaaagtgaagatgacttacttagttctcaagaactcgatgtgctggtcaaggatatgggaatggatatcacaaactctcaggatgaaatgttgaatgaaaaggtggattctgaaaagcaagatgggaatgcaaaagaaaaaacaagaaaaacaagggaaaaggagctgatctaa

SEQ ID NO: 4258 - DNA, 297 bp, Zea mays
  Peptide Sequence Number=SeqID_46037
atgaacaccgcgcagcagggagctcaagcaccaggccacggtggacagagatcagacaagaatcagagcaccggagaagtgcacgattccggcaatagagcacaggtgtccgtccgaccgatcaaccacgatcgaggagctattggtttggcaagcagacttccagttccagctgacggaaacgatccatcggccgaatacatcccgtggaccggcatgcatgggatgggcggaggacatgagtccgaaagcgacgtgaaccagcgtagcataccaggtgtcagtcagtacgtgtga

SEQ ID NO: 4259 - DNA, 643 bp, Zea mays
  Peptide Sequence Number=SeqID_46038
cgcacgacgatgtcgcacgtctgcgacgatcccgtaccgtgagaagcagtcatcatcatccacagactctacgtgctatacgctccagcgaccttccctcaccgcacataagcgcgcccgtacccgcgacccggcgtccgcgccccgacgtcccgcgcccgtccccgcctacaccgggcgccctcactcagaccccgggccgggccgccgctcccccacggcctcccgcgaccggccgccctcgccctcgtccgccccggccccggcgaccccggccgctcggctcggccgctccggcgagcccgccctcgcctcgccccggcgcgcctcgcgccgccacgcccggccgcctccggcgagccgcccggcccgtcctcccccagctcagccccgccccgccgccccggccgccctcactagaccccgcccccggcttggccgccctcggctgcctcgcccccggcgagccccgcgcccgcgtcggccccgcctcgccgccctccggcgagccgccctcgcccggccccgctcggccccgccctcgcgcccgcctcccggcaagctcggcgccccccccggtaaagaagaaggcgtcgaggtggatctactggagttccaggacgtcgacgagttcgaggattag

SEQ ID NO: 4260 - DNA, 468 bp, Zea mays
  Peptide Sequence Number=SeqID_46039
atgatgctgcttggattcatatctctgcttctggctgcgatgtcaagaatcatctcggggatctgcatcgactccaagtactacaacagcagattctccccgtgcaccaaagaagaggtccaagaatcgataaatgcagagcatgccattgctcacgcgcgcaagcatttaccggagttcatcctgcaccattcaccgtggagaaatttgaatactagttaccataaccatgaaggctgccgtgagttgaaggcagagcatgggaatggagaagaagagaagggaagacggaggaggcgcgaggaagagaaggatgggagcgccgccagtaatggacggggacggccgccgggagggagcttggtcagatccgttatggacaaacgagatagcgtgcatgtgcttaacaagccagatggggctaaatcactgttggataacataagactaagtcacaacgtattataa

SEQ ID NO: 4261 - DNA, 378 bp, Zea mays
  Peptide Sequence Number=SeqID_46040
atgtcgtgggacggggctactgctgttgcaacacaggaagggcaagctcaccatggtgaagctgcaggcggccatgggaagaggtggagcagtgagaggcgacttaaggtaagggtgccatggcaggcctgctgcaggggagggcgtcgagctgcagcaaggagggacggccatgggagatggggcgagctcccgggcagggaggagagggcactgaccagccatccagagaggaggcgtccatgggggaagagcagggcgaccagttgtaggagatggggagggctggtcgctggaggcctggagaggatgaggttgagagagagggcggcatgcgtgctgccagcaagggaagacgtgggaaaatatcccagatag

SEQ ID NO: 4262 - DNA, 381 bp, Zea mays
  Peptide Sequence Number=SeqID_46041
atggacacaaaggtgggtggcatccagggatcaatgcgatgtaaactccaaattccagtgcgcgacggccgacacagagtcacatcaagggcggagcaccgtacctatgaggtgaacggtggtggcgccgatggcttccctcgcgtcttctacagcggcaagcaattgccaccaaacacgacctcctcggggcctgcctggtcaccatggagtgtccttcgcgagacccgcaccttccccccccccggtggtcgaccaacagccaccgcgatgatacacaacagcggctccccggatctgatcatcggcggtggtgactacaagcggcggctagactcccaatcgagacaaagacctcgcaagcggacccctcggggatag

SEQ ID NO: 4263 - DNA, 783 bp, Zea mays
  Peptide Sequence Number=SeqID_46042
atggcgccccgcacgctctatgacgacggcggctctcagcccccttacggaagcaagaggacgtcagcaaggactcgacagccccgacagctgtccttccgccaggctccagcgctcctccgacggccacaacaccacatgaaccggccatcgccgcccatgttcttcctctccctcccctattctctctcctccctccctcgcttctctctgtcccgcgcaagccgccaggaactgaccggtcccgcgcccaccgagcagcgccccaagcaccgacgcaccaggccgcgctcaggagccccgcgcgcccctgtctccttccccgccgcgaccccgaccgacgccctgcaccgacccgcgaccccgcctaggccgcgacacccgctaccgcgccgaagcagtcgagcacgcgccagcaagccaacggtcgttacccgacgcgtccgagccgacccagccacccgcccacgaccgttcttcgtctccgagttaatggaacatcaaagcatccgtttcttcttccccccattacctccattgatggccatgaagattctggccacctctctccctcccccggccgaccttccctctccctccctctcctctataaaaaccgagctcctcctctctcccttcaccctacccgagctcgcccccatctctctcactctctcctcaccgttagagccaccgtcgtcgtcaccggagttcgccacgccgtcgctagagcccgtggaactcgccggagctacgcccccgtcgtaccgagccttcacctag

SEQ ID NO: 4264 - DNA, 1632 bp, Zea mays
  Peptide Sequence Number=SeqID_46043
atggcgtccagcggcgaggcagcactgctgggcggctccgtcggcgacgcgcgggcgccgccgctcccgtggaagctgctggcgctgctgtgcgcggcgctcgcggtcgcgtggtgcgccgtgcgcgcgctggagtgggcgtggtggcggccgcggcgcctggcgcgggcgctgcggtcgcagggcctctgcggcacgtcgtaccgctccctcgcgggcgacgcgccgctgacggaggagctgaaccgggaggccaggtcccggcccctgccgctgggctgccacgacgtcgcgcccagggcgatgcccttgttccaccagaccatgaaggagcacggcaagacgtcgatcacctggttcgggccggtgccgagggtgaccatcaccaagcctgagctggtgcgcgaggtgctgtccaacaagttcggccactacgagaagctcaagttgcgcaagctccagaggatgctgcacaacggcctgggcagccacgagggcgacaagtgggccaagcaccgcaggatcatcaaccccgcgttccacctcgagaaactcaagcggatgttgccggccttcgccgcgtgctgcacggacctggtggagaggtgggaaggcctggtcgcggatgggcagcagccgtgcgaggtggacgtgtggcctgagatgcagaacctgacgggggacgtcatctctcgcgccgcgttcggcagcagctacctcgaaggcaggaggatcttccagctccagggggagcaggtccagctcgtcgtccaggccatgcacaagcttcacatccctggatacctgtacctgcccacgaaaaccaaccgaaggatgaagcggatcgcgtcggagatccaggagctcctcaagggcatcatcgccaagagagagaacgcgctgagaaccggcggcggcgcggcgagcgacgacctccttggcctgctcctggagtccaacatggagcactgcaggggtgacggcggcaagtccaaggcctccggcatcaccaccgacgacgtcatcggggagtgcaagctgttctacttcgccgggatggagaccacgtcggtgctgctcacgtggaccatggtcgtgctctccatgcacccggagtggcaggaccgggccagggaggaggtgctccacgtcttcggtgacaggacgacgccggactacgacggcctcagccgcctcagaatcgtgacgatggtgctctacgaggtgctgcgcctgtacacgccgctgacggcgctccagcgccagacgtacaagccgatggagctcggcggcgtcaggtacccggccggcgtgatgctgatgctgccgctgctgtgcatccaccacgacaaggacgtgtggggtcccgacgcgagcgagttcaggccgcagaggttcgccgagggcgtctccagggcgtccagggacgcgccggccttcttccccttcggctggggcccgcgcacctgcatcggccagagcttcgcgctgctcgaggccaagatggggctctccatgatcctgcagcgcttcgcgttcgagctctcgccggcctacacgcacgcgccgtttgcacacggcatgctgcagccggagcacggcgcgcaggtcatgctcaggcgcctcccctga

SEQ ID NO: 4265 - DNA, 1557 bp, Zea mays
  Peptide Sequence Number=SeqID_46044
atggacgacgacgtcgtcgtagcagctgcagctgcagctgcagccgcggcggcttcgtcttcgccatcgccgccgtggagcctgctccaggggctccttgcgctgctcgtcgcgtggggggcctaccgggcggcgcagacgttctggctgcggccgcggcggctcggccgggcgctccgcgcgcaggggctcaccggcacggcgtaccgcttcccggcgggcgacctcaaggagaacgcccgcctcaacgacgaggcgcggtccaggcccatgcagccgccgtgtagccatgacgtcgttccccgcgtcatgccgcatctcttcaacaccgtcaaggaccacggcaacatctgtattacctggttcggaccgattcccagggtggtgatcacggaggcagagttagtcagagacatcctatcgaacaagtttggccacttcgagaagttcacgaacaagagtctcgggaagatgatcgccctcggggtggcgagctacgacggcgagaaatgggccaaacacaggaggatcctgaaccccgcgttccatctcgagaagctcaagcgcatgcagccggcgttcttgacgtgctgcaccgagctcattgatcgctgggacaaggaggtcgctggtggttccgacgggtcattcgagctggacgtctggccggagttccagagcctcaccggcgacgtgatctcccgcacggcgttcggcagcagcttcatggaagggcggaggatcttccagctccaggccgagcaagcggagcgagtgatcaaggctttccagtacatatacatcccaggcttcgtgttcttcccgacacccaacaaccggaggatgaaggagatcaacagggagatcgaagggactctgagaggcatgatcgagaagagggagcgcgcgatcgagaacggcgaagcgagcggcgacgacctgctcggcctgctgctgcagtccaacatggagagcgggaaaggcggcctgaggatgagcacggaggacgtggtcgaggagtgcaagctcttctacttcgccggcatggagaccacgtcggtgctgctcacctggacgctcgtcatcctaggcatgcaccccgagtggcaggaccgcgccagggaggaggttacgatgatactgtacgaggtgctcaggctgtacccgccggcggtgacgctgaaccgaagaacgttcaaagacatgcagatcggaggcatcacgtaccctgcgggggtgatcctggagctccccgtgatcgtcgtccaccacgaccccgacgtctggggcaaggacgcgcacgagttcaggccggagaggttcgccgaggggatctccaaggcgaccaaggaccagcagccggcgttcttcccgttcggctgggggccgaggatctgcatcggccagaacttcgcgctgctcgaggccaagatggccctcagcatgatcctccagcgcttccagttccggctgtccccttcctacacgcatgcgccgtacaccgtccttctgctgcatcctcagcatggcgctccaattattttcgacaggatctga

SEQ ID NO: 4266 - DNA, 1434 bp, Zea mays
  Peptide Sequence Number=SeqID_46045
atggccctgcaggtgcttctgtggcaggccggccggcttctgcgccagctgtggtggcagccccggcggctggagcgggcgctgcgcgcacagggcatccgcggcacggcgtaccgcttccccgccggcgacctcagggaatacggccggctggccaacaaggaggcatggtcgaagcccctgccgccgcgctgccacgacatcgcacaccgggtgacgccgttcctgcaccggcttgtcctggagcacgggaagacgagcatgtcctggttcggctccacccccagggtgaccatcgtcgaccctgcgctgggcgctggccaaggacgtgctgtccagcaagttcgggcacttggagaagctcaacttcccggcgctggccaagagctggtgagtaggtgggcggagtgcctcggcccggacggttcctgcgagctggatgtctggcccgagctgcagaacctcaccggagacgtcatttcgcgcaccgcgttcggcagcagctaccaccaaggaagaaggattttccagctgcagaccgaacaggcttcgcttgtcatgacgaacattcaaaacattgtaatccccggttacaggtacttgcctaccgcgaacaacagaaagctgcggaagaacaacagagaggtggaatcgattctgcgaggcataattgggaagagaattcgagcgatggaacgaggcgagagcagcgaagacgacttgctgggtgtattgctggagacgacgagcacgagagacgacgctgacgacgacgggaacaacaatagccagtccaccgccggcatggggctgacgatccaagacgttatcgaggagtgcaagttgttctatttcgccgggatggagaccacgtcggtgctgctcacgtggacaatggtcgtgctaagcgcgcatccggagtggcaggaccgcgcgagggaggaggtgctaggtctgtttggcagagacaagcccgagcaccatggcctaagccgccttaagaccgtgaccatggtcctgtacgaggttctccggctgtacccgccggcgaccactctcgtccggcgaacggacaaggagatggaggtcggaggcgtcacctaccccgccggcgtgctcctggacctgcccgtgctcctcatccaccacgacccggacatctggggagacgacgcgcacgagttcaggcccgagaggttctccgagggggtctccagggcctcctccagggaccccggcgcgttcctcccgttcggccgggggccgcgcgtctgcatcggccagaacttcgcgctgctggaggccaagatggcgctgtgcatgatccttcagcgcttccagttcgagctcgcgccgtcgtacgctcacgcgccgcataccgtgataacgttgcatcccatgcatggtgcgcaacttaagctcagagcaatatga

SEQ ID NO: 4267 - DNA, 633 bp, Zea mays
  Peptide Sequence Number=SeqID_46046
atggagccggactgtccgaccttgccaggtctgccgccccctattcggtgccgccagttgcatctcctgtggggtccacggaagcgttcggcggcacctcacagtggcggtggcggcggccccgccctcgccttcgtcctcaccttcgtcgggaccgctctacccgacgcctccacccaccgagcaggaggtggagagggtcaagctcgagcaggttatgaggagactagagaaaacagcaaggtatttcaagaatttgggtaccctggggttctggtcccaattgttgtaacggggaaggtgacatcaccctttacattctatgcaactgctgctggtattgctgctgcttttatttcagtcttctggtcatttggttacatccgtctctctgaaaggcttagaaaaacatccaaagaacctgctaaggctcctccacgtgctgatgttgttaagagccttaaaaatggcatcgtggttaatattcttgggatgggcgctgctgttctcggcatgcaagctactgttggtgctttggtagcaaaagctctcacaacctctgcagtaccctattatcaggctgctggccaaagccctgtcttggctttagatgttttcctagttcagagatag

SEQ ID NO: 4268 - DNA, 1134 bp, Zea mays
  Peptide Sequence Number=SeqID_46047
atgggcgaaacaatctcgttcgcccctcggaaggccatcaagtcccaggtcctagcggacttcgtggccgaatgggtcgacacccagctcccaacagctccgatccaaccggagctctggaccatgttcttcgacgggtcgctgatgaagacaggagccggcgcaggcctactcttcgtctcgcccctcgggaagcacctacgctacgtgctacgtctccatttcccggcatccaacaatgtggctgagtacgaggctctggtcagcggattacggatcgccatcgagctaggggtccgacgcctcgacgctcgcggtgactcgcagctcgtcatcgaccaagtcatgaagaactcccactgccgcgacccgaagatggaggcctactgcgatgaggttccgcgcctggaagacaagttctacgggctcgagctcaaccacatcgcccgacgctacaacgagactgcggatgagctggctaaaatagcctcggggcgaacaacggttcccccggacgtcttctcccgagatctgcatcagccatccgtcaagatcgacggcacgcccgagcctgaggcaccctcggcccagcccgaggtaccctcgacacaaattgtccgcacctgcgaagggtgtcagttctacgcaaggcagacccacctgcccgctcaggctctgcggacgatacccatcacctggccttttgctgtgtggggtctggacctcgtcggccctttgcaaaaggcacccgggggctacacgcacctgttggtcgccatcgacaaattctccaagtggatcgaagtccgacccctaaacagcatcaggtccgagcaggcggtggcgttcttcaccaacatcatccatcgcttcggggtcccaaactccatcatcaccgacaacggcacccagttcacaggcaggaagttcctggacttctgcgaggatcaccacatccgagtggactgggtcgtcgtggctcaccccatgtcaaatgggcaagtagagcgtgccaacgacatgattctgcaaggactcaagcctcggatctacaacgacctcaacaagttcagcaagcgatggataaaggaactcccctcggtggtctggagtctgaggacaacaccgagctga

SEQ ID NO: 4269 - DNA, 570 bp, Zea mays
  Peptide Sequence Number=SeqID_46048
atgaagtcaactagattgtggtgcaagcgtacgttgctacccaagccacaagtggcgctgcatcctgcactggacttttctgccgctgaaagtacactaaacacccttagtgcagggttcggatactccggactaggccttggttaccaggctggcaggctggaacaaaagtatggtctcagttttgaagcccagtgtaaccaaaatcaggcctatgttccaactctgtcctgcctccggaagagcgacaaacaggcgagaggcgcaaagcctcgtcgagtcatgtcatcggctcaccctggttatgcttgtgctgtgcagagcgctttgcagcaggtcgcccgccgctcccgcttgtgtgtcacagtgcacacgcgcgcgcaggaggcggacctatatcctttctattgcaagtcaggccgctgggcgctggccgctccatctttactgttctgcgcaagggtccgcgacctctgctgctttttacaattgctgccgccgtctcgtgttgttggctgttatagcggtgatcgatcactcactgtcactgcccgttctgcactcacttga

SEQ ID NO: 4270 - DNA, 318 bp, Zea mays
  Peptide Sequence Number=SeqID_46049
atggcgttgcgcgcgcggaggcagtgcgcacagaatttggcctggttcggcgctacgatgcctcaggtctggcagacggacgtgaacgctgcggcgccggcagcctgctgctcggttagagcgatgaaccgtctcaacaacaacaacaacaaaaaggatatagatcttccacaacttatcgcgcctgatctgctgatgggaagaaaaggagcggatctgttgatccacggtaacgtagttctcaacacgttatcagtacgctctatctcgacgttgctgcgagatcatatctgcatcaactctctatcaagacggtag

SEQ ID NO: 4271 - DNA, 372 bp, Zea mays
  Peptide Sequence Number=SeqID_46050
atggcggagtacgaccagtacaggtttgagcccctgctcagcagccgccggctcgtggagtacgtcgtgctcaacatggagctggagctggagcatcgcgtgctcggtgtgctcggcccgatggacccgatcgcattatgggcccaggtcgcccgcgcgtcggactttggcaagaacgacaccgtcttctccgcgaaggcgcgtccgcgcgtatcggctggcagctggagcctggggaccatgtggcatgtgctagggtacgacctctgcagcgtcagctcttgcaacaaccacgacctggagagctatgggcagcgccatgaagatgatgcgggggcaggacggcagcgccagcgaccgaagctgcgctga

SEQ ID NO: 4272 - DNA, 1029 bp, Zea mays
  Peptide Sequence Number=SeqID_46051
atggctgccgtgaccgcggcggccgtctctctgccctcctcctcctcctcccctgccgccgccaaggccaaggcgtccgcgtccgcgtccccgtcgtctccatgcggccacctccagttcccgcggcggcacggcggcccgcgcgcggtgcggctgcgcgtgcaggtgtccaccaccgagaccgcggaggcggagccggtcaagaagctggagaaggtgtccaagaagcaggaggaggggctcgtcaccaacaagtacaagcccaaggagccgtacgtcgggaggtgcctgctcaacaccaggatcaccggcgaccaagcgcccggggagacgtggcacatggtcttcagcacagaaggcgaggtcccctacagagagggccagtccatcggcgtcatcgcggatggcgaggacaagaacggcaagccgcacaagctcaggctctactccatcgccagcagcgccctcggagatttcggcgactccaagacggtgtcgctgtgcgtgaagaggctggtctacaccaacgatcagggggaggtcgtcaaaggagtctgctcgaacttcctctgtgacttgaagccaggcgctgaggtgaagatcacagggccagtgggcaaggagatgctcatgcccaaagaccccaacgcaacaatcatcatgtacaccgggctggcgtggctgttcctgggcgtcccgaccagcgacaccctgctgtacaaggaggagctggagaagatgaaggagatggcgccggacaacttccggctggacttcgcggtgagccgggagcagacgaacgcggccggggagaagatgtacatccagacgcgcatggcggagtacaaggaggagctgtgggagctgctcaagaaggacaacacctacgtctacatgtgcgggctcaagggcatggagaagggcatcgacgacatcatgctcgacctcgcagccaaggacgggatcaactggttggactacaagaagcagctcaagaagagcgagcaatggaacgtcgaagtctactga

SEQ ID NO: 4273 - DNA, 633 bp, Zea mays
  Peptide Sequence Number=SeqID_46052
atgctgctccggctgaagattgtcgtcggcgtccactcggtggtgctcccggttcctgttcgaggcggctttggccatggtgcttgctacgcggcactagagccctgctggcgccgcagtcggaggccagcgctagcggcggcaggtggcctcgtcacgaggcggccgaggagcgccacggtggtgatggcgctaaaggaggagcctgagggcagccgccgcggcttcgtcggcagtgggtcgagctgggaccccgggctggagatccaagtcccctcagatccgttccttctctggattaggaaggagagcctcaacgtgggggatcacatctactcctggaaggcgacttgttttttgagttttcaggttgtggatgctaaagttattcatctgggctataataatagctgcatatttttgtcacttaaagatgtaaaggtgatggtggagacaacacttggcaaagaagagttgaaagaggcagttttgatgtgcactaatagggtttcacaagctgagggaatgaaggttgacatatccacgaggttctcatatgaagaactttccggtgctataaacaacttcagtatggaccataaaattgggcatgacgattttggctttgtttag

SEQ ID NO: 4274 - DNA, 306 bp, Zea mays
  Peptide Sequence Number=SeqID_46053
atgggtcactggcgatgtgggccgggcttgccagcacatctgaggcgcgcccactccaagctctcgccgccaagtgggaccctcaaggaaggtgccggcggcctcggcgtgcgtgattggttggtggagaccccagaattgctcaccatcgtgcaccacctccgcaacgttgtggtcagggatccccaggtccccgtggtgtcgcatcgacaaccttgccgaacattcctattggacctatcactcgaagctgagggaaacagatacagcaagaggtgcacacgctacattacgaatttaaattaa

SEQ ID NO: 4275 - DNA, 516 bp, Zea mays
  Peptide Sequence Number=SeqID_46054
atggcgcctcctgttgatgtggccggtctacgccctaggttgggtgatgtggaagctcctccgaagccgaggtcgagtctatcttccgtggccgagcccgagtccgagccctgggtcgggcggagcggagttcgtcgtcttctggggctgagcccaagtccgagccctgggtcgggcggagcggagtttgccgtcttccagggcttagcccgagtccgagccctgggtcgggcggagcggagttcgccgtcttccggggctgagcccaagtccgagccctgggtcgggcggagcggagttcgccgtcttccggggcttagcccgagtccgagccctgggtcgggcggagtggagcttcctatgaccggtcagtggagcggcgaagtgaaggcggtcacttcggctctgtcggctaggggggcgcgcgtcaggataaagctttatgttgatgggggttaccagctgagaattaggagccttgaggcctacatacagcggatcttgcaacccagttga

SEQ ID NO: 4276 - DNA, 381 bp, Zea mays
  Peptide Sequence Number=SeqID_46055
atgaagctgtggaaggagacttccaggagttccaagactacgacgagttctaggtgtgggttagcggcaacccccagtcggctgcctgtgaaggccgcgattatctacgtttcttttccgcactttgatttattttgttgggggccttcgtcttccaaaggtcctcaaaaacatgatttaacaacgtcttccaagtgtgacatacatgaacagcgccgaagctacgcacaaggaagcttcggcgtgatagcaggaaagggaaccgacttaaaggggaaaaggctatttagacctcgatggattaccttagggccattagcaaatataaagggcatggatgtaatttcacatgggctgcaacccgtgcctataaatagatga

SEQ ID NO: 4277 - DNA, 318 bp, Zea mays
  Peptide Sequence Number=SeqID_46056
atgcagtctagctccgccatttcaccgctgccgcaggctgcatggctcacatgcgggttgtggggaggctcaagaaaggcgcgacagaggggagaaggagagcatgatgcaacacatcgacctaacctcgatgtcgcgcttcttgtcagccgtcgtagagtacgcagtggatcaatcgtgtgggtggatgatacttgcggggtcgtacgcctccgtaactaccgtgcgctgaggctgaccctcgtggggccgtacgacaccgaggccgaccatgctaggtgtaggaaacgggtgacgcctaagaggggggtgaattag

SEQ ID NO: 4278 - DNA, 576 bp, Zea mays
  Peptide Sequence Number=SeqID_46057
atggcgcacgcgaaggccgtcgccgtcctcggcgtggtgatcgcgtcgctcctcctcgcggctgagagccgccacattgcccgaaaagacctgggcgtcggccttggtgggggcggcagcggcggcggtggcggcagcctcggtgtcggcacgggtggtggcgtcggggttggtacaggcggcggacttggggttggcacgggtggcgggctgggtgtcggctcagggatcggcgccggcgccggcgtcggcggtggcggctcagggtccgggtcctactcgggctcagggtccgggtcatggtcaggctcgggctcggggtctggcgctccaggctcatcggctggctcttatgctgagtcaggatccgggtcgaacgcagggcccggtggtgcaggagcaggatcctacgcgggctcgagagctggctcttacgcaggctctagctctggaggagcaggatcggatgcgggctctgacgccggctcgtacgctggcccgcacggcggctcgggtgcaggttcctacgcagggtcccatgccggatcctacgctggcagcggacatggcaagtga

SEQ ID NO: 4279 - DNA, 843 bp, Zea mays
  Peptide Sequence Number=SeqID_46058
atggtgctcgtcgacgtgaagaccaccgacgcgtccacctccaccgtgcctgttgtgcccgcggtggagcacctattcctcgtcgtcctcgacgcgcatgcatcgctggttccaccacttggactcgatagccatggggggagggcgactgccatggatggaagggcacgatgggggaggcgcggattgcggctagggcgtggtgggggaggcacgtattgcggctctggcgcggtgggctatgccaccttgccgctaatcatcgcgctccccgtgggcaacatctacccatctagccacctcgccaagccgctccccacctcctatttcgccgccaccccgcgacccctgcccccaccccacgcctcccgccacgatgtgcttagctctaggaccgtcaactacaaccacgagagcatcatccgctcccacgccaccgctgccaccgacgacgacatagtccttagtcgcaccatgtcgatcaccgacccggagaagctcaagagggaggcccttgggctctacaactatgccatcgctggtaatgccgcgtgctggggcaaccgtgctgccactctcattggcctctgccgcctcgacgagaccgttgagtgcgaggagatactgccaccgggttggagagggttgtcgaccaggaggatagccttcgtcgccgggcactgcaaggatggccctgctatgaaccgggacgcgccaacacgggcagcgaaaagcagcgcaaccgcacataaggctgtcgccacctgcgctgcgagggcgtcatcgctgagcgctaagagggccaccgtcgggcgctcgacggctaggatgcaccgccactag

SEQ ID NO: 4280 - DNA, 114 bp, Zea mays
  Peptide Sequence Number=SeqID_46059
atggttatcttctcagacatcaatgcttacgaggtggaccttgatactgatgagaagcactgtttctgccgagagttagatctgttagctgtagtcgaaggaattttaccatga

SEQ ID NO: 4281 - DNA, 600 bp, Zea mays
  Peptide Sequence Number=SeqID_46060
atgcctccgcccttgccctccccccggcaatctcgcatcggcgcccgccccagccccgtagaggtcgcatccgtcagcctcttccccaccacggtccccccttccccacccaccggagaccgcgcccttcccctcttccccaccgcggcatggcgtcggcttacccaccagagactgattcctccaaccccatctcaaccatctgccctcctcaagttcctcgagcacaggagcaggggagggttccaccaggccgaggcgccataccagtgcgctctcgctgcacgtgtcgtcgcgtgggcctttgacttcagcttctccttcctccccagccaccaccgtgttcgtggacctcgcaccacgcgatcccttgcatcgccggtgtgggcgtccgtcgaggagtttgaggccgtgggcgacggcgccacgcccaacgccgcggtgttccggcacgccgtcatagagctgggcgtgaggtcccccagtgggggaggggccaggctcgacgtgcccccaaggaggtggctcacgggcagcttcaacctcactagccgcttcaccctcttcctgcaccacggcgcggtcatcatcggctcctag

SEQ ID NO: 4282 - DNA, 270 bp, Zea mays
  Peptide Sequence Number=SeqID_46061
atggagcatggcgcttcacatgagtacggtagactttcgtggagcctcgtcaagcgcggagatggctcggtgctgcggcaattgatcgctatggcggatctgccgtcacgggggccgcagggtgccatggcgggagggttgagctgcatgattcgatggatagggtatccgaccactgggacactcttcaccggcgagctgcacgccgccgtggggggggcgttcctccgtcgttgccgtgagctgggtgtggggtcgaaaggaggatag

SEQ ID NO: 4283 - DNA, 261 bp, Zea mays
  Peptide Sequence Number=SeqID_46062
atggcggccccgcgacgcggacgaggtccggtcttacaacaacctccaaaagcacataattatagggaaaaacaaggatcccatccttacctatggtttccccaagaaaatctgcaagagatgggggtagaacatctccttgatcctcgtacgggaaccttgtcgtgcacaaggagctgggaatctgcgccaactgaccaccgtgaatccggcatcgccgcggggtgttccttgtcgggggcggtggcctcatcgccgtaa

SEQ ID NO: 4284 - DNA, 195 bp, Zea mays
  Peptide Sequence Number=SeqID_46063
atgggggaggagagaaaggaatgtcgtcggggagtttggcgcgtatggctgttcagggtgcaaagtcagagttgtgagcttcgccgggcgtcgaggggcaagttcgttgcggcgcccagagtaaagattgacggattagtgaagaatttcttgtcatcgtgcaagctctgccacggaaccttgttaaattcatag

SEQ ID NO: 4285 - DNA, 181 bp, Zea mays
  Peptide Sequence Number=SeqID_46064
aggcgccgaatgctccccaacgccctgtacaatccgggggagaggtcaaggaaggcgagcgacgctcggcaggcagggcatcccgcgaggccgcgacagaggcggcactccgctcccaccaacccacaacaccgatcccctcctcgccgagccgccgccggggataagcgtggggaagtga

SEQ ID NO: 4286 - DNA, 204 bp, Zea mays
  Peptide Sequence Number=SeqID_46065
atggatgcgctatcacctgagttgacaacgcagaagcaccttagctccgatggggtggtgacgtactccctcgccccggccttcgcgcgattcacaacggtgctagcccagacggatggggaaggtgtggctggggtttttatggggcacgcagggaggacgaccgagccccaagccagcgccatccgtgcaatcggcgcctag

SEQ ID NO: 4287 - DNA, 543 bp, Zea mays
  Peptide Sequence Number=SeqID_46066
atgagatttgcgacgaacgacagatatacacgtgataacctaagccgcagattggacgatcaaagaccagattttcatgctacgaagagcggcgccaatagctccccccaataccagcgctacacgttgagaaggaaaaagacaaactacatggatgtgttatcacctcagttgacgacgcagacgcaccttggctccaatggggtggtgacggactccctcgccccggccttcgcgcgattcacaacggtgctagcccagacggatggggaaaggacaaaacgacgcggccggggccggggcgtccgcgtgctcgtgcgggaggactatcgtgggcgggcggcgtcggtgaagatcgtgttgaagaggaaggatgcggaggcgctggtggcgaggctgaacgcgctgagcgagcgggagcgcaaggctcggatggccgagctcaagggcgagttccgggccggggactgcgccggcggcgcgagcccgaggccgtgccgggacgcgtggaagcccagactcgttccgataagggagaactaa

SEQ ID NO: 4288 - DNA, 423 bp, Zea mays
  Peptide Sequence Number=SeqID_46067
atgcgccgctactcgggtgccggagcatggcagcagcagcaaacggaggcggtggctgactgcgtgcaccggtaccgtcgggtcctgatggtgttgctctcgccggtactcctcatctcgttcgtgctccttctcatgccgcgcacgccgaccaccgcctcagggggtgtgctcctcgtcgttggtggtcggaggtggggaccccgggccgtcgaggacggactgaacaagtatgctgtcatattagacgtcggcagctctgggagccgcgtgcacgtgtattgcttcgacgaaaacctggatctagtgcccatagggaaggagattgagctgttcaaacagaggtatcctggagtggccatagcccacaatgagattattgatgcatcctgtttggtcttctactatatcaagccaaactaa

SEQ ID NO: 4289 - DNA, 447 bp, Zea mays
  Peptide Sequence Number=SeqID_46068
atgggcaacaccgtgccgccgcgcgtgtcccgcgaggccaccggcggcaggaggggcgccgggaccgcgcgcaggcgcaggcgctccgagaacgttgccgtcaccgaggcggcgcctcctgccacgccgagccgcgtggtgggcacggcgcgcaagcaggacggcgacgttgaggaggaaacgacgcgcgcgggacgagctctgcgggcgggtggtggcgacggcgcggccgcgtccagcaaggtgctggcggtgaggatcgtgatggagaggaaggacgcggaggcgctggtggcgaggctgatggaggcgcagagcgcgcgggtgcgcaaggccaggatggccgagctcagaagcgagctacgggccgggagctgcagtggcgcggcggcgcgcgccgagacgctgggactgggaggcaaccgcatgctcccgccgatagactga

SEQ ID NO: 4290 - DNA, 522 bp, Zea mays
  Peptide Sequence Number=SeqID_46069
atggagcgcgaaggggggaagaagccggagggagacatgcgtaaaaaggggaaacccgtggccttcgtgcttatcccgcgcccaggtcggggtaatgatggcccctcctatgacgtggtcggtccgagccctgggttgggcgaggtggaggctcctccgaggtcgaggtcgagtctgtcttccaaggccgaggtcgagtccgagcccctgggtcgggcgaggcggagaccgtcggttgaggccagggctgagtctgagccctggggtcgggcgatgcggagttcgtcgtcttccggggctgagcccgagtccgagccctggggtcgggcgaagcggagttcgtcgtcttccggggctgagcccgagtccgagccttggggtcgggcgaagcggagttcgtcgtcttccggggctgagcccgagtccgagccctggggtcaggcgaagcgaagttcgtcgtcttccggggctgagcccgagtccgagcccatcgggcgatgcagagtttcctatggcgcctga

SEQ ID NO: 4291 - DNA, 1053 bp, Zea mays
  Peptide Sequence Number=SeqID_46070
atgggcgttcgcttggtccccggagccccaaaggcggcggtgagccggagcccggagacgacggcgcggcgcgactcccccctaagcgacagcggcggcgtcgacgcaacgactggtatgcaagcagtccttctgtgcaagcgtgcaagcaaactatctgatccattagattacgatccaaccacaggctctagaaatggaccacaacagaagtacgtttcaggagcccagaatgcctgggatatgttctctgatgagctgtcacagaaacacatcactactggttctggtgacctcaatgacatacttggtggcgggattcactgcaaagaagttactgagatcggtggcgtcccaggggttggtaaaactcaactggggattcaactagcaatcaatgtacaaatcccagtggaatgtggtggccttggtgggaaagcagtttatatagatacagagggcagtttcatggttgaacgtgtctaccagattgctgaagggtgtattagggacatactggagcactttccgcacagccatgagaagtcctcttctgtccaaaaacaattacagcctgagcgtttcctggcggatatctattacttccggatatgcagttacaccgaacaaattgcagtcataaactacatggagaagttcctcagagagcataaagatgacatcataatgcatgctagttttgttatctcccagttctttggtttccaatgtacgacaactgacctagtgttcaaaagtaaagatttggctatctacttcgcagattttgaagatctggcactgaggaccagagtgctaagtggattatcattgaagttaatgaagattgcaaagacatataacttggcagttgtcttgttgaaccaagtcactactaaatttacagaagggtcatttcaattgactcttgctctagagcagcaggaagttagcaccaagaatttccttgcttttgttaccaaggttgcctttctgttctggttctgggcacacgtttccagtgaccaagtcaaaatggcaagcatttactaa

SEQ ID NO: 4292 - DNA, 543 bp, Zea mays
  Peptide Sequence Number=SeqID_46071
atggcaacctttcaggagctgtcatcatcgaaagtaatagtcaagcatgatacagttaaacataatatataccaactgaagagctattacagtttgctctaccgtgattcagggggaaagctaagtgccattcacagatggggtgtctctgatcttggattaagtttcagctcctgtgtcaaacgggaaaaggtccaagattccaagactgttcgcagattaactgatggcccaagacgttcctacatgtcacaggcatcaacagtaccattgattccttcttctattagcactgaacagaaaaagaatgaagatcagacactggatttaggttgcccagtatccatggagcgatgtcgatttgggctgattggccggttgaagggtgctggtatcggcggattggaggatggcgggattgagagccagggcgggggcaaagcagatttggggcgagctttgcgaccgctccttccatgcatagcgtgggcgagcttaggtggcactgcaattcatgatcacaaggttattctgctattctga

SEQ ID NO: 4293 - DNA, 2307 bp, Zea mays
  Peptide Sequence Number=SeqID_46072
atgtgggtgccaagcaggaaggctgccgctggtctgctatggactggtcgtcgaggtggtggtgatggacgacaagatgcagaccggcaatcagggctggaaaggagtgctgacaggtgttgggggggtagtgcaaggcaactgtttcagcgccttcaaggaccgtttgaggaagggactctcaagacacacttcgagaaaataatattgcttggtcaaaaattgcatcaaactcgtagaaaggatgagatccatgagctgaggcaaaaaaatccacttcatacttctcatggttttgcactttctcaagcatgtccagggaacttatctggtgtcattttgacgccacttgacctttgcgatggaccttcgaactcggatgcacttacaggatccaatacaagtgggttaggtctttcaaacaataactgctctgttggtcctactcttcctacatcaaatatgaacttaagattaccaggttctcctggtatggttttgggaagcaattcaccattgcctttgaatgctccctctagggatgttcagaggtatggtgtgcctagaccaacctcgatacagggtgacgagcaatcaagaattcattataaccagatggtaaatggcagaaaccttcagcaacctggagttcctgttcctggtgtgttgccatctggtgttgatcggggtgcccgaatgatgccacctgcccatggtgttggaatcatggctggactaaatcgaggtacacctattactaggccaggttttccaaggcttggttctcttggaaacatgtcacccaccgatggtcaaggcttaaaaaatactgtaaacgttcatcctggtgccatactgggacctggaagtactatgttgaggccacgtgacccaatgcagatgtttagacctggccagaattcagaggagcatagacagatgatgatgccagagtttcagttacaagtctcgcaaggaaataatcatgctgtgcatttcagcggtccaccatattccaacactggggcatcttcacctgttcaatctttacctgcccagcagtcccaaccacatcagatgccacaacaatcacacatgtatggaaacacacaccttcttcatacccaaggaacaaaccagtcaaatccacagcaacagcaggcttatgctatgcgcttggccaaagagaggcatatgcaacagatgatgccccaacaacagcgtccattatctgttgccagtgcagtgtcagctgtacagaatggctcaccgatgcaacagcagagccaaggatctgcaacttgcgtaatcccagctacacagacacaacataagcagcaatatcctgcacaaaatgcacaagataactcaatgcttccccatcagccttcagccaccactacacataaacagaagaagcaacagggccagcagcagcctagacaaaatcaacagcaacgaaatcaaggcagtcaacaagctaagcttatgaagagtttaggccgagggaacatgatgcagcagagtcctgtggatgttattcaagcaagtggcatatcaacaagctgtaaagatcaagttcctgataagaatatgatgcaacagggtccagggcattttgttgtaagtaaaggatcaatcccattgatacctcaacctgggaatcaaccaaatgtatacacttctcagatgcctccgtctccaatgcagacaccggatattagtaatcagggtgcagtcaagggttcttccaaccatgccttgttaacttcccagcaaggttcactccatacgccttcacagttggcacagcagcagcagcagcaactacggttcatgaatccgtcacagaataatatgcaaaggttgataatgcaacagaatcggcatgtgaacacagatggcaggattgagttacctgctgaccaagtacagcataaccaggtaatgtcatctgcctcacttgcaagaagtacagattcaggcagcccaggaatctcatctataagccagcggaaacaagagtcatctcatgacccaagtgcaattacctcaacctcgcagctagctagctcacctcaagacacctttgttggaagtgatagggtgttgccatcatccagccaaagcatgccgcaaaggcaaatgtccggtggtgtgcctgtacatggatatggcattggtggccaggtgcagctacaacagtctcggcagcaactccagtctcagcagcagcagcagcagcagcagaggcctgttgtccaaggtggtgtatatgctcacccctcaaattcaggacaaggatga

SEQ ID NO: 4294 - DNA, 237 bp, Zea mays
  Peptide Sequence Number=SeqID_46073
atggagcaggtgccacgtgacatggggaggggggctgttgcaggcgatgatggcggcggtgggtgcgctgcaaagggggtgtgggcggcggtggtagtgcgcatggaggcaggcttattccaggcttcaagagtaagcttcctggtatcttcttgggtaaggtacttttctcttgagggctctggccaaagtgaagaaaaacttcactacccaatacatgtagaggactgggcataa

SEQ ID NO: 4295 - DNA, 366 bp, Zea mays
  Peptide Sequence Number=SeqID_46074
atggctcctcacatgttaggtgttattgatttatcaacagtggttaatggcctacatgctgctaagaagcctaaattgttgaatcaagcaccagatatttcactggaagctcttaaaccaattggtccaatggcctctcttgctgcatcacaaatgagcaacatggcaaatcctacgagggttataaaaatcagcacccgtggaagaaaaagtaaaggactcaaggtattattatcttttgataataggagaggatccaaggagaatacaataacgtgtaatagagcgacgttcaatgggatcactcgccttacctcgacttaccgccttaacaactatgcaactatgcaagtggcatcccagtaa

SEQ ID NO: 4296 - DNA, 579 bp, Zea mays
  Peptide Sequence Number=SeqID_46075
atggctcgggtgttgtctggattatttgctgaagagactcgtcttaagtctatgtcttctattactggtgttggttctcacagtgtgttggtcactgctcagatgcccaagagtacctcttctcagccttgtgagcattgcaaaaagaccactcatcgctccgagaactgctttgctaagttcccggagaagttagctgattttcgtgcacgtcgtgttactcgtggtcgttgtacaggaccatctcctagaggctcatttgttgttgctacttcgtctgctgatgctttgccatcatcttgggttcttagctgtggagcctcatttcatgtgacatctgagcagtcgtggctgacgtctactacacatgtcactaagggtgctcccattcagactgttgatggattggcgcacaaggggtgtgaatatgtgattgggactgatcgtcgccgtaaatcttctctcctctacatcttggacaccttgtgtcttccttcataccatacattcaccttgctcttccaaaccacctgtcatccagacctacattcgtcgttcctgctctatttccacggctag

SEQ ID NO: 4297 - DNA, 177 bp, Zea mays
  Peptide Sequence Number=SeqID_46076
atgcccatcaccagagagcctccaaatatgcgagctggtcattcaggtcctggaagtccatggtcaagttttgaggatcaggctcttgttgtccttgtccatgatatgggtgaaaactgggaattggttagtgatgcccttaacagcatcatccaattgaagggctttggatcttaa

SEQ ID NO: 4298 - DNA, 627 bp, Zea mays
  Peptide Sequence Number=SeqID_46077
atggccaacaagctggctactacgtccctcctcgccgccgtcctcctagcgctcgccgccccctcactcgccggcgacccggacatgctccaggacatctgcgtcgccgactacaaatccctccagggaccactgcggctgaacggattcccctgcaagaggccggagaacgtgacggcggacgacttcttctccaacgcgctagcgagcccgggcagcacgtgcaacgcgctggggtcggcggtgacgccggcggacgtgcggacgctgccggggctcaacacgctgggcgtgtcggtgtcgcgcatcgactacgcgccgtggggcgtgaacccgccgcacgtgcacccgcgcgccaccgaggtcatcttcgtcctccagggctcgctcgacgtcggcttcgtcgccgccaccgccaccggcggcagccgccgcccgcctaggaacagcggtggcagccccgccgccgtcctctccgccttcgacagccagctgcccggcacgcagcccgtcgccgaggccctcttcggcgcctcgccgccggtgcccaccgacgtgctcgccaggagcttccaggtcgacggaggactcgtggaggccatcaggtccaacttcccgcccaagtag

SEQ ID NO: 4299 - DNA, 309 bp, Zea mays
  Peptide Sequence Number=SeqID_46078
atgggctatttcggtgagcaacggggagctaaagtaatcgtggcggtgcggtggcaaggctcggacacacggcgcaaggccgtgcgacggcggttcaccggcgagcttatctgcgcaagccacatggggtacggcgtttttgcacataggcccctagggtttggacttagggttttccagggttccaatgggggtttttggtatctcaggggtataaatgtgattcaagttcattcttgggaacattttgtgactattcccctaaagcttttaggttttctcaatttgggttatgttttacccctttaa

SEQ ID NO: 4300 - DNA, 180 bp, Zea mays
  Peptide Sequence Number=SeqID_46079
atggcgcaccggacagtccggtgcgccaccggtgcgccaacggtgcgccaccggtgcgccaacggtgcgccaccggggcctagatgctttcagtttgcaatcggcaaccagatgcccctcaaaggccagattttgttgaagctctatctcctcgaagagttgcaaagtgaagatatgtag

SEQ ID NO: 4301 - DNA, 237 bp, Zea mays
  Peptide Sequence Number=SeqID_46080
atgaggactaccgcgaggtggaggaagttttatctcctgcgggcatggctcgggattctgccatgcacggcatgctgcggcaatggcggttggggaggtggcatagcatgggcaggggtagggggtcatggtggtggggttaatttggcaggtgggcactcgggatggctggtccatggcgaggtggtgggctcccgcgacggcgaggttgccggcgaggcttacaaggcgggatag

SEQ ID NO: 4302 - DNA, 186 bp, Zea mays
  Peptide Sequence Number=SeqID_46081
atggctatcggtcgattcggtcgcagagattccttcgggcggggcgatttctcgccgatatcgaagaaataccaccgggccaccgacttccatgggcagtgcgcgtcagagaaccattggaggaaagctagtggaggtcttccttacccgaaaggggcaagggcagtaggggagtggtcagtgtag

SEQ ID NO: 4303 - DNA, 717 bp, Zea mays
  Peptide Sequence Number=SeqID_46082
accgtacgcgactccaaaaccagacgagatcgcccagcgacgggtgcggcctccaccaggctgacctcagacgcgaagaacgcggacccctgcccaacccgaacccacaagaagaccctcccccctcactccccgcggcggcgccccgctcgacccccgctcggcccctcggcgtggcggctcggcaccctgcccactcacccgcggcggagctcggaccgaccactcgacccctccccgcggcggcgctcggcgcccgccctcggaacagagaccggcctccctccccggcggcgcccgcccggtctccctccccggcggcgctcggccccttccccctccctccccggcggcctcgcccgcccgacctccctcggcgcggcggcgctcagcctccgctcggccctccccgcggcggcgctcggctacccgcccccggctcgcccgtccggccccggcggtgctcggcctcgccccctgcccatacccggcccctgcgcgcggccccgcccctcggctcggccggccgtggtggcccggcgccctcccgcggcgcggcgagccccgctcgcccgcacacccccgtccctggccggttcaaccgccctctgggccggtggcaatgagattgatggttttagttatgactatggtgctggcgaagatgaagctgtggaaggagacttccaggagttccaagactacgacgagttctag

SEQ ID NO: 4304 - DNA, 330 bp, Zea mays
  Peptide Sequence Number=SeqID_46083
atgatgcgccctcgccagcgccctagggcacaacacttttcaaccggacttctgcccacggggaaagattctatggttctcggcggggagattcacggctatggtggaggtcggcactgggtgtgggttgtggccagagaacgaggcgcatggccgcgggttttataccccagattgggggcaacaaccccactgaattctacggggatcccagctggcattcaacggattgctgttggcgtagtccgccaaactcgcgaggatgacgccctcgaccagcggatcccacggttagagaagaagctccatgcccagtgttacagcgtctga

SEQ ID NO: 4305 - DNA, 444 bp, Zea mays
  Peptide Sequence Number=SeqID_46084
atggttgatccctaccccgattcaatggacctacttgttgctctaacggaagtgaacacaggtaagggctctgtaccagggattacctgcgccggcgagctgtccacgggaagggggagctccgcccctgattcgcactccggtgaggaattcacttcgattcggaactcacggcttgattcgggggcacggacagacttcacgagcgctggcgaaacccacccgaccacgcgccgaggacggaacaccggcgcagacggttttcactggcggcgcgactgtggtgactcgacctccccacggttccacggcaatgaggctgggctacggggcatagaggaaaccggtcccagttctacgtcttatagcctcggagaatcggtcccaggtgcccgcaacgtcctccacgatcgacgcagggagctccgggttccacggatttga

SEQ ID NO: 4306 - DNA, 588 bp, Zea mays
  Peptide Sequence Number=SeqID_46085
atggaggaacagggagcagggacgctggtgctggagacgcggcatcgagtggcggagtttgaggcgagctgggcgagctcgaccaccagagagcaagacgtgacggcggatccgcgcgtgcggaaagctgaagaccaaatcgagctagggccgagcaccggtcatgggaagcggacggtcgggcacaggaagctgggagaccgctgcactggaactgggcgccgtaggaatagcaggagaggagcgcgcggcatgggcgcgagctcggaacttgacgcagcagccatggagatgggcgctgatcgagcaggggaaacgggggggtggggggcgacgactggagaaatgaagctccacggcgagcagaggcgcggccgaacaggaagctccggcgagctgcagatggccggaggcgcgagcacggagagcttgggcgcgagctgcaatggcgagcagggtgccggacgagcacagcaggaagctcggaccaggggcgcgcgagctcagagagcagctgctaggcgcgcgcccagggggctgggggagggagacccgcgagccggaagccgagcagagggaggaagatga

SEQ ID NO: 4307 - DNA, 459 bp, Zea mays
  Peptide Sequence Number=SeqID_46086
atggtggcaagaagagcttcgagggtgttcgagctcatagatggcaatctagatctagtcatgaagactaggagttttggagtccaacatcgacctcaaacaagccaaaaggagcaaaacggtgaagaaggaagatcctcccaagagttgaaatcaagtggagaagagttggacaatttggctctgtctgggcctctccgggcagtcacccgagacaccctcggtcgagtcagagatgcgttcatgcgaatagtgtctggctcgggcaagtcggagatgctctcggccgaatcatgtctggctcaggttggcctcggggcaagacgtgactgcctcggggcacgacgtggctacctcgggcgagtggtggcctcaggcaagttatggcctcgggcgagtcatggcgtcgggcgattggccttgggcgagatgtggcctcgggcgaatcgtggtctctaa

SEQ ID NO: 4308 - DNA, 879 bp, Zea mays
  Peptide Sequence Number=SeqID_46087
atggccacgttacacctcggcgcgccgagctgtgttacttcggcgccacagcctgtggcgccgagcattgggtccaaactagcaaataaaatttctgggggtccaaacttaactcgatgttttgttgaggcagggccaacaggatccgaagatgatgatataagtttcacactgaccgtggaaacgtttagcttcgaagagctctctgctgcaactgataatttcagtagcaccctcaggataggctctggggggcaagccacagtctatgaaggccacataccccacattggacagttccctggttgtgtcaaccaggttgctgtcaagcggttgagaaccaatgattttccctctaagcaaagggcatttcttatggaggtctatgtgctcaattcaactaaccaccctcacattgtgaaactactcggttgctgttctgagggaacagaacgacttcttgtgtatgaatatgtaaagggggggacattgcgtcatcgattgaaagtagagaccggtgtgtgccccaagaagatgatagcccctagatgccgaggtagccgaaatcgaggtggccgcggtcaggagacacgcagcagaagcttgttcttctggaagggtcgacgttcgagcgtcaacggtcagcagggcgacacagcaaaagaacaccagcatgctgaccttcttgcttcttcaattgtacggacgtcgaggagccccgccagggaggccgacggcagcgcacgcatctccgccggtcatggtggccgtgcccgcgacagaatagaaggggtaatggcggatgtggccgggaaggccacgacagcgacaaatccaaccgggaagacgcgatccagccaaaggtcgcatcaactctga

SEQ ID NO: 4309 - DNA, 204 bp, Zea mays
  Peptide Sequence Number=SeqID_46088
atggtggaccacccagacctctggcctaagggggtacgatgctgccacgtgctggacaacactgaaggagacgagacctcccccgagctcaatccggaccccaagccaagggcagttcgaacctgtcataaggaagggcggtcccagtcactactccccacacaagacaaggaccggtgttgctacgtgttctacgacatgtga

SEQ ID NO: 4310 - DNA, 1749 bp, Zea mays
  Peptide Sequence Number=SeqID_46089
atgggcgaaacgatctcgttcgcccctcggaaggccatcaagtcccaggtcttggcggacttcgtggctgaatgggtcgacacccagctcccaacagctccgatccaaccggaactctggaccatgttcttcgacgggtcgctgatgaagacaggagcaggcgcaggcctgctcttcatctcacctctcgggaagcacctacgctatgtgttacgcctccatttcccggcgtccaacaatgtggctgagtacgaggctctggtcaacgggttgcgcatcgccatcgagctaggggtccgacgcctcgacgctcgcggtgactcgcagctcgtcatcgaccaagtcatgaagaactcccactgccgcgacccgaagatggaagcctactgcgatgaggttcggcgcctggaagacaagttctacgggctcaagctcaaccacatcgcccgacgctacaacgagactgcggacgagctggctaaaatagcctcggggcgaacaacggttcccccggacgtcttctcccgagacctgcaccaaccctccgtcaagaccgacgacatgcccgagcccgaggcaccctcggctcggcctgaggcgccgaggcaccctcggctcggcccgagacaccctcggcccccgagggtgaggcattgcgcatcgagggggagcggagcggggtcacgcctaatcgaaactggcagactccgtacctgcaatatctccaccgaggagagctacccctcgaccgagccgaagctcggcggtttctactggccgacggcggtggccgacgccactagaattgtccgcacctgcgaagggtgtcagttctacgcaaggcagacccacctgcctgctcaggccctgcagaccatacccatcacctggccgtttgctgtgtggggtctggacctagtcggccccttgcagaaagcacccgggggctacacgcacctgttggtcgccatcgacaaattctccaagtggatcgaggtccgacccctaaacagcatcaggtccgaacaggcggtggcgttcttcaccaacatcatccatcgttgtggggtcccgaactccatcatcaccgacaacggcacccagttcaccggcaaaaagttcctggacttctgcgaggatcaccacatccaggtggactgggccgccgtggcccaccccatgacgaatgggcaggtagaacgtgccaacggcatgattctacaaggactcaagcctcggatctacaacgacctcaacaaattcggcaagcggtggatgaaggaactcccctcggtggtctggagtctgaggacaacgccgagccgagccacgggcttcacaccgttctttctagtctatggggccgaggccatcttgcccacagacttagaatacggttccccgaggacgagggcctacgccgaccaaagcaatcaagctaatcaagaagactcactggaccaactggaagaggctcgggacatggccttactacactcggcgcggtaccagcagtccctgcgacgctaccacgcccgaggggttcggtcccgagacctccacgtgggcgacctggtgcttcggctgcgacaagacgcccgagggcggcacaagctcacgcctccctgggaagggccgttcgtcgtcgccaaggttctgaagcccggaacatacaagctggccaacagtcaaggcgaggtctacagcaacgcttggaacatccaacagctacgtcgcttctacccttaa

SEQ ID NO: 4311 - DNA, 120 bp, Zea mays
  Peptide Sequence Number=SeqID_46090
atggaggtcgccgggtgtttgagtggcggctccaaatttggaagggaggtgctggcggccgaagagaagagaagtgtactggagcgggtgaccgtggttgtcaccgtggccaggccttag

SEQ ID NO: 4312 - DNA, 270 bp, Zea mays
  Peptide Sequence Number=SeqID_46091
atggcgttaatggccgccggccgcctctccctctccctagcgccctctcctctccccctgatcctctataaagggcagcttagcactcctctcttcctctccctcccaagagctctctcctctgtctcccttgcccctgcacattgtcggagccacgccctcgtcggagccgtgccggaccgtctgccgccaccatctgtgctctaccctgccatgcccaagctcgccgagcccctgcccgcctcgccagaccgtccgagccccgcctag

SEQ ID NO: 4313 - DNA, 606 bp, Zea mays
  Peptide Sequence Number=SeqID_46092
atgaagaagactttgcagaagatattgacgaatactaagtctaacaatgtgccagtcatctttctgtggaagagtgtccatgttttatctattttccaggccacccttgaggcctccagactgcagtttggtttctaccgcccagctcctaaggacacaactctagctccagtcgatccacttgcaccagatctcagggttgaggacgaggccatcagacagtttgaggatcagggtgcagctgctgatacttcctctgatgatgatgaggatctggggtttccgccaccacctcatgtgccacctcgttcccatgatcacaaggctggtggctctagtggtgctcccccagctcatcctccagcgatagaccccgctctagctaccacccttcagtcactcactcagcagcagactcacatggccgcagagcaggcccgtcaggaagtagagcaggccaagcagactattcaggaccaccaggacactctccagcagcaacttctagcagatagggcaaagcaccaggcttttatgactcatattcttcagcacaccggtgtttcgattcctccaatgcagtctgctccacctctagcactttag

SEQ ID NO: 4314 - DNA, 285 bp, Zea mays
  Peptide Sequence Number=SeqID_46093
atgggtttgaaaaccctgtgcacggagtgtactttcgcaagtcttacccgtcaaaggaaaaagactctcaaggatatgttggcttttgggaatcaaggcaaacaaggaatggtaaccaattttccaaggaaggaaatgcatcaactgtttatcacacaattcctatcacccaatgcatcatataaggtgataaagattttaaaacaacaaggaaaaaggataatgcacaggggctttctttgtgttggaggaggttctgtttccacaccgcaaatatcgaagtaa

SEQ ID NO: 4315 - DNA, 438 bp, Zea mays
  Peptide Sequence Number=SeqID_46094
atggaactgtgccatggaagtagggagcgtgtgtgtgatagccgccgcattgctgagttgtcagcagaggttgatcgtttgcagcgggagattgtggagcgggacagggctattgattgggctgtaaattcacaatctatagtctgggattgcgaggtgaatgcccgagcccgggtggaagagctaagcgtagccctggaaaatctgcaagcgtataacaacaccctacacgaggaagtgcacgtgttgtatgaccagttgcatccgaacgtgccaccgaaggttgcggcgatgggagctagaacatcaggagcagctagcgaaggaccttatggggaattggatctctttggagcccctccttcgatgatcatcgcggatgatcattctcccaaagctagcagtggagcaggagcagccaaggacgtagataactag

SEQ ID NO: 4316 - DNA, 137 bp, Zea mays
  Peptide Sequence Number=SeqID_46095
gtgatgactgggagcatgaagaaacattcactgacgatgatgaggctgtagacattgatccagaggaacgggcagatttagctcctgaaattcctgctccacctgaaatcaagcaggttgatatacaccattactga

SEQ ID NO: 4317 - DNA, 894 bp, Zea mays
  Peptide Sequence Number=SeqID_46096
atggagaagaaacggcagggtgcagaacccgggtcgcgtagggcgggccatccaccgtttcacatgggcctggaggctggaagctggaccagacggtctgatccaaccgtttccacaatgctctatgcggcaaaccgttcggctagctgggatgttggagcggcacgatccggtttaggaacacggggacaacatatatatcggattcaagtgcaactattgcaagaaaacaatggaagggtgtggtactacacgtttcaagcaacaccttgcatcgcatgggggaacgtgcaaggttgtcgcaacgttccgtcggacaattactttcggcgggagcttgacaaggtccatgataaaaggaaagcaagaatagcggaagaggcacaaaagttgcaagtggcaggttcgcatcgtgtttccgatgatgatgatgatgagttacaggccgcaatccgtgcgtcgagagaggaggaggagcttaggaggcgtgctcgtgcgagcggtgccttgtatgagacgggtggtggctcgtcccaaggtggtctctatgccgcgtttgggagaatatgttctaggaaggagaagccacatatggtgcaaacaaggattgatgtgggtccgttctctaaggcaggaaagaatgtggtccattgttttggtcagcaatgggctaagtggttccatgcggaggcgattccagggcataaagctaacattccatatttcatcaatgcattcagagagacacaaaaacatggtgagtgtggatccaaagtttatcattgtcaatcaatgtcgtacatttctctcattcatattgtacctgacaatcagtacttagacgagaatgagaaggaattacaggttgatttcacgaagttcaaggaggactag

SEQ ID NO: 4318 - DNA, 243 bp, Zea mays
  Peptide Sequence Number=SeqID_46097
atggggcaaacatttagaaaaaacgttgaagagcttcgggcatccaagaaaaagtgctatgaaaaatctatagaatgtgttaagaaaataagaaccagcttcgccagcgttggcgcattctcaaccgcactttctcctccctcagagcctgccgagccatcggtggacccccacgtgaaggggacgacgaaattagaaaaatggccgaagctatcatggataaagttgttgatcagctactaa

SEQ ID NO: 4319 - DNA, 474 bp, Zea mays
  Peptide Sequence Number=SeqID_46098
atgggtgtagcccccgagcttcgagtggattttggaaaaataatccactcgaagggtaacaaacgcaagcgcgagccgactcctccatccgaggacttcggtgactcggaatactcagaggaggagttctcctctgagtctgaggggtctccggctcctgtctctcccccggcgtcgtccgacgactcggacgactctcaggggattgccgcggaggtctggacttacatccaggccgtcgagcgctccgggctcgagggctcggatgagtcggagtactcctcggacgaggaggactcgcccgaggagaacggcgatggtgacgacgacgacgacgacggaggcgacggcgacgatgacggtgacggtggcggtaggggcggcagcggcgacgacaagggtggcgacggcggcagcagcaggggcagcaacggcggcggcagcagcaagggcagcaacaaggccagtggctag

SEQ ID NO: 4320 - DNA, 3102 bp, Zea mays
  Peptide Sequence Number=SeqID_46099
atgcccggcataccgagggatgtcgccgagcactcgctggatattcgggccggagcccgacccgtcaggcagcctctgcgccgattcgacgaggagaagcgcagagtgataggcgaggagatccacaagctaatggcagcagggttcatcaaagaggttccctaccctctacctcgcatcgatcaaatcgtggattccactgctgggtgcgaaaccctgtccttcctcgatgcctactcagggtatcaccaaatccggatgaaagagtccgaccagctcgcgacttctttcatcacgcccttcggcatgtactgctatgtccccatgccgttcggtttgaggaatgcgggcgcgacgtaccagcggtgcatgaaccatgtgttcggcgaacacatcggtcgcacagtcgaggcctacgtcgatgacattgtagtcaagacaaggaaggcttccgacctcctctccgaccttgaagcgacattccgatgtctcaaggcgaaaggagtcaagctcaatcccgagaagtgtgtcttcggggtgccccggggcatgctcctggggttcattgtctccgagcaaggcatcgaagccaacccagagaagatcacagccatcaccagcatggggcctatcaaggacttaaaaggtgtacagagggtcatgggatgtcttgcggccctgagccgcttcatctcacgcctcggcgaaagaggtctgcctctataccgcctcttaaggaaggccgagagtttcgcttggacccctgaggccgaggaagctctcgggaacctgaaggcgctccttacaaaggcgcctatcttggtgcccccagctgatggagaagccctcttggtctacatcgccgcgaccactcaggtggttagcgccgcgattgtggtcgagaggcaagaagaagggcatgcattgcccgttcagaggccagtctacttcgtcagcgaggtattgtccgagaccaagatccgctacccacaagttcagaagctgctgtatgctgtgatcctgacgaggcggaagttacgacattacttcgagtctcatccggtaactgtggtgtcatccttccccctgggggagatcatccagtgccgagaggcctcgggcaggatcgcaaagtgggcggtggaaatcatgggcgaaacaatctcgttcacccctcggaaggccatcaagtcccaggtgttggcggacttcgtagccgaatgggtcgacacccagctaccgacggctccgatccaaccggagctctggaccatgtttttcgacgggtcgctgatgaagacgggagccggcgcgggcctgctcttcatctcgcccctcgggaagcacctacactacgtgctacgcctccatttcccggcgtccaacaatgtggccgagtacgaggctctggtcaacgggttgcagatcgccatcgagctaggggtcagacgcctcgacgcccgcggtgactcgcagctcgtcatcgaccaagtcatgaagaactcccactgccgcgacccgaagatggaggcctactgcgatgaagttcggcgcctggaagacaagttcttcgggctcgagcttaaccacatcgctcggcgctacaacgagactgcggatgagttggctaaaatagcctcggggcgaacgacggtccccccggacgtcttctcccgggatctgcatcaaccctccgtcaagatcgacgacacgcccgagcccgaggcaccctcggctcagcccgaggcgccctcggctcagcccgaggcgccctcggttcggcccgaggtaccctcggctcccggggccgaggcactgcacgtcgaggaggagcagaacggggcctcgcctgatcgaaattggcagaccccgtacctgcaatatctccgccaaggagagctacccctcgaccaagccgaggctcggcgggtagcgcgacgcgccaagtcattcgtcttgctgggcgatgaggaggagctctaccaccgcagcccctcgggcatcctacagcgatgcatctccatcgccgaaggtcaggaactcctgcgagaaatacactcgggggcttgcggccatcacgcagcgcctcgagcccttgtcgggaatgccttccggcaaggcttctactggccaacggcggtggctgacgcctctagaattgtccgcacctatgaagggtgccaattctatgcgaagcagacccacctgcccgctcaggctctgcagatgatacccatcacctggccctttgctgtatggggtctggacctcgtcggtcccttgcagaaggcgcccgggggctacacgcacctgctggtcgccatcgacaaattctccaagtggatcgaggtccgacccctgaacagcatcaggtccgagcaggcggtggcgttcttcaccaacatcattcatcgcttcggggtcccgaactccatcatcaccgacaacggtacccagttcaccgacaaaaaattcttggatttttgcgaggatcaccacatccgggtggactgggccgccgtggcccatcccatgtcgaatgggcaagtggagcatgccaacggcatgattctgcaagggctcaagccccggatctacaacggcctcaacaagttcggcaagcgatggatgaaggaactcccctcggtggtctggagcctgaggacgacgccaagccgagccacgggtttcacgccgttcttcctggtctacgaggccgaggccatcttgcccactgacctggaatacggctccccggggacgagggcctacaacgatcaaagcaaccaagctagccgagaagaatcgctggaccagctgggagaggctcgggacaaggccttactacactcggcgcggtaccagcagtccctgcgacgctaccacgcccgaggggtccggccccgagacctccaggtgggcgacctggtgcttcggctgcggcaagacgcccgagggaggcacaaactcacgcccccctgggaggggccattcgtcatcgccaaagttctgaagcccggaacatacaaactggccaacaatcaaggcgagatctacggcaacgcttggaacatcaaacagctacgtcgcttctacccttaa

SEQ ID NO: 4321 - DNA, 307 bp, Zea mays
  Peptide Sequence Number=SeqID_46100
aatggtaaacaatcatttatttgccaagtctatcaatggtgatacaagtgtgaatgagctgcaggctgctactgcagaaagtcttgtcatgttgaggctgctcagcgccgccagggacgctaccctgctgatgctggtcgtcgtggggccgtgccgcttcccgctcgacggcgcggacgctggccaccagcaccagcagcccggcgaggtgaagacccggctcctcgccgtggagtacggccagctcctggacgagcacgagcagcagtccggcgaccacggcgggttgctaatttgctatcgctag

SEQ ID NO: 4322 - DNA, 174 bp, Zea mays
  Peptide Sequence Number=SeqID_46101
atggggtctgttctcgcagaaatcgatactaaaacatcgattaaggatcttactatcagagttttgttctgtacatttccaggggaaatatttggattctgcatattctctaacaaggctgacaatagtcatgtcttatttataactgtgatgcaaggtgacattaaggtttaa

SEQ ID NO: 4323 - DNA, 723 bp, Zea mays
  Peptide Sequence Number=SeqID_46102
atggtgagggccttgcggctcggtggccacgcgacctccgcagcgaggtggttcacctgccggcgcaccgccgtcgccctctgcatggccaacctcgtcgccgcgctgctcgtggcccgcacgctctacgctcccgactccttcgcatttgcacccaaacgcggggagctgaagtattccagggagcagatgaggtgggtggaggagtcgatccggattcgcggcgcagctgagcccgtcgagctcattgaagcggtaatagctgtcctacagagctcttgtgtttggaattcaatttgttcagaagctatagaagcatggcgtgttgggaagctcaaggacatgagaagtacatcttttaggaatttatcaaattttggcctctccagtgaagattcaaatgaagagataataccaggtccacctttgccccctgaatgcaatactgaactgcatactgattatggtggcactactttcgcgcttgcaaacatccgaaccccatttttcatcttgaattcagcttatgatgtatatcagattgcacccgcggagcttgaagggctacttctgtctcatccagaaattttggatgctgttgttatcccaaatatgttttttgatgtaccttataggaatatgtgcttgttcctaaggttacccgatgctgaagctggtgaagttcctattgcctacgtcgtaaggtcccccgacagttcctaa

SEQ ID NO: 4324 - DNA, 1158 bp, Zea mays
  Peptide Sequence Number=SeqID_46103
atggcagagcattttgtgctgtgccccgtgatggcagtactattactatccatggacgtcctcggcgccgccgccggcgtcttcaagccgccgccggcgatgtacgtgttcggcgactcgacgctggacgtcggaaacaacaactacctgccgggagcgggcgtccccagggccaacaggccctactacggcgtcgacttccccggcggccttcccaccggaaggttcagcaacggctacaacaccgccgatttcattgcaaagtgcatagggttcgtgagcagccctccgccgtacctgtcgctgctgggagcagcaagctgcggcggcggccttctggttccgacggctctcactatcggcgtcagctatgcttccggaggagctggcatcctcgactccacgaacgccggcaacacgatcccgctatcgaagcaggtgcagtacttcaacgccacgaggtcggagatgatcgccgcggcgggctcctccgacgcggtggacgccctgatcaaccggtccttcgtcctcatcctcgtcggcggcaacgacctgtccgcattcgcgaacgcggagcgggcgcggaacaggtccggcgccgacctggagagccacgacgcggccgccttctacggcggcctcgtctccaactactcggccgccatcaggggcctgcacgcgctgggcgtgcggaggctggccgtcgtcaacgtggggctcgcagggtgcctgcccgtggcgcgggtgctggacgccacgggcgcgtgcgccgaggaccggaaccggctcgccgccggcttcaacgccgcgctgcgctccctgctcgccggcctcgcgtccccctcctctaggtccgggctgcccggcctctcctactccctggccgactcgctcggcctcatggcggacaccttcgcccacccgctggcgtcggggttcacggacgtcgccaacgcgtgctgcggcggcggccggctcggcgccgaggcgccctgcgcaccgaacgcgacgctctgcgccgaccgcggcctttactacttctgggacagcgtgcacccttctgagcgggccgcagcgctcagagcccaggctttctgcgatgggccagctcaatacactacgcccatcaacttcaagcagttggtccacatggcatga

SEQ ID NO: 4325 - DNA, 258 bp, Zea mays
  Peptide Sequence Number=SeqID_46104
atgagcctcaccgagccccaggttacgaaggccggggtcagcgtagcccgaatgatggcgcctaggacccacactgcccacgccgtctgtaacacccctggtgttactctctccaacttcacgttcgcccccaaatctgttctccgccacccgaagcccaacctcaccgcgaccagccgtactccggggtccactgaccgtcgggaacacatggatctttggttcatccgcgcgctcaccgtggccagaccacattag

SEQ ID NO: 4326 - DNA, 489 bp, Zea mays
  Peptide Sequence Number=SeqID_46105
atggccatgatggattcaacatcggaaaagatgtacctctaccaggaccgtctcgatgtaggcttgatgatcgaggaccctttaactggtcacatgcctcgtcatgggtcaaccccgccttccgaggataacgagataaggcaacatatcatgattcacatgggaccaaacccctcgtatgatgatctgtcggctttcttcgcgtcctacgctgagctctctgcgtcatacgacgcgaagatgtcacccaactatggcgaatttattagcggctctggcgccttcgagcctctactgcgcctcgcctcgacggtgatcgccgcgctagtggcccacaaccatctccccaactctgaccacttggagttcgtgggaatggccgatgacagtggggaccccgtcatcgaagaaatttgcatggactcagactcgtatctggtttcctctgggagcagtggggaagaaccccctggcggcgaggagaagtaa

SEQ ID NO: 4327 - DNA, 294 bp, Zea mays
  Peptide Sequence Number=SeqID_46106
atgatgcatcatgcatgggtcgacgatggcgtgctggagctggaggacgacgacagagagggagacaggatccgggaggcatgcatatcaatgggcataacgggcgacaggggaggcgccatgagtggcactggtctggcagaaggccgagctctggttgcaattgtcggctgggccgcgcctctggactggacagctggagtggatggatgggtcatcgacattgcaatgcaatgcaagcaacttgcatctggatctcagacctcgcagctcactggcactgcggatcaataa

SEQ ID NO: 4328 - DNA, 150 bp, Zea mays
  Peptide Sequence Number=SeqID_46107
atggacgacgatgacgacgccgaggcaaggggcgcgtggggcgtgtacaatgtgtcagctccggtgtggatgggccagcgtctacgtaggaagcctgctactgctataccgtcgagacggatcgcgtcgtgggctgggctcagtgagtga

SEQ ID NO: 4329 - DNA, 423 bp, Zea mays
  Peptide Sequence Number=SeqID_46108
atggaccccgacttcgagctcgagttcgagatggtcggtgtcttgcgtgcgtacaagaccacatgggacgatggtgactctgctgcggcggcggcgtccacggacgtcgatctgctcaagcgagcgtggctcaacgagaaggaggaggtgctcgatgacttcgtcgacggcggcgttgacgacctggtggtctcgctctaccagatggacctcgatcgcacgctcttcctcctccgctcctacctcctcctggagaaggcattttggagggctgtaacaactgggatgacaaagtctctggcctactcatctcgtgttgatgatgtagagagtccagttcttcaaagggtgggaatgtgtccaagaagacaaaggcatcgacccgccaactcttcgctacaaattcaaacagcacttgggtga

SEQ ID NO: 4330 - DNA, 615 bp, Zea mays
  Peptide Sequence Number=SeqID_46109
atgaacgtatgtgagctcactcttgctgtctcacaccccccacaggtcaagaacaggtaccgcaagatgaggcgcgtggaggatgctgtgatgagttcaaataactatcctattgagtttttgaactccataactccaaatggtttgcccccacatgtgctcaaagtaaaaatcaatagtccagtgattcttctccgcaatcttgatcctaataatggcttgtgcaatggaacaagactcatggttagagcattgcaagacaatgcaattgatgctgaaattgttggtggtcacaatgcgggtacaagggtgttcattcctcagattccaatgtgtccatcagatgacatttctcttccgtttaagttgaagaggaaacaattccctatccgcttgagttttgctatgaccataaataaagcacaggggcaaaccatcccaaatgttggcatctacctgccagagcctgtgttctcgcatggacaactttatgtggcattgtcgaggggcgtgtcaagacaaactactagaattctggctaggccaaagaaggaattagatcccacagggaagagcaccaagaatattgtgtataaagatgtcctcaactgctga

SEQ ID NO: 4331 - DNA, 1677 bp, Zea mays
  Peptide Sequence Number=SeqID_46110
atgcctctgcgcggtctccggcgccgggggcgttgctgtgatgacgggaggaccctgctacgcctctctctccgcagatcgtcatcgtgcgccgcaccttcgagccaaagttccaacagcgccgcactcacggcggaggaagaggcggcggccgcacaaatcaagagctcgctcctcagggcgcgcaaggggagcgtcgaggacctggtacgggccctggcggcagagtgctccgaggtccggctgacgagcggcgtcgcggacagcctgctgcgcgggtgcggggactgctggaaacccgcgctgggtttcttcctttgggcgcagtcgcggggcggcggctactcgcacacaccgtacgcctgcagccggatggtcgacctgctcgggaagacgaggcagatcgaccggatgtgggatctgctgtccgaaatgcactgcagggggctcgtcacggtggacactgtcgccaagagcatcaggaggcttgccgctgcgaggaagtggagggatgccattctgttgtttgatcagctggaggacttgggactggagaggaacacggagaccatgaatgtgctgctggacgcgctctgcaaggagaagaaagtcgaactggcgcgcgaggtctttgtcatgctcagccctcatatcgcaccagatgcgtacactttcaacatcttcgtccatggttggtgcagcgtgcgcaggattgacgaggcgctgtggacgatcgaggagatgaaaaccagggggttccctcctatcgtcatcacatacacggctgttcttgaggcgtactgcaagcagcgcaacttcaggagggtctacgaagtccttgattccatgggttctcagggctgccatccgaatgtgatcacatacacgatgatcatgacctcactgacaaaatgcgaaaggtttgaagaagctctgagtgtctctgatagaatgaagtcctctggttgtaagcctgataccttgttctacaacgccctgatcaaccttctcggtagagcaggtcacttgtttgaagccaaccaagtgtttcgcgtggagatgccaaggaatggcgtgctccgcaacgtggccacctataacacgatgatatcaattctctgccaatatgggcgagatgatgacgcgctcggtgtactgaaagagatggaagcacaatcctgcaaacctgatcttcagacatatcagccacttcttagactgctgcttggtagaagagggcaagctgctgccgttcaccgtttgttgagtgagcttcgtgatagaaatggtctagggttagatcttgatacatatacccttctgatccatggtctctgcaaggtcggtgagaccgattgggcttatctactctatgatgagatggtaggcagtgaaattgtacctaggcctagaacatgcgagttacttttgagtgagatgcagagacaaaacatggaagcctccaaatttctggagcaaggggttgtgtgtccaagtgcttgttctgcactattttttgcgcggagtggtagcagcgcaggcggggtcgggtgctggttacgcacattagctgtgcggcacagggcagtagctgagagagcgttgggcgtgggacccacaggacacagcgcgtggggcgggtctagagtgtcaacgcggagtgtgaagtcgtggtag

SEQ ID NO: 4332 - DNA, 540 bp, Zea mays
  Peptide Sequence Number=SeqID_46111
atggagagagagccgcgggagctgagggagaaagaagctgggcgcggcgctgggagatccggtgagccgagagggaggctgcgcgccgtgggagctggagcagcgcgcgacacagagaaccggagggcgcgcaggctgggagctcggccgccatgggcaagtgcagggaagaacgcgacgcgccagggaagagcagaggtcgggggcgagctcggcacggcgcgtgcgcaagaagaagctctagggagcgagcagggcgcggccaagggagaaacgccggctgtgcccagggcaaactcggcccgacggccatggacgaggtgggcgagcagcaaggcgccgagcagaggggccagagcgcggagggagagagagagacagggcgccgagcagaaccgagcgccatgggtgcaggaagatgtgacggcgcacaggaaaggagaaccgaggagcagaggctggggcacgccatggaagatgggaggaggccggctgcgcgcagctggatttgtatccagggccggccgagtgagaagataa

SEQ ID NO: 4333 - DNA, 321 bp, Zea mays
  Peptide Sequence Number=SeqID_46112
atggcaaaggtgaagacggtactaggacgtggcgacaacgacggactagggttgtggtcgcagcaccgccgccacctgcgcgcggggccgcgagcagcaagggagaagacgcggagattggagagaaggaggtgcagcgccgccgccacctgctttggcgcgggaccacgggcagcagatctacgggcagcaggggaggagactagcaggggggaaatggagattgaagaaaatggagatggaaggaagaggcttgacgggagagagaagaaccttgcagagaggagagtgcgacggaagaacggctctggacggcagtag

SEQ ID NO: 4334 - DNA, 285 bp, Zea mays
  Peptide Sequence Number=SeqID_46113
atgtcacaaaatccgctcattatcgatgccgcgcttcgtgtatcgtgtgctcgacggaagtcccaagcctgtggacagcacacgcacaagccgacacgtgggttgcagaatcgggcgtgtgtgatcaatgacgtcaactggaaactgtcgtcgtgcttgcgactatcgcgtcgaattagtcagggtacgttaattaatcgcgcgttgcggaagacgaaccaagtcgaccccaagcacgggctaatccgcaagatgaagctgatggaccaacttgaagatggttaa

SEQ ID NO: 4335 - DNA, 294 bp, Zea mays
  Peptide Sequence Number=SeqID_46114
atggcatggttggcccgcgcggaaaggagggacgggctgcgcaaggccgctcgctcccactcccgcgtggacgcttgtatcccctactgcaagcgcacccgactcaggcgcggggctaacacgaaggccgcgggatccgctctcttacgcctccctccctccggctgctccctttccccccttcgcgttccgcctcgcgtcgacccatctgggctggggcacgcggcgacaattcactcgtcggtccagggaccccccgggtttcgaaacaccgacaaatatgccctcggataa

SEQ ID NO: 4336 - DNA, 792 bp, Zea mays
  Peptide Sequence Number=SeqID_46115
atgccggccccgacccgcccccgccggcgtccgccccgccctgcccccaccgccttggctaacgccggctccctcagccgcgtcccactccctccgcagcgccgactccctccatggttgtgcgacgcgagatcggctccccttcccttgcgtaccccccctgagatcgcgcagacccgccaaatcgaggaatccacgccccaaatcgaggaatccgcctccgctgtggaaggagatcgcctccggccctccgctgtgccccaaatctcggtcggcatcatcgtccgctccttcaacgccgatctgctgtacgagtcgtgggaggtcctcgacgaagaccgccgccccttcaccatgtgcccgtgggaagagctggtctttgaggacgagtccgagaggggcagcaacgcgctgctcgcgcgggcgtggtcaccagggtggcagaacgccgacaaggcgctgacggccttcctcaacggcccgctgatggactactccgtgaaccacaagaaggccgacagcgccagcacgtcgctgctgtccccgtacctgcacttcgacgagctcagcgtccggaaggtcttccaccaggtccggatgaagcgcctcatgtggagcaacgacggcaaccacgccggcgaggagagctgcaccatgttcctctgctccatcggcctgtgggagtactcgaggtacctcaccttcaaccacccttgcagccacgagaagcccctcctgtcgcacctcaggttcatcccttgggtcgtcaatgaggtgtacttcaaggtctag

SEQ ID NO: 4337 - DNA, 270 bp, Zea mays
  Peptide Sequence Number=SeqID_46116
atgggcgtgcctgacttctgcgcgcgctggcgtgcaataaatgcgttgcaggaactaggtgtaagcctaattccctttcagaagttcagcctcgggcgcgacagggagctctgcctcgcccgacccccgacctcggtctcagcctcggcctcgggaggagtcacatcctcgcccgaccccggcctcggcctcgggaagagtctccgccttgcccgaccttgggctcagaccgaccgtgccgcaggggatacatcattaccctactcctag

SEQ ID NO: 4338 - DNA, 267 bp, Zea mays
  Peptide Sequence Number=SeqID_46117
atggcaatagcaaggaagtcgaaagaaccaaacttgatgctgcttccgggggtgaaggtttcgaccccgataggtgctaatgaactggccatcagagtgaaaacaattcactttggcacagtcgcggtcccctacccgcgtgcgagtccttgtagcatgctctacgctagcactgccgtacctgatgggtcccgcagaatgtgctcacggattttgctcgcgaagctcattgatgtgttattggataaatggctccattaccgctag

SEQ ID NO: 4339 - DNA, 753 bp, Zea mays
  Peptide Sequence Number=SeqID_46118
atgggagatgccatgtgggacatccagggccatttcatgaagattcttgacactgccagatgggtatccatgccgctggaggtttcccctaccagagaagatgacgccaatggcgccgagccgttcgccatcgagaagacgagggccgccttcagggacctcgggaccaagctggacatctccctcacctccgtcgacgccgtgtccaggaggatcgccgcggtgcgcgacgatgagctccggccgcagctcgtgcagcttgtccgagggttggcaaggatgccgagagtgatcgcggacgcgcaccgggtgatgaagcgcatcgccgacgactcgatcgcgctcctcacggtcccgccgccgcccccgagcgcggccgcgggtgcgggtgcgggtgcgggcgagctcggcgcggagctccgcggctggcgcgcggctatggaggcctgggccgagtcgcagcgcgcgtacgtggccgcgctctggggccgcgcgcggagctgcgccatggacggcgaggtcatcatgccgcgcctgatcgtggggtgggcgcgcgcggggggcgaggagtggttcaacgaggaagaggggaagaagaataagttctgcgtggcgctgccggcggctttgccgctttcggatacgacgagctggtgctggagcctggagatggagatgggagcgagcagcgagggaacgagagcgggagatcgccggcagggacggacgaggaaccaatcaatccataactga

SEQ ID NO: 4340 - DNA, 1332 bp, Zea mays
  Peptide Sequence Number=SeqID_46119
atggaggagggccaatcgacagcggagcgcaggtcacggccagcgccgaactccgacatcttcaccatcactctatggtcgcatccgtccactgcgcggctgggcggtggtcgggtccgactgcacgaggtccgccggcgtgaggtagagacgaggagcctcccgccagtagagtcccgcggcggcggcaatagggtcggctgcgcaccaaaggaggcgcggtgtcgggtcgcgaggaagacggtcaccagcccagtggggcccgcataccagcgacgccaacagataatgcgggtaggagttagtgataaaatgggccaggaactgtggaattcggcccagaagtgcccatcggagctggagctggaggctttcctccgcggccgggaggacgccacggcggcggcggcggcggcggtggccgagcagaagcctacgcacgacatcgctgcgctggcgccgttcggcgccggtggcgtgttcccctccagcgatctgtccgccttcagcttcgctgactcgaacaccctcaatggaactggaaacatccataatcacctttggtcccataaccacaacgtcaggcatcccgcagtctccacgacgatcgagtcgcagtcgtcgatctgtgcagctgcagcagcaagtccaacatcggctaccaacctgtacctgaaagagagccaggctctgggcggcacgagtggttccgactccgacagcgattcgctgctggacatcgagggtggcccgtgcgagcagagcacgaacccacaggacgtgaagaggatgcgacggatggtgtcgaaccgtgagtctgctcgacggtccaggaagaggaagcaagcccacctagctgaccttgagacacaggtcgaccagctgcgaggcgagaacgcgtcgctcttcaagcagctgacggacgccaaccagcagttcacgaccgcggtcacggacaacaggatcctcaagtcggacgtggaggccctcagagtcaaggtgaagctggcggaggacatggtggcgcgcggcgcgctgtcgtgcgggctgggcagcctggggctgtcgccggcgctgaacccgcggcaggcgtgccgcggccccgacgtgctgtccgtgtccggcctggacttccccggcgccgacgacgcctgcttcacggggctgtccccggcggagcagctgcagctccagagctcccccctgcagagcatcgccgccagcctcgagagcctggacaaccggatggccagcgaggtcaccagctgcggggggcccggcgtcgacgtctggccgtgggaccaccactccaacggcggcctgtccaagtga

SEQ ID NO: 4341 - DNA, 1207 bp, Zea mays
  Peptide Sequence Number=SeqID_46120
gcggtcaccggagtcgcgtcctcccctgcgcgagcgcgagcacgaccaccgaggcgccgaccagagtcgcgacctcccctacgcgagcgcgagcgtgaccgccgaccggagccgcggcctcccctgcgccgctgcgcgagcgcgactacgcgaccgccgaggcgcctctgcgccctgcgtccctgcggccgagcgcaaccggagccgcggccgcctctgcgccctgcgctgcgtccctgcggccgagcgacagggagtttcccttcctccccgaccacctttgcgtccgtgtgttcctgctcctgctgctgctatcgacgaccaactcgagtcggccaccatttctatggatgggaactcgaatcgaatcgacaataacaacagccaatcattttccgttgccgatcctctgactttgagttccactggtcgcgagattgctttggatgcagatacaggtacaggtacagctgcgacgccgtcgacagcgacaacgacagcgagtaccgcaagcacggatactatatgccacaagcgcggtcgcaagagcacttccgatgtatggaatgacttcgagcaattgttcaaggacataaatggtaagaaggttaggtatgccgccaaatgcctttactgcaagtctcaacttactgcttcttcaactgctggtactggtcatttgaaacgacatcgtagtacttgtgcatctaaagctcaacgtgctgctaagactcaatctttaattcagtttaatgctgatggttctgttcgttcatgggactataatcttgatattgctcgtactgagttgtgtcgattgatatgtactttagatcttcctctaggtattggttccactgctgcatttgaacgttacataaaacatgctcataatcctaggtttactgttgtttgtagacaaacaaccactagagattttgtaaagttttataatcaaagtcgtacttcactaatagatgtattgaagtctagtgtttcatgtgttgctcttacttctgatatttggtctggaaatgctaaggaagattatattagtgtggttgctcattatgttaatgctgattgggttttggaaaagagggtaattggtatgagattgattgatgtttcacataatggggctaatattgcagatcgtgttaaaactattattgctcattttggattgactgataaggttgattga

SEQ ID NO: 4342 - DNA, 645 bp, Zea mays
  Peptide Sequence Number=SeqID_46121
atgggattgaagctttcttgcatccaccagggcagcctgtcccgccaggcacatcagccggcctcgccggcgcccgccagggtcatcgccgcagacgcgtcgctaaaggagctcccggcctcatcctcttcctctagcgtctcggacgtgctcggccggagcggcggcgacgacatggccgtggcgtcgtcgtcgttcttcatgtgcaactccgacgcgctgtacttcaacgagcccccgccggcgctgcccaccggcgaggtgctccggccggggcagatatacttcgtgctcccggcggccatgctcgggaggccgctttcgaccgccgacatggcagcgctggccgtgcgagcgacgacggcgctctcgtccagctgcaagccgcggcgccacgggcggcgccgggcacgtggcggcggcaagaagaagaaggcagttcgcgtcgtgcccgtgcgcgagcaaatggaggacggtggagaggacgccttcttcaacgagaagctcaaccaacagacgctgggggatttcgggatgttgctgctgagccaagcgaagaaggacgacaagcttgcggttgcggccgccgcggcgacggcgaggctcaagcgggcgctgagcattattcaagaagacgccgagtga

SEQ ID NO: 4343 - DNA, 654 bp, Zea mays
  Peptide Sequence Number=SeqID_46122
atgacggaggagaagcagatgttctcttcctacgtcaagaacaaggattcccatgacacgatcatatttagagatgggaaccaaggcaaggtaaatgggttagatgtgattgtctttagaggaagtgatggttcattagcatttaaaggtgtattagatgacaagctttacttggttgattttacaaaagagaatgctgatctacatgcatgtttacttgctaagaccaacttgggctggttgtggcatcgctgtctagcacatgctagaatgaagaacccgcataaacttataaaggggaaacatgtgttagtactaaccaatgtatgttttgagaaagacagacattgtgcagcatgtcaagtagagaagcaagtgggaacaagtcatccgagcaagaacataatgacaacatcaagaccattggagtttattaacaaggatttctttggacttgttgcttatcttagcatcgggggaaatgagaatgaggtttcaacggccgcactaaggacaatgacaattcgagacatacgatcacacgaaccacaagaacaagatcaaccatcttgctcaacaatgatgcaaccccctactcagggtgaggaacaaatacctcaagatgatagtcatggatcaagtgggagcgcatga

SEQ ID NO: 4344 - DNA, 663 bp, Zea mays
  Peptide Sequence Number=SeqID_46123
atggtgagcctgagggagatggctcggtccgatgcggagcgtgccccaccagcgtggctgcgtgcgctgctagagaccaggttcttcgatgcatgcccagagcaccaagccaacgacgccggccgcgctaacaggaaaagaaccagcggctgcaacttcctgtgcactcactgtgccgaccgggccctctgctctggctgcctcggcaaccatgaaggtcatggacttatccagatccggaggtcgtcaggcaacaacgttgtgaaggtcgatgatgttcagaatcggctgagcgtgtcactggtgcagacctacgtctacaacggagactatgctgtgttcctgaacaggcgacccatgtcgggtcacggaaagcatggcgcgtctcactgtgagcagtgcggaaggggactccaggatgaggactgccgcttctgctcactcgagtgcaaggctaaaggaatagaggaccgtcttgatttcagcgtgtcattcgctgtcgatccaaacaacttcagcagctctggagatgacactgaatcagacgacgatgaagactcatcctacccatccaagtttcaaaagctggaaactataccagcatcatctagcaagccagttgcctctggaggacagcactctataggtaaaaagcaatattga

SEQ ID NO: 4345 - DNA, 324 bp, Zea mays
  Peptide Sequence Number=SeqID_46124
atgtcgttgacggaggcgaagaccgtagtggtcctagagtctgtgctgcgcttggagaagtgggcggcatacaagaaggcccttgctgacaggaagagggcgcttgagagccgtaagatcatattcactcgctccaaacagtatgcccaggagtacggcacagaggaaaaatccaattggaaatgtcttggctcgagcagccaagaatctactgagtctgggagcaccggactgtccggtggtgcaccggacagtgtccggtgcgccaggctgactcggcgtgaactcggcgctctcgggaattcgccgacggcgtacggctaa

SEQ ID NO: 4346 - DNA, 696 bp, Zea mays
  Peptide Sequence Number=SeqID_46125
atggccgtctccgacgatgaaactgttgagatcgactgcaacgaggagcgacggttgtgcgggttggccggagatgacgatgaggatgacctccgggaggatgctacaacgctctttggccatagcagtgagcatcctgtccatgtcggtgatgaacaacaagtcggtggtcaggataacgaaggtgaatgggacgaacacagtgccaagcgatgtcgtccttctacttctgcagtgtggttagatttcgagaaacttttcaaaatcgtgaacggtaagaaggttaggtttgcagctaagtgcatacattgctctaagcaatattctgctctctctagtggtggcactggccacctgacccgacatagagatagatgtcccaggaggcgtgagaaaacccgcatgtctcagtctcagatatcttttaatcctgatgatagtatgcgtaactgggagtactgtcctatggttgcacgtaatgaattggttcgattgcttgctaggctagaaattcctattagtttgggtgaaaatgctgcatttgaacactacattagaactgctcataatcctaaatttgtgcctgtctctaggcaaaccaccaccagagacatggttaaatacttcactgacaaaaaggctaagcttgttgagactctttcttcttctgatgtgagagcacctagaggggggtga

SEQ ID NO: 4347 - DNA, 795 bp, Zea mays
  Peptide Sequence Number=SeqID_46126
atggacccttacctcggcgccgtcatcattggcgccgaggggggtcggcaccaagatctatggcgccgaccccctaggacttgccacatcggctgccacgtaggaaaagttggcgtcaattatgttggcgccactatgtgttacctcggcgccaatgatgacggcgccgagggcaacgacaatcccctcgccgccgcctcggcctctctacctttccacctttcccacccgccgattcactcgctcgcgcggccgcgactccagcctcccctaaatccgctcgcgcccagcgaggaggcggggtcgcagcgagcgaagattccctccgaatcctctcctccaaaaacttccgatccgcttacgatggctacgcagcagcagcacgcggggccggcgtccgggtcggcgtcggcgtcgagctctagctcggggctgcaccttcccgcctcgccctcggccttcggggacaccacccacaccaaggttttcgtgggcggtctcgcctgggagaccaacagcggcaggctccggcgcttctacgagcgtttcggggacatactcgaggccgtcgtcatcaccgaccgccactctggccgctccaagggatacggattcgtcggaggttatggccaccaccgaccgtttccacttgggtattaccaaggatttccggttccccagtacagttatccttcatatgggaccgaatacatctctccacaggttgaagtgttaaaagctatcagcttttatattcttgtgctgcataagacagttacacaaacctttgcctaa

SEQ ID NO: 4348 - DNA, 360 bp, Zea mays
  Peptide Sequence Number=SeqID_46127
atgtccggtgcaccagaggactccgacttcaaactcttcaccttcgggaaattccagaggcgactccgctataattcaccggactgtccgcggggcaacggctatttcggcgccaacggctacctgcgacgcattaaatgcgcgcgctgcgcgcgcaaagggcaggcaccccccatgctggcgcaccggaaaatctacagtgcgtgtccggtgcgcccccgggacatcaaggcgggcccagaagtcagaactccaacggtcggaacccaacgacttttggtgacgtggctgtccgcaccggacatgtccgaagcagtagaagctgaagagcttgcagcatgcagtagagcagttgcagag

SEQ ID NO: 4349 - DNA, 228 bp, Zea mays
  Peptide Sequence Number=SeqID_46128
atgggagagatgcgggtgtgcggtgtgagaggatttttttttatacagccgggccgggcggaggtcgatgacagactatcattgttgctaggtaccatcatccggataaggatagaagtatccgggataggaatgagcgtgaagttctacacaaaacggaacaggtgcttggtgactctcgtcttgcgaaacacaatggagatcctcttgcatggacgacaaagataa

SEQ ID NO: 4350 - DNA, 396 bp, Zea mays
  Peptide Sequence Number=SeqID_46129
atggcatccaccaaggacttctcgtccgtctctgccttcaggctgccctttgtgatcaagttcttccgagacgtcaagctcagcaggctgcccatagcaagtttcgtcttcaggaaacttttaggagaccacttagttctgatccagcttacctatggtttgttattgcaaaagcatgcttcagataaagcattttataataccaaggcgagctggctttcattagtgcatacccttattttgcagttttcatgggtggtagcacatgaacaccagttggaaacaaaaatggagaaagcatatcagaatgaagctctgttttgtttttcacaacaatcagctcggagctgtatgggctgcacagatcgatggattcctggtaggatcagatcttaa

SEQ ID NO: 4351 - DNA, 435 bp, Zea mays
  Peptide Sequence Number=SeqID_46130
atgaggcagaagaagaagaagaagaaaaacaacgaagaagccaacaataagcaggaggacaactttgttgggatgtggcctgtcaccgagtattacacctcaatgttcgagtcgggacacttcccaaacctgctacagaatgcactacatgccctgggaacctatgttcgacctctctatgacacacgacgagtgtctgagccccctcgggcttgtcactacatgactcatgtgcatataaaagtgatggatgcaggagatagaggttttaggactctatcagcccatgagtctctgacgctactatgcacctactctgccttggtcagcgatgctgctcgaagagctctatggtccctcagccacacctatcggcagcatctatacaacatggtgtacaggcatcttcctctacgtcctcgtggagagagctag

SEQ ID NO: 4352 - DNA, 447 bp, Zea mays
  Peptide Sequence Number=SeqID_46131
atggtgagtgtcccggggaatagcatgctcaacatcgtgacagttcggtgtggacactgcgcaaatctactgtcagtgaacctgagagcactgatgcactcactcccagaacaagatcatcagctccaggagaacatcaaggtccatggcatcaacggcactttgcacgatgatcatcagtactgcggccatttggatcagctcggttcttcttcgtcgtcaagggaagagatacgcaggatcaaagcgaacaaccccgacattaaccacagggaagccttcagcacggcagccaagaattgggcacattatccaaacatccatttcggtttagacgactccgggcgagagggcaagaagaagctcgtggatcatgaggcggcggcgtctgtcgtcgcagtcgcagcagcaccgactgctgctaaaaagatccagggtttctactga

SEQ ID NO: 4353 - DNA, 222 bp, Zea mays
  Peptide Sequence Number=SeqID_46132
atgaccttttgtgcagcatccttacgaatgaagggattttctaatcatgattcagatacggaagaaaacataaaacttctcttaattgcttttgagcaagtctcaagccttaaggttaactaccacaaaggcgaggtgctcctcaggagaactattggctcaggttatgagccaagcttcagaaaagtgaagaggaagacggatgagctgctggtcctataa

SEQ ID NO: 4354 - DNA, 522 bp, Zea mays
  Peptide Sequence Number=SeqID_46133
atggacagccgcggcagcgccttcgccgcacaacaccacttgcccaaggtcgagtgttcgctacaaccttacgtcctgaggatggcttatgcgcagttcaaagcgagcacggcatggggaaaactcaccaacgcagaggcacagacgaggtcggacgaagacgacgcgaagctttcgccacacgacacgagctccaccaggactgtcaccggagaccagccaaaacgtccgtcacggacgagcgtggattggtcccgcctaaaggtcgtgacccaggggctatcggaagtaaccaatcgtggccgagtttcacggagcaaggcgtggtcaacggccatggcggaggaatcagtcagtttggccatgaccagctggggcgagaagatgacatgtgggtcccacatcgtcggcacccgttctctaatgcacggcacgcgcgtgactggccccagtggtccacatgtcggcgccgatgctgaacttgtgccgtatgtgcgcgggagtgaaggtctgctgggctaa

SEQ ID NO: 4355 - DNA, 615 bp, Zea mays
  Peptide Sequence Number=SeqID_46134
atgtggtggtcgtgcctggcggagtgggtgctggttgtgtgccatttgggcaaggaccctatgccagtggctttggttcccccttctctagcggaccatggtatccttctcgtggtgatcgctatccccccatggaaccgagggtctctggacggaggcctggagaacacgtggctcatagatttaggttgtttgcaccacatgatcggaagttctaaatggttctccagcctcgaccctgtgattggtaagaaatacatcacattcgaggataagtcgagaagtaaggttgtctctcgtggcatcattcgggtgaacgaggtcaccaaagtgataacctcgcatccctgtgagttgcttcatatggatagtgttggtccaactcaggtttgctcttttgggggggagtggtatgtgcttgtggttgtggttgtcgatgacttttattgctactcttgggtgttcttcatgatggcgaacgatgaggcttttactcatgctcgagatttgattcttctgttgctaaatgagtttcctaagaatgccatgggagctatacatagtgacaatggctcaaaattcaaaattactcagtttgcaactttttgtgcttga

SEQ ID NO: 4356 - DNA, 969 bp, Zea mays
  Peptide Sequence Number=SeqID_46135
atggcggcgaccgacttcttcttcgtgagcgagtgcaagggccagaagaccatcgacggcgagcaggtgcccctggtcctggctccttccggggacgacggcaagagcaacggctacgaggcgctggtggaggccctgaaggcgaaccgggagtgggtggaggccaaggtggtggccaacagcggcctgctgctgcgcggcttcgacgtgcgcgatgctgccgagttcaacgccgtcgtcgaggcgctcgggtggccggacatccgctacgtggggccggcgccgcgcacgcacgtccacggccgcgtctggaccgccaacgagggcccgctggaggagttcatctactaccaccacgagatggtcctgatcaaggagttcccggggaaggtgatcctgttctgcgaggtgccgccgccgtcgggcggcgaaacgccgttcgtgccgagcttccgggtgacagagcgtgcgctggaggagttcccggagatggtggaggagctggacgacaagggcctccgctacaccttcacggcgctgagcaagaacgacaccaagtccatgcgcgggcgcgggtgggaggacgccttcgccacctccgacaaggccgaggccgagaggcgcgcgcgggcgctgggcatggacgtggagtggctccccgacggcggcgtgcgcacgatcctcggcccgcggaagctcacgcgcgtcttcccgggccgcaggaaccgccgcatgtggttcaacacggtggtggggatgcacggcaaggagctcagctccgccacgctcgctgacgggtccgagatccccgccgacttcgtgcgccgctgcggcgagatcatcgaggaggagagcatccagttccggtgggagaagggcgacatcctcatcctcgacaacctcgccacgctccacggccgccgcccctcgctgccgccgcgcaaggtcctcgtcgccacctgcaagtga

SEQ ID NO: 4357 - DNA, 390 bp, Zea mays
  Peptide Sequence Number=SeqID_46136
atggccaatcccatacacctctaccgaggaggcgaggcaggtgcaggaatccctcgcctgaccgccatcgcagcaaaatcaacccaaggacctccccacacagaccactcccctactgcccttgcccctttcaggggccacagggtattccgtccacggcgcaaggcggaagatccgaatttcgtcgatgacagcgagcaattacccagggctccgatgctggcgctcggccgagacggcagggaacggatcagcggctggctggagcgcgcgaccatggtggcggccatcacggccaacgacgaccatggacgttcacatatatgcgcagggggaaatggagctgcgcagggagaagtggaggaagttgcggagctttggttgacatga

SEQ ID NO: 4358 - DNA, 714 bp, Zea mays
  Peptide Sequence Number=SeqID_46137
atggctatggtcgcctgtgcttttcttgttatggctagcgcatctgctctgctgcactctttgcagtgcagctactgcttcgcaaacagtgatgcaccgagaacagctgtagccgcggccaagggaagaagggcaacgtttctagctgctgcaacaagggtttcagatctggtccggtttgcgcctgtgtctgcaactgacccagcagtccggcttgcagctgcgcttgtgagtgcccctgtgattgtagttgtgcctgaggttgcggttgggaggtttgctgggctgatgattgcaactgcgcttcttggggctgcacttcgggctgctggtggacctgcacttgtgggggttgctgcagctgctgatggacctgcaattgtgggggcaactgcggctgagggtgcagatgcacttggggttgcagctgcggctgagagtgcagctgcacttgtgggagctgttgtggctgatggtggagctgcagttgaggttggaggtagtgttgtgtttgcgaatgcaactgaacttgagattgcatgggttgctgtggttcagtatgcagctgaagttggggttgtgcttgtggtagctgtggcggttcttgttctggctcctttggcttgggggctccgttattcatccttgctcgagcctcagcaaacatcctttgttgctcagcaacagcttcttcctctgtcatctcaatcctag

SEQ ID NO: 4359 - DNA, 2328 bp, Zea mays
  Peptide Sequence Number=SeqID_46138
atggcttcttcccctccccagccactcacccgcaccgtcctcgccgctaccctgctcctcctcttgcacaatgccgccgccagagccgacggcgcgtcgccggcggtgaacccattcacggcgaaggcggcattcatccgatactggaaccgcaaggtgcccaacaaccgcccgcacccggccttcttcgtcgccaaactctccccgctcccggccgctgactccgcctccttcccatccgcgctgcccgacatccgcgccagcctacccgcgctctgcaccaaagccgcgctcctctgccccgggccggctactactgatgcggcgtcgctgacatcgggccgcaggggcgggggacctttcaagggctacaacaacgccaacttctccaactacggcaccggcggcgtagcggggaccgactcgttccagaagtactccccggacctcaacatcgccgccgacagcttccgccgctacggccgggactcgtcgggacgcgccgacagcttcacctcttacgaggccgacggcaacgtcgtgaccgccaacttcacctcctacgccggcggcgccacgggtggttcgggctccttcgccgcctacgccgccgagaccaacgtcccggactccaccttcaccaactacgacgccgccgccaacggccgcggccggagcttcgcgtcctactcccaggaggcgaaccatggggagaacggcttctccggctacggcaagaacggcaacggcgtgcgcgagacgttcaagtcctacggcaatgagtccaacgtgctggcctccggcttcgccaactacgggcagtccgccaacggcgccacggacaccttcacgggctacggcgtggaggggaacgtccctgagaacaggttccggagctacggcgccggcggcaacgctggcgtcgacaccttcaagaattaccgcgacgacggcaacgtcggcgacgacaggttcacctcctacgccaagggcgcaaacggcggcgcggcggagttccagagctacggcaactcggccaacccgggcagcaccatcttcaagggctacggcgagggcaccaaccccaaccaccacattgggttcaaggagtacgccggcgagaacaacaccttcaagggctatgccaagagcggtgtggacttcaaggggtaccacaacaccaccgtctccagctccaccgccgcggtgctgacggtgtcggcggaggcagcggcatcgatgcatcacgagcacctgaagtggtcgccggagcccgggaagttcttcagggagcgggagctcgtggccgggaaccgaatgccgatgccggacatcagggacaagatgccgcccagggcgttcctgcccagggccatcgccgcgaggataccgttcgagcccaacgccgtgtcggaggccttcgggctgcccctcgacacggcgctggggaaggccgtggcgtccacggtggcggagtgcgagcgcgcgccgagcaagggcgagacgaagcggtgcgcgacgtcggccgaggacgtggtggacttcgcggtggaggtgctgggcgacgacatcgtggtgcgcagcacggcgtccacggcgggcggcggcgggcgcgtccagctgggcgccgtggccggcgtggacggcggcagggtgacgcggtccgtgtcgtgccaccagagcctgttcccgtacctggtgtactactgccactccgtgcccaaggtgcgggtgtacgaggccgacatcctggccgccgatggctccggctccggcgagaagatcaaccgcggggtggccatctgccacctggacacgtccgactggagcccggcgcacggcgcgttcgtggcgctcggcggcaagcccggcgaggtggagcggatctcgcagaagcaaatagttccttccacggcctcatctcagaggaaaagcgagcagcttgttgtaaaccatggaccatggacggacgatgctccagtgtccggaggggggcaggaagaaagtgacgcggcaaagaaagcgcgtgtgaggaagaagagaagcacagcacaggttccctttcgcatggcctgtcaattccagcaatgggttcgattccgaagtcggtcctgccactggcgtggctcaagaaaacggcaggtccgaatgatctggccgtcactcaccacccatggcatggtggtaggactacgtactgcatctgtatgttgcaatgtcactttcggcgaggatctggactcatcttggattggactgctggagctggacctggaggtgaatgcgttgttgcctagcgtgcgcatcgtcagtacagtgctagtttaa

SEQ ID NO: 4360 - DNA, 261 bp, Zea mays
  Peptide Sequence Number=SeqID_46139
atggacccgatggacatcgtggggaagtctaaggaggacgtttccctccccaaatcaacaatggttaagataattaaggagatgcttcctcctgatgtacgagtggcaagagatgcacaggatcttcttgttgaatgctgcgtagagttcatcaatctcctttcgtctgaatccaatgaagtgtgcagcagagaagagaagaaaacaattgctcctgagcatgttatcaaggctctaagtgttagtattttctcctcataa

SEQ ID NO: 4361 - DNA, 645 bp, Zea mays
  Peptide Sequence Number=SeqID_46140
atgaacgagaaggtcaggttgcatgtgtgcaccggttgcaacaaaaacagtgggtttaaagagagcagagtccatagcgtccacgttgctgctaggctcgactacccattgcacgtccatggcgttgagaagctccgtcaaaccaccacggctggagcatgccagtggcggcgctgccatgttgcagcagcccttgaacgtggtgaccagcaggtggcggctgcgacagcaacgacgttcagcgagggcacgacgacatgggtgttagccctagcatgtgacgataacagatattgcaatctcgcggatggagagtacgtgttgatccaagagcaagaggctcagcaggaagaagcccaggaaccagctcttgagcccgtcgccgaggaaccttccgccacacccacatttgaaggcaagcccggttttatgcataaccgtcatatatgctattttacaccacttaatgtttgtagctatggtgggtacaagtgcggtcattgcacgacggcagccaaggtcaatggagcattgtatgccaagaccgtttacttcaagacatggttgatggtgcgacttggccagccaccgggttggacgatcgagtgggatgccacctcggtaggagaggaccaggaggagtag

SEQ ID NO: 4362 - DNA, 255 bp, Zea mays
  Peptide Sequence Number=SeqID_46141
atgatagtgcgggagctcgacacgctgtggcgagcagataaaattcgtgcgcgcggcaaacaaggaaagagcgagctgagcgtgcgcagagagctcgacaacccgcagcaggggctagcagggcgtgagctgcgcaacgccgagcagagactggagcaaggaccgagctcgacacagggagtttcacggcgcggtggccatgtctgggaccaggggcgcgacgatgggaactgggggaaaaaaatggagctctag

SEQ ID NO: 4363 - DNA, 192 bp, Zea mays
  Peptide Sequence Number=SeqID_46142
atgaggcccttgacgtatcgtcgccacaacgaggccctcgacgtattgccaccgccgctttggaggaagccgaggctttgcaacaagctgcatacaacagttgtccacaatgatttcattatatttaattccagggtacttctttgcaacctcacggagtggccccctctggagttgaatatgcagttataa

SEQ ID NO: 4364 - DNA, 252 bp, Zea mays
  Peptide Sequence Number=SeqID_46143
atggggctgggtctgggagctcttctcaaatccgggggctctcggaaggcaggtgaaagaaccagtggagctgctggaccctcaatggataagatggagaaggccccaggtttgccctactcttgcaaaaaaatgcgtaacaaatctgtggtacaaaccagacacatatttgtgcccgatcttcgtgtaggagaagcgttcggtagaaggaaccctagcggtcctgtgaaccagaccgacagttacgcgtaa

SEQ ID NO: 4365 - DNA, 531 bp, Zea mays
  Peptide Sequence Number=SeqID_46144
atgactgcacctaggcaacgttattatgagagtgaaaggggggatgtgctcctacttcccacttcccttgatgagcaacaagcacctgcattgagtaatgcaagaaggtccttgaaggcgcggcgcgatgccagtgctgtccttgaaggcgtcagcgcccatgagcagcgcgacctcatcgacttcgctccagagcttctggatggcgccgaggcggcggctaccgaggccatggccgtggcgagcgtggcagaatccgggaaagagcggttcggcttgcggtcgctcttgcgcgagggcacggcggagccgtggtccgcggcgcgctcgcgacgggagctagggttagggttcggggagcagcggcgatcctcggagcggccgcgggacttggagcgagaggtggcaatgagattgatggttcttggttttgactctggtaatggttgtcagcattgcaaccactgctcaggagaagatgaagtcgtggaaggagacttccaggagttccaagactacgacgagttctag

SEQ ID NO: 4366 - DNA, 399 bp, Zea mays
  Peptide Sequence Number=SeqID_46145
atgacgacgcgcagacgctgcgcagatcgacgacgtgaggcccgatctagcgagcacgacgcaacggagggcgtcgctgctgctgctgctttggcattacatcgagcacgccgagggcacgacgcaagggagacccaggtggccgttgctgcaagtgcgggggcacggaccggtggaggagcacgtgaggaggagctcggcgagctctgtccaggcgcggggacgcggatggcaagggcagagcagagaggaacggcgtccagcggcacagggacagtggtcgccgaccgacacttgtgcgcgtccagggaaaacagagagggagctcgaccagggatctccagcccgagcagaggatgcagtgaaggagcagagggaggcgacaagagaaggatctag

SEQ ID NO: 4367 - DNA, 396 bp, Zea mays
  Peptide Sequence Number=SeqID_46146
atggcgaaattttggtcctgggtcttggagaggcaaagacagactgcagctccggacgaaaagacgacttcaacacaccagaatatgtttcgcacgctacatttcaagagctacaaagcacaggtcgagaacaaagagatcacaaggcgtctcaagcacagggaaaacatcaatttcggtaaagtgcagagcaagagggggaaggtcgacagtctggacagtgatggcttaccatacacagataactggcaactcacatacacatacacagataactggccactcacatacacatacacagataactgggcactaagtttgtttctgggattctgtttctggaattctgggcactatttctgtttctgggagcacatacacaattctgggcactaa

SEQ ID NO: 4368 - DNA, 231 bp, Zea mays
  Peptide Sequence Number=SeqID_46147
atggccagttcaaaggatcgcaccgacgtttcccccaacaacatcgtgaagctgactctggagaacctgtcgaccgaagatcatcagaaatttgaaaactacaaaaggcagctgatcgaggaggtccaagcgagagctaaatttgccaaaagcatcggctacaaatgggccctcacaaacccagccattatacgacatgccaatgaacttgtgcatgaccggaccatctag

SEQ ID NO: 4369 - DNA, 165 bp, Zea mays
  Peptide Sequence Number=SeqID_46148
atgacccatgggggcagtcgtatcattaaccccatgacagctgatttgataatgacccatacccacagggtacaaggggaagttgttgctgagaagaccccagatgacaaagaaacattaaagatcaccatcaagtctgacgatgctaggggcaaacgcagatag

SEQ ID NO: 4370 - DNA, 1128 bp, Zea mays
  Peptide Sequence Number=SeqID_46149
atgggggaatgtttcgaggtctttgcagcagatctagcagagacatgcgatcccgatggctcagcgcacgacattgtggctgagaccgcagagtactcagtagacctcgttaccgaggataagttggggaaggatttaattccaatgaaagttggtacgggtagcacgaaacagtgggttgtgtgggaggcgagtgcggtgtgtgactgtgaggatgttgaactggctctcatggcatgggtgttacttatattcccttactcgcataatgtcacacccgaatttaaggggatatcaatcgtctccctccctcagaaagccgacgacggcactgacccagctgcggcggagggctccggtgagcccatcagttttcgcgacaaggcaccacgagctatcctgagggcatctacacgaatcaccaaacaaatgcgaatagtaaggggcgaggggtctgcctggctggcgaggccgcggcggcttcgacatgcccacaacggactcgatgaggacaacgtcgacttccggagagtagctgacaagcgggacccacaccgcagcgacatagggtgcgcgcgcgacgctttcggcttcgacacgggcccatctgtcggcgcggaggcgcgcggatccaatctgggccggcttggagtggagtgggccgagggtgcacttgtggctgatttcgtacttcttcatcttgccactattatcgatgctctagcccccttggcggaaatgtgggaggcggtagctgcggtgagggccgagtgtttggctgttaaggacgagcttaaacagaagaagcggcaggcgaccgagttcgagcagcgagcgaagtccgctaaagctgagttgggcttcctgaagaagcagcttgatgaaacgacgatcgagctatcagctgagcaccttggctcggagggcttcactctaagcgttcggtgcatgcacaagatattttcaatgatttcagcagagtatagagatcacatggctctgggctataatcaaagagctaaaaccttttccgcccttgttacttacgagagtggatttgagtcattgatccatgagggttgtgaccacatgtcacgcttgacctcggcggagtttgaagacagatag

SEQ ID NO: 4371 - DNA, 372 bp, Zea mays
  Peptide Sequence Number=SeqID_46150
atgcagccaacggtgacattatccaactgtaaggaggcaccgacttggattagaggattcaagggggtgtacgagtttataactctgagaagatcgagctcgaggaggtggaggagcagcagccgactcgattggttgcaacagaccgcggataccacgcggccagtttcttctactaccctcccagccggcttggtgacgctcgaattaatggccgaggaaggtgtggcggggggtcgcttttatactccggtgagggtagagtccgaggcagccctgattggccgcactgaccaaagcggcgagttccgcgcgttccgttgggatcgacgggaggaagaagatatccccgacagatgggcccacatgtag

SEQ ID NO: 4372 - DNA, 1707 bp, Zea mays
  Peptide Sequence Number=SeqID_46151
atggctggaacaacctttggctccgataccaaatcagggaagagtagtcaagcaactagaagagatgtgaggaatatcgcaattgttgctcatgttgatcatgggaaaacaactttggtggattcaatgttaaggcaagccaaggttttccgagataatcaagttgtgcaggaaagaataatggactccaatgacctagaacgggaaagagggatcacgattctgagcaagaatacatcaataacctataagggcactaaaatcaatataattgatactcctggacattcagattttggtggggaggttgagcgtgttctgaacatggtggaaggagttcttctagtggttgattctgtagaggggcctatgccacagacaaggtttgttctgaagaaagctctagaatttggacatgctgttgttgtagttgtaaacaagatcgacagacctactgctcgtcctgagtttgtggtgaattcaacatttgaactatttattgaattaaatgcaactgatgaacagtgtgatttccaaacagtctatgcaagtggaattaaaggaaaggccagtctatctcctgacaatttagctgatgacctaggacccctttttgaggcaattcttagatgcataccagagccacgcgttgagaaagatggtgccctgcaaatgcttgtatctaatactgaatatgatgagcacaaaggaagaattgcaattggacggctgcatgcaggagaacttcagcgtggcatggaggtcaaggtttgtacaccagacgatgcttgcagggttggtaaagtgagtgagctttttgtttatcagaacttcagccgtgcccccgttgaatctgttagtgctggtgacatttgtgctgtatgtggaatcgatgatatcatgatcggggaaactatagctgataaagttacaggaacaccattgcccactatcaaagtggaggagccaacagtcagaatgtctttctccatcaatacatcaccttttgttggacgggaggggaaatatgttactagccgaaatctccgtgacaggttgtatcgcgagctcgaaaggaatttggctatgaaagtagaagacggggaaactgctgatacatttcttgttagtggcagaggcacactacatctcacaatattgatagaaaatatgcggagagaaggatatgaatttatgattggacctccaaaggtcataaacaagacagtcgatggaaaactactagagccttatgagatagctgctgttgaagtcccagaggagtccatgggatcagttgttgagcttttagggaaaaggcgtggacagatggttgacatggaagctaacgggacggagggaacaacattgctgaaatacaagattcctaccagaggccttattggacttcggaatgcaattcttacagcttctcgtggcagagctatattgaatacaatctttgacagctatggcccatgggctggagatcttagctcacgtgatcagggatccttggttgcttttgaagatggaagcactacttcttatgcacttcttaatgcacaagaaagagtggttcttgatgaacctttaagctacagtttggatgactgcatagagtttatccaagaagatgagatagtggaggttactcctgcaagcatccgtatgtgcaagaacccaaaagtttcgaagaaaaagtaa

SEQ ID NO: 4373 - DNA, 309 bp, Zea mays
  Peptide Sequence Number=SeqID_46152
atggagtcttcggcaaagaacaaggcttccactccaactctgacggtgcataaggttcaatacaaaccaatgaatattcaagttagggacccaattcaaaaggagcaaaaaggacttgagtgtgttgtggtctggcgcaccggactgtccggtgtgccaccggacactgtccggtgcaccaggaccgtacagggtccaaccagccactctcgggaaaactcgggcgcgctccactacaattcaccggactgtccggtgtgccagcgggcaactgctatccagcacgcaacggtcgactctgacggatga

SEQ ID NO: 4374 - DNA, 273 bp, Zea mays
  Peptide Sequence Number=SeqID_46153
atggtggcggggtcaatttggtcgccgagtgctcggtatggccggcccacggcgggtggcggcttccgcggtggtgaggtcaccggtgaggccacgcagtgcgacgggggaggcaaaaatggtgtctcaggaccgtggggaggtggtgaagctcatgagctaactcaattgaatcctaggctactagagaggggagggagactcagcggagcgcaggaagggagcagcggcgtgggctcgattgagctcgggggaggggtgcggggaggttga

SEQ ID NO: 4375 - DNA, 1470 bp, Zea mays
  Peptide Sequence Number=SeqID_46154
atgatgctgtttgtatcaccccccttcaatgattgcattggaaatgcaggtcctgtttctgcaatggttgggaacaggctagaaagcagacctatttcggcatcaccatccttcagctcaagtttggtggcatataaaggatctgccaaaacatttaacctggttgagatggagagagctacactaggatttgatgagtccagaattattggtgagggtggttttgggcgtgtctatgaaggtattcttgaggatggagaacgggttgctatcaaggttttaaagcgggacgatcaacaagaggggcatagccgatgtttggtttatgagcttgttccgaatggcagtgtggaatctcacttgcatggatcagataagggagctgctcagtttgattggaacgctaggctcaaaattgcacttggtgcagcacgcgcacttgcatatttgcatgaggattcaagtccacgtgtcatacaccgtgatttcaagtccagtaacatcttattggaacatgacttcaccccaaaggtgtcagactttggcttagcaaggacagctttgggtgagggaaacgagcatatttcaactcgtgtcatgggaacttttgggtatcttgctcctgaatatgcaatgactggccatcttctagtaaagagtgatgtttacagctacggtgttgttcttcttgagcttcttacagggaggaaaccggtagatatgttaagacctcctggacaggaaaacttagtggcatgggctggttctcttctgacaagcagggatggtctggaatcaatcatagatcattcacttgggcgcagcattccatttgacagcatcgcaaaagtagcagccattgcttctatgtgtgttcagcctgaggtggaccagcgcccattcatgggtgaagtagttcaagctctaaagctggtatgcaatgaaggcggcgagttcaatgagtcaacctttagccaagatttgcatatccaagatgtcgaggttatgagtagagcaagtacggatgtagacgttgacccaacgctatctgctgagctgttcacttcatcagcgcgttatgatgctatagatgcccctggttctttccgaagatactcaagttcaggtcctctaagagtagggagaactggactgaacaaagagaggggcctgtcaacaggcagctcaagcatgactgtgggggccgatggaggctccagtgtcgaatgcacccacagagcgtccatccgcttcgggagcctcgacttcaccatcggtcgagagagcaacacggtcagggtgctcgtccgacctgccccgtctgagagcctcgacgccatcttggcggccctcagtactctcagcctcgccacgcgcatgcgatgcatgaggcctagatcgacctcgccttctgaggccgacaaaaaaggcgacagattgcgattcacatgcgccaaatccctcatatga

SEQ ID NO: 4376 - DNA, 279 bp, Zea mays
  Peptide Sequence Number=SeqID_46155
atgtcaaccccaatagctgccccgcggtggatgctgaggtccacgacgttccgaacgcggctcggaatgtcgagcaggcgctatacgcgagttgctccacgtgcacagatgctctgggtcaccgaatcgacctcccagcacagctccgccaacttggtttcctgtcatgttcagaagacaaaaaggaacattagtttcgatgcccccgagaggcagaaagggattcagaagcagggtgagtggcatactcgccgcacgggcctccacgatggccaatga

SEQ ID NO: 4377 - DNA, 168 bp, Zea mays
  Peptide Sequence Number=SeqID_46156
atggcaaggaaatactccatcttggtggtgacgcatctgaagatcgagtttgacttctctccttcccttgacgaggttgatcttttctcctccggtcttggtctcattgattcgtggataagatggatccataaagataagatagaatcttttgagatgcaattgtga

SEQ ID NO: 4378 - DNA, 354 bp, Zea mays
  Peptide Sequence Number=SeqID_46157
atgacggcttggaaccatatcacgatccttccagcctgccttggtacaatcactatgactcgagttgaacatgcaagatttacaaaactggcggagccaggcgccaaaccggcggtaaaccgccctgagccggcgattaaccgcgactggcataagctggtaatattatttgctactaatgtgttgtatacttgtattatttttgccacatttgtaggagacatgttggatctagatagagatacagaaagagaaagagaaaaatatagaatctggattcatggagagaaggttggtgcgggttttaagtgcaagtattgtagagaaacaaagagcggagggggtggtacctga

SEQ ID NO: 4379 - DNA, 519 bp, Zea mays
  Peptide Sequence Number=SeqID_46158
atggaggctttgaatgcgtcttggaatggattgctagctcttgtattgaatgttgaaggtggcaatgagattgatggttctggttatgactatggtgctggtaagtggtattctttccgtttggaaagggttgtcagcattgcaaccactgctcaggagaagatgaagctgtggaaggagacttccaggagttccaagactacaacgagttctaggcgtgggttagcggcaacccccagtcggctgcctgtgaaggccgtggttatctacgtttcattttcgcactttgatttattatggctcgtcttagacacactgcatgaaagtctgtcatccccttcttaccctcctgccttgctgagcgtccgcttcgtcgtcccgtggccggacagtccagccacttggagcggctgcaccaccgcctgcatgaggagcaggagcgtcgacggcaggagcaggagcgtcgacggcaggagcaggagcagcagggctcttctttctcgctccaccaggagatag

SEQ ID NO: 4380 - DNA, 171 bp, Zea mays
  Peptide Sequence Number=SeqID_46159
atgaggtttgtccagaacgctgtcacaggcagctcccacatcgaccggtcgaaccaccgcctctccgatgaagccaatgggcctctacgcaaaaatgcacaaagcgggcgcgagaggccggcgcggtgccggttttcgcctatgttcgtgggccgagcgggttggttttga

SEQ ID NO: 4381 - DNA, 1560 bp, Zea mays
  Peptide Sequence Number=SeqID_46160
atgtcggtcaatttccttgtgtttttgggcagcagcaaagaggcaacggagagggtttccagaacagagtatacagagggcaaggctgttatgagcaacaaggaggagaaagaatgccaaatgaccaaagaagagaagaggcggaagaagagggagaaacataaggacatgggtcagagcggcgattatgagggtaaggctgttatgagcaacaaggaggagaaagactgccaagtaaccgaagaagagaagaaacggaagaaggggaagaagcataaggacaagggtcagggcagcaattctgatagctcatgtgccaggaaccatagcattgagatggagcaagctgatgtgtcagccaagatggctgaagactcctgcttggagcatgcagaggctgttacgagcaaaagctctgcgaagaaacacaggaagaaaaagaggaaagataaagaggttgaaactattggccagaagcagatactcgatgctgatgaaaatgttgggtcagaagatacgaagaggaacagcagagaaagggaacatgataggaagtcaaagaagcacaaacgaaagcatcaggatgacgagactgcctcaaatggttcttctggtaatcaaattgttttaggggaagataagaggacggaaaaagagtatttagttaccttggatttggaagaggacaataaatctgatatgtcaaagattgggaagaagacagatagcaagaagaagaggagaaaagagagaaatgatggtgttgacctaagacaaaatacactagttggagagggcaagaatggtaagaataacaaagagaaaaaaatgtgtgaggatgagaatggtggcggtgaaagagagaaagaaaacatgggaaagcagaaggataagtgtagacgagtgagcttcactgatcatgtggaggtgtttaatataggtggtagtgatgatgtagagggtgatgggagtggtgaaactgaacttgtgcatggacgacggtttagccctgaggaagatgcaaagctaatggaagcgatattgaaatatgcagagttgaagcaattaggagagaaagggttacagatgattggggaaagtaataagcatccagagaccaggggttgttgggctgaaataggaaaagcattacctcatagacccaagaaagccaaatacgcgcgtggaaaggttttacttcaaaggagtgctgaacgtaaatggaccgctgaggagtatgagataattcgacggtttgttgaaaagaacggccgaaattggaaggtattagcaaaagaacttggaaagagtgaaatccatgatccagattcctgtaggaacattttagatccatattttctcaagaaatgtttcaggggcaaagggcagacccagtgttggatgctcttacataagtggggtctgagaagggataaatcggtgcaagtcttccctcgtaaatgtggagaggctgctttgaacccgcgatttggtgactcagtgaaacagctctcaacactacaccatgcctgcacttcttacactaaaaaggacaagtag

SEQ ID NO: 4382 - DNA, 174 bp, Zea mays
  Peptide Sequence Number=SeqID_46161
atggcccaccagcggtgcccggcctgcgcgctcttaaggctggtgctagtgcaggcggcagcgcggcctcactcctccgtgcactatttccgtctgctagatgacgaagaagaggaaccggaagcggaacgtgaagaggagaaagatgaggatgagatcgaggagtccgattag

SEQ ID NO: 4383 - DNA, 1515 bp, Zea mays
  Peptide Sequence Number=SeqID_46162
atgaccgcgacgccggcagtgatcgggctgagcgctgggcaccgcctcctcgccacctcgttcggctcccccgacctcgcgtccccggacgcgcactcgtcgctgcagttcgcggccgccgcaccgaagctcaccgtcgtcgcgcaccgcgcccccgcctcctcttcctcctcctctccgcccaacgtcgggcgcggctcttccgccgccggccacgcgcgcgcgcgcgccatccgggcgctcaggaaccactccgcgcccgcgctcgccacgccaccgccgcctcctctaccggcggacccgactccggacctagactcggagttcgagtcctcgctcgaggccatcgtgctgctgcagcgctccatgctcgagaagcagtgggagctccccttcgaggacgacatcatttccactgacgacgagcaggacgacagggttagcaaggccacggtggtggcggcgcggtcgggcgtctcggcgcggcagcggcggatgagcggccggcggcggggagctggtcggaagagcgttgccatcagcccggagctgatgcagagccggaaccgcatctacctcaggggcaccgtcagcaaggacctcctcacgcacaagcaggtcatccagctctccaggaagatcaaggacggcatctggcttcagcaccaaagatcaaagctgaaggagaaactggggaacgagccatcatacaagcagctggcacagtcactgcggatatcagctcctgaactgcgcgcaaggatgcgcgagtcgtttctcgcgagggagatgctgacaatgagcaacatccgtctggtcatatccattgcccacaagtatgataacctcggtgtcgacttggcagaccttattcagggtggtctgatagggctactccgagggatcgaaaaatttgatgcatcgaggggattcaggatttccacctatgtgtattggtggattcgtcagggtgtttcaagagcattggctgataactcaaaaacgttcaggctccctacgtatttgcacgagaggttgatagcaattcgtggtgcaaagtacgcgttagaggatcaaggaattgctccgacaatagagaacatagcagagtcgctcaatatatcggaaaagaaagtgcacaatgctacagaggctgtgaacaaggttctttcactggatcaacaggcgttcccctccttaaacggtctacctggggacacactccatagttacatagaggatcaaaacgtcgcaaatgatccatggcatggatttgaggaaatgtatctcaaggaggaagttaacaatcttataaattcaaacctcaacgagcgtgagagggacattattcgattataccatggcataggaaaacagtgccatacatgggaggatattagcagacaatttgggttgtcgagggagcgtgtgaggcaagtaggactcgttgcgatggagaagctgaagcatgctgcgaggaggaagcatttggatgcattgcttgaggattattga

SEQ ID NO: 4384 - DNA, 714 bp, Zea mays
  Peptide Sequence Number=SeqID_46163
atggatcatggattccagccaggcgcccggctccatccgccgcgcgttctgccgcgcctcgctgtgccggcccacgccgcctctgacgagaaccagaagacattccgccccaagaagagcgctccatcaggcagcaagggagcacagctccgtaagcacatagatgccactctcggcagtggaaaccttagggaagctgtgaggttgcctcctggagaggatatcaatgaatggcttgctgtgaataccgtggatttctttaaccaagttaatatgctgtatggcacgctcacagaattctgcacacctgagagctgcccaacaatgacagctggcccaaagtatgagtacagatgggctgatggtgtgcagataaagaaacccatagaggtatcagcaccaaaatatatggagtatctgatggattggattgaaggccagcttgacgatgaatccatatttcctcaaaaacttggcacaccattcccaccaaacttcaaggaagtagtgaagacgatattcaagcgcttgtttcgtgtttatgcccacatataccactcgcatttccagaagattgttagccttaaagaggaggcccatctcaatacctgtttcaagcacttcattctgtttacaaatgagtttggcctgattgacaagaaggagctggctccactccaggagctcattgaatccatcatcgttccttactga

SEQ ID NO: 4385 - DNA, 156 bp, Zea mays
  Peptide Sequence Number=SeqID_46164
atgcacctagaagaagaaattgaagtggaagtggaagcgaagccaactcctcaatctgaagtctctccagctgaaggtctctccgaaggtcctccggaaggtgccccatttggatttgctgctaactacgatatcctggtagtaggagttgaatga

SEQ ID NO: 4386 - DNA, 681 bp, Zea mays
  Peptide Sequence Number=SeqID_46165
atggcttttaactggtcaaccctcgactacataccctattacctttcacatttggaagccccattcactgaccaagagatcactgacttaattaaggctttaccagcgagccgctccccaggccctgatggcttcattgggatcttctacaaaaactgttgggaaattatcaaggtcgacttgattaaggcattacaagatttccataatcataaaacctcaaagttacatctcgcaaatgaggcgcacattgttctgcttccaaagaaagagggagctacagagttcagtgagtttcggccaatcagtctgatcaacagtctggctaaaattattactaaggtgttggctgaccgtctggccccaatgcttgataagctcgtgcaaaatcgttctggtgagtggatatatgcaacgccgattcccggaacctttgtttgtaacatcggtgacatgctgaaggtttggacaaatggaatatatcagcccacccttcacagagttgtcaacaattcccagcattaccgtgtatctgttgcattcttctacgagtccaacttcgatgctgcagtagagcctgttgagttctgccgggagaaaaccggcggtgctgctaagtacgaaaaggttgtgtacggggagcatttggttcagaaagtattgacgaacttcgtcatgtaa

SEQ ID NO: 4387 - DNA, 969 bp, Zea mays
  Peptide Sequence Number=SeqID_46166
atggcgcggacgctccgccgccggtgccacggcacagcagcagactacactatcaagaatcttcgtctggtctacagaaaggacgtggccatggaatgccggtacgtagacgagttcatcgcgctcgccaacgccacgaagctggagctcgccccccacatgggcgccgagtccttctcctcctcacttgtcgcggacgcagccggcgactggtccgtcgagctgccgccggctacggtcgagttggaggtgcagccgttctgctttgccgtgaggccgccgcgcatccacggccccggcgtcaacgtccttcggtcccttacgctgcatgggcacacggtggttcgcaaggacttcccgctcgccgtcaccgtgttcccgtcgctggaggacctgcacatcggcaactgcacccttgctgccagtatgaccatctcgtcggacaccatgcctcgcctcaaacacctccgcttcaccgaggtcagcgtgagcgcggatgacaccaaagccgccatcaccgtgctcgcagatgacctgaggactctccgcatgtcatgccggcggtgtagctatactgtatcgccatcggagccgctcatgttcacgtgcggcgggcacggctcggccttgttcaccaaatactctttgttccacttacgcgcacccaagctggcggtgttcgagtggcgatgctgctatgctgatgaggtgcgcgttgacgccgtgggccgcctctccgacgtcgcgatcgagatcgccgccggtaggacgcggacgagggttcccataggcatggaacctaagttcgtgacagtacagcaacgtgacaaacttatgaccgacatccttcaagagcttatgccagggctgcagccgcgcacctggaaagatatcacgaggcaatgcatgcaacgtgatgagaggtggttgtgctttgaagtcacagatggttaccctgctaccgaatga

SEQ ID NO: 4388 - DNA, 192 bp, Zea mays
  Peptide Sequence Number=SeqID_46167
atgacgagggtggggcggagattcgtggtgggatttgcgggcttgaggatcccggcggtgggaggtcgtgccctctctgtcatcggcgttgacgagctcgggggaggagaacggcggcaagacgaagcccacatgagagagaggacaacaaatccggagaaggcaggattggatccacacttggaggcctag

SEQ ID NO: 4389 - DNA, 1941 bp, Zea mays
  Peptide Sequence Number=SeqID_46168
atgggggcggagcaggggtacgaagatatgcaggggaccttcagggactccgaggtgttcgagtttgtcgggaaagtcctgcagtccgtgcggatggatccgtttttaattgacataagggacaaagattattatgattacatgctaggcattatagaccctaccaagaaaaggagtacagatgatgaagctatgtttgttgctgctgtggcagaccaatatctcagagaatgtttgcagatgcttgtgaataatttcactccacctggacccctcattcgttacattgaggagccaaggtggcttccaaagaaggaaaaaatctactctcagttgcaagagagtttgaaaatgatttctgacactgtgcccttggcaccaaggatgttaaaggatataattgataggagtatgccaaagttgtttgatagcaaagctaagatggtatcatttgtcaagtgcatgttgggacttgatgctgttgtttgggacattattgggtcgtcattgttggagaaagttgtgtacctacttacagaattggatgttaatataacatgggaagatattcttcaagatgaacacaacaaaggtatatttgacatggagcttgaggatttggctgaggatgaagataaccttggtcaagaaggaacaaaggtccattttggaggaaatatgtgtgccgagaaacttgatggtttaatggtggttgtgtgtgagcacctcaagtcacgtgtagaagaacctgagcgcctaattaagtggaaactgtcaggaccaccaggccaacccaaaccacaaggtaatgtaagaggcaccgttcttagtggatcccaaggtctgaaccaggaatttgtcactttgaaggctatatttaaatcacatgtgctgagggtgcacaaatccaaatttgcacagtttatcatgttttatgcttgttccctgcatcctgagattggcgatggctttgctaattttcttactgatatttttattgacaaggacaaaaacgaggatgcaattactaggctagtggactggtgtgattattattgtggccatcagctggacaatggggtgacagcaaatcctataaagcaccagctattttatgctagctgccaggctgtgatgtatgtcctatgctttcggttaagatctattatggactacccaaatcttaaacaacaactttttcgaatgcgaatccgggatatcttggtccacccattgcagccattaaaggtgtgcttgccttcaatagtgaatgagttcctgagacaggctacagctgcgagcctgttccatgcacctgcgatctcaatgcacgaagatgcagttgaatccgatctatcgaaggcatttggaggacttaataggcttgacatgttcttcccatttgacccgtatctacttaaagagtctgacagatatatacggccaaattttgagttctggtccttggtcaagacgacatacagtaacgacaacagcgatgaggacgacgaagagcttggcgacattgacgcacctggaatgaatgtgggcagcttggatgatcacttcgaaatagattttaacagtgacgatgacattgagtataagatgaataagatgtccataacgccgcaacgcactttctaccatccactggctacaaacagcaaaacaaccctctgttgcccagttcatgctgaagtctccagcaatctggcgaatacatccacacaccttcatcgaatgccctttctctatttggaacgattatcgaaacatgcaactaacatggtggaccgatgtgatcgatgtcgaggattgactcattatgggagcaggcaccgaattggcacacaccttggcaactcagatcttcagggaccggttatagtttatggtttccaatgtaacattgctttgaaggcaatggtcatgatttaa

SEQ ID NO: 4390 - DNA, 465 bp, Zea mays
  Peptide Sequence Number=SeqID_46169
atggcctactgtgatggaaaatgtaatctcctcagactgattgcttggtattgtgatattttaaaggctgaagattgtgattatgttgttgtatatggcttcagtttacctgctgcagaaagcgactatatcaggggtgtggcagcctcccatcagagtcccaccagcgccgaacccttcgcatcgacagtggccacaccagagaagaagccatacccacctgccacggtcgcggaggagatcaaagcaaacattataaccctggttattgaggttttcacatattcactttatatgcagaaagtcaagtctgagaatcgatggcatactttgaggctttatacatctcactgggcaccagagcgatggcaggagtacgaaccactttggaattactgccgtgataatggaataaagcttgttgcatgtgggactccacttgaggcatattggagtcatgagtaa

SEQ ID NO: 4391 - DNA, 660 bp, Zea mays
  Peptide Sequence Number=SeqID_46170
atggcccccccctgtgacgtggtcggtccgagccctgggtcgggcgaggcggtggctcctctgaggtcgaggtcgagtctgtcttccgaggtcgaggtcgagttcgagctccgggtcgggcgaggcggagaccatcgtctgaggccaaggctgagtccgagccctggggtcaggcgaggcggagttcgtcgtcttccggagtcaaggccgagtccgagccctgggggtcgggtgaggcggagttcgtcgtcttccggagccaaggctgagtctgagccctgggtcgggcgaggtggagttcgtcgtcttccggagccgaggctgagtccgagccctgggtcgggcgaggcggagttcgtcgtccgaggccgagacgggagccgagccctggggtcgggcgaggcggagcttcctatggcgcccgaagccggacttggctgctgtcagcctcactctgtcgagtggcacagcagtcggagcgacgcaggcgatgctgtcctcttgtcaggccggtcagtgaagcggcgaagttactgcggtcacttcggctctgtcgattggagggcgcgcgtcaggataagatgtcaggccatccttccccataatgttttgcgatacggtcgtcgtgtgcgatctggccaagtgctctgcaaagactag

SEQ ID NO: 4392 - DNA, 891 bp, Zea mays
  Peptide Sequence Number=SeqID_46171
atgaccgcgtcaaaaaaggtgcgccacgtcgttcgatttcgtatcttttcccttttcctctttctctctcttgccacagggaccgggaaaggggataccccaaaagggatccttctccgcgaaggaaacgggccccgagcccccctactgatcagaggtttgaaggctggcccctcagaagggttcaacagccgcctcagagcactcaggctctgcgcccactactggtcagaggttcgaaggctggcccctcggaagggttcaatggccgcctcagaccactcgggctccgcgcccactactgatcaggggttcgtaggctggcccccgaagggttcgacagccgcctcagacgcagagcgagggatgaccctggaggacagcgccgcctgcgccgctccgactgctgtgccactcgacagagtgaggcagacagcagccaagtctggcttcgggcgccataggaagctccgcctcgcccgaccccagggctcggcccccgtctcggcctcggacgacgaactccgcctcgcccgacccagggctcggactcagcctcggctccagaagacgacgaactccgcctcgcccgacccagggctcggactcagcctcggctctggaagacgacgaactccgcctcgcccgacccccagggctcagactcggcctcgactccggaagacgacgaactccgcctcgcccgaccccagggcttggactcagccttggcctcagacgatggtctccgcctcgcccgacccggggctcggactcgacctcgacctcggaagacagactcgacctcgacctcggaggagccaccgcctcgcccgacccggggctcggaccgaccacgtcacaggggggccatcattatcctacgcctag

SEQ ID NO: 4393 - DNA, 318 bp, Zea mays
  Peptide Sequence Number=SeqID_46172
atggcagccttctcccggaccaccggcagcgacatcgtggggaactgtgccatcgcgaagaggcttacgcggccgagcaccgccagcacgctccgctcctccctgcgcagtgaccaatgttactctaacagaatacgagttcaatcagaagaatgtgccacatttgtaattgagaacattgttggtgattacttccagccgaagaagcctactgattctacgttttggcatacaactttcacgctaagaaagacatcttttatatccatcaacttcaacttgatctacagcaatgtcaggagaatgagcatgagctaa

SEQ ID NO: 4394 - DNA, 1299 bp, Zea mays
  Peptide Sequence Number=SeqID_46173
atgggtagcttcgttaagctggcgaggagggcggtggagacggacgcgcctgtcatggtcaagatacaagaactgcttccaggggccatggatgtcatgtcgcttgcgcagggagttgtttactggcaacctcctgcgtcagcaatggctaaggtcgaaaaaataattagggaaccaacgcttagtaaatatggctctgatgatggtcttcccgagcttcgagaagcacttcttgaaaagctaaggctgcaagagagggatacaaaaataatttcctgtattatccaacatcttgctcttgttatgattactctggctaataattacagttacttgtttgtctataattccaaccagagagggatacaaaaatatgcattcaatcattatttgcagccaagtgataggaagcacatggagtccgtgggcgaggagatggagcagcgccgccgcgagctgcgcctcttcgccaacaccgccttcatgctctgcgacttcgaggccttcaaggcgctgaccagcaactacctggggctcaaggaccacaagttgtactcgcaggtggaggaggggttccacgccgccggcgcccgcctcagcccggccgagcttggcgagatcatgctggccaaccgcgcgtccccgagccgcgcgtccccgcagcttgatcaccaagctccagcacatttggagttgatgcctgctatcatcaatgcttcagaagttcagatgagtaactctgacgggctgacccttgttcggcaatttaattcctatcgccagatcagaacacttcgcaagaagctgcaacaaattgagattcttgaggctaaacaacttgcaagtcatcatcttgacaatcagcagaagaggcaccatggcgcctccgtcagaccgaacactcggacatcaagcttctctataccgccccatggcggagctctagaggtcaatggcgacgcgaaggacaacgtgcccaaccggtggttcaggccagagatcgatgctccgtgcccccgtagtccacccactctatctaggattccagatcttggagcaggctacgaaagacttcatgcgcttctacagcagcgtgagcagcttgttagcattccatcttcctcacttgaaattgtaccagtgcctcctgtgaatgaacttgtgccatcggtggaatgtgcagcagagcttgtttcaacactgtccccacctaggaaattaaggagagctgtgaaaaagataactccaaaggagaagatccaagccatgtacaactgcaatttggttcctgaaatctga

SEQ ID NO: 4395 - DNA, 363 bp, Zea mays
  Peptide Sequence Number=SeqID_46174
atggaggaggtccggatcttgaagcgcggcgaggaaccgcccactccagctccctcgccagccccgatgctggtgatagcagcgccccccgtggcgcaaaccgcagtggttgaccagcgcgccatctgctccactggtcggatcgggccacagacgcccgccgtggtgccgacgaagaagatagtgtcgccccccgctgcatctccagcagaggtggaggcgggtggggggatctgcggcatccgcgtgcgcgttgatggcggaggcgggcgtctcacggggtggagagagcgcctgtcatggcggcgattctggcgggcgaatggaacaaaccctaaaaccacgaagctgagcaaaggctga

SEQ ID NO: 4396 - DNA, 228 bp, Zea mays
  Peptide Sequence Number=SeqID_46175
atggaggagcgccgcctcctcaagatcaggaggctgaggcggccaccatgtcccagcgttgtctatctgcagggcatgctcatcacctcatacgccggcagccaccgtatccaggatgcaatatttagagttgttgacgctattcttcatttgggaaatgtggaattttcagaagggagtgaagcaaattcttctgtacccaaagatgacaagtcccagataacatga

SEQ ID NO: 4397 - DNA, 2733 bp, Zea mays
  Peptide Sequence Number=SeqID_46176
atggctgccgtcgcgcctccgcccgacaacatggacccgccgccggccactcccccagccgccactcctgccgcgacgctaaccccgcctcccgccgccacctccaccccgccaaaccccgcgacgcccggccccgcggcgcctagtccaaaccctaacctgccccccgcccccgcttccgcgcctccggcggcatttgcgccaccgatgcccccagctccggtctctttcgccgctaccttccgcccgctcggtgctcctgcgccaccgccgccgcaccaggtcccgcagtacggcgcgttgccgccgaacccgggctacccgatgccgccgccgatgcagccgccgggcgtccccgtcgtcatgcctccgggctccgttcggccgccggtcatgtacggaccgccccagccgggagcatacatgccgcagcagggcgctgcggtcccccatcctggaatgcctcgttatcctgcaccgtatcctatggttcgtccaggttttgttccacgtccaatgccgccacctggtgttgtgacaattcaacgaccaccaataatttctgggatccgggctattcctcctttggtagccctgactgcccgtccacctcctccagctgttatgctggctgataaaccgccaaccgcagtttatgttggcaagattgccccaacagtagacaatggtttccttctttcacttctccagctttgtggacctgtcaagagttggaagcgtgccgaagatccaagtaatggaaaacctaaaggttttgggttttgtgagtttgaatctgctgaaggcatccttcgtgcgacacggcttctcaacaaattgagccttgatggtcaggaactggtgattaatataaatgatgccaccaaggagtacctgaagaaacatgttgaggaaaagaagagagcacaagtgaagtcaaaagatgcaagtggggatggaactacagctgttgctgaaaatgaatcatcaaaatctgttcctgatgaatcagataaggagacaggagatgctggagacaaggacagtgacgagagcactaagaaatttgggattgttactgatgaagactctcaagctgataaagacgtcgcagaaaaaataagcagtatgattgagcagtggttaaagactagaccgccacctccacctccaccagttcaaccatcggcggatagctctggtgtagataaggcaaaaaatgattctgctgataagactgatgctgacactgttaaaagagcagtcaatgaaactgaaagatctgaaactgcctctcctgataggaggaaggatagagagcatgataaggataaacgggacaaagatattgaaaggcatgaccgtgaacgcgaacgtgaaaggatacggagggatagggagaaggatcataagcatagagaagttgatagactatacagggatcgccttaaggagtgggaatctagggagagagagaaagaatatcagagatatagtgaaaaggagaaagaaaaagatagagaacataaccgcagaagggagatcctgaagcaggaagatgagagcgacgaagaggataataggaaaaggaagcgaaggagtagtagttcacttgaagataggaaaagaaggcggcaacgtgaaaaggaggaagatttggcagataaaataagggaggaagaggaaattgcagaagcaaggcggcgggctgtagagttgcaacagcaagcagatgaagcagctgcagcagcggctgcagctgctgaagagtctgctacacttatggaggttgatgctgacgacgaaaaagaaacagatgcacaaaacgagccgtctgttgtggaagctgataacatcccgagctttgctaatagtgttggtgctggtggacttggtaaggaaaataacagtgaggaaataagcatggtacctagtcataccaagcaaaacaacaatgtcccagtaaagaaactgggttttggtttgattggcttgggcaaaaggacatctgttccatcagtttttgctgaagaggatgatgaaaataatgttgataaaagcataagacctctagtacctatcgactacaatgaagaattacaagccgtacaggctaattcttcgactggggcaaatgtcgcagcagctgctgagtttgccaagcgcatctcagtttctaactcaaaggaagagaaggctgacacagagaaggataggaataggagatccagtgaaggtcgtcctagcgatgagcgaagagagaagctacatgatcgtgagaaggataagtccaagtcggagaacaagaagattctggatgcaaagcaattaattgatatgatcccaaggacaaaggaagaactttttgcctatgatataaactgggtgatatatgacaagaatgagttgcacgagagaatgaggccttggatttcaaaaaagattattgaatttcttggcgaggaggaatcaactttggtggactatattgtttcctgcaccaaagaccacgttcaggcagaaaagatgctagagctcctacagtcgattttggatgttgaggctgagatgtttgttctcaagatgtggcggatgctgatatttgagattaagaaagtcgaatctggactatcaggaagagcaaattcacatgcatcaacagcctactcttgttctctggtgaacgacgaagaatgtcgaaggctggcagtagtcgcaagtataaatccctaa

SEQ ID NO: 4398 - DNA, 708 bp, Zea mays
  Peptide Sequence Number=SeqID_46177
atgacaaatctcaagatgaagtcaattgtaaaggacataaatgtaatcttacgcaggttgcaccctgttcctataaataggtataaccttcgtggtatcttgttcgtggccttcattcgaagttcattaaatccatggggatataatgcttccgcgaacgaaggacaacatctggaggatgctgtcgtgcgttcctccctccacgccggcacgagttacaccattgtgtcggccgactcatgcacgcgcgccggcacgctgcgctacgacgcgcactacgcattgctcctcctcccctttctcctctggctagaccggcgcgtggaagagaaacaggccagcactgccaacgggcagaaggaaaaaggtggtgacatcgcgagtgtagctgaccctaaggtgtctgctcaaatgccagtaagactattagcccaactagctatatactctggttctgttaccatgtacccaacatttgtcattaaaacattctcttccagaatgaccgtttctgcatgctttgagaaagaaaggacttatattacacagttgaatgttcggtttcctttggggcaactggacctgcatcaactttctctgcttacagatgcggataagggcaatggcgataagtacactgatttctcttatgaaattcatatggtggtgcgtacaaagagtttgtttacacataatctgacttcttga

SEQ ID NO: 4399 - DNA, 357 bp, Zea mays
  Peptide Sequence Number=SeqID_46178
atggctgtcgaagaaggctgcgcgaagggccacgcgagaagagagcgactcgcagcaaccgtcgccacgtgtcctgaaggctcaactcctccctcgatagcggagtccaagtcccgacgaagtcaagggtctgacttatgggcaaaggcctcgcgagcttttcgtggggccaggcttcaccctacgacggttttgtcctcgcggcacacctctcaacctaaggggccgaatacatcatacaagaaggcgagtacctgggaatctcagctaaagaccaactcaaactatgaacctgttggtcacttgttctcaaatgttgtgagtcaagaaccaggcaacacatttgttaagtattaa

SEQ ID NO: 4400 - DNA, 954 bp, Zea mays
  Peptide Sequence Number=SeqID_46179
atggagatcgcgacggttgacctccgcggggtggtgccggggggcgccgggtgggaggccgcccgcgcggcggtgaccgcgtccatggtggcgcacggctgcgtcgtcgtggcgcacgacgcggtcggcgcggacctccggcaggcgctgttctcccgcgcgctgccggagctcttcgcgctccctctcgaggccaagcagcggacggtgtcgcccaatggggagttcaggggctacatcggccagcgccccggcatggactgggagagcctccgcgtcggaaagcccacggacgccgccagcgtcagcggcttcgctgagacgctctggccggagggaaacccagagttctgtgacacgatcgtggcgttcgccgagaacatgatggagctggaggggacggtggagacgctggtcctggaaggcctcggcgcccgcgggcagagcatccgcgcccacttcggctcgctcgaccacgccgtccggctgtcgcactacggcgtgccgccggacacggagagcagcatgtcgatgcagccgcactacgacgacagcgtggtgaccgcgatcgtgcagcacgaggtggaagggctcgagatgcacgccggggacgggcgctgggtcgccgtccctgccgaagtcggcaccctcaccttcgtcgccggcgagcagttcagggtcgtgacgaacgggcgcgtgccggcgtgcctccaccgcgtgaggacgcccagcaaccgcgagcggttctcggtgctgttcggccgccggcagaaggacggcgtggcggtgcgcgcgatggaggacctcgtcgacgcggagcacccgctggcgtacaacccgctgcgccatgaggagtactccaggtggcgtgtcacacccggttttagaaggcaaaccgaatgcgaaccatgtacgtgccaggatcagttattcacgtacacagcagttacataa

SEQ ID NO: 4401 - DNA, 249 bp, Zea mays
  Peptide Sequence Number=SeqID_46180
atggcggcgcccgagccttcccacggccgcgccatcgccggaggagctcgccaatgccccaggggatgccgcggccacggatttatactcaggggcgagctcggtcagaccgcgcgacaggtgcgggagatcctccgcggattccgcggcggtttggtgaagcatccgcgccgaattagcgtaatccagcggagacagcagcggagttctgtttcgttcgcccgcgaggaagatggagatgaccggtag

SEQ ID NO: 4402 - DNA, 249 bp, Zea mays
  Peptide Sequence Number=SeqID_46181
atggcggcgcccgagccttcccacggccgcgccatcgccggaggagctcgccaatgccccaggggatgccgcggccacggatttatactcaggggcgagctcggtcagaccgcgcgacaggtgtgggagatcctccacggattccgcggcggtttggtgaagcatccgcgccgaattagcgtaatccagcggagacagcagcggagttctgtttcgttcgcccgcgaggaagatggagatgaccggtag

SEQ ID NO: 4403 - DNA, 375 bp, Zea mays
  Peptide Sequence Number=SeqID_46182
atggcccaccgcgacggcttctcgccctcggtctcccccgatccccggcgacaatttcccacggcacacaggaacaggtggggaagaaggacaggaacgaggtccacccgcagagcgcctgcgtccagtggccgacccgtgggtcccacgctagtgccacaaatcgcggacatcggcgtggaggtggagctagggagcggatgcgcgaatcacgcgaagcttgttacggtgaggttggggaagaacccgacgggcgggccctcgatgccagtggaaggaggaatcggtgcgcgtggtggagtccggtttactgaggaccggacggtggggcccaagggcagtgagcgcggaagtgcaggtgaccgctgggcctag

SEQ ID NO: 4404 - DNA, 219 bp, Zea mays
  Peptide Sequence Number=SeqID_46183
atgacgaaggtggtcgttaatgagttcaccggaggaccttcgacagatgaaggcccccaacagccggctggtaagcaagcaagactggagaagtttacgattctatccaaaatcaagatgacactggagccatggatgccggagtcaggcctcatcacgacaaccctcaagctcaagagggaggtcatcaagaaggcatacgaggtggaccttgcctag

SEQ ID NO: 4405 - DNA, 114 bp, Zea mays
  Peptide Sequence Number=SeqID_46184
atggcgatagggttcaaggtagtctcaacgaagggcgaggggggtcacgccaggaggttttatatccgcggccaaattccattccctaatccacagttggtgcaggtcagctag

SEQ ID NO: 4406 - DNA, 1069 bp, Zea mays
  Peptide Sequence Number=SeqID_46185
atgagaagctgcccagaatctgggcgtttggtcgtggcttctgcttctggcggccagaagccgcccagaatctcaaccaaacaggcgcagtgtcacacgagactcctccgccttccttttggtgtggaccagtttacccactggagcggcgctccaaaggaccgtgcgctcaaagttctattcggctggtattacgtatcaatgggtggctcagcaatcatttctataactctcatcgtgtacttgcaagacaaattgggctggaagatcggttttgccatttctatggttatagcggcatttgctgcaattttaaacattgttacatcgcccctttacatcaaggtgaaaccacagaaaagcacgtggattagtttagtgcaagtggttttcatcgctataaggaatcgacacattcagcttcctaaagcagcaggtgagaatgatctgcattactgcaacgttggaggactggcaatggttccatcaagcaaaatgagggtgctacaggcagaaacgatggaccgtcatgttggtagcacaaggttccaaatgcctgctggttcagtcgcaatatttgaaggcattacattcacattggtgtcaggatgcattacaggaagagaaaaaacgcttagtcacaagcagaaaatgggcatcggcgtgctcttttccattgcatgtgctctttcggcatcagtggtggaggccatccggaggaagcaagcaacaaggcagggcctagaaaataatactgatgatggtggggttgtaaatatgtcagtgctgtggctagcccctcaatgtgtttttgctggcctcattagtgcgtttggatccattggacagatcgaattctactatgaagtgctaccaaagtcaatgagtagcttagcactggccctcctccccctagcaataggtgtcgcaaacattgcaagtacagtggtcgtcaagctcgtcaaagtgattacatgtagtggtggaagagtaggatggcttcttgataacctgaaccaaggccattatgactacttctattttgtgctagcaatgctcggtattgcag

SEQ ID NO: 4407 - DNA, 417 bp, Zea mays
  Peptide Sequence Number=SeqID_46186
atggttatcctgaaggtgaggcaccacctctatgatggtcaccacctatttagaatcaaacagcaacaaaccctaggcccatctcgtgatgagcaatatcttgggttcggttctgcgagttggacggcgacagtccgtgacgggtcgccaggtcgtctggcggtgctcgttgcggcggtgcagactatttgcgactctgggctggacggtccgcaaccctgctataggagcggtcttctctgcgcgctgtctcggacggtccgcgctctgggctggacggtctacgatgccgcaggatcgtataccttctcctcgtatgacctagatcccgctccctgtgggagagaccatagggtgctccgggtcagtaggtcacccggggcatccctagaagatgtagagtcgcataggacttag

SEQ ID NO: 4408 - DNA, 402 bp, Zea mays
  Peptide Sequence Number=SeqID_46187
atgggggaaacccctaacgaaaggacgcaccgagaactgcgcaactcccgccgccgcgatcgtctccaagttcaggagcacgagcgggagcaagcagaacaagacgctaggctccagcgggaaaacctgctcctcacccggaacctataccctgacttcgcttgggtgctaaacacaccaagaaagtcgtgggatctcaaatcaatcaaatgccaaaacgacgatactctccacttgttcctcggaagacttcaaatgatgaggaaccgcatccccgaggttgcggaggcagccatgactgaggatttctatcggggatccaaagactcagctttcgtccgagttatccttcaaaaggcacccgccacctctaaacaactatttagggaggtggatgtctag

SEQ ID NO: 4409 - DNA, 312 bp, Zea mays
  Peptide Sequence Number=SeqID_46188
atggccagggattgcggtgctgcgattcacggtactaacgctcctgctgcattcattgcttcattgggattgtgtgggtaccctcgggtctgcatttggggctgtggaccaccagttggcatgctcgccggtgagcctcagtcgcggttcggggtggcgccgctgctccggccaacagaaaagggggtgaatccagtggctcagaaagaaccataccccttcggccatgcctatttgcgtaagagccctcctggaattttggatctaacccgcagtccagccttactatgctctatgtcttgggaaaattag

SEQ ID NO: 4410 - DNA, 156 bp, Zea mays
  Peptide Sequence Number=SeqID_46189
atggagaaggtcaagaggactgaggtaccaaaagccaaggtgaagaagaggttcttgcaagaggtcaaggttgatcatgctaaaaagagacatgatcaagcatttggcgtgcatactatccaaagagggaggcgtagtgctgatgtgctactgtga

SEQ ID NO: 4411 - DNA, 1935 bp, Zea mays
  Peptide Sequence Number=SeqID_46190
atggttgtcgctgcgtcgcctgaatttgatagcaaattgttacagaccccctgctgcatcttatgttttcctttctggcagcttgattttgctgtgcttaaatacaaaaaccaaaagcttgcggaacaactggaagtccacaaatttgagttctgtgctcttgagagtagatttaatgatctaaaagagaaacaaaggacacataataagacacttgttctagtcaaaagttattgggagcgactcatagcagatctgggtatagtttctgtttgcaaaaatgaatcttcacgttcaagctgcagtacagggaacaacaatatacgaaaggaaacagactttttaaatggacttttggaggctggtgccacagaaagttcaggttctcccaattgccaactaggaaatgacgtctcttcagaacaatcaacaacaattgatattctgcagaagctattccttccatcaagtggtccatggcatgtgaataacgagtttgtttctgctgctctcatgaagttgccagaaaatgaacacagcaggcaattgcacaatgctaccagcgatgtgttatccaagcttcatgtggtgatgcgtacagtagataatcttcacttgaaacacaggcagttagcagcgaactatcaaaaacaaagagattcgagtgcctggaacagagctgaacagaaacgtctgaaagaggagttgactagtgttgttgccaagttggaaggaagcaaacaaaaactggcagtactgaaagcacagggagacaataaacaagcaacaccgatcctggttcctacgctgggaaacaaaaatatgactgcagaaaaggtgagagataaacaaacagaactgcaagatcttgaagctactcacaaggagttaatggatgctagatgtgtatggacttttaagattgacacatacaaatatgagcaggaattgatttcaaagcgtctggaggaaattagaaggctgcatacagagagaattgaaattttgaacaagttagcaacttttcaggttgagatggatacctttgtttggcgagaaaggcaatttaatcaaaaagttgatttggctgaaatcccccagaaggtttctgcatactgtgtgtctagaattgctgaccttgaaaaggatgtccagaaactgtgtaatgaaaagaatatgcttgtgctgaaacttgaagaggcttcgagagaacctggtcggaaccaggttatctcagagtttaaagctctggtgtcatcactaccgagggaaatgggtgccgtgcaaagtgaactgtccaaacacaaggatgcttccttacagttgcattctttgcgagcagaagttcattcactttctagtatccaaaccagaaaggaacaagaaattgaagaaatgtcatttagatctgcccatgctggatctgatataagccaacttcaatctctggtccgtgagctgagggaaaatacacaggagcttaagctatttgtggagttgtataagcatgagtccactgattccagacagctgatggaatcgagagatagggaactcgctgaatgggctcgagttcacattctcaaatattctcttagtgaaagtaaattagagcaacgtgtaatttcagccaatgaagctgaagcaatctctcagcagaggttggcaactgctgaagctgagattgctgaattagggcagaagctagaaacttctaggagagatctagtgaaacaatctgatatactgaagtctaaacatgaagaatgtgaagcgtatgttgtggagatcgagagcattggccatgcctatgaagatataatgtcacaaaatcaacaattgctacagcagattattgaaagagatgatcataataccaagactttttctcgaaaagcgcaggagaactgcgcccgttatattaagaaggtctaa

SEQ ID NO: 4412 - DNA, 684 bp, Zea mays
  Peptide Sequence Number=SeqID_46191
atggtagaaagaaatcacacaaaggccgataagatataccaagagatcgaaggtcacaagcaaaaaattgctcgcgccgaagtcgtatatgcaaactcgaaaactgaaagtaatactgagggcacaaggcctactcataggactggattccttggtcttattggtacaaaggttgacaccattgaatactgtagtgagcagattaaggaattactgcccaaactggaggctgaacagaagactacccttcatgagaaacagcagcgggctgccattgtcatcttcaatagtaggtctgccgtagctttcgcatctcagactctccatgctcaagtgtatgataaatggacagttatggaagctcctgaaccacgccagataatatggtccaaccttcctatgaaactatatgataggcaaatcagacaatctgtggtttatggcattgtctttctcatagttgtgttctatatggtttctctcactgctatttttgctgttacaaccctggaaaacctggagaagctacccttcctgaagccagtggtggagcaaccagcaatcaagacggaagacagtgccattactcatatggtaaacaaacttgggccaaagaaatggtcgaccttttccaaactctacctggatgtattggaaagcaatgttgggaaagttgtgccatga

SEQ ID NO: 4413 - DNA, 309 bp, Zea mays
  Peptide Sequence Number=SeqID_46192
atgggagagggcgccggggaggaggtggccggcggcttcaaggccatcaaaatgccaataatggcgttggtttccattgatgaggagaggaaatggggggagggagaggaaggggaggagccggtcgtttccggctcagaagggactcgaacgggcgcggccagtcggctaggggcatgggtcggggttggctcggtcgctgagcggcgcggcgcgaggcgcggcaaggaggcggcagcgcggctaggggaggaagaagacccccctgcgggtggggcccacgcgtcggtggcctcatcttccgaatga

SEQ ID NO: 4414 - DNA, 669 bp, Zea mays
  Peptide Sequence Number=SeqID_46193
atgtgggggaggaagagctggagcccacgcgtcagcctgtgtacatgcagggtaaagggcgacgtgggggttcctccgaagccgaggtcgagtccgtcttctgttgccgtggccgagcccgagccatggggtcgggcgagacggaagtcgttcggccgaggccagggcggagtccgagccctggggtcgggcgaggcggagtttcgtgtcttccgggtcttagcccgagtccgagccctggggtcgggcggagcggagttcgctgtcttccgggtcttagcccgagtccgagccctggggtcgggcggagcggagttcgctgtcttccgggtcttagcccgagtccgagccctggggtcgggcggagcggagttcgccgtcttccgggtcttagcccgagtccgagccctggggtcgggcggagcggagttcgccgtcttccgggtcttagcccgagtccgagccctggggtcgggcggagcggagttcgccgtcttccgggtcttagcccgagtccgagccctggggtcgggcggggcggagttcgccgtggcacctttggcaaggcctgtctgcttgtcagactcactctgtcgagtggcactgcagtcggagtggcgcaggcgacgctgtccttctgtcagactggctagtggagcggtggagtga

SEQ ID NO: 4415 - DNA, 249 bp, Zea mays
  Peptide Sequence Number=SeqID_46194
atgacccttggtacctctatctcccacaaacccctgaggctcgagcctatttatgagggaaatccaatttgtgcacccaatcggtgtgcccaatgggtggatatgtacatcgtcttgtccagagagaagttgcttgaggtgacagggcgtaatgttgcgcctgagtggttgatttgccgaatcctggtgccgtgttacgccaaagggtggcagagatgtgcagctctaggaaatttaaatgtcccttaa

SEQ ID NO: 4416 - DNA, 1278 bp, Zea mays
  Peptide Sequence Number=SeqID_46195
atggaccgtggctacgaactccgtatccaagggccagctaccctaggtctcgatgtccttgacaagttggatgtccagaaagaatatgaaaaattgaggcgacagtgccaccatgttctgcattgcaatagaggaaatggtctgaatgttataaatgagttcctgaatgaggacttctctgatggggctgaaggttcagagtcaccatattccaatggtgctagtaagagggcttgtgtgatgcccagagaattgaaatctttaggcagtaaggcagaagagtcagagagttctaactgggatgttgtggaatccatagatgaagatacaaaatcagaatcttctgaatctgagtcttcatatgaagaggaccctgatagaacacctgtctctaccaatatggaagagagctgtgatcccaaacctagatttgtccggactgcttcagcaaagtcagacatttttctttcagacagaactcctgaggattttaccacatggcagcgcattatacgtgtagatgctattcgagcaaatacagaatgggttctatttgcccgtaaccaggctgaagtctctaaagagaaagcactgcagtctgcaatatctgttggattgaaagattttgaccatttggagccttacatgatttatcatgcggcacgattagttgcactgcttgaggcatatgcagtctatgatccagagatcgggtactgtcaaggaatgagcgatctcttgtcaccaatagttgcagtcatggaggaagatcatgaagcattttggtgctttgtgggtttcatgaggaaagccagacacaacttcagacttgatgaggttggaataagaagacagctgaaaaccgtctcgcagatcatcaagcttaaagattcacagctctacaggcacctgcagcaacttcaggccgaagactgcttctttctgtaccgaatggtggtggttctcttcaggagggagctcacttttgagcagactatgtgtctgtgggaggttatgtgggccgaccaggccgcgattcgagctgggattggaaggtccacttgggcaaggataaggcttcacgcccctccaacagacgacttgctgctctacgctatcgcagcctgtgtcctgcagaggaggaagctgataatcgagaagtacagtagcatggatgagatactgcgggagtgtaatagcatggccgggcagctagatgtctggaagctcctagatgatgcacaccacttggttgtcgaccttcatcacagaatctga

SEQ ID NO: 4417 - DNA, 363 bp, Zea mays
  Peptide Sequence Number=SeqID_46196
atggcgtggtcctgcttggcgtcgaggctggcttgggcggctgcagggggcgcgggtggttggaagcagcgcgcggggaggagctcctggcttgggctgggcgcgtgggtggtgcagaagagagcagggaggaggagaggtggggatggagagagagaagagggaggcagagagatagcggcggcggcggctattgctagggataggagcggcggctggggaggggagcaggccgcggctagggttagggatggtgttacagaactcaaagcgaaggtcgaagccgaagctgaaaggaatgtgaagctaagtgaaactgttaagaatcttcgggacaaatgctccggttttgccacccgatga

SEQ ID NO: 4418 - DNA, 384 bp, Zea mays
  Peptide Sequence Number=SeqID_46197
atgtcgtcgaaatccgccaagagctcctcgaggagtgagctgctagctgtggtcgtgctcacggccgacgcacaagtgcagccgcttgcacacgatgatcgaccgaggacgtggggaaaatccatcttcttgaactttggtggtcggccatggtggtgctacccatcgtggcccccaaggccgcccgatgaggaggcgggcttctccttctggagctcgaccacggacgtctgcagggacgccacagtcgtggttagggtctcgatcatcttggcaagatcggcggtggtcggttcagacatggctgaagtgatcgacgcagcggacgatggtggcgagcgaggtgggctaggtggtagcgcagcagtggaatatatggcctag

SEQ ID NO: 4419 - DNA, 411 bp, Zea mays
  Peptide Sequence Number=SeqID_46198
atgggtgtcgcaggtggaggcacggtgacggtggtgatgcctactcgtggagcagcgcttgttggtagtccgactaggttcgcgtcgtggccgaccgttgtggccctcttgcgtggatctgggtggctgctcctggtggctcgaggagctgtaggggccgcacgctggatgccgctgggtttccggtggggggtatggtggccactggcccctgctggttgtcgaccggtaccgtgggtagtagcagcacgacggacatctcctgtaggtgggggcgagaccctcgcggtggctgcgctcgttggcgttctcagtggagttggtttgtggtctagtgagctgttaagcctcagtgctaagctcggcaacgatgacttgagccaggttatagggactatcgatgaggtgtga

SEQ ID NO: 4420 - DNA, 399 bp, Zea mays
  Peptide Sequence Number=SeqID_46199
atgcagagttcgtcgtcttccggggctgagcccgagtccgagccctggggtcgggcgatgcggagttcgtcgtcttccggggctgagcccgagtctgagccatgggtcgggcgaggcagagtttcctatggcgcccgacgccggacttggctgctgtcagcctcactctgtcgagtggcacagcagtcggagcggcgcaggcggcgctgtcctcttgtcagggcgctcgtcaggataaggtgtcaggccacctttgcattaaatgctcctgcgatatggtcggttggcgtggtgacttggccaaggttgcttcttggcgaagactgggccgagggcgagccgaagctttgtgctgatgggggttaccagctgagattaggagtcttggggtacccctaa

SEQ ID NO: 4421 - DNA, 885 bp, Zea mays
  Peptide Sequence Number=SeqID_46200
atggtcacgggaaagaagaggacgttcgtgctctacccgtcgctgggcgtgggccacctgatcccgatggtggagctggccaagcacctcttgcgccacggccacggcgcgctcatcgctgtggtcaacccgccggacaccgacgccgtgtcggtcgccgcggtggagcgcctcgcggcggccaacccggccatcgcgttccgcctcctgccggtcccggccagcccggacgccggcgcggactgggtgaagcgcgacctggacacgctccggctcgccaaccccgtgctccgggacttcctgctccggtcccagcccgccaccgcgctcatcctcgacatgttctgcgtcgacgcgctcgacgtcgcggcggagctcggcgtcccggcctacttcttcttcgcctccgcggcgggggacctcgccatgttcctcaacctgccgtacctctaccccaccctgccgtcgttcagggacatgagcgaggcgctggtgcgctgccccggcatgccgccggttcgggcgatggacatgccgctgacggtgcaggacagggacagcgaccggatcaaggtccggatgtaccagttccgccgcatcccggaggggaggggcgtgctggtcaacagcttcgcctggctggagcccatggcactgagagcgctcggcgacggcgtctgcgtgcccggccgcccgacgccgagggtcttctgcgtcgggccactggtcaacgacggcagcagcacggcggggagcggcgggaggcacgagtgcctggcgtggctggacacgcagcccaagcggagcgtcgtgttcctctgcttcggcagcaaggacgcttgttcggtactgattgcattgttcttatatcaccagttctattga

SEQ ID NO: 4422 - DNA, 819 bp, Zea mays
  Peptide Sequence Number=SeqID_46201
atggcgctcctcgcggggccgctctgggcggcggtcctcctcggcctcctgctcggctgggcctggcgcccgcgctgggcagctggcctcgtcgccgcccccgcccccgccgccgctgcgcagccgcccttcgccacgctcggtttctggaaggcccagctccccgcccgtctccgcgccccgctcggctccgccgccgccgtgcggcacggggaggaggaggaggaggacgaggtctccgtgcgagggtcgtcggaggcggggagcgaggagctggcggtggggaagcgtgacctggccaacctctggaggctggtggagggcagggacggcggcccggcctggatcaagatgatggacaggtcgcttcccaccatgacctaccaggcgtggcggagggacgcgcagaccggaccaccacagtatcagagtagcagcatctttgaggacgccactccggaggaagtgagggacttcttcggggacgacgagttccgtgtgtccaacaagtgggacgacatgcttgtttaccataagacgctggaggagtgccagaccaccgggacgatgaaagtgcattgggtccggaagttccccttcttctgcagtgacagagagtacataattgctcgccggatatggaaactggggggcgcctattattgtgtcacaaaggctgatggttatagcatgcagtacatatggactgtgttgttgacaatttatgttgctgcccctcaactaactctgctaggaatagccacagatgcacggctcagaagttcagtggttgcagcttacacttcacgtggactgtaa

SEQ ID NO: 4423 - DNA, 633 bp, Zea mays
  Peptide Sequence Number=SeqID_46202
atggggattaaggccgagcagagaaaattcgcgcacgcggctggaaggaactggaaagccatggcgccggaggaacttcacagcgcgcagacactagagaactcgacggcggcgcgtgcgcagggagctgaaagagaaccacggcacgagcagggaactggccacggcgaacagagggatatggctgccgtctcacttatcaccgcagacgtagtcacgcaggcaccgcacccattttctcccacttccctccgccggccgtcgccatccattcggatctcgctgtggatctcgacctcgtctgtctcggcctcccagggaggacgcagcatggaggtcggactcggagccggagtcgaggcctcaaggagagcacagcacacccagtcgcccatgcttcgcagcgtccgcaaccgaggagaccttgcgggtctgcgggagcgcagccgcagcattaactggaacgacaagctggctgagagcgttgcaaagcgcattcgtgcattggatccaaaggacacatcttcctacattcttctgtcaaatgcggcagctgaaaaaaatctgctggagggcggtggcggcaggatctttccagggagaggaggagtacgtgagcgagatgatggttag

SEQ ID NO: 4424 - DNA, 369 bp, Zea mays
  Peptide Sequence Number=SeqID_46203
atggctttccagttccttccagccgcgtgcgcgaattttctctgctcggccttaatccccatcgcgtcgtcgacctcgccggttgtcgtcgtttgtcgtcgcattgtatgtgcagctctatatatgtcactctcccatattgtcgttaaggtgtcgaaccccgttcttccctgcccaacctcgtcgaaccctgaatcccggacgttatataaaaataagcgagatccgtgtgcatcgcttatcaagtgctcggtcgaagacttcaatcgaaagtcatcgtcgttccgtgcatcattaagaaatcccaagagtcaggtgaagacggagctagcagcatgctgttcaccaagtgctcgacacaagggctga

SEQ ID NO: 4425 - DNA, 4386 bp, Zea mays
  Peptide Sequence Number=SeqID_46204
atgggcgacgacgccgagctcgaggagggggaggcctgcgcctgcggggacgacaccgccttcgtcgaccccgatgtcgcgctctcttacattgacgaaaagcttcaagacatacttggccatttccagaaggacttcgaaggaggcgtttctgcagataatctagggtcaaaatttggtgcatatggttcatttttgcctacgtaccagcgctctcctcttcctcaaactagaagtccccctaaggcaggaaatattacctcaaaatctccctttcaccagtcgaatgaggacttgtctcagaaacctccagctgtggcagtttcatctaccccccaaagtaatggtcctgtggtgcctttttctggtgattcaattaaaaaggaaatacgcccatccacaaagtctgaaaggggttccgtctcccatgattcatatgggccatcaaaatgtagtgaccaaaacagacttaaagtccggataaaggttggctctgataatgttttggcaagaaataatgcagctatctacagtggcctgggccttgatatttcttcaccttcatcaaacgaggatagccctgatggccgtgggagcctgtcccctgaagttaacaatgtgccacatgaatctccacaaaccattcttcagatcatgacatgcttttcagttcctggaggcttcctgttatcccctctaccagccaatatcttgcagttgacaaaaaaggtcgtgtcttcatcaaagaagtgggaatcaaatgtggatgtagaaaatgtacaagaatcatatgaaggccatgtggctaaaagggtgaaatctgatggtaacaaaaagaggctgatagatgcaaaaaattcaaagaacaaaaatgatattagtgcagttatgaaaaaggagattgatatggaattagttgctggtcaaaagatagtatctgaagctcttaaaatatcattgctgtctgaccccagagctatggatgcaaaaggtgagaatcgtcttgaagaggagccagcagaaaacaacttggttggaattagagatgctcgattgaaagagcggtgcaccaagactgactccatgacagtcaaagtggaacctgccaaagcagaggtgatggaatgtttagagaacagtagttttggcagttcagaaatggatctttcagcagtgaaagggaaatcaaaacccaagacagaaaagggtgaggcaactttagaagataggaatacaactaatgacaaagacctaatatcagataggaagcaaaaaaagaaaataaaatctgggagtaaatataatgcctctaactttgaaggtagcattagcaatgttataaacgaaggagcttcagctgttttccacatgggaaaaatttctggtctagaagctttgccttatgacacaaatggggaaaataattccaagagtgaggtcaaaaaaatgcagagagaacaaaaggccaatgtttcgacgtcttctgatttcctggaggaggagaaacacattcattcttctgctgcagttaaggagagaagtgacatgcaatcaaaacctatccatactggaaagaaacccaaagcaaaatcacatagagatgttagggacaacaattttcctgaaggatcttatggaagcaaggaacaggattcattggagaataaaagtgcctttggagatccccggccaaaggaaaaaccatggaagtttgacagcgaggactctgatgcacctgggatctcgaggaaggatagttcttatgtaaagcttgacaaacacctggctactgaggagcagaagatgcatatacttccacctgccactgcttcaactgcgaatgcagcttttatacatgcagccccagtcgtaatagaggaacattggatcttcctaagaagtggaaatgtagcatgctacagtggctggcctagaaaactgggaactctaattgcaactcttaagttagaaatgtggtatactgggatacctgggatgaataggtgtgagattagtgaagaggagactacaaatgctctgaatgcactgtatgtccctgcccctgcaaatggtattccttcagttggccttcctcatgttgcttcatcaggactagtaacatccagcactcccaatatgaatggacatattgagcagagtaggaaaagaaagaatgttctaagtgatggaaattttgtggctgagggttctcaccaaacacagggttcaggtcatccaatgagcaaccaacatgctcccaataaaagtaaaactcatactgatggtatccagtatcctattgatagagattctgtaagcaaatcagttgacccaacaattaaaaagcaaaggtccaaaagcaaacatcacagtagctattctgatggagtagatcttgttgaaagacctaagaagcattctaaagtaaaaagcaagagagacttggatcgtgatgaatacaaagcttctaaaaaaatcaggaaagaagagcgccattttgatagagatcggaaccttggatccggtttagctagtcgtgatgttcccgatgaggccaaggcttttcctgtgaagtcagtaacgtcaaagggttcaggtgaaaggagtgatctttcttcatcaaagcaaaaaaatgtctcacatcataaccatttggaaaattccaagaaagcaaggcaagattatgtaggttttcctgaagacgagagcaaggaatattttcaccagtcagatgtgcaaagatcagatttgtctagtaagaagaggatagtgaagaaatgggaggagagtcagtacaatccagtagctcaggtaagcaaaggagctatcaaggaaacctatagggatcagaacttaaaggaagcaaagttgatgtcattgaattctgaagaactgttttctatgacgagctccaaaccaccgaaagctcaacatgctgatcaggttttgttttatgatggggggcgtacgaacagcgagttagttgaggataacacacactttagtggcaaaacaggtctccctgagcaagaaaatagtctttctgataaggctttagacttgggcaaacctgctagtgatgtggcctatattcagacttcagctgtaacttcaagttcttcaaaggcttcagtctcacaaaaaaagaagcagaccactcaagctatgaagacatcgtcaattgagtctctttctttgtcaccacagagaaactctaacattgacaatgtctctgcctctcatagtagagtttcaggtaaggatggatctctgaatgctaactcaagcactgtgccggccatggcaaaacaactaaatactcaagttggtgtagcagtcaatgatcaatggtctagtgaacctattttggttggttcttcccgaagaaaatctgatagagataatggacaggttcagttaactcaaggtcatgcctctgatggtattcatcctgaaaggggtttgaatgaggacctgcagcctgaatctgggagaaaggattccaatataaaaaactcccatattcctaaaagttctaaccatttgcattctggtgaaaaaaataactataatacagatggctctcctatgcaaccaggaaagcatcttgttgatccaaagacaccagtcttggataaaggtgattcaagtatgcatgaaaataagaaaagtgcaaattctcttcaagatagaaatggatcaactcattgcccaccagatggaaatcctctgctcggtttaccatctggaaaagagaaatcatatctcaaaaacaacaggcaagattcacagaagcctaaaccccagatctcacctctgaaagaaagcaaattggattcccattccactccattaaaacctaatgggtcaaaattgactccacaatcaagacaatacaatgctgaaaatggagggcgacatggcactgcaaaacaagcaattcgtagtcctgctgatacttttagtccagctaggaaggacaatacttcaactgcgtatgctctcaaagaagcccgtgatttaaagcataaggctaatcgtttgaaggaagaaggaaaagagcttgaaagtacaagactctactttgactccgccttaaaatttttgcatgttgcatcacttttggaacctcctagctttgatggtttgaaacaaggcgatgcagcccagagcatgtattcagatactgcaaaactttgcaactttgttggtcacgcgtatgaaaaatgcaagaagatggctgctgctgctttagcatacaagtgtgttgaagttgcttatctgaaggctgcatactgcaagcacccaactgcaagcaaggatagacaagtgttacaggcagttgtacagactgctccagagtcttcaccagaaggtgctagctaa

SEQ ID NO: 4426 - DNA, 246 bp, Zea mays
  Peptide Sequence Number=SeqID_46205
atgaccatccggatgaacctggcgatgctcatcatcagagctggttgcctggttctccaagttctcgtcgtccttgtgcccaatggcatcagacaggtggtgacaacacatcaccgtgatgcacgcgagactcctgaggacatcattcgtaaacgaagggagagggagcaggaccttacagacagccgtgggacacctttgaacgaaacggacatcagaacaggagtccgtgagtggaagctatag

SEQ ID NO: 4427 - DNA, 321 bp, Zea mays
  Peptide Sequence Number=SeqID_46206
atggccgaggggctggggcgcatcgagtgcagcgcttggtgcggcgcggcggcttcggagtcggggcacacgcgcggtcgctccacggcgtcgggcggtcggggctcggggcggctggcgtccatgcggctcggcgggggcctggcggggaggccggggcttcggtgctcgggcgcgcaggggcgcagcgcgttggctctggcggcgcttgggaagagcaggagagaggggaggagagaagagagagaagggggagggagaggtggccaggtggggcccgtgcgcagaaatgggagaaggggatttccctgtggcggctag

SEQ ID NO: 4428 - DNA, 2001 bp, Zea mays
  Peptide Sequence Number=SeqID_46207
atggcgccgcccgccgtcgccgcgtcggcattccctttccgcctcttctccgcggaggcgcgccggaacaataagagcggccgaggcaagcggagcgccgccaggccgctcaagtcctcgcccccacctcgccctccctcctcctcttccgtcataggcggcggcgtcgcggccaccacgttcacgcggctcccactccgcgatgcgccagagtccaccgaggtcacgctcgaccgcttccccaccgccccggccaacccgggggcgcccgctctcacgctcgggagtgtccaacggctggagaacgaggagttcgatgttgggtggaggcccaactctgtcgcgcggatccctctgcgggactcgtcggacggtgtggagctcaccattggccagttcgaggcccgcgcggccggcaggaagagcactggcggtcgcgggtttacgcggcaaacggtcgaacgccttggcgacgacggtgagggggaggagctcgtagtcaccagcctcgatgtgttcgaggtcaaaaacggcaggagagatcgtggtcttgttcccgaagtgctcgacgacggcgacgacgtcgtggtgttcgacccggactacggcgtcgacagcgacgacgaggaggaggagttcgagatgttcccgttcgacaaaagtcatcatgaagaagctgatgccgttccacgcgcggagatcggtgaggtagagtatggcgacgagaatgatgacaacgacggtgacgaggttgtagtgttctacgcagactacgacgaggaggaggactctgaggaagacggctacgaggttgagaacgcggaggaaggggaaggtgatgtgaaggagaagggagtgccggcagtgatgcggtgtttcgacaccgccaagatattcgccaaggccggggacggcgggaacggcgtggttgcgttccgccgcgagaagtacgtgccgtacggggggccgtcaggcggcgacggaggccgcgggggcgacgtgtacgtgcaggtggacggggagatgaactcgctgctgccgttccgcaagtccgtgcacttccgcgccggccgtggtgcgcacggcatgggccagcagcaggccggggccaagggcgaggacgtcgttgtgaaggtgccgccggggacggtggtgcggacctcagatggaggcgtggagcttcttgaactgatgaagcccgggcagcgcgcgctgctgctccccggtggccgcggcggccggggcaatgcggcgttcaagtccgggacgaataaggtgcccaggatcgcagagaagggggagaaaggcccagaaatatcctcacaaagagctgaatccattgaattgaattacttgaatgactacaataattatccgcagataatccagctctatgtttcactaacatacaactttttggggatgctggtgtttggcaggtggctagagttggagctgaagttagtcgccgatgtagggattgtaggtgctccaaatgctgggaagagcactctcttgagcgttattagtgctgccaagccagctatagccaattatccttttaccacattgctaccgaaccttggcgtggtctcattagattttgatgctacaatggtagttgctgaccttcctggcttactggaaggcgctcatcgtggttatggtttgggtcatgagttcctaaggcatattcgcttggaactggagttatttagcccgtctctggttgacaaaccctatgtggtggtgtacaataagatggaccttccagaggcatctgagagatggaatacatttaaagaaaggctacagtctgaaggcattgaacctttctgcattagtgcaataaacaggcagggcacacaggacgtcattcatgctgcttacaagcttctgcagaaagagaggcaaaggatgaaggaaactgaagctcttcatcttgaaactacatacttctgcaggatggagcgggacagaaaatctgaaccacgtgtctga

SEQ ID NO: 4429 - DNA, 840 bp, Zea mays
  Peptide Sequence Number=SeqID_46208
atggctttctccgagcatccgaacccggcgacagcatcgtcgtcggggcagccgcaggcgtccccgccgtcgtcgccgagcgagcgtccgccatcgggccgcgggcggcggcgcgcgcaggagcccgggcggttcctgggcgtgcggcggcggccgtggggccggtacgcggcggagatacgcgaccccacgaccaaggagcggcactggctgggcacgttcgacaccgcgcaggaggcggcgctcgcctacgaccgcgccgcgctgtccatgaagggcgcgcaggcgcgcaccaacttcgtgtacacgcacgccgcgtacaacaactacccgcccttcctggtgccgttccaccagcagcagcaacagtacggcgccgcgccacagcacattggctcgtacggccacggccatcatcactacgaccagcagcagcagcagggatcgacgacgggcgagtgctcgtcgacgatgccgccggtgcccgtggaacgcgccgacggcacgctgctgctggaccgcggcggcgggcaccaccaccaccatcaccaccaccgcgagctcctgttcgcgaccgcggacgacagctccgggtacctgagcagcgtggtcccggagagctgcctccggccgcggagcagcgcggcggcggtggaggaccttcggcggtactcggtctcggacgcggactcctacggcatggggctccgggaggacgtggacgacctggcccagatggtcgccgggttctggggcgccggcgccggcgacggggacggcatggtggcgtcgtcgcagggctccgacggctactcgcccttcagcttcctctcccactga

SEQ ID NO: 4430 - DNA, 345 bp, Zea mays
  Peptide Sequence Number=SeqID_46209
atgactcgtctaaggacaacttctggcgggagacaaagtttcgattcgcccgaagccaaccttggtgggagacgcggttatgattcgcccgaagccaacctcggcaggagacgcaggttcgatttgcccgaggccaacctcggcaggagacgtagtcacagttcccccgaatgcatctccgactcgcccgagcacagtttcgactcgcccgagcacaatcaagattcgcccgagcgcgtctcgggtgactgtccgttgaggccaagattggtccaagtttggccatatttagccaaacttcttcactacattttgactcgacttgagaagttccctatcacttag

SEQ ID NO: 4431 - DNA, 1470 bp, Zea mays
  Peptide Sequence Number=SeqID_46210
atggctaccaacggcagctccgtgagggttcgggacacggagagcagcctggagaaggtgaagcggcagctgtcgtcggggtccgggaggtacctgctgcaagggcccctgctcaagcgatctgagacgacattgggactcctcaaaagaaggaatactttctttgcgctgaaactcctggtgctgcaaaagcttgggtatctacattacagcagagtacctagcaaacctttatctcagtgcaagaatgcagactccaatacgagagtggagtgttatccatttgagctactcaatgttgagttatatccctgttgctgcatcctgactatagttttgtgtgctttgctgctatgcgcaactcagttagtcttacgagctcataaagaggcagtaaattctttggctgggaatggctctccagctacattaggcacagttgctactgcagttgctaatgctaatgcaacagccatggaggctaccaaggagatagaagctgcactaaaggtttcaatgagggcagcccttgggttgggtacaaataactccaacgatggccaacttgatgacctaacaatcatgaaggagactctacgagtgaaagatgaggaattgcaacatttggccaaggatatacgttctcgagatgctacaataaatgaaatagcagacaaactaacagaaaccgcagaggctgcagaagctgctgcttcggcagctctcacaatggatgaacagaggcgacttttgtgtttggagattgagcgactaaaacaagccttggaaagacaagtagaacaatcaatgctgaagcttagacagtccgaagagaaggtcatcagcctgagcaaagagaaggagcagttgatgaaggaaagagacgctgcgtttcaagaggctcatatgtggcgcgtcgaactaggaaaagccagggagcaagcagtgatacaggaagcaactattgcccggaccgaggagaaggcaagagtctccgaagcagatgctgcagctcggattaaggaagctgctgaaaaactgcgtactgttgagaaagaaaaggaggagcttctagccctggttggtgttctccagtcacaagtccagagagagcagagcagcacaaagcaagtgtgtggggagaggtctgagtcgtgttcaggcgccgacagcccccctcccctgacaaagcatgttgatgcatcggacgatgacgtggacaaagcctgcgtgagtgactctagatcagtgctggtgtcgagcgacagcactgaggtccagctggctgtggacggggtggacatccgtcctgtcggcgacgcagagtggggtggcttccagcagtcagatgcgctgatcgctgatgtccgtgaggtctccccagaggcagatggaggcagcttggacattcctgtggtcaaccctccaccgatcagtgatcatgttcagggaggcgcaactcatccctga

SEQ ID NO: 4432 - DNA, 4248 bp, Zea mays
  Peptide Sequence Number=SeqID_46211
atgggccgccccaggatgctcaccgccgccggtggcatcgaccccatcgccgaggagccccaccacgcgcgctcccccgccgatggcgggctcgggcccgacccggcggccctcgcctgcgcgatctctgccgaggccagcaccgtgctcgccgtcatgcgccggggcctccggcacccgcgtgccacggccgcggacgacgccgcggccgaacacccgctcgttgcctccctccgcgggctccgccgcctcgccttctcgccgtccccctcggccgccgccgcgctccccgccgccgcgctgcggcccttcctcgatgccgtccgctccgaggacgccggcgccgccgccacctccgcctcgctcgccgcgctccacgaggtcatgtccctcacgggccccgcgctcccgggcgccgcgctccgggaggtcgtcgacgccgtcgccagctgccggttcgaggccgggaccgagcccgccgccgaggaggccgtgctcatgaggatgctgcaggcgctcctcgcctgcctccgcgcgcccgccgcgcccgcgctcggggaccagcatgtctgcaccgccgtcaacacctgcttccgtgtcgtccaccaggccgcggccaagggcgagctcctgcagcgattctcgcgccacgtgatgcacgaactcatccgatgcatcttcgcacgcctcccgcagataggcggtgctgacggagttgacggtgctgtcaagccagagatgggtggcatggatatgaatcatccttttggtatcaaacaaatggaaaatggtaatggaagctatgtgtccgagacaggtacatctgatgagaattctgcagatggcagtggtcttgttgtagagccttatggagtaccttgcatggtggagatctttcattttctatgctctctcctcaatgttgttgaacagattggcttagatgaagatcttcctttgtttgctcttaaattgatcaattcagcgatagagcttggtgggtcttcaattcagaaacatccaaagctgttgtccttggtgcaagatgagcttttcagaaacttaatgcagtttgggttgtcaatgagtccactcatcctttcaatagtatgcagtattgcattgaacctttaccatcatctccggactgagctgaagctgcagcttgaggcttttttttcttgtataattataaggcttgcacaacctcgttttggagcaacatatcatcagcaggaggttgcaatggaagctcttgtagacttctgtcgacagaaaaattttatggtggagatgtatgccaatcttgactgtgatataacctgcaggaatgtttttgaggagcttgcaaatcttctatcaaagagtgcttttcctatcaactgccccttatcttccatgcacattcttgctctagaaggtttgattgctgtgattcaggggatggctgatcgtatcgggaatgcagtctcacgccctgagctcctgcctgtggagcttgatgaatacactcctttctggactgttaagtgtgagaacttttctgatcctcggcattgggtgaagtttgtccgtcaaaggaagtatgtcaaaaggaggctaatgattggtgctgatcatttcaacagggacccaaagaaaggtctggagtttcttcaaggcactcatctgttgcctgagaagcttgatccccagagtgtggcttgttttttccgctatacagctggtttggataagaatcttgttggagatttcctaggcaatcatgatgagttttgtgttcaggtgcttcatgagttcgctcagacctttgatttccaggagatgaacctggatacagctctgcgtctatttttggagactttccggcttcctggtgaatctcagaagatacagagggttcttgaggccttctcagacagatactatgagcagtcccctcagtctttcgcaaacaaggacactgctctactgctgtcatattccattataatgctgaacactgatcagcataacatgcaagtgaagaagaagatgactgaggacgacttcatcaagaacaatagaaacataaatgggggcagtgatctcccacgtgagatgttgtctgagctatatcactcaatctgccgaaatgagattaagacaacacctgagcagggtttgggatattttgaaatgtctcctagtcgttggatagatctaatgcggaagtcaaaatctacgtccccatatatcatcggtgactctcagcctttcctggaccatgatatgtttgctgttatgtctggccctactattgctgccattgcagtggtattcgatcattcggagcatgaagaagttcttttgacttgtatagaaggctttttgggtgttgcaaagatatctgcatttcatcatctcgaggatgttctggacgatcttgttgtttctctatgcaaattcacgactctcttgaatacttctttggttgaggagccagttactgcctttggagatgaccttaaagctaggttggcaactgagacattatttactatagctaacagatatggggattatatacgcaccggctggaggaatgtattggattgcatcctgaggctgcataaacttgggcttctccctgcccgtgttgctagtgatgcagctgatgattccgaacttcctgctgaagcagtccaacgaaaggctgctcctagttcagttcccccatctcatattccagtgatgggcacacctcgcaaatcatccggactcatgggaagatttagtcagctgctctctcttgacagtgaagaaccaagatcacaaccaactgagcagcaacttgccgctcaccagaggactcttcaaacaattcagaaatgccgcatcgatagtatatttacagagagcaaattcttgcagcctgattcactactgcaacttgccaaggctctgatttgggctgcaggccggcctcaaaaggttgccagttcgcctgatgacgaggatacagcagttttctgcttggagctgctgattgccataacccttaataatcgagacaggatcgtgctcctctggcaaggtgtatacgagcatattgccagcatagttcagtccacagttatgccgtgtgctctcgtggagaaagctatttttggactcctgaggatatgccagaggttgctaccatacaaggagaatcttgctgatgaattactgaggtcgttgcagttagttctcaagctcgacgcacgggtagcagatgcgtattgtgagaacatcacacaggaggttgcacggctcgtcaaagcaaatgcggcacatataaagtcacagatgggctggagaacagtaatattgctgctctccattacagcacgccatccagatgcttccgaagtcggttttgaggctatcgtgttcatcatgacagagggggctcacctttcactagcgaactatggcttctgcatcgatgcggcacggcagtttgccgagtctagagttggtttagctgataggtctgtccgtgccctggacttgatgtccgactccgtcagaaaccttgccttgtggtcccaagagataaaagcgacgacatttgaagaaggcgagaaagggccggaggcgataagggagatgtggctcaggctgctgcaagcactgaagaaactgagcctggatcagagggaggaggtgcgaaaccatgcgctggcttctctccagcgatgcctaacatccacgggagaactctgcctccagtccgcgacgtggtcccatgcctttgacctcgtcatattctccttgctcgatgatttgctggagatcagccagaaccactcccagaaggactacagaaacatggaagggtcacttgtgctcgccatgaagctggttgcgaaggtatacctccagctcttgccggaccttttcggcctaagcagtttctgcaagctgtggctgggggtcctgagccggatggagaagtacgtcaaggtcaaggtccgaggcaagcggagcgaccggctgcaggaggtggtcccggacctgctcaagaacatcctgctcgtgatgaagagcaagggcatccttgcgaagaggagcacgatcgggggcgacagcctgtgggagctgacgtggcttcacgcgaacaacatctcgaccagtctgctgcctgatgtttttccaagccaggagtacgagcaacagagcagcaccggtagcccaagagggcccagtcctgttgaggcgtag

SEQ ID NO: 4433 - DNA, 288 bp, Zea mays
  Peptide Sequence Number=SeqID_46212
atgggcggcagatctgaagagaagggatcggggacagcgaggagcagagcggggccgtgccccggtggagacggcgaggaggtgttgggagtaggacggaagttcgtgcgggagcgtgcctgcctgcctgcctttttcctcgtgtcggctttaatttttcagcgccgggacgtcaggaggtggaagacgccgtcaaggtccgtgtgggtgtggctcgtgcttgcgacctccgagaaatttgccattatggaggtcctcaggtgcggcttcgacgatttaaaggcgtag

SEQ ID NO: 4434 - DNA, 972 bp, Zea mays
  Peptide Sequence Number=SeqID_46213
atggcatcaggtaccggagaggcagcgtcgtctccgcgcgaggagatcgtgcgcggcatggcatggcatggcatggcacgtggtccgtcgccgtcgcacttgacagcgcaacggccgacggggatgggaatgggatgggacctgggaatgggagtggggaagcagaaatcagaacgcgtttcggagagcaaagcccatgggccaaggaagggagcggatctggtaattcgtgataacgtagttattcaacatgttatcaggacacactacctcaacgttgtttgctcggtccgagagttccgtctggcagaactatcgtccagcgccaccactcgcattggcatcagggcgctgtgccgtcgagcaggtcaaaggcaactagtcgctgcgtcgtggctgccctgcttcccctcgggcgtagcaggccgcaagcgtctagcgccgtcatcatctttcaaagagggtcgcctgcccataacggaggggctaacatgtcgctgcctacctctacacggccgcctacctctacacggccgccgccgcgtcgcgccgtgcggcggcttccaactatggccgcctcacccggcgcaggagcaccaccaccacttctacgcccccaacatcatccgcttcgccgatgaccccgccgcgggctcctcgcgcggcggcaggggctccgctagcggcgccggcgcgggcaccatcagctgccaggactgcggcaaccaggccaagaaggactgcgtccacatgcgctgccgcacctgctgcaagagccggggcttcgactgccccacccatgtcaagtccacctgggtgcccgccgccaagcgccgggagcaccagcagcagcaggccaccggcgccgccgagccctcgaagcgccaccgtgacgccgctaccggtgcccagccctcctctaccaccgccacaaccagttcctcgggtgcgtattttatagagaagctataa

SEQ ID NO: 4435 - DNA, 579 bp, Zea mays
  Peptide Sequence Number=SeqID_46214
atggcccaagggcacatttcccttttagttcttcgacgaggagtcggagctggaagacgagttcgagagaggaaccgggccgcttcagagctggaagacgagttcgagagaggaaccgggccgaagcggtttcgctacggcgagctcgccgtcgccaccggaaacttctcgcacacgcagaagctcggggaaggtgggtttggttcagtgtacaggggattcctcgaggacatggatctccacgtcgccatcaagagggtgtccaagaggtcgaaacaggggaggaaggagtacgcctcggaggtgaggatcatcagccggctgaggcaccgcaacctggtgcagctcatcggctggtgccacggcgacagcaagctcctccttatctacgagctaatgcccaacggcagcctcgacaagcatctctacagcagcagcgacgtcggtctactgccgtggccggtccggcacgagatcgtgctggggccgagattggggaggaacgacgaggcgttgaacctggcggtgagcgagcgcgggatctcccccgacaggtggttggccgaggcggttagctaa

SEQ ID NO: 4436 - DNA, 423 bp, Zea mays
  Peptide Sequence Number=SeqID_46215
atggcggcccgggcgtggtggccctggttcgctgtcctgcggcggcgcgggcggccaccagcgcggatcaagcgtggtcaagcatcggcgcaatccctgcgcgagcgtgaccgattgattatacgcagccacgatatgcacggtcgacaacattcattccaaattagcgagaaactccagagcaaaatcctgaaagtaattttacatttattggttgccaaatgcctaaggatggttttgaagctcaagtgcaggaaaagggcatccaagcagatatggacaaaatatcaaaagaatgttgaggctgcacataataagggtttgaagactgttccaaatagcattcgctcagagaactataccattacctttgaagtcgaggaagagaagtatgagttgaaattgtatactaaatacacctag

SEQ ID NO: 4437 - DNA, 294 bp, Zea mays
  Peptide Sequence Number=SeqID_46216
atggcagagatttgctgtgcgagtgttggagccttcgagggggcatgtgatgtgagcggacgcggcaagttgcaacacgcatctgcgtgcgccgacgcatgtggggctcagtgtttgtacgtgagccgtctaaaggaacaggcaggggcagatggcactgtccgtttgccatgtgaccggactgttgtcgggcaagcggaggacggctgcccgcaggacgcgacggcggttttccggtcacaggatcttcaggggctgcaggaaaagagggcttttgataatactgagagatga

SEQ ID NO: 4438 - DNA, 1413 bp, Zea mays
  Peptide Sequence Number=SeqID_46217
atgctgccaccttgcttggcagcatcagcattgcccataaaagaggcagtcactgagatagagcagctcaaggttagggttgaggacgtgagccgaaggaactcacgctacagcctcatcagcgactctggatccaagcccatcatgcagcaacagacggcacccaaaactatttttggcacaatggtgcttgacatgatggttgaggcgagggacaccgcaaaaaggcagcaaggtttaggagatctcacccagctactaacaaaggaacaagctgacctggggcttacacaacctttcaatcctcatgagtttctccgcagtatggtcgcccagttctacgcaaacagttgcctgcaaaatggaatggttataaatgtcgatgaactgaagaggattgaggaaatggcgacaacgggaggcggactcattggggcatttatggataaagtaaatgagaacagatacctaatcgtcctggaaaatctgtccacaattggagattgggacaccatcggaacttacctgccagacaggaagaatggcagtcgggtcattgtatccacacagcagtgtgaaattgcaagcttgtgcattgggcattcataccaagtagcagaggtgaagcagtactcagcagagcactctgtatgtgtcttcttcgaggagggattgcaaggtaatggtgataaaagcatggaatctgatagagtagtagacaacaacaatgaaatgtcaatgcaggatgaaataacccacggtactggctttctgtccgacagaattccaacatctaaacggaaggatgcctctgattgggtgaagaattttcaacttgttgaacgcaagtcagaaatgaaccaactcggtaactatattgctaaggcacgtgtctatggtttgcaaatactgtctgtgtgggggatagctggtgttgggaaatcagccctcgttaggaacatgtactttgacagaattcatcgaaatgaccaattatttgagaagtacggttgggttgatgtaacccacccattcaatttaagggacttctcccggagtttgcttttggatttccattcagaacctgttcaagccatgggaatcaaagaccctactcaagagtgtcataagattctagaagataaccggtgccttgttgttattgatgatttgcagtccattgaagaatgggacttaatacaagctgccttggtgtctagaccttctagaagtattatcattgtcattacaactgaagcaagtatcgccacatattgtgcagataatgaaggggtcgtatttaatgtcaaaggtctagaagacaaagcagccctcaagcttttcaaaaagcagccatggggcatatttggcattggaatccacaactcgtacaagaagagtggctggtactaa

SEQ ID NO: 4439 - DNA, 1020 bp, Zea mays
  Peptide Sequence Number=SeqID_46218
atgatgaccgcgccaaaaaaggggttcgaaggctggcccctcagaagggttcgacagccgccccagagcactcgggcttcgagctcattactgatcaggggttcaaaggctggcccctcggaagggttcgacagccgccccagagcacgcagagtgagggatgactctgggtacgtccgttacatggccgaggctcgggctacgctcccgaggccggccaaggcatcacaaaaagcattaagacctcagaggagtcaaaccactcctccgaggcctcgggggctacacccggcgggtcaaggcctcgtctaccaaggggcgcaatctcgcctcgcccgagcccgaccttggaagggaacagtagtcccggacgaactcatgcctcgcccgagggcctcctcaggcggaagctccgcctcgcccgaccttaggcctcggcctcgggaggaggtctccgcctcgcccgaccccaagactcggcctcgggaggaggtctccgcctcgcccgaccccaagactcggcctcagcctcgggagaagtctccgcctcgcccgaccttgggctcggaccgactgcgccacaggggatacattattaccctacccctagctagctcagactatgagggaacaagaccgacgtcccatctggctcgccgcgagctcaggcacttctccgacggccacgttatcgcgtacacagggctcaagcacttctccgacagccacgttggcatgtacacagggctcaggcacttctctgccagacacggtgttacagtagaggagtctgtaaaaaggaaatggttggagactttgctggaggtatttcgagctgtgttcggttcggagttcggacaatctcctggaaattctgatcgaacctcctgcttggagcttcgcagcaacaccgtcctcacccgcgctgaaaaagcacccatcttcctattgcgcctttcttgtagagtcaaaactttcaagctcgtgcaaactctgtcttttattgcgataattcgttga

SEQ ID NO: 4440 - DNA, 1734 bp, Zea mays
  Peptide Sequence Number=SeqID_46219
atgggggatcttgtcgtcggattggcaaagtcggtggtggagggggttctaacaaaggcccagtcagctattgaggaagagtcaaagctgcgtcagagtgcacagagggaccttgtgttcatcacaggtgaatttgagatgatgcactcctttctcaatgtcgccaatgaagagcgtgccaagaacaacgtggttaggacatgggtgaggcaggtccgtgacctagcctacgatgtagaggattgcattgaatttgttgttcacttggataaccggccccactggtggcgccgcttcataccatcatgtatgccagcatcggcactacccgtagatgcagtggtcgccgagatagagaagatcaaggtcagggttgaggatgtgagcaagaggaactcacgttacagcctcatcagtgactctggatccaagccagtaatgcagcaacaaccagctaccggccctgctattggcacaacaacgcttgacatgtttgttgagtcaagggacgccacgaaaaagcagcaaggcttaggggatatcacacagttgatcactaaagaaaacattgaccttggagtgatctcgttgtggggtacaggtggagatcttggtaagacatccatcataaggaaagcataccaggatcaagaaatctgcgaaaactttggatgtcgaggctggatcaagctaacatatcctttcaatccacataagttcctccagagcttggttactcagttctatacgaattcctgtctgcaacaaggaactactttagatgtagctcaactgaagaggatggtagcaaagcgaggaataattgaagaattcacgaagcaagtggatgggaagaggtacctactcgtcctggaaaacatgtgcacgatgggagagtgggacgctatcagggcatgcctgcctcacaggaataagggcaactggattatcgtgtccaccgagcaccatgaaatcgcaagtttgtgtgttggacattcataccaagtgttggagcttaaacagtattcagctgagtaccctgtatgcgtcttcttcaaggagagcaagaagactggaagagtaatatctagcagtggtgaaatattagaagatgaaatgagccacaggggaggccttacttatggtaggattcccacctctagaaaggctttagccagcagttggatggatcagtctacccttgttggacgtgagtcacaaatgaatgaacttcgtaagtatcagaccacggcccgtttcaaagattggcaagtgatgtctgtgtggggaattgctggtgttggaaaatctgatcttgtcaaaaatttgtactatgaaaggatgcttaaagaggacccaatgtttgacaagtatggttgggtccacgtgtcccatccattcaatttgagggacttctctcggaacttacttttggattttcactcagatgccgtgggaatcagagaccctattcaggagtgtcataagcttctaaaagaacatcagtgtcttgttgttattgatgatctacagtctgtggaagaatgggacttaatacgacctgcacttgtatctagacattccaagagtgttatcatcgtcattacaacagatgaaaaaattgccacgtattgtgcagacgatgaagaggtcgtgtttaatgtgaaatgtctagaagctgaagcatcctttgatctctttaaaaaagaggagatctgcgtatttttgtattaa

SEQ ID NO: 4441 - DNA, 1404 bp, Zea mays
  Peptide Sequence Number=SeqID_46220
atggaggcgcgggcagtgtcggcgctggacctttcgctgcacatcagcctgccgagcagcgccgccgggtcggcatcgcccgccccggagctgggcggcgggggagggattgggcgaggtgcgcagccgccggccggagcggacccatggcgtcgactgaacggatccacggcgtcgaccgagctgtcgctctcgccgccgctgtggcagcaggacgtggctgccggggatgtccttccgtgccgtcggctccggccggcagcgccgaatcactactcctccaccgcggatgcaacgacgttcgtgccagtgaccgtaccccggcttatttcgttcgacgccgcggcgggagcggaggacgaggcggcgcgggcgaggccaatcgaaggcgtgcccgtctacagcagctcgcgggctgcccgtcgtccatttctaggcgccggtgccggtgagtaccaccgccagggccaccacccaaaggcggccgggctatacaatcgtccctgtcactcctcgtcgcggccctcgtccctgcgctcgacgacgacgacgacgtctcccgccgtggctccccccgcggagtcctcgtacctctcgccgtccgcgtaccaccggatgctgtcgagcaccagcaggctccgcctccagggcgtgctcgccgacacgctccggggctacggcggacaccaccaccagcagcagcacttggacagcctcgccgcggcccgctatatgccgaggttcctggcctccaggcgcggcatgcgcgcaccgcggatgcggtggaccagcagcctgcacgcgcgtttcgtccacgccgtcgagctcctcggcggccacgagcgggcgacgcccaagtcggtgctcgagctgatggacgtcaaggatctgacgctagcgcatgtgaagagccacttgcagatgtacaggaccgtgaagagcactgacaagcctgcaacgacctcatcgggcgggccgcctgtggacggtggcggcgacgacgatgatctcccgagtgcccggcgggctcagtcgtcgtcgtcgtcgccagctggacgacgggacggcagcagcccgcaggcgttcaccagacaccggtcggctgcctcctcggagggcgcggcgagcctcgcgggcggcgacgacgtcgaatgctcctcctcggccgacgattccgactgcggcagggcgcgcagtgcttcgtcgtcaaggccctacacaacaagggatcctgagctgctgataatggataaaaattcggctttcacctcttccgaggttaaggccaaagcatacacaactagcagcccctacgactgctcaaaaaggagggacaaacctccaaacctccaagccaagaaggacggtaacactcccaaacggcacacgttccacacacaataa

SEQ ID NO: 4442 - DNA, 765 bp, Zea mays
  Peptide Sequence Number=SeqID_46221
atggtgacagggataggattgggtgcggtgccgcccgatgcgttgctcctcgcccatgctcgtgcaacccccaaccgcgacggcagatcctcatcaacacacacccaacagcgcctccacctctctgggttcccctccactcctctgcaccgcagtggcgatggagtcccccgacgtgtgtggcggttggcaccacctggttctcttccccctaggtcggccatttctcctactcctaaatcggacaacgcgcctgcacccccaatatcagtcctcgccccccgcccaccatcctcaacagatctttcgctacctccagtcccgcgagccatccttcctccgagccatcatcgtgctactcatcaatttcacaaaaccctaggcctcaagccaccaaccagcactccatacacggcgacgccgatgtcagccatctttgggcggccctctggtcgaagaaccctctcaggcaaggcagctgcctcgaaggaaccagctgccgcggtggaggaaccagcgaccaccgcaaccgaattggcaggggcatccaatccatctcttgtcatggcggtagccgctagagatgcctcgtgcagtcccgcgctcgccaccaatctttcccgcttctcctgtcacgtccacagcgtctcctcttgtctctcccggcgtcggaactgggcaaggcgttgcggtggtcgtcaagcctggcgctgctccatgtgtgtcgtgctggtggtgtccgccgcgatggggctccccgcctag

SEQ ID NO: 4443 - DNA, 511 bp, Zea mays
  Peptide Sequence Number=SeqID_46222
catcttccatctcttcttgatgcatcaaggcctcctgcagattgatgagagggcgggggagggtgagcagaggccgggcgagctttctgtgagggcatcacagaagattgtcactgttgagcagaaattgacacgaggatggggaggagaaaatgcgtatcatgttagtggatatcgttatttgcttgttgatccggagagaagagtatcaagagcctccccacctgggaaagtcaccaccctagcaaaggattctctacttgccctcaacatgctaagacaagaagtagatctagagaagtcaagatacaagagaggcgacccttgtcatgataaggatttcgaagtatgtatcagaacaaaaaacaatgcgtgggttattgctaaaatcagtcaaggaagggagctttacatggctctagagaagggtggtgaaacgcttctatatgcatccacagctgtagagaaattcagcaacaggtactgtgagggagcattctctacagattag

SEQ ID NO: 4444 - DNA, 708 bp, Zea mays
  Peptide Sequence Number=SeqID_46223
atggatgacttcccgaatgttggcctacaaaaagacacatattcaatagataagtgctgtgaaaatacatatgtccaaaggagacctgtagaagcaccaatgtattgtggaatcctaagaacagattttaatgttggaaagaagttacaatttccaacctaccgtgacagcctaaaggagaggggaacagtccaaatgcttacggtatcacgagaagtggcacttgacgttcaggatgatactttaaacctatatacatatgctgttctgaggttaactccgcgtgctttatattccaatgcaagttcttggtcctatttgcggaaaggaacttctgttagtgctggccaaacatcaagttcatcaaatggaacaactgcaggagaaaggtaccgtagtcgatctcgtgatacttctccaggtggacaaaatcagatgaatcgtaatttcaggcctctcctacgtgagaaattgtcaaagggaaaggatggctttgttgctgctgatttcacagctacagaagctcgttgtgctgtaccctcgactccaatactttggttccagcaggcagatgagtgcatgcacctatgcatttatcagcacaaaagtctcactatcttactgctggttcctgcttcctcagtgataaatggagaagagggcattactcatgtgaagaaggcgatgcttgaaaatatgcgctgctga

SEQ ID NO: 4445 - DNA, 648 bp, Zea mays
  Peptide Sequence Number=SeqID_46224
atgccgtcacgcagccgtgaaattaacacccccatgctcctgggctgcgcaagcccatacataattgggcaggcccgaatcccgtcggcgaggcccaagtcaacaattcccccaccgaccagcttgtccccgtcccacctgcccggcgtgcccgaacagcgcctcaccgcgccgcacgcctgcgtcggtcgccgaccccagtcaccggtccacgcccgcctccccctttctcctccgccctttcttgtgaccgccgccgcgggccctagcccgccgttccctctccggcgccccgctcccgcacccgcaccggatcagtccgggccgcgtggtcgcccccacctaccgcctcgggtccactcgctcgcggttgcgtgtcccgcggggtggcccctcgggcctcggcagctccggtttcgaatggggctctcgtcggccgccactggcgacggggtgcagctctgcgtgttcgacctccagagggggcaacaggagggccaggagctcgacaagatcctctacttctaccccgccgactgccccatcctgctccagctctctgtcatcggcctctgcgaggggatcgtcactttcactaggttgccttcgctctcactcatttttattgtgcagttggtcgcaatttga

SEQ ID NO: 4446 - DNA, 231 bp, Zea mays
  Peptide Sequence Number=SeqID_46225
atgaactcttggtttccacagcaggcacaacaacaaccatttgttttccctcagtttcagccgctgatgcctcagtggggattacatgctccacaacctccacctccacctcaaggatcctgggtcatggtccacaacaggccacctgcggtcataccatcatacagaggagcttatgctggggagaggagctttatgcgggagaggttaatgggagaaccatttgtttga

SEQ ID NO: 4447 - DNA, 234 bp, Zea mays
  Peptide Sequence Number=SeqID_46226
atgcgggcagatggtggagcaaggcagatcccgccgcagtctacctccgtccatatcgacggtcaggcctcggtgtgcgaccctgggggatcatcggcgcgcgaggaatctgggcggagcttcctggggccgttgtgggtctcgttgatagataattgctcgccgtcgcttagccccgccgtggatccgcctcaagccgtgggcaggactgcagccaccaccatgtgcggttaa

SEQ ID NO: 4448 - DNA, 339 bp, Zea mays
  Peptide Sequence Number=SeqID_46227
atggaacggctacacaaagaaagttcaccggtggcggccctctcagttttcttgatggtgagccccgcgcagctcacagtggggctaattagccagtcgatggaggttccagatttttctatggcttatcagggaattcgtgacgcggctggtttatttatcccttcccaggcccaagattctcggtcagatagttgcaggcgcgatcttcaccaacaaattctgtcgatgcatgcgacttcacaggaggaagacaacgctggttgttgcgatttcatcgcgcctggcaagctgagtggaggagggttctgggtgcttgggtcccaccagcagcgctag

SEQ ID NO: 4449 - DNA, 243 bp, Zea mays
  Peptide Sequence Number=SeqID_46228
atgtcgctcaaagtgggggctctacatgactttgcttgccacgactccaagtacaagccttggcaagatctgaagctgggcgccccaagcgaagaccactgcatctacgcacgtgaactatggaatgggcccacacggcgccctgctggcctatgcgggcccatgtgtaaccaggggcataatcatactcagaagggcatgcctgtgggggatagatatcccctgggtccactaaagaagtaa

SEQ ID NO: 4450 - DNA, 573 bp, Zea mays
  Peptide Sequence Number=SeqID_46229
atggtggccctagcgaagtttgtgtgggtggtgacttcgtacggcgtagccctttggtccaaggttttgcaaagaactacttccttcatcggcagaaaaaggatgtggccgctcactcatggctgggatctaggtatagtcaagccgcaccccatgccctgcttgaataatcagatggtgctaagtcctgcctttgccattgagccacgagggcgggatgcgactacctttgtcttggaggtggaagcggaggcggtgaaaattgttggcaagtactcatcgaagacggagctgacgaggagttgggatatacgaggttcgaatgctaggctgaaccgtgtttttgaattaaatggtttttgcatcgttaagctgcggaagaagcggaaggcccttcttgggctggtggatgcccgttgtgacgcgaaggcgtcgcgtcccaatgcgaaggggcttaccgcagctgctgccatgccccctccagaagtgcctgcagcggcagccaggagggtgcctgcaccaccgcgggctattcaggtggcaggggcggaggagactaaagaggcctactag

SEQ ID NO: 4451 - DNA, 189 bp, Zea mays
  Peptide Sequence Number=SeqID_46230
atggcggagctaaccgaagtgctggcgcgacttgggggtgactggagtgggctggccacggtggccgaagctctggcggcgatggcgggtggaaaggagctcgccggagctaaggaggggtgtctggccgacgaaagatttgagttagggatcaaggtgaacacgcttgatctttggctcaaggtctga

SEQ ID NO: 4452 - DNA, 213 bp, Zea mays
  Peptide Sequence Number=SeqID_46231
atgcaaaaaagtgcgacaaagcctccaagcgagtacaacactccctttgaggatcgggggctactgtcgggtaccgtaattaggggtacccccaacactcctaaacatggctggttcctcgtccttccactgaccggcctgacagggaaacagcgccgcctgccccgctccgactgctgtgccacccgccagggtgagactaacgacagctaa

SEQ ID NO: 4453 - DNA, 366 bp, Zea mays
  Peptide Sequence Number=SeqID_46232
atgcaccccagctcccttttgaaccccgttcgcacccgctctctctcccctgcctcatttcgcacaagctcgccctctctcgcgctctaccatcgccactcgcactcgtcggagatccacgaccgcgctgccaagcccgctagaagtcgggccaagccacctcgagctccatcccgagccctcaccgacgaccctagatcccccggcgaccgcgtctacctcgtctccggtgacttcactactgcggagagggcaacaaaggtcaccgagctgcaaaaccccgtgcaccccatcgcaaccgtccgtcccagatctaacgattcggatctgctgatatcggtccgtgactacacgctctgcccctag

SEQ ID NO: 4454 - DNA, 492 bp, Zea mays
  Peptide Sequence Number=SeqID_46233
atggagaccggcaagctgacggggctgggggaaactcggaatggcacgtgggcggcaagaggtggggaagaagatgctcagctgggcgccatgggagggaacctgcgacggctgagggtgctggcgagctggaggttagagggagagttggaacggagggagcagacggagcaacgacctgctgtggatgacgctaggaacggctggagcttcctcaggcgcaactggaagctccgcctcgcccgaccttgggcctcagcctcaagaggaggtctccgcctcgcccgaccccagggctcggcccccgcctcggcctcggaaggtggtctccgcctcgccgaccccagggctcggcctcaacctcgaccccaggaggaatcgcgtcctcgcccgacccccggctcgacctcaggaggagtctccgcctcgcccgaccttgggcttggaccgaccacgccacgggggatacatcattaccctacccctagctag

SEQ ID NO: 4455 - DNA, 801 bp, Zea mays
  Peptide Sequence Number=SeqID_46234
atgtcgttcttcttcgtcaacatccaccagccagcgcccatcctcgccaccaaccacactcgcccggatccgcgactccctggtaccagccgaccgtccctgtgccccacgcccagatcgacctggccccatgctcgactgctcgttgtccaatccatccaggcatcaacgtcgacatatgctcctctgctgctcacctggactgaagctgccaagctgtcgaactccatcgcgcccctccgttcaggccgcgccctgctcggcttctctggtgcacgcgcagttcatcggccaagtcccctcaccggcatcctccacagctcgccctaccacgccgatgcccttccctatttagccgttcgtcgaggtcgccaatggccttcatcaatgccgcacctgctccgatctcatgtagctcggtccaactgtgcatcgctaccactcttctgtccatggaaatctgctccaccgggccgcacctcacctgcgatgtcgtgcacaccaagccgaagtgtcgtcgctgctcatacttcgtttgtcggtcaccatgggcatgccctacagttgcgtttcttccccagcgttggccgccattcacagcactcggcctcaggtcttcgagctcccaagccgacctccttcattagtctcaagctccgccccttcgtgctcgacgtaaagcctgaaccgaatgtcatcgccgtttcgcaattgtcaagtcaaaatttagtcatggcgcgtcgtgttagtgttaaatgtttgccaaaatacctcagcacctccggtaacgtgatcgtgtga

SEQ ID NO: 4456 - DNA, 1407 bp, Zea mays
  Peptide Sequence Number=SeqID_46235
atggcagcagcagacgagcggaagcagcgatcaaatcgcctgcaggcccacgtcccctcctggagcggcaggggagccctctcccacggcgtgaagacgacgcgcccgtgttttgttcctcgaacgactcgtgcacgcgcaacggctgccccgcgaaccgcccgtcccgttgcattaactcctcggcagggcaagcgacaccttttgtgggcgaagcaggcgtcgcttcacctcaaccatgatgaccacgtcagaaaagccgccccagagcactcgggcttcaagcccattactgatcaggggttcgaaggctggcccctcgaaagggttcgacagtcgccccagaacaatcgggctccgcgcccactactgatcaggggttcgaaggctggcccctcggaagggttcgacagccgccccagagcacgcagagtgagggatgactctgggtacgtccgttacatggccgaggctcgggctacgctcccgaggttaaggcttcgtctacccgagggaagcgatctcgcctcgcccgagcccagcctcgggcaggaactgaagtcccggacgaagttacgtctcgcccgagggcctcctcaggcagtgggcacaccctcagcacgcccgaggcccaactcgggaaaacagcgccgctcgccccgctccgactgtcgcgccagccacccgggcaaggctgacaacaacaagttcggcctcaagcgcaacaggaagctccgcctcgcccgaccccagggctcggcctcaacctcggcctcggaaggtggtctccgcctcgcccgaccccagggctcggcctcaaccttggcctcggaaggtgctctccgcctcgcccgaccccagggctcggcctcaacctcaacctcggaaggtggtctccgcctcgcccgacctcagggctcggcctcgggagaagctacggggaacaagaccggcatcccatctggctcgccccgcactaacaactgtacttctacagggctcaagcacttctccgacggccatgttatcgcctacgcagggctcaagcacttctccgacagccacgttggcatagatactatgactacagatgatgatgaggataacaatggttttaatggtgatgattatgattatggattctggtgtgacataagtcgtattagagcccaacccaaaccctgtatcgagttaaaatttgtccccgcctccaaacccgccgaggacccgaaacccgccgaggaccccggaaacccgaatatatgctatggctctggccagactgttgtattcggggccctgttgagcacttgcgggtacaggagaaaacccgctccaaacccgccgctattcgggtccccaaacccgcggacctatgggggaaattcagacccgccccgcctctga

SEQ ID NO: 4457 - DNA, 333 bp, Zea mays
  Peptide Sequence Number=SeqID_46236
atggaggccattaacgctattgagggagaaagaacgtgggggagggagaggagaagccggcgtcggtttccggtgcaggggaggcggtcgggcgcggtcggggacgccgcgcgtgagcgcgcaggcgcctggcggcggcggtggcggtggctggaagatggagggagggagagaggagggaagagggcatggggcgcggcggctggtgctcgacatcctatcgtcaacaccgagtgggtgagcaaccggaggagtgctcatggaccggagaggaacagagtgttgccgctgtccttgaaccacggagcgtcgtcgaccaactcagggtctgtg

SEQ ID NO: 4458 - DNA, 192 bp, Zea mays
  Peptide Sequence Number=SeqID_46237
atggactacaatcccttgtcagcacgagagctatttgctaaggattcttacactgggccacacattctgagcatgcttgctctaggtggaactcaattcaaagatggtgtgggaagatacattcagtttgttaaacagcttaactctactctacagagtaatttcgttaagtactttgacagacaaggttga

SEQ ID NO: 4459 - DNA, 870 bp, Zea mays
  Peptide Sequence Number=SeqID_46238
atggtagctgatggcttcaactggaggaaatatggtcagaagcaggtgaagagtagtgataattccaggagctactatagatgcacaaactctggttgtctcgctaaaaagaaggttgagcatttccctgatggccgcgttgtggaaatcatttacagaggagcccataatcatgaaccaccacagaagaccagatttgcaaaggaaagagtgactcctattagtgttccctctggaggcgaaaccttgaggcttgtgaacacagaaattgtagaatctagcacgcctacctgtgaattggaacggagtgccatctcagaaacttctgagcagcatctcttttgctcaagtgactgcgaaggggatgctggtaacaaatctgaagatgaacatcctagcgcggaagccctgccaaagcgaagaacacttgaggctacagcaccaaatttaacgccggttcgcagaactgttagagagcaaaagattattgtgcaggctggaaagatgagtgatggatacagatggcgtaagtatggacagaaaattgtgaagggaaatccaaaccccagagtggagtttgaatatgggtatggggatgggattggtggagaggtagatcgcgctgacattgtcgcagtagacgagggtggcgcgctggaggggactgtgaagctactgaagaagctgccgcaaccaggaggcctctgctacgtcgttggccacagtgcggtacttggcctcgatgctggagcggaagacgacaggttgccgcttagcggcccaggtgacgaggttggtgcccagaaacacagcataaccggaagtagattggcgtgtgtcgggacaaccaaccagtcagcgtcgatgtag

SEQ ID NO: 4460 - DNA, 1368 bp, Zea mays
  Peptide Sequence Number=SeqID_46239
atggcgccagcgaagccccccgcgcggcggcattgctgcagctacctcctcctcctcctaccctccaccggccaccgccgcagcgtcgcggcgtggtccgcgaagaaaaagaacccgtggctggacccgttcgacgacgggcccgacgaggagttcgactaccagggcatgttctccggcgggaagcaggaggaggacccgcggccgcccgaggaccctgcgaacccgtacgggttcctgcggttcccgcagggctacaacccggagctggacagcctcgcgtccaaggtccgcggcgacgtgcggcgcgcgtgctgcgtcgtgtcgggcggcgtgtacgagaacgtgctcttcctccccgtcgtgcagatgctcaaggaccggtaccccggcgtgctggtcgacgtggtggcgtcacccaggggcaagcaggtgtacgagatgtgcaagaacgtcaggtacgccaacgtctacgacccggacgacgactggccggagccagcagagtacacgcacatgctcggcgtcctaaagaataggtactatgatctgatcgtgtcgacgaggctggccggcatcgggcacgcgctcttcctcttcatgtcatcggcgcgcgacaaggttggctacgtttaccccaacgtcaacagcgtcggcgccggcctgttcctgaacgagatgttcaaggcgccgaccaacaacctcgccgacggcggctaccacatgtacaaggacatgctggagtggattgggcggccggcgaagaacgtgccccggcagccgacgcagccgctgcgggtgtccatctccaagaagctacgggcgtacgtggaggacaagtacagccgcgccggcgtggagaagggcaagtacgtcgtcgtccacggcatcgcatccgattccgtcgccagcatgacgtccagaggcgacgacgactgccttcttcccctcgagcactgggctcagatagccaaggagatcagctctggcgacaaggggctcaagcctctgttcgtgatcccccatgacaagcacagagaggaggtcgaggaggaagtgggggacgacacgaacatcctgttcatcaccaccccaggacagctcacctgcctcatcaacgactctgccggcgtcgtcgcgacaaacaccgctgccgtgcagctcgccaacgcccgcgacaagccatgtgtggccttgttctcgtcggcagagaaggcacggctgttcctgccgtacgtggaggacaagagcagctgcaccgtcatctcgtcgatgacggggaagctgatcgacatcgacatcaacgccgtgaagaatgcggtgaaggacctggagcccgctcccagcttcgcattggcacagaagtag

SEQ ID NO: 4461 - DNA, 381 bp, Zea mays
  Peptide Sequence Number=SeqID_46240
atggcgtctcctgcaagcctgcagtctggaagaaagtggacatttgttatcaatgaaattgaaggcctggaaggtgtcactctgcggggtctgcctgacttcatcaaaactgctcattctcacatggccatgcgaagggaggtgctcttcttcttgctggatgaggaggcacaccctagtctaggcctcgctgcgccgctgcttggccgcgagggcgtctctctacttcttgaggttgctggtggtcttcgggttgggtggtcgggaatggtcggcagcgagggcaacatagcctttttggtggcaagggctgccctggcgtcatcgtcatttggtggtgggctagaacgagtgctcttcttgggggcatcgtgggtttag

SEQ ID NO: 4462 - DNA, 312 bp, Zea mays
  Peptide Sequence Number=SeqID_46241
atgccgatcagctatacagtcactgcaatccggaccctcccacaacccttcaagagctgtatcggctatttgagaagtacgcatgttttgaagacctccattatcgcaaggttgaggcatagcgtaaaccaagggacccctcgcacccggggagctccaagcaagtttgtttgggcgacgaccacatttggcagaggaccatctgcagaggtcttcgtgaagcagtattgtttgcattggcagaaaaagacgacaggcgggttgattgaccaatttgggagctacacttttaccccgagacgacgaaagtag

SEQ ID NO: 4463 - DNA, 1218 bp, Zea mays
  Peptide Sequence Number=SeqID_46242
atgaagctgtggaaggagacttccaggagttccaaggctacgacgagttctaggtgtgggttagcggcaacccccagtcggctgcctgtgaaggccgcggttatctacgtttcgttttcgcactttgatttattgttcttcaagctcatattttggatgcatgctattggtagagacatctgtaactcacttgagttggtcagatttgttaatgggtatgtgcaaagaacagcagaccttgtggagggtgttatgcaaggtaggaatgggacagtgttctactatggagctacaggggctggcaagacctacaccatgctagggacaatggaaaaccccgaggtgacgcagaagaaccactcaattaagctatcatacctcgagatatacaatgagacggtgagtgatttgctgtctcatggtagcccccttaacctgagagaagataagcaggttgtcatagaatacagatccttggatggagttaacgtaaaacgagttgggaaactatctctcatcgatcttgctggatccgaaagagctctagcaacagatcaacgcatgcagaggtcaatcgaaggagcaaatattaaccgctctcttcttgcattcagcagctgcattagcgcccttgtggagggcaagaagcacataccatatcgcaattccaagctgacccaactccttaaggactcgacgcaacaaaccactgtgaatgaggaggttctggaccaaccagactctgaaagtatgcttgtactggagcttcagaaggaaaaccgcgtgctgagggagcagttggcgaagcaacagcataaattactgactgccaaggctcagctactcacttcaaaaacctcgccacaacgatctcctgctccactgtctcacgtctcaactccaggatcaacccaaaggaagaccagacaatctatcttggctggtggtggtgggaactacttcagcacactggactcaaagaggcatgcagccgacaacgcacaggtcagggagctacagaggaaagtgagcacgttggagcccgagatcaagaagatgaaaaaggagcacctactgcagctgaagcggaaggacgacgaacatcagaggcaacaacccttcagttcttgctgccaacggaagaaagactcgaagccacgtggcaatagagacaccaaagaaagcatcctccaagctgcttcaggcataggcatataa

SEQ ID NO: 4464 - DNA, 303 bp, Zea mays
  Peptide Sequence Number=SeqID_46243
atggcgagggtgttcttgcggtgggttagagcagatttgggcgaaattcgaaattcaagctctcggttgcaagattggaggcaatgctgggagtttactgacagtaacactaggggtgttacatcggcggactgcgtctgggccgccaagctccccgccaactaccgctaccttgcggccctagccgcggccgccgatgacgagggctgtggcgatggagatgccagcggcaagcgcttgaccaagaaggagatttacgctcgtctgtgtcgatccaccctctttgatgccgcagaaaggtaa

SEQ ID NO: 4465 - DNA, 138 bp, Zea mays
  Peptide Sequence Number=SeqID_46244
atgttgcaccaactgaagaaccagctgaaaataacagagacaacatctaaaaatacagctgaagggtcaataaaaaatgcaaaagaagggacacccaaaagggtagttgaggaactaattgaagagcattatgcttag

SEQ ID NO: 4466 - DNA, 930 bp, Zea mays
  Peptide Sequence Number=SeqID_46245
atggccatgatgggttcaacatcgaaaaagatgtacctctgccaggaccgtgtcgatgtaggcttgatgatcgaggaccctttaactagtcacatgccttgtcatggccgaggctgcgccacggaaggcgctgttgaggcgagccacctggcagatctccgactggtcgaggtagaggagtaccatcgccgcgactgcaccgctaccgccatcggaccagagtaccagagcaccacctccacctcccccgcaccacctactgccacactccaccggtcgcacccccaccccgacccggccaccctgtcacccgccaccgttgtccccaccacagcacacctcggtctgtcgcctccccgatgtccaccacatccgtaccaacgccctgccccgcacctcgccacgcaccgcctatcctcgcgcccgctgcgcttcctccgtcgctgcctacgcgtgtccccactcgcccgccccgagatctggcgggacccgcgcgagctcccgcgctgctcgcccctgcgccaccgtgtccccgtcccccacctcctgcctctacgcctgcctcatatgtgcccagtggcaacactgctggagggactagcccgagtaaaatcaaaggtaccagcagatggacatggttacctgactgaggagaggggaggaggtggcctcggatccgaaggacgcggcggaggtggacggcgaggtgtcggggtcaggggagccaaggaggacagcgaggaggaggtcacatgcgtgggcgaggaggagggagagcaagaggtgcacctaccacgcccgctgctgccaccggcgcttgaacgacggccgtcgctggtccaggaacggccgctgcttcatcggaccgtgctctcgctggcagggccaggagggaggcgccgcgccgcgccgatatctgggacgagttaa

SEQ ID NO: 4467 - DNA, 360 bp, Zea mays
  Peptide Sequence Number=SeqID_46246
atggcgcttgggattggccgctgggcgcctgcctgggcggctgggcgtgcgcggtgcatggccgctagcatgcatggccgctggccgctgggaccgctggagtcgctggacgccgtgcctgggagtgggcgcgtggccgcaggaccgctggacgccacgcctgggagtgggcgtgcgcggtgcatggccgctggtggcggctggcggagaagacgagcggcggccgacgccttgggagtcgaggcgagaattggagacgggctgacgcgtgggaaaacgattaatctgataaatccatatccagcattatctttgaaaaaggatcaggaggggggaaacccctactgcgcattttattag

SEQ ID NO: 4468 - DNA, 1491 bp, Zea mays
  Peptide Sequence Number=SeqID_46247
atggcggcttctggtgagggcgcgtcgctgccgtctccggcgggcggggaggatgcgcaccgccgccgcgtcagctatttctacgagccgtcgatcggagactactactacgggcaaggtcacccgatgaagccccaccgcatccgaatggcgcactcgctggtggtccactacggcctccaccgcctcctcgagctctcccgcccctacccggcctctgaggccgacatccgccgcttccactccgacgactacgtcgctttcctcgcgtccgccaccggaaacccgggtgtcctcgacccgcgcgccattaagcgctttaacgtcggtgaggactgccccgtgttcgacggtctcttccccttctgccaggcctccgctgggggaagcatcggcgccgccgtcaagcttaaccgcggggacgccgacatcaccgtcaactgggcgggcggcctccaccacgccaagaagagcgaggcctccgggttctgctacgtcaacgacatcgtcctcgccatcctcgagctcctcaagttccacaggggtgggtattttgaccattttaaatgtgagatagatgcccctcttattctggtttttgcttttaaacttcaaacagtatgctgctctgatagctatattgtccatttgttccagcgtgtgctatatgtagacattgatgtccaccatggagatggcgtggaggaggccttcttcactacaaaccgagtcatgactgtttcctttcacaagtatggggattttttccctggtactggacatatcactgacgttggggcagccgaagggaagcattatgctctgaatgttcccctgagtgatggtatcgatgacaccacctttcgtggtctgtttcaatgcatcattaagaaagttatggaggtttatcagccagacgtggttgtcctccaatgcggagctgactctttggctggagacaggttaggttgcttcaacctgtctgtgaagggtcatgctgactgcctccgtttccttaggtcgtacaatgttcctatgatggttttaggtggtggaggttacaccatcagaaatgttgcacgctgctggtgctacgagaccgcagttgctgttggagttgaacctgataacaagctgccttacaatgattactatgagtactttggccctgattatactcttcatatccaaccaaaaagtgttgaaaacctgaataccacaaaggacttggagaacataaagaacatgatattggagaacctgtcaaagatagaacatgttcccagcactcaattccatgacagaccgtcagaccctgaagctccagaggagaaagaggaggacatggacaagaggccacctcagcgcagcagattatggagcggaggagcttacgactctgatacagaggatcctgacagcctgaaaagcgagggtaaagacgtaactgctaacttccagatgaaggatgaaccaaaagatgatctgtag

SEQ ID NO: 4469 - DNA, 354 bp, Zea mays
  Peptide Sequence Number=SeqID_46248
atggcatcgcgactgtggccgtcgacgccggaggaggtggtgcgctccatcaaggactcctccctcgcgctccacacacgcacccacgccaaggctctggagaggtcgagaaaaatgtcatccttgagattgttgatctttggtgatggagaagtcgaaccaaatgaagagcaggtcctgcaaataacccttgagatttgcaaggaggacgtcatttccctgatcatccaggatctgccttccttgggctggggagtaagaaaagatctggttatctactggtgcatcttgcttaggcagaaggtcgatgaaacttattgctacccgacctacgacattatatacttcttttag

SEQ ID NO: 4470 - DNA, 384 bp, Zea mays
  Peptide Sequence Number=SeqID_46249
atggaggcgtcctcttctaacggcaacgacaacaagacccctatccggattggatctcacgcgacgacgaaaatgatattgtcatcgtcggacgcggtagcggtgctggagctgcagcattccggctttggcacggtcgcgccaactgtggcatggtcgttgtctaggacgatgagcgtgggccgccgtgcacgctgtcactccacggcgcacgtccctgcggcggggaagcgggagcagaagggcttgttcgacaccatcttcggcgcgttgtacagggaggagcagctgctggagacaaaccccatcctgaacaaggtggggagcaagagcaagccccccgttgtcgtcgctgctccggcgcccaagaaagccgccgaatag

SEQ ID NO: 4471 - DNA, 468 bp, Zea mays
  Peptide Sequence Number=SeqID_46250
atggagggtcggctggttcttcatggaccatcaatggatctgtcgtttcctgctcgtaatggagagaggagaaatgaggggaggaagaaacggacgcaatcaaataccattaacgacggacggcgcgtgtgttggtcgaacttcggcttcggttgtcggggtggcctaagcgcgcggggcaccagtcgcgtggggccgctgggttgctgcgcggggccggggtcggtgcagggcgccgggtcgtcgcgcctcggcggctcctggcgcgcggttggcgcagatgagagcaggggcgctcggccggctaggatcctggccggggtcgcggcgtgcaggcagggcgccgtggctgctcggttgtgcgttgaagagagcagagagaggagagagagaataggagataggggagagaagggcggcggcgactggcttggaagaagcaggcgcacgcgcgcagttagggtttag

SEQ ID NO: 4472 - DNA, 153 bp, Zea mays
  Peptide Sequence Number=SeqID_46251
atggcctgctcaacttcacaagagctggtaggctccttttgtctgtcgtcacttcaaacagctgcttgggcagacacgactcagtctcagattttggatcttggaatgggttcctttgggatggagcggaaccagcatgcctccgcgttgtag

SEQ ID NO: 4473 - DNA, 621 bp, Zea mays
  Peptide Sequence Number=SeqID_46252
atggccgtccaacacgggatcgacggtgctaggctcatcttcaccacacgaaccattagcgtggcgcagcagagcgcgtgcggcggcgcgcagacacccgccgaggacccactgacgctcaccagcgagaacgacgatggtggcacaagctcatctctctcccaatcgcgagctcaatgttggcgttggttcgacacgggcgagaggtcgaggatgcgtgtcggtacttatacacagcggggaggggccaagtggtcgcaacaaccccgagattcccccgtgcttcgcgattctagcgtcggattccgcgcattaagcgcgcctctgttgttctcgtcgcgctcggatagggacgaagggagaggcagaccggactggagcaatcaatataggtcatttcagagcatgacctgcttgatgcagatttcaacaagaacaaaagactttcttgtggacactcttaagctacacatatacattggtctgcagatttcaaaactacttcctgttgcattaacttctcttcctgactattctgcagtcagttggctttctggggcagtacaacaacaacaacaacaacaacaacaaagcctttttgtcccaagcacgttggggtag

SEQ ID NO: 4474 - DNA, 240 bp, Zea mays
  Peptide Sequence Number=SeqID_46253
atgggaatgggggcctatcacatgggcccggtgggcaatgccgcaatgggaatatgggggctgtcacgtgggccccgcgtccggagtgtgctatcacgtgggccccgcgtccgaagtgtgatggtttgcgcgatgggaatgggggtcgcgggtgtgcaacaaggaatggtggtgggaatggaaatgacagaacagtgtggtactggtgtgagcacaaaataccagtacaataatgactag

SEQ ID NO: 4475 - DNA, 288 bp, Zea mays
  Peptide Sequence Number=SeqID_46254
atggaaagaactaggataattgataggctagtaacacgaacatcattagaggaattgcaaagagatgaagaagatccagacaccgaagttgtgcaggggtctacaagcggcgctcctatgtcacatgttgagtctcttgtgaggcctgatgaggcaaaagttttgaagaggcttgaatatattaacaatgaaggtttgattcacttcgctttcgacgagacaattcccatgtcgaaggatgatgagattattgtgttcaagaggttcttccgagcagccttcaactaa

SEQ ID NO: 4476 - DNA, 396 bp, Zea mays
  Peptide Sequence Number=SeqID_46255
atggccagttatgacttcatcaaggacgtcaacttctttatcgacgcattcaacctcaaccttgattgtcatattcaaagctttggtttcatggttgaatcagctagagttctcttccaaaaggtggttgcgagattctcggctttagctgcggcagtagcttcagcatcggcggctgaagtgattccccttaactgcaagaggctagtcagatccaaccttagaggacttagcagtgcaaatgggaaaggttcagtcattacctcagcagcagaagatgaagaagggctcatagtctgctttggcacatcttcgaggacggcgaaggcatcgagcgaagggtggcgtcttcgccttcgtcccaacatttgccctctgagggaccagttcgactaa

SEQ ID NO: 4477 - DNA, 456 bp, Zea mays
  Peptide Sequence Number=SeqID_46256
atgggcaagagcaagaaaggtggtggctcttcgcatcactccggcgacaagcgcaagcgcgagccgactcctccctcggaggacttcggtgactcggagtactcggaggaggagttctcctccgagtccgagggctctccggctcctgcctctcccccggcgtcgtctgatgattcagacgactccgaggggatcgccgcagaggtatggacttacatccgggccatcgagcgcgccgggctcgagggctcggatgagttggagtactcctcggacgaggagaattcctccgaccattcgaggagggcagcggcggcgacggcggtgacggcgacgacgacggaggcgacgacagcggcaagggcggtgacggcagcggcaagggtggcagcggcgacggcggcagcggcagcaagggcagcaacaaggccagtggctagacaccactggttttag

SEQ ID NO: 4478 - DNA, 306 bp, Zea mays
  Peptide Sequence Number=SeqID_46257
atgtctccgcgtcctcgtccgacctcgacgtgtcatggcaagcagtcgaatgtcagcaccagactgacgccacaggtctctgaagagcccgccacctcgggagatccgagccctactgctgctgctggtaaccattttcgttgtgttgacgcggagagccagagggtagaaatttatagcgacggcggtcatggcaggcacgctatcggaggttgcggcatggcagcgcaaccaagaccagccacagctcacagccatcgtctattcgtatgcaaatacaaagctgcggtctacggaagcttctga

SEQ ID NO: 4479 - DNA, 426 bp, Zea mays
  Peptide Sequence Number=SeqID_46258
atggcacttggtgaggacgtggtcggtgctagcgacaacaaggaaattggtgacgactccacttctgaggtatcacactttaccgatgatctcgacgctgagggcaccatcgctgtgcagataggccgaagggttgagatttacgacaaaaggatgtgggtccccttcgctcctcgaaggcgccccacaaacttggttgcccctagtagccagctggggcttgacctctccaagcgaagacaaactaggaggggtcgaaggccccctggcccacaccccctcagcctagtcgcctgcgtgatgggcccaagccaaggtgaacgtgcggcacagttgacctcgataatcggtgctgccctctctaatgaggatgtcccacctatcatcctccacagcgagcacagggctctgtacagttcggcctag

SEQ ID NO: 4480 - DNA, 309 bp, Zea mays
  Peptide Sequence Number=SeqID_46259
atggcttttggcatgtttaacttctctatacttcacagcccgtcgcagaagtcttgctggatcgttatggtctccaccctcttccatttgttgtcatgggcaagctctgacgaaggaaacccagagtggaaaaatgggagaaaaccatatttaaccttccaacatatgcaactgtgcacctggtccagtttcacacgacttgcattttttataaaggttggaacgttgaaggctattgcgactatgattgaatcaggaattgacaagaaacttcttgtgattctaggcattggttttgagatctcatag

SEQ ID NO: 4481 - DNA, 333 bp, Zea mays
  Peptide Sequence Number=SeqID_46260
atgaccctcgccgcctgtgctcgtgcccagggtagctccgaccacctccgacgccgacccgcacaccgacgtgaccgtcgtgacctccctgacgtcactgaccaccccgccggagctctactgccgccggaggtagccccggatccagcaccagagcctacaccagaggatctgcctgccacaactttggaaggcaagccccggaatcctattgagatgaatactagctctctggaggacatggttgctggagtgacttggccgtccatcttgccaccgggttggacagtcgagtgggatcctgcctcggctgaggaggagcatgaggagtga

SEQ ID NO: 4482 - DNA, 120 bp, Zea mays
  Peptide Sequence Number=SeqID_46261
atggggttggtcacggtgcttgtcctcgggcggctctggtgggtcgcggagaggtcgctggagctatgggcgagctcggggagttacgcgtggttattaagtgtactacaacttttataa

SEQ ID NO: 4483 - DNA, 459 bp, Zea mays
  Peptide Sequence Number=SeqID_46262
atgccgctcacactggctgagcggtggaccatccggatccagaatattataatcgtttctcggcaacgagctcagggaagatcccaccctgctactcggcagtttatcaccattgcattggcatggggtgcactacggagatcgacgtctcttgcgtcgaagatggggatggtaggtgtgggcgacaactctttggttgtcagccgattggtttctggccattcgatcttttgttgccttggttttagggcaatccctggttggatgtgtcgagtcttcgccatggaaaagacaatagaatcttcgctgctgcggaccttggcctctgcccctgcctctagtcgtgttagtgtcgtggccttgctgcggagggtaatcatgacgacgagcgatgtcctcggtctactgctgatttgcgatgttgttcacctaggattgggtgcggttttgtcggcctga

SEQ ID NO: 4484 - DNA, 252 bp, Zea mays
  Peptide Sequence Number=SeqID_46263
atggagaacaaggctccacaaatcacgctatcagaacaactgaagatgagggccatggtacagtgcgcaaaagatcttcagagaaaagatcttggcaacaggttggctcggactcggtcacggttaagttcgccgtacccacttggtctgcggctggacgggatgatcctcaccgccgccagcgcgccttcgcaaaattggacgccaccgccgatggaacctataaattactgccccagtgagctccgctag

SEQ ID NO: 4485 - DNA, 249 bp, Zea mays
  Peptide Sequence Number=SeqID_46264
atggggaagcctgtcccatcactcctcatgctcctcctcagccgagtgaccacacttgtacccaccataaccggaataggagaccacgtctcaggtcacgtgaggggatatgtccactgccagtgggtcactagttgtcactgtaatctgtcctacaaatttgaggtggatactgattcagatactacttgtgcaaaattaacaaagataagttttaaaagggcattttacactatagctgtgatttaa

SEQ ID NO: 4486 - DNA, 477 bp, Zea mays
  Peptide Sequence Number=SeqID_46265
atgggcgtctccgaggaggcggcgcgggtgtgggcggagctgcccgtgcgggtggactgggcggccgcggcggcgcaatgcgcgtccctgtgggcgcacgcgcgcgcgctgctggtcgcgccagcggtgcgggtcctggtgctcctgtcgctggcgatgaccgtgatgatactggcggagaagctgttcgtctgcgccgtgtgcctcgccgtgcgggcgctccggctcggcccggaccggcgctaccgctgggagcccatcggcggcggagtcggagacgaggaggaggagtccgggtccggccacggcgccaagtaccccatggtgctcgtgcagatccctatgtacaacgagcgggaggtgtacaagctgtcgatcggggcggcatgcgagctggagtggccgtcggagcgcttcatgatccaggtgctggacgactccacggaccccgtttgtaaagatccgattctagtctag

SEQ ID NO: 4487 - DNA, 147 bp, Zea mays
  Peptide Sequence Number=SeqID_46266
atggccttgattaaggcctgggtattctttgtcccagaatcttgggaccctgctgtgtccattggagtcgaccgttgtgctggagtcgttgctccgctggcacaccagacagtccggtgccccaccagacagtccgatgaattatag

SEQ ID NO: 4488 - DNA, 330 bp, Zea mays
  Peptide Sequence Number=SeqID_46267
atgaccagcaggcaggcaggcgggcacgaaaaagcgctcgtctttggccccctcgccctcgccttcggtggtagaaaagtgcagggcaggagcggcggcgcgtgccgtggtgtctctattgcgcccgacgaacggacggagacggaggcggcgtgggcggcgtgcggcctaggaaacaacggaggagatccccgcccgtgcccgtgggcgcgtggacccggcctggatctttttgcgaggacggcctataggttcactggcgtagagatcccgaccaaagaggcctccgatcaagcgggcccgacattgaggggccgcaccaggcggtga

SEQ ID NO: 4489 - DNA, 264 bp, Zea mays
  Peptide Sequence Number=SeqID_46268
atgctgcaccccacgctgccccacccgccccgcccgccccacgccgtgcccctcgcaccccttgccgagccgcgccgctgccccgcccgaggtgccctacgccgcgtcgcgacggcctccctgcgccatgtcgtcgcccacacgcccgtcaccgaggcgcgccgcaccgtcgccggccgccccgcccgtctcggcccgctcgcctgctccgtcgcgaaggcctccctgcgccccgcccacattttcgccatcaggcaagtataa

SEQ ID NO: 4490 - DNA, 237 bp, Zea mays
  Peptide Sequence Number=SeqID_46269
atgtcgtacaaaggatcccacaagagtgagaaagtcccctcgggagggaagcataaggagaagggcgaagaatctgttaactcgggttctatgtcctccaagtcctacaagaggagggaggagtacaacaaggtgaacaggttggagagcgccaaggaaatatgggatacactcaacacgacgcatgaaggtgacaagatcactgttggggacttgttctcaaatgctatgagttaa

SEQ ID NO: 4491 - DNA, 213 bp, Zea mays
  Peptide Sequence Number=SeqID_46270
atggctcgcgagcggctcgcgagctgggcaaaacctcagctggcccagtctggggtccgactgcacaacaaccaagttgctcaagcggcaaagcccaacagtcgtctctccatctcgcgtcctctggtgtctggtccaagtttgaagtctcgtgtctggtcccaactcgtccaagaaggcaagtccaactccaagacatcattgtctcactga

SEQ ID NO: 4492 - DNA, 198 bp, Zea mays
  Peptide Sequence Number=SeqID_46271
atggcatttttctccagcaacgtacttatgctcttggtatcattaaccgtgcaggatgacactcacttccggagtctagccgacacacttcaatatttgacgttcacccgtcctaatattgcctatgtagttcagctactttccatcctcctcctgcgtgaggacaagtatgtgaactttgtcacgtataacaactag

SEQ ID NO: 4493 - DNA, 2295 bp, Zea mays
  Peptide Sequence Number=SeqID_46272
atggatgggaaggtcgactggaggttgaagaaagcagggagaggggaaggtgagctggtcctgggcgtctgtggccggcggcggggagcagtagcagagtcgaggcggtgcgagcgcgaccaggaggagcgcgtggatccctggggccatcgcagtctggcgcggccggctggtgcgggatggcggcgcagcgcggaagccggggtgggagtgagcagcggatgcgtagccctgggcttactgttgctgtgcacgaggtcgactggcgacgaagggacgacgcctctgcccctccttccgcggctgggccggttgtttcgcgcggcgccccgtcgttcggaggtgacgaggccgccgtgcagtgcagcagggctcatccacggcgggatctggcgcgtgctagggacggagggagcagcggctgctgggtgcgtccctggtggagagggaggtcgaacccgccatggcttcgaccagctcgtcgatggaggagcaggggtagacaccatggctgagagggagaagctcggcggccaagggagctgggcattggcggccctgctgctgcttctctcccggtcttggctggctacctgctgccaggggaggaggctcggcggtcgtggtagagggccaccggcgcgggcgcctgctccaaggcggtcgcggaccaacggctggcgcggcgctctgaagccaggtggccggctcctagaggccctggcagcgcgcaagcacgaccggcgcacagaggcgacggtcatggtgcggccgcggtcggccaccactgcgcttgaccggcgctcggccccgacggctggggcgagtgctcccctggcggcggcagccggggcacgtgcctggtggtcggaggggcagaggcccggcgcggcgacggagacccgacgcggcggcgggcggatcccgcgcctacgcccgtggcggcggcgcccatgccctgggctgcgaggcggcgccggcgtctgcgcgctcgcgcgctcccttggtggcggcagcgtgcaggtctacgtagcggctgctcgcggcagcggcggcgaagaagcctcatcacgatcaccaccgcctgagtgttggtcacaaggcctccagtgcttacgatgcccttgggctacccagaacaagcctagacaagaatcaacagtggagtggtcaaatctagcggcggaggatcaggctccaacagcgggtcctcagcaacacgacactagaccaacatgccccgaggagggtacggcgaatgttctagagcactctggtgtagcaggcaagcataaagacgatgaccccgtgtgtggcagaagaagcaacagggtgcagaccggtaatctgatgtgcacctcccctccaagtccgatagaattgacagttgtgacgggcatgcttgctggtgctgagcacctctacagcgctagccttctgtggtccaccaagcctccacattggattggcatgggaggaagcaccccagaagaactaaccgaggaaggggaagcgtcgctccactgctgggcctttgagcaacctgccatcatgcaggaagggcccaatggagaacacagcaaggaacctggctcaagggaagagaagcaagccgggcaggaagccatcgcggcggaggaggtggctgctgggtccagagaaggcaccggcgtggggctggtgggaagggacagggggaggggaaaccttgtctacaactttccaatccgtattccagaaaggttttctttggttattcgttcattgttgacacaagaaggaatctgctttacactaaagcctgattttaagtttcttgaggttgcctatccatatgtagcaaagcgtctgttgacagatccaaaccctgctcttcgtgaacgcctgattcaggtgctattcaaggatggggcattccagtggaaacgactagaaaaccttatagttcttgccaaggagaatgtgtccaagatgagtagcaaccccgcactgaaaaagaatagtttgcaagctgtaagaaatcgacagttggagagcaaacttgatctcactgaaacaataaaagatggagcacggatgttccttatcgatgctggtatcaggagacaacttatactggctttcaccgaagactccagattgcacgtagaagagcttattgatgtatacagactggttgaagatcaaatagatatgccttcagttgccgtcgaggttcttcaagatttaccatctgttgcgcgtgatttcatgctttcctggagtgattccatcctgtcagatcgccagtactaa

SEQ ID NO: 4494 - DNA, 813 bp, Zea mays
  Peptide Sequence Number=SeqID_46273
atggtgggttactcggccttccatgacgaggtcgggggggcgagccggcgaggacgggccttccatgacgagtcaccagcacgccgcgccgccaggtcgccagcaccaggccccagccgcgtgaggcgccgcgccgccgccagaggccagaccgagcggcgagccggcaagcgcccgtccgtccgcgtccgctcgagcggacctgtgcaagcagccaagcacctcaccgagcactcgagcagcgtccatcggcctcaccgagcgcagatcttctccctcaccgagcgctccatcgcccatcggcctcatcacctcctcctccagcggcctcgatcagcgtccggcgcgtccaccctcaccgagcagcgtccgcccgagcagcgtccaccgtcctccctcaccgagcagcgtcctccctcacgaacagcgtccggcgcgtccgcccgagcagcgtccaccgtccaggccggtgtccacgccgtccagcgaccgagccgccgcaccgcgccgccagaccaactgaccgagcgcccgcggcccgtccgtccgaggctcccagcgaccaagattcagtctactgctccaggcgccgccatcgtcgcaccgacccctgcctccagctctaggcgatgtcgacccctgcatccaagaatgcagcagccccacaccggcgtatcaggtcccaacagcgggcactcctcggcggccaccatcgtcggctcgtcggcgtcggctcgtcagcagcagcaagacgcacctcacggccgaaccctcgatccgtggccccgtcgtgcagcccctcacccttggtaa

SEQ ID NO: 4495 - DNA, 1173 bp, Zea mays
  Peptide Sequence Number=SeqID_46274
atggccaccgccgtttccacccccgcggacctgtcgcccacgcctgccccgagacggcggggccggccgccgaagaaccccgccccagccgaggccccaggcagcccggcggaccaagcggaggtgattggggactacgagcgcgagagggacgcgaggatccgggagaacatggagcggatgcagaagctcggcatcctcgacctcgcgcacaccctcagccactgcgccgccgcctcgggtctgggtaccggcagcgggcggtggcgccggaagcccgtggagccggggtctgctggtggggccagggtgaagcccgcgtcgccggcgccctcgcggagatcgctcaggttgaaggacgtggaaccggttacctatcgtgaaattgagccaaagaaagagaaacgctctgaaggtggcaaaactgttttaatggaggtgggagccaaggaagaaatatacactgaagagcatgacaagcttttgggtacatgcaacactccttggactctctttgttgatggttatggcaaagatggaaaacgcatttatgatcaagtgaggggtcaaacctgtcatcagtgccggtatggtgaaaatgtgttagaggttaagaagaatcctaactggatatgtccagtttgccgtggcatctgtaattgcagtctatgcagaactaagaaaggatggttccctactgggtctgcgtataggaaggcgatcggacttgggtacaaatctgtggcacactttctaattgcaacacatcgagcatcatcagtcaattcaagctcagtcgacaataacaagctgccgtttgctaaatctgaaacctcgtgcatttctgaccatgccaatgagagcccagaggatggagaaacgaccagcaaagctaagcagaacaaagcaactcgccgccgagtgaggaagagttctgatggcgacaacgatagcagaagtgggtccgtggtgacatctgactgccaggatgatcaagccaacaaggatgctgggtgtgtgactccgtcgtctaagccagcgtcaacgaagaggaagatcatgtatctcttttactgcctgaccgcaggctctgtcccttcttgcgatgatgttgtggctctttcatctacaagcagttcatggtttgccagtaacgatgttctgcgcgagtaa

SEQ ID NO: 4496 - DNA, 1851 bp, Zea mays
  Peptide Sequence Number=SeqID_46275
atgtttttcgatgggtcgttgatgaagacaggagccggcgcaggcctactcttcatctcgcccctcgggaaacacctacgctatgtgctacgcctccatttcccggcatccaacaatgtggctgtgtacgaggctctggtcaacgggttgcggatcgccatcgagctaggggtctggcgcctggacgcccgcggtgactcgcagctcgtcatcgaccaagtcatgaagaactcccactgccgcgacccgaagatggaggcctactgcgatgaggttcggcgcctggaagacaagttctacgggctcgagcttaaccacatcgctcggcgctacaacgagactgcggacgagctggctaaaatagcctcggggcgaacaacggttcccccggacgtcttctcccaggatctgcatcaaccctccgtcaagatcgacgacacgcccgagcctgaggcgacctcggcccagtccgaggtaccctcggcccagcccgaggtaccctcggcacggctcgaggcgaccttggttcagcctgaggtaccctcggcccccgagggtgaggcactgcgcatcgaggaggagcgaagcggggccacgcctgatcggaactggcagaccccgtacctgcaatatctcgaccaaggagagctacccctcgaccgagccgaggctcggcgggtggcgcggcgcgccaagtcgttcgtcttgctgggcgatgagaaggagctctaccactgcagcccctcaggcatcctccagcgatgcatctccgtcgccgaaggtcaggaactcttgcgggagatacactcgggggcttgcggccatcacgcagcgcctcgagcccttgtcgggaatgccttccgacagggcttctactggccgacggcggtggccgacgccacaagaattgtccgcacctgcgaagggtgtcaattctatgcgaagcagacccacctgcccgctcaggctctgcagacaatacccatcacctggccctttgctgtgtggggtctggacctcgtcggccccttgcagaaggcacccgagggctacacgcacctgctggttgccatcgacaaattctccaagtggatcgaggtccgacctctgaacagcatcaggtccgagcaggcggtggtgttcttcaccaacatcatccatcgcttcggggtcccgaactccatcatcaccgacaacggcacccagttcaccggcagaaagttcttggacttctgcgaggatcaccacatctgggtggactgggccgccgtggctcatcccatgtcaaatggacaagtagagcgtgccaatggcatgatcctacaagggctcaagcctcggatctacaacgacctcaacaagttcggcaagcgatggatgaaggaactcccctcggtggtctggagcctgaggacaacgccgagccgagccacgggtttcacgccgttcttcctagtctacggggccgaggctgtcttgcccacagacctggaatgcggctccccgaggatgagggcctacactgaccaaagcaaccaagctagccgagaagactcgctggaccagctggaagaggctcgggacaaggccttactacactcggcgcggtaccagcagtccctgcgacgctaccacgcccaaggggtccggtcccgagacctccagatgggcgacctggtgcttcggctgcgacaagacgcccgagggaggcacaagctcatgcccccctgggaggggccattcatcatcgccaaagttctgaagcccggaacgtacaagctggccaacagtcaaggcgaagtctacggcaacgcttggaacatccaacagctacgtcgcttctacccttaa

SEQ ID NO: 4497 - DNA, 1311 bp, Zea mays
  Peptide Sequence Number=SeqID_46276
atgggcgcgcacccatcggaaaaaatctcccaactctcaaaaatcctggcaaaaacgcccagaaggtttagcaagaacctccaagcgagtgcctacactcccttgaaggctcaggggctactgtgcgcattccggcagcaatggcataacggcggcgggcctgcgtgtgtgcttagcgtcggcacagccaacccaggcaactgcgttcagcaagatgagtacactgactggtacttcagtatcaccaagaacgatcatcttacacacacgaaagcaatcatgaagaaaatgtgtgagaagatgatggtaaaaaaacgatacctgcaagtcaacgaggagctgttccgtgagcatcccgagttcttggaccctgcagctccaagtctagaaggcaagctagccgtcgtggccagtgtcatgccagggcttgtggccgctgccgcagagaaagccattgccgaatggggccgaccggctgaagacatcacgcacctcgtcttcgccaccagcagcagtgctcaactgccccacatcgatctccgcatcgcttcccttctcgggttaagcaccaccgtgcagcgtacggtgatcggctttcatggctgcagcggcagctccgcggcgctccgcgttgccaaggacatcgccgagaacaaccgcagcgcacgagtcctcgtcgcttgcgcagacatgttgagcgtcatggatggttacctagtccccaacgtagtagcccaccgctacggaatcatcggccacgccattttcggtgacggtgctggtgcagttgtcgtcggaagccggccgcaggaacccgtagagcgcccaatcttcgagatggtgtcagcgtcgcaggccacgctacccggctcggagctggcggttgctgccgagctcaccaatttcggcatggagtaccgcctcgagtttggagagctggcggcgggggtcggcgacaacatcgagcggtgtctgatcgacgcgctgtcgccgctcggcattggtagtgttggctggaataacctcttctgggcggtgcacccgggtggccccaaggtcatggacaacttcacggcggctctgaggctagagcccgggaagttggcgcccagccggcaggtgttcagcgagtacggcaacatggtgggcccgactctgatctttgtcctcgatgaggttatacgtcgtcgccagcaagatcacgaggaagggagctgcgagtgggggttcatggtggggttcggcccggggttcaccatcgatgtaatggcattgcatgcgtgcagtggtatgtccacagttccacactga

SEQ ID NO: 4498 - DNA, 177 bp, Zea mays
  Peptide Sequence Number=SeqID_46277
atggccaccattgccgctgggcatagaaattggacctcgccactgcacaatcaccgggagttgaatcctggattccggcgaacccgccgcagtggggtgtgcgcgttcgagcttggctgctgggaggttggtggtgatctcctggccgttggttcggatgtgatcggccgagattaa

SEQ ID NO: 4499 - DNA, 432 bp, Zea mays
  Peptide Sequence Number=SeqID_46278
atggaagcctcttcccgagccgagacccttgccaaggaactcgaggcacatcagactacgtgcacccagaaggaaagtgctctggctgaggtcgcagcagcagcagctgaggcgtctcggaccgaggcttcgcagtggaaggctcgggtgaaaggacaacttcggttgtgcttacgtgtttgtttggttggttttagaattggatcgggaccttcacgtgtctatcgagacatccacgagctcacccgagccgtcgacgagaagagcatcgcgtacgaagccatgtacgacacagttgtcgccctctaccggacctttgagattgaagacaccccttcgagcagttccccgtggagacgcatgcttgcgctgagtggccacatgcagagcaaactccgtgaggctttgcatacaggcatgaagcgggcatga

SEQ ID NO: 4500 - DNA, 732 bp, Zea mays
  Peptide Sequence Number=SeqID_46279
atggccgttaatgtaccccaacttggccttgtgggaccagtcaagctccgctacggagggcctcaacatcggagtctctattgtaacccacatactgagcaaagtcgaagtgatccaccataccgcacatatgcttatgcgcgtatcggaagcgagactttctcactagggactcgcatcacattctcttccctcgacttcctcgccaccgccaccggagaactccgcctcattgactccgacacgcccatcgtggcaaacgcgggaggaccctcacgttccacctccaccaggagcaaggcggagaagcgacacctcatgaggcgcgccgccaccctcaagcgacgtcttaacaagcccgctgtcgccatcaagcagaaggcagagggagcctcaccctcaacgtttgtggccgacatcgaccacccgcagcctccatcctcgaccttctggaggatgactcaagcctcgattcggcagaagaacccaaaaccgatgtcactgaggcagttgggagaatttgcttcgtggcaacatagccgcggggtgaggatggtgggggaaacgaagatgccgccaactaagaggagtactagcaccatcgccatgcacgaatccttgcccacgaggaaggcctccagtagcaacaagaggagctcgatgccttcgtacgtagagtcgacagaatctacaacaacacagaacgagagcgcctcgaggcctctggcatga

SEQ ID NO: 4501 - DNA, 270 bp, Zea mays
  Peptide Sequence Number=SeqID_46280
atggagcagcgcgcaagtgcagcagctgcagacgtgcagcggcaggtgcaccagactgcagatttcagcgaaaggtttcggatcaagtgcaaggtattattctacaaccggaagttcctgacacttttagatggaagctatcagattcaagggaatactctagcaggaagcgctgctggacagccgataggctggccagaagagggttgccccaccctgaggcttgccctctttgtgatcaagcggatgggacgattaaccacattctag

SEQ ID NO: 4502 - DNA, 294 bp, Zea mays
  Peptide Sequence Number=SeqID_46281
atggcgctaagaagccaggttctgacgacacaattcaaccgcacccaggatggagacacacctagaacgggattagacccagcaatacttagtgacaaaaaggtccccatggacaggcccggaaggcggcgtcaaggtggagagcagaagcctcgcggttgcgaggaattcctctatggcaacccaggcctaacgggaagtgccaccacgctcacaaacgacttcctgcaactcaacagtgaccatcccgaggatctaggagaggaccatattatccattcgccgctaggatag

SEQ ID NO: 4503 - DNA, 210 bp, Zea mays
  Peptide Sequence Number=SeqID_46282
atgggttgcccaagccccacaccagacctacttttgaatgccatgaagttgccagttgtgatgcttggtgataagcactcattggcatatcatttccgaggttgggtcctccagagcattccgagcagcactaatctctccaacaatctgaaagaacatatcatgctcaaccaccagagtgctaatgaacttaaactcaaaactatttaa

SEQ ID NO: 4504 - DNA, 222 bp, Zea mays
  Peptide Sequence Number=SeqID_46283
atgaacgaggcgctcattcacgagctcgacagcggacgaccaaagaccaccgctgacctcctcgacatcgcgaccaagtttgctgacggagaggatgcgatggggaaccatatctaccccgtccaccacaagctctgcgagtgcgagctactcaagcgcttcattgctaatcctcccaacaagaaggcgaagccagaggaagccaccaaggtggtggaatag

SEQ ID NO: 4505 - DNA, 1902 bp, Zea mays
  Peptide Sequence Number=SeqID_46284
atgaagaaaaagaactgcggccatgagaagccgcattccgccgctctggttgttgcagctgcgactgggggccggggcgaccgcaacaaacgcccacggccgcagaagggtaacagcggctcatgccctatacaccccaacagtcgacacagtgccgcagagtgtcgcgagatcatcgacctcgcaaaacacgtcagtgtgcggcgcgagcagtcttccggtgatggctcccacctcgtcgccgacctggtaaggaaagggtcgacgacgaagaggtggccgtggctgaaccagacctcaggcctcgcatacgcgtacgccagcctgttctgtgggtccgacaacctggggtccgggtctagagaatggacactcgtctcctggggtgatccggagccgagtagccgcttagcctggtcccgtaccagaggccctcgctcctgtcttcctacggggggtgacaacgaggccattaaagctaaagagttgggtgcacggcggctggcggcgctggtggcctggccagcggcggtgaccacctctgcaccagcggatcgccagtggctcgccagcggcggcaaccacctcaacacgctcgccatggcgaagaggccctcgctcccgccctcctacgggagtgaggacaaggccatccaagccaaggggctggaagcccggcggctggtggcacttgcgggccggacgatgaccactggtgggagaccgcagccccactgcatgataaaaatccttgaagctgagcgatggcggaagggcaccagcctccatgagattcctctgatcgcgccccgaaagaccacaagaagttctcccccaacgcacaccggagcacccagcctatgctacgggggcccgaccccacaagtcatacggctggagcaacggcctcctggtgcgcagaaggcgaaccgtcgtgcgagaaacgattcaccgtgcctcttcaccttcgccaagggcagcggtccagcttctggcacgggggcccgggtccaggagtcatactcctcggacgtcggccagcgtgtgaggagaaggcgagccgccgcggccaccgcagaaaacagagaaggtggattttcacaaccatatacaacggtaacaaggcgccccgcgcatggcccagtaaaagctatcgagcgtgaagatcacgggctcgtatcctcccctgaggcgggcccgagggccactttcggtaccctggatcaagagtacccctactactcccaaccaagggcggttgctcagggcccagcggcgcccggcctcaccacccgggaaggactcccagaggaggtgcgggacctccacgtgggcataaccgggcccccaaggtgggaaccagaccccttcgcaaggggtccagaccgctcacggcagggtcccggtgcaccaggatggaaggtgcttaaagccctggtcaaagaccaggcaggggtccgacgctggcacgtgcctagaccccatcatgaacacttcagctccccgcccaggcggagacccgatgatgccatgtggccctccgcccgtgacgatgcccaccgcttgacaggcgatgtgccatctcagcatttaatgcgccccgtccactccgctggcaggcgacgtgactactcggcatttaatgcaccctctactcctctagaaacttctgttgcaagccaatactacgggaatcgcagatatcagggcacgaggagattgcaccggattaatagctccaagctctctgagacattcagagccaagtcttccaagacacaactcaagctcatgagcaatacaacacacagtggagtaggggcgggtgcactccgccacccggtcggagaattcctctccgacaggcactctctcaagtgcctcaaatatactacactgtag

SEQ ID NO: 4506 - DNA, 390 bp, Zea mays
  Peptide Sequence Number=SeqID_46285
atggcgggcaaccctggagctgttgacggtggaatccaagcggcccgaccaccactgcttcaccccaaggccagaattagtccaaggacaccactgctggcattgagtcgacgacaaacaacagcttctctgtggcggctccggttcctcaccacactctgcgcgacgccacaggtggaagacttatgcgtgaatgatagggcgagtagtgaatccaaggaggacgtgcatagatataggccccgtagacccggaaacccccacccgatcatggatgcacgcgacgaattcggagctccgctgcggcgcacgcgcgattttaccagagtgcaaattgagttagaactaattctcttattttatgtattcttattatcattaccaatgtag

SEQ ID NO: 4507 - DNA, 495 bp, Zea mays
  Peptide Sequence Number=SeqID_46286
atgccgcagtcggtgctggtggaacgcgcgacgagcgagtcgctcatcggccctgactggtctctcaaccttgagatctgcgacatcctcaaccacgacccctcacgcatagtaaaatctatgaatctagaagagccaaaacgacttacaaatttggaatggagggagtataaagaaaattttcttttgaacttcgtcgatgagcctggctggccacttgaggtgctggaccgaggctccaccactgcctgcatcctgcatgttggacattatagtgaaagagctggtgcccgtgacctcttccttgccgccgactggtcttccgtgtggccctccgacgcctactgctcctcttccctgcggccggccggcgcccacaccctcttcttccccacgcccagtgcctgccgctcctcttgcctgcagccgaccgacggcaagaagacgtgccccaccactgtagcaatcatcaccttgcccttggcctttggatga

SEQ ID NO: 4508 - DNA, 168 bp, Zea mays
  Peptide Sequence Number=SeqID_46287
atgaaggtgtgcgcattaaatgcgagtcactcacgccggccttcgggtgcctttgtcctatctgcctgggatcggctcgagcgagatgaacggagcgggggtgactccgggcgaggcggagattccctgaggcgggagaccctcgaggaggggccttggtgcctgtag

SEQ ID NO: 4509 - DNA, 153 bp, Zea mays
  Peptide Sequence Number=SeqID_46288
atggagggatacactacagaagaagtgattgagagctgtatagattacatcagtgacggaacaatgataggtgtgcctgtacctaaacatgaggatccccagctgggtattaatcgattcggatcgccgttacttctcggttatgaagactag

SEQ ID NO: 4510 - DNA, 1248 bp, Zea mays
  Peptide Sequence Number=SeqID_46289
atgctacacgttgcacaggcattcattgacaagaactaccatcctactgttatttgtcgagcatacaccaaagcgcttgatgatgctattgctgtacttgacaaaattgcaatgccggttgatgtgaatgatcgcggggcaatgctaggcctcgtgaagagctccattggtacaaaattcactggccagtttggtgatcttattgctgaccttgctattgatgctacaacaacagcaggcgttgaccttggtcagggtatgcgtgaagttgatatcaagaaatacattaaagttgaaaaggttcctggtggtcagttagaggattctagagtccttaaaggagttatgatcaataaggatgttgtggctcctggaaaaatgaggagaaagatagttaacccccgtatcatcctgttggactgccctgttgagtataagaaaggagaaaatcagaccaacgctgaattgatgaaggaagaagattggcaggttctcctagagatggaggaagaatatataaagaacctttgcgctcaaattctaaaattcaagcctgatttagttatcacagagaaagggctcagtgatctcgctatccattatttgagcaaggctggtgttactgcaatccgtagacttaggaaaactgacaacaacaggattgctaaagcttgtggggcagttatagtgaacaggcctgaggagctccaagaatctgatgtgggaacaggagctggcctgtttgaggtcaagaagataggtgatgaattctttgcctttattgttgactgtaaagatcccaaggcatgtactgttctgttgaggggagcaagcaaggatgtattgaatgaagttgagagaaacctgcaggatgccatgtctgttgcaagaaacattttgaaaaatccgaaactccttcctggaggtggtgctacagagctgactgtatcagcaacactgaagcaaaagagttcttcagttgaaggcgtggaaaagcttactagctttatcctcacaaggacagaggataaattagaatgctgggattgtaaggtgatacctgggaagtgtgctgtctctcagcataagcttgtgttggtggccaaaattgcaagaacaaaggtgggagctgataggggagaaggcaaaaagtcttcaaggaaagggccatcaaagaggccacttggaaggaagaagatgatacaaacaacatgtgggagaagatggcaatctgcatttggaaggtag

SEQ ID NO: 4511 - DNA, 345 bp, Zea mays
  Peptide Sequence Number=SeqID_46290
atggcgcttcacgccccggtccacgtgatgaaggactcgctgaagcgggagtctggcgcgaaggttcaccaagccaacatccaggcggccaaggctgttgctgacatcattcgcacgacattgggtcccagatccatgctgaaaatgcttctggacgctggtggaggtattgtggttactaatgatggtaattctattttgagggaaatagacatcgcacaccctgctgccaagtctatgattgaactaagtcgtacacaagatgaagaagttggtgatggcactacatctgtcattgttctaggtatttctcataagcatgttaacactatacttgggttctga

SEQ ID NO: 4512 - DNA, 222 bp, Zea mays
  Peptide Sequence Number=SeqID_46291
atggccggggaagcgggcgtggtctccggcggcgtctggcggcgaggtagagcgcgagagagggcaaagctatgcgaaatgaggcggggggcgagtcggggcactggcagggctctaagaagggagctgggcacttgggcgagcgtcgtggccgagaaatccggcgacgtgcgcgagtgcgcactcgccggtccacgacgggtgcggggaggacagatctga

SEQ ID NO: 4513 - DNA, 870 bp, Zea mays
  Peptide Sequence Number=SeqID_46292
atggcttcgttccggaccagctggcattgcttgctcgccgcctgcctgttcctgctcgcttcggcggcgcacgggcagcagctctcgtcgtccttctacgcggcgacatgcccgacgctggagctcatcgtgcggaccaccatgctcacggcgctcctcgccgagcgtcggatgggcgcgtccctcgtcaggctcttcttccacgactgctttgtccaaatcaaggccaacgtcgagctcatctgccccggcgttgtctcctgcgccgacattgtcgccctcgccgcgcgagacggcaccttcttgctcggaggaccaagctgggcggtgccgctgggccggcgcgactcgaccacggcgagcctggccctggccaacagcgacctgccgtcgccggtctccggcctcgccgctctcctcgcagcgttcggcaacaagggcctggggcccggggacctgacggcgctctcgggcgcgcacaccatcggcttctcgcagtgccagaacttccgcgcccacatctacaacgacaccgacatcgacccggcgttcgccagcctgcgccagcgcacctgccccgccgcgccgggcaccggggacagcagcctggcgccgctcgacgtgcagacgcagctcgtcttcgacaacgcctactaccgcaacctgctggccaagcgcggcctgctgcgctccgaccaggcgctcttcaacggcggctcccaggacgcgctggtgcgccagtacagtgccaacccggccctcttcgcctcagacttcgccaacgccatgataaagatgggcaacatcagcccgctcaccggaaccgcgggccagatcagggcaaactgtagggtggtcaacagcagctga

SEQ ID NO: 4514 - DNA, 270 bp, Zea mays
  Peptide Sequence Number=SeqID_46293
atggagagatcagtgaggcttttgggattgttctcaccagcgaagaaggtggcggcgacgctgtctacgatcccaggtgctaaaggttcaacacaaaacaataaaaagatcaaagttagggttcaaaagaaagcggcaaaagaaaccgaagagaaccctggtctggcacaccggactgtccggtgtgccaccgaacagtgtccggtgcaccaggaaccgtacaggctgaactcctcaccttcgggtttctggaaagcaactctgctataa

SEQ ID NO: 4515 - DNA, 582 bp, Zea mays
  Peptide Sequence Number=SeqID_46294
atggggcggcgcatggctctggcgcggtctctgcaaccgctgcacagcgccgtctcggcggcccggctgacgtcgcggctgggggcggaggtggaccgggccgtgtcgcaggatatgggaacaagcttgataaacttttatctggattggtgtcacggggaacgtggtatagcgccacattccttgtctcagcaacaacaaaagtcagaacgtcgtcctacttggaacaatcttgtctggaccttcgcaacacttctctcaattggtgcaccacgtcccttgatcgacttgcctcgatttatcccttctctagaccacccactcatgtgtgagcctctaccactaagtctgccttattctcaacagttgagactttttgggctcatctccttttctcatccccgttttcacaattgtgagcttctagcacagggttcaaatttctcacacattggtcccaaggtcaggtgtgttaagcatatcctgccaaaaacaagattcttgcctcaccagcagtcaggacgtgagtgggtgggtgtgggtcttttattctggaggggagtcatcactcagttgtattaa

SEQ ID NO: 4516 - DNA, 1050 bp, Zea mays
  Peptide Sequence Number=SeqID_46295
atggatcaagagttcgtcattagagataacaaacttacaaggattcctgatgctggcatattcaaggatcttctggtgttcgatgtatctttcaatgagatatcttctttgactggtctgtccaaggtttccatcaaattgaaggaactttatgtttcaaaaaatgaagttgcaaagatggaagagcttgaacatttccatgcgctggaaattcttgaacttggtagcaacagattacgggtaatggaaaatcttgaaaccttgacaaatctacaagaactgtggttgggaagaaatcgaattcgagctgtcaacttgtgtggtttgaagctaattaagaaaataagtttgcaaagcaacagactgacttcaatgcatgggtttcaggaatgtgctgcattagaggagttatacctcagccataatggaatccaaaagatggaaggcctctctactttgcataacctccgcattttggatgtttcagctaacaagctaacgactatagaaaatatcgaaaccttaaccaggctggaggacctgtggttgaatgacaaccaaataccatctctagagggtatagagacagctttggctggttcgcgggagaagttgacgacaatctatctcgaacgaaatccctgtgactcaaacgtaagacttcttggagatgctcttacttcagatattgatccatctttagtgaatgaaatagaaaataaacttaaaggcattagtgagaaggaagtcacatgcactatggttttcttgaaaatgtctagtaccagagaaattgatgcctcatctgatactaaggcaaagaaggctttggggttccccggagaagtcattaacagcaatcaacttgtgaggcgaacaatagacagtaatttgatccttaaagtcttcattgccaactctgctcgtgttgtggaagacattggttcggagtttgtagccttgagccgttacgggcttaatatagtgattggtaaccaaataattagaggtgtacgaggattgtcacaggatccatatccgtgttactag

SEQ ID NO: 4517 - DNA, 390 bp, Zea mays
  Peptide Sequence Number=SeqID_46296
atggatacaaacttggatatagcagatgtggtggtagatgtaggtccagtgcattggatccagactatcaataatgcagaaggcacgtggaaaccagcgccacttcttctgtggctacaaataccaccagtccacccgcaagctctgcaagttctaccacttactacgcgagcacgcgccggcgaatcgagatcgatcggcatgtggccggcggcgacgatgttcgcgctgggcttcctgctctgccccttccccgccctgtcgccgtcggcacgtaacctcaccgcgctgctgccggagctccgcgacctcttcggctccctctaccgccactgccggcaggagttcgtcctgctggcctctactcgacggcggcggcgtggttcgtag

SEQ ID NO: 4518 - DNA, 633 bp, Zea mays
  Peptide Sequence Number=SeqID_46297
atgactcccgcatccacctcccctctcgccgccgccgtcctgcccacgaacttatcttccttctctcgctgcccacctcgccgcctcccgcgcatctcctgcctggcagcgcccgaacgcgggggcaacaatgcgtcgaacgcctcgccggcaccgcagcagccgaggtggggtgccgcggtatccgccgcgctcgcggcggccgtggttgccgcctctatgccagcttacgcggacctgaacaagtttgaggccgagcagcggggcgaatttggcattggctctgccgcgcagttcggctcggccgatctcaagtatgccagcacctctgcttcttcatctcttcttcatgaccattttgttgttacattgcctaggaaggctgtccacgttaacgagaacttcaggcgggccaacttcacatccgctgatatgagagagtcagatttcagtggttccacattcaatggtgcctatcttgaaaaggctgttgcttataaggcaaatttcactggtgctgatttgagtgatacattaatggaccgcatgtgtcctttcagcaaatatttgaataacatggataaacctaattctttgatagatcagagtttcaggggttgtaggatgagatag

SEQ ID NO: 4519 - DNA, 888 bp, Zea mays
  Peptide Sequence Number=SeqID_46298
atgcatttggaatgggcagagaagtgcaagattgggatggaggagcagaacgattggtacttcttcagccacaaggacaagaagtacccgacgggcactcgcaccaaccgggcgaccaccgccggcttctggaaggcgacggggcgcgacaagcccatctacaccaagagctgcctcgtcgggatgaggaagacgctcgtcttctacaggggccgcgcgcccaacggccacaagtccgactggatcatgcacgagtaccgcctagagaccaccgagaacgggaccgcccctgaggaaggatgggtggtgtgcagggtgttcaagaagcgagtggcgaccgtgcggaggatggccgacggcgcgccgtggtttgacaaccacgtcgccggcgggttcatgccggaccttgttggctcggtgccgaggcagctgatgcaccaccacccaaacgccgtagcggcggtgtacagcggccagcagcagctctaccactgcaagccggagctggagtaccatcaccttctgcccagccaagacgccttcttgcagcagctcccacagttggagagccccaagcctcctcccgcctacatcgccgcccagggcagctgcagcctccagtcccccgacgatgcttctgggtacaccgcgcggcaactgccgatgacggaagccgcttacatggacgactcggtcaccgactggagagtgctcgacaagttcgtcgcgtctcagctcgtcagccacggcggcgatgacacagcgaaagagaccgcttactccagcccggcgcaggcatttcagtctgagaacaggcagccggaagaagcactggacttcgcctctacatctgcctctggggacggcgaggcgagcatgtggaagtag

SEQ ID NO: 4520 - DNA, 972 bp, Zea mays
  Peptide Sequence Number=SeqID_46299
atgggcagtctccagcaacctctccagcccgggacggtgctccgtttcgggagtcttgagttcatgtccctcgacggcagctacgacatgatactccttcccccgccgtgcgacagcgacaatggcggccgacagcccgcccgccggcggcggaatcgacgacgtcttccccgcgtggtggaagaacaacattcgagctcactccgccctctcccccaccgacggaggaggaggcggggcaaccaaggccaagcaggaggcggcacctcgtcggctgtcgagcaagtcgacggcgccggcgcccctacggggggcgcgtcgggcatcgacctcgcgtttgagacgaagacgagcgccgtctccctgcaacacgccaattccgagcaaacggacgacgccagcacgctcgcgaaaggcttgctgggcgtcaccctcgtacctgagacgacggtgcagtcagtccctgacgtgacttcatcaccgcccgtcgaccaagaggaccggctgacggacgtctcgacctacgggccctcggggtccgaggaagatgatgagcccgacttctgttgggatttctccggacttggtaaccccagtgccatgtgggacttcatgaccgcatgcgactactgcctttccgactgttccgacggtagccgcagcctcggcgacgaggacggcggcccaagtcgtgaatgtttccacgtcgatctagggggtccctccgaaggcaaccatctcggtatgccggagaacggtgatctccctaggactgtgccttgcgttgacatcctacgggagctagctgtggtccccgttcaggcggggggtcatgacccacagctcgagcaaatccgcggggtgcaggccaggctcgacgaggtagcaggagcacttgagccgatcccccgggacgtcgggcaggaatgggcgggccagcctccggccagagaaatgcgtcatctaccctag

SEQ ID NO: 4521 - DNA, 264 bp, Zea mays
  Peptide Sequence Number=SeqID_46300
atggcctcatcctcgggacaaactctgcctcgcccgagcccagcctcggctacctgctccccgcgaatcccgcaggaggccatttcttcaactgtgtcgcccgagctcggcttcagccttgatattatcaacggaaaggcacccgacgtcaccagaaacagtggagttgatgagtggctttttgtcatgctcagcacttcaccaaccactatgacatgggcagcttccccattaggtaggctcgggcacgtgaccgatccctaa

SEQ ID NO: 4522 - DNA, 378 bp, Zea mays
  Peptide Sequence Number=SeqID_46301
atgcacggcgatggaggagctccccgcactgtccccgtccctaactccccacccccaccccgtcccaagaccctcatcctctcccatatcatacactcacggcttcgcagacatgggcttcttagctctcactcgatgcactcacagcgtacctcaccatgctcgtcgtcgcacattggcctcgactgcttcaccttccccatcatcgtcaagtgttgcagcacgacggtgtggctaggcgagggctacgctgtgcacataaccgtgatcaagcttgggtcgacaccgatgagtacaccacccactttcatcgtgctctacgccaatggaggaggcgggctaaaagcgaagcctgagcaccactgtgattgcagataa

SEQ ID NO: 4523 - DNA, 234 bp, Zea mays
  Peptide Sequence Number=SeqID_46302
atgcatcgcgccgagccagccgcgaggcaagatgaggaggaaagggggatcatggaggagggagagggaggatttataagttttatggggacggttgaccccgataaaccccctaaatttgcccctggcctacctctacagatgcaaagattctctttgggactggctctcgagatacgcagggaatgggtgttttttccaaagtcagacctagagagaaacgccctaacatag

SEQ ID NO: 4524 - DNA, 1548 bp, Zea mays
  Peptide Sequence Number=SeqID_46303
atggatggcagatcacttcgtgattgggcatttcaaaggaatctaaaaaactcagtcagggagggaaataccgtcctccagacaattgcaacagtatgtgtatttctagcgtcaaaagttgaagatactccttgtcccctggactatgtagttagagtatcctatgaaacaatgtataggcgggacactgctgcggctcaaaggatccgccagaagcatccttatagaccacttcttgatgctatgcaaaatcttggcatcaataaaaaagaagtgaagcaagtagcatggaactttgtgaatgactggcttaaaacaacattgtgcctacagtataaaccccagtacatagctgctggttccctttacctggctgcaaggcttcacgatatcaagcttcctttgcatggagcacatgtttggtggcaccaatttggtgttgcaccaaagcctctggaagctgtcattcatcaaatgatggagcttgcggctgtgaacaaatcgaatcctgttcgtcccaatctggttaagccaaaggaaactttatgtgaagctaaactgagcttatctaatagcccagactctgtgttgaatcaatcaagcttgttaataagcagctctagtcctgatattggcgagaccagtgaccaagtgcaggtggattcttgtcaatacttgataagcagccatacgggtgattgtagggtctcatgtcctgacaacagttcgttggatacttctggtaaagctcatgatgaagagagattggatcaggccttaataaccaagcatgacagtgggatgatgccttctactagtaaccagacatcattagatgctactgtaggcactgagagcagtgctgaatatatgaagcaggatgtaagccattgcgatgacttcaatatcagagtcaatgaccaaagcttgaaccaggcgttaagaaatcagcatggtgatgctgtcccattacctgacatggtatcactagatgctaaggtggacaaggaaagtagttggtgtctggaaccattgattgcaaacttcgactgctgcattgacagcgttaatgtggatagcttgtgcactgatcagagattggctgatgttgcttcaggccccacagctgatgtgccatccgtgctgctggccaaggagaattctgatcctttgagtgcaaagctcgaaaatattgatgttgccaggataaaaggtttactgatgaagaggaagagccggagagagatccaaaaccaagccattgcttcagatggcctcagtgaagaagcctggattgagagagagctggagtctgggattgtcacaaaacaagaagccaattgtgccgccatctcagatgagctaagtgatgaagcctggattgagagagagctcgagtcagggattgtgaccggaccaacaaacgagcaggcgatcacttttgatggtttgagtgaaaatgattggatcgagagagagcttgagtctgggatcatcattgagccagcacctgctatcaagaagcggaagctggagtcaagctgttag

SEQ ID NO: 4525 - DNA, 1746 bp, Zea mays
  Peptide Sequence Number=SeqID_46304
atggaagcggcaccatccgcccgcgccttctccccgtcctcgtctccctccgcgggggctagacccagccttcccctcgcgggcctggcctcgcggcgcgcccgggtgctcgcggcgccgcccccgccccgcgccgtcgcctcctcccgcgcgccgctggtggtctccagcccgccaccgccggaggactccggcacgcacaaccccgcgcacgccaaggtcgaccgctccggccgcttctgcagcccccgcgccgcacgggaactcgcgctgatgatttcctacgccgcgtgtctggagggaaccgatgttgtccggctcttcgatcgcaggatcagcgcaaggcgagaacccgggtttgttttcaacaaggcatgcctattgaattacaaccatatgagctttggcgggggaccgctcgaggttggaacggagcaggaggctgagaagctggccagtcagaacgataaggattcagccaacgaagcagatgtactttcagctcctccaaaacttgtttacaacaactatgtattacgggaacttttagtggctgttgccagtggatgggataagcatgtggttatcatcgacaaaataattccccaggcttggaaggatgaacctgtggcaaggattcttgagctctgcattctacatattgctatggctgagatggcatcaaaaggaacaccccacaaagttgtcattaatgaggcagtagatctggcaaagcgattttgtgatggtggtgcccctcgggcgaataccttctgtctccaaggtttagccttcaacctaagggaatctaaaagctcggtcccgttgaaccgggggatgaagccattccttgcggccatctctgtgtcaccaggtgcgagcgcattcaaacggaggggcacatggggaagcttcgagctcaaggaaagcggaggaaatgagatggatggagaatatgcaaggcactggatgagcgcggacgtgaagagtagggtgagctccagcgtgggaaggagcgggtccgatgatctcttccggccatatgagatctctggttgggcaggttacgcatctctggtggcagcaattctgaaattgcacgagactgtgcgaatggattggccaaactcttgggcggctgtagttcccagctcttctgtgatgttgcgcgactgcggtacaatgttgaaaatcaggctttgctcacacgaagaaggcaacaaggataggaatatcgtatcaacagttaatttggattgtaaacttgacctcaaagcaatagctttgcaagcacgaaatgcggagtataacccaaagcgttttgctgcagtcatcatgagaataagagaacccaaaaccacagcactgatatttgcatcgggtaaaatgtatgcccgcattattcagaaacttggttttccagctaagtttaagaatattgttggctcttgtgatgtcaagtttccaattaggcttgagggccttgcatattctcatggtgccttctcaagcaagattgttttgactggagcaaaggtgagagaggagacctacactgccttcgaaaacatctatcctgtactgtcagagtttagaaaaattcagcaatgggtggatggctacagcgtgcagttgacttatgtcatgtactcatttatggaacatgtgtgggactgggcacctatgacatgtgatgtgaaggtcacgttcttcaaattacaagcttcctcgaggattctcgtgtga

SEQ ID NO: 4526 - DNA, 423 bp, Zea mays
  Peptide Sequence Number=SeqID_46305
atggacgattcaagctcacagccagccacaatagtgagcggaggagaagagagaaaccaaaggagggaggaggacgacgacgaggagacggcggcggcggaggcagaggccggcaacggcagccagctgatggtggtgcccgaggacgggtacgagtggaagaagtacggccagaagttcatcaagaacatccagaaaatcaggagctacttccggtgccggcacaggctgtgcggcgccaagaagaaggtggagtggcacccgcgcgaccccagcgcggccctccgcgtcgtctacgatggcgcgcaccagcacggcgccgcgccgccggcggctccggagcagggcggcggcggcggcgcctccaacagatacgagctgggcgcgcagtacttcggcgccgggccggccgggtcagggtga

SEQ ID NO: 4527 - DNA, 509 bp, Zea mays
  Peptide Sequence Number=SeqID_46306
actgcccccgcttacacccgcccgacctccggaatcctcgccgcagcaaaccgcccgccaaccccgcccccgcctccaccgcccgacgtccggaatactcgccgccgcaaaccgcccgccctaccgaccgccgtcgtgatcctcaagcccgcaaatccttccgtgaatcgcgccgcgaccatcgcaatccattcgccgcgtcccccaacaatcccgagcccccgctgcaatccgtccgtcgcgtcgcgcctgccgcatactccgccgcgaaccaaaatccccgagctcaatcccccgcgtgcggccccgagctcaacccgccgtcgcaagcacgagggaaaacgcagatggcccccgccggggggcagcagcagcccatgaagcggccccgccccaccgaattctcaggtccgcctgccccttccccacccgccctcgatctgcgctgttgttcgcggttgctgcctgtctggtgcccgctcgatctgtccgtggccgctggcgcttag

SEQ ID NO: 4528 - DNA, 1479 bp, Zea mays
  Peptide Sequence Number=SeqID_46307
atggcggcggcgagctatgatcggttggccgtcgcggcgtccgctgtggtggtggcggcggtggcgctggcggtcgctgggctgccggcggctggagcgctcggggtgaactggggcacgatggcgacgcaccagctgccgccggccaccgtggtgcggatgctggaggacaacggcatcaggaaggtgaagcttttcgacgccgacgccggccccatggacgcgctcgccggcaccagcgtggaggtcatggtggccatccccaacaacatgctcgacatgatgacggactacggcacggccagggactgggtgcgccagaacgtcagccgctataacttcgacggcggcgtgaacatcaagtacgtagctgtcgggaatgagcccttcctgtcgtctttcaacggcacgttcctgaacgtcacgttgcccgccctgcagaacatccagcgcgcgctgaacgacgccggcttcggcgacaccatcaaggcgacggtgccgctgaacgccgacgtgtacaactcgcccaaggacaacctggtgccgtcggcggggcggttccggcccgacatcgccggcctcatgacggagatcgtgcagttcctgaaccagagcggcgcgcccttcaccgtcaacatctacccgttcctgagcctctacgacaacgacgacttcccgctggactacgccttcttcgacggcacgggcagccccgtcgtggacaacggcatccagtacaccaacgtgttcgacgccaacttcgacacgctcgtgtccgcgctggccgcggcgggcgtcggcggcctccccgtcgtggtcggcgaggtcgggtggccgaccgacggcgacaagcacgccacggccgcgttcgcgcagaagttctacgcgggcctgctgcggaagctggcggccagcgccggcacgccgctgcgcccgggccagtacatcgaggtctacctgttcagcctcatcgacgaggacgccaagagcgtggcgccgggcaacttcgagcgccactggggcatcatgcgctacgacggccagcccaagtacgccatggacctgtctgggcagggccggaacacggcgctcgtggcggcgcggggggtccagtacctgccccgccagtggtgcgtcgtcaaccccaacgcgcaggacacgagcaagatcggcgacagcgtcacctacgcctgcaccttctccgactgcacctcgctcggctacggctcctcgtgcaacggcctggacgccgccggcaacgcgtcctacgccttcaacatgtacttccaggtgcagaaccaggtggagggcagctgctacttccagggcctcgccgtgcccacgtcgcagaacccgtccacggacgcctgcaacttcaccatacagatcactccgtcggcagcggggagacgacgcgccgccgccgcgacagctctgctcctcgtggttcttcttgcggccgtgcatgtcgcgccataa

SEQ ID NO: 4529 - DNA, 1386 bp, Zea mays
  Peptide Sequence Number=SeqID_46308
atggcgtgtgctgcagtttggtttaagctgcggaatcaatcagtctttcatggagttgttctacgtagagaccccccgttggctattcctagggaacagacacattcctccaaaaagttcagaccatgcctcaccgttatttctgcaagcacaactacattgcggcatcctggatatatgaacaatgatctggttggccttcttgcctccctgatccccactccaaggtgtcattttttgatgacaggctatactccactgactgttgagcgccaggttaacatgatacgcaaaacaacagtattggatgttatgagaagacttctgcagacaaagaatgtaatggtgtcatcatatgctcgaacaaaagaagccagccaggctaaatatatctccatattgaacatcattcaaggggaagtggaccctacacagactttcccaccacacggccgccgtccaggacttccccatcgcgatgtcgtcgtcgtcctggacttcgccaccactatgtcagtagccatgaatggagatgagcaagtcgagatggattggagtttgaatcagggaaacacaatagattcatcagttacattaccagagcaagcacctccactggtagattgggatttaatacaaattcaagaagaaaaagaagaggaaggaataacagaactttgcagtgaagaacaagtttatgcacttttgggtctgtctcgcgaggatgagagggaggaagaaatggctacagactcaaaatcaagagccgatggacccaatgcctctatagttcttgatatagagggtgttgaagatgtacctatggtagtgaatgattatattctacaggagactgtgacggaatatgacaaagataatcccagtctggatgtaggcaccatatatccttgtatggaagattttcgattggctgtgaggcaatatgcaataaataaagagtttgaattgggtattagggcaacaagcaagtcaaggtatagagggtattgcaaaggtggagattgtccttggtctgtttctggattcaagaagaagggtgaggtggctgttatggtactaacttctaaagtgaggtgccctaactgtggagagttaggacacaggaaaacaagctataaatgcccactaaatggaactaagaaaatcctattcggctaccaaggttttagagccatttttactgctcctgtgacatcgagcaagctctcacaaaatgctgatgtctttgttcgattgtctggcattaaaatttataagtccgtgcggcggaggatagacaacatgcaccagaggttgaggctcttggagcaacatatggagacgctgctgaggcccaaattggcaaaactactgacaatgtgctga

SEQ ID NO: 4530 - DNA, 399 bp, Zea mays
  Peptide Sequence Number=SeqID_46309
atggatcacatcgtcgggggcaagttcaagctcaggaagaagatcaggagtgaatcatttggggaaatttacctcgccgtgaacgtgcagaatggcgaggaagtggctgtcaaactggaatcagtcacatcacgccatccacaacttcactatgaatcaaaactatacatgcttttgcagggtggaactgggattccacatcttaagtggttcggggtggaggggcagtacaatgtcatggtaactctagtggacagaatcatagctctgttagcactattttatcaagaaatggtgtacttgttaggctcttgttcagttagtgtgaaccatgtgcttctgaatcctggatggatgttttattttagttcaaggtttctagaggtggacgacaagtag

SEQ ID NO: 4531 - DNA, 456 bp, Zea mays
  Peptide Sequence Number=SeqID_46310
atgggtgcaaaattaccacatatccaaacccaccacgggtacatagaggatagccatcggaggtcggcgcagacattcaggaggtcgggctcgtcggggctggtctgggacgagcgcttcatcaccgagggcgccggcgcggcggcgccacgccagcagccggagctgcggcactcgaggagcgtcggcagcgtcgccatgctgctgctcggcggcgaggcagatcgcgacgacaagaggaagctgacgctggccaagccgaacctgaagggccaccacaagaagcaggaggagctggtgcctggcaggaaggcgtttcggaccagggacgtagccccggccgccgagccaccgtcgccgagggtgctcgccatctgctgcgcgccctgctccatcttccgggatgccggcgccggtggctcgtcgtctctggcgcggcgggccaagaagcggtag

SEQ ID NO: 4532 - DNA, 483 bp, Zea mays
  Peptide Sequence Number=SeqID_46311
atggagagcgacgatgagataaggagagtgccggagctgggcctggagttgccgggagcctccacgtcgggcagggaggctggccctggcgctgcgggcgcagaccgcgcccttgcccagtcgtccacggcgcaggccagcgcgcgccgccgcgtccgcagccacgccgacaaggagcacaagcgcctcaaaaggctggggggcggggacatgcatgcaatcgcaaggcatgggccaggctgcaagtgggtgcggttactgaggaacagggtgtcagctcaacaggctagagagaggaagaaggcttatttaactgatctggaggtgaaggtgagagatctggagaagaagaactcggagatggaagagaggctctccaccctccagaacgagaaccagatgctccgacagatactgaagaacaccgctgtaaacagaagaggttcaggaagcactgctagtggagagggccacggccaatag

SEQ ID NO: 4533 - DNA, 117 bp, Zea mays
  Peptide Sequence Number=SeqID_46312
atgccgggtcgccgtttggccatctatatgctgagtctgacaaagccgaccatggttgtatttgcccggtttctcaagcgttcattatctctgaaagttcaaagagtccagacgtga

SEQ ID NO: 4534 - DNA, 468 bp, Zea mays
  Peptide Sequence Number=SeqID_46313
atgatggtcctcgccttagttgtggcgacctcgttcgccatcctgcttcttttctctctcccctcatgcctccgccttcgcgccaccccattctcagtagagggcctgggggcaggcgcctcctccccatattcgtccgacactagccctgacatagacctgcacattggctattgcatttccatgacgacgtttcacatcatgcgcgcaccatcgttttcgctgtcgtcagacgtcctgtttgtcttcccggccttctctctattcttcctccccaacctgctgcccctccacggtcgcagccgtgagctgatcgacgctcgtcgactcgagtacggggcgagtcagtcttgttcctggcctttctccgtgtgtgccgccgaggaggacatggtggcgcctgctacgcttagttatcttagcgatgaggagtacaggtttgagatactggacaaccaaggcctgtag

SEQ ID NO: 4535 - DNA, 495 bp, Zea mays
  Peptide Sequence Number=SeqID_46314
atggctgccatggctgtggcacggccgcacgccgcgagcagggcccgaggatcggtcgcgcgcgtagagaacacgaggggtgagggcatcgcggccaggggaggagcgcggggatggggctacagggacaaggacgagctggacgctgacccaccgcgagccacgtcgctggctggccgtgacgctgcagcgcgcgggggctgttggccgcgctgcgcgctgaggctcaggcgggctggccaggactggccaccgcgccgcgccggctgccacacgcgccgagctcgtgcgcacccgcgccgtgacgccgcacccagggacgcagcgcgccacggcctcctggtggaccaagctatagcacgcgcaggggcatcggggctgctcgaccaatggaaacggagaagagtgcacagggaagggaacacacctggtaaccgctgccctccacgcctgcgatctggatctgggcgagacaagggtttatgcggcgtctag

SEQ ID NO: 4536 - DNA, 510 bp, Zea mays
  Peptide Sequence Number=SeqID_46315
atgaatcccaatgaagataaagtggatgaggtcaacgacaagattccaaccccgacagtggtgaaaagaaaagatgagtcacatggatatctgctgaatggaatgaagaacgaccagaggactagaaaaatgtttgggtacaagattaaaccacctcaaccgcaagcagaagcgccagagctcatgaatacccaaataggagtatcatatcaagctcagctgttcaacatgcaggcaaccgaccaaccatcatctgctggcaatcaagcaaagctgactcgcagagaggtcaaagcaagaggtgcctgtttctactgcaaggaagaagggcacttcatttgccaatgccccaagaagcgtttagatcggcttgcgaagaaggccttcaagcagaactcaaccagtgatgatctagaagaaattgtcttcactcgctcaaagtacaaattaattcaatcaagcgatgagagtggcaggttgctagacgtacgcgtcgagccgagagagtga

SEQ ID NO: 4537 - DNA, 495 bp, Zea mays
  Peptide Sequence Number=SeqID_46316
atggctgccatggctgtggcacggccgcacgccgcgagcagggcccgaggatcggtcgcgcgcgtagagaacacgaggggtgagggcaccgcggccaggggaggagcgcggggatggggctacagggacaaggacgagctggacgctgacccaccgcgagccacgtcgctggctggccgtgacgctgctgcgcgcgggggctgttggccgcgctgcgtgctgaggcccaggcgggctggccaggactggccaccgcgccgcgccggctgccacacgcgccgagctcgtgcgtacccgcgccgtgacgccgcacccggggacgcagcgcgccacggcctcctggtggaccaagctatagcacgcgcaggggcatcggggctgctcgaccaatggaaacggagaagagtgcacggggaagggaacacacctggtaaccgctgccctccacgcctgcgatctggatctgggcgagacaagggtttatgcggcgtctag

SEQ ID NO: 4538 - DNA, 903 bp, Zea mays
  Peptide Sequence Number=SeqID_46317
atggtccacgacgaactcggctacaggacgaagctgaccgcctgggcccacaacacagtgaccgggaaagagctcgtgcatggaaaggggtggctgactgccagggcccgcccgtcggtgattaccgcgcgtgtgatgggggaacgatggcttatgacatggtggggcccatatggcggcgagagtactgcagtcagtggaagcacgagtgtgagactggcgccaagggcccacgcgctagaacgcacccccagagagccacagcacgcacgcccaaggccggcctcgggcgtcataggaaactccgcctcgcccgaccctagggctcggactcgggctcagccccggaagacggcgaactccgctccgcctgacccagggcccggactcgagctcagccccggaagacggcgaactccgctccgcccgacccagggcccggactcgggctcagccccagaagacggcgaactcccctccgcccgacccagggctcggactcgggctcagccccggaaaacggcgaactccgctccgccggacccagggctcggactcgggctcagccctggaagacggcgaactccgctccgcccgacccagggctcggactcgggctcagccccggaagacggcgaactccgctccgcccgacccagggctcgaactcgggctcagccccggaagacggcgaactccgcctcgcccgaccccagggctcggacatgggctctgccccggaagacgacgaactccgcctcgcccgaccccagggctcggacgcagccctggcctcagccgacggtctccgcctcgcccaacccaggggctcggactcgactacggccacggaagacagactcgacctcgacctcggaggagcctccaccttgcccaacctag

SEQ ID NO: 4539 - DNA, 408 bp, Zea mays
  Peptide Sequence Number=SeqID_46318
atgggcgatgagataggctgtggtgaccaaggatcccaggtgcgcgcgagacccacggggctgcggaggaacacggcgaaaatccagtatggtccacgacgaactcggctacaggacgaagctgaccgcctgggcccgcaacacagtgaccaggaaagagctcgtgcatggaaaggggtggctgactgccagggcctgctcgtcggtgattaccgcgcgtgtgatgggggaacggtggcttatgacatggtgggggccatatggcggcgaaagtactgcagtcagtggaagcacgagtgtgagactgacgccaagggcccacgcgctagaacacacccccagagagccacggcacgcacgcggtgttcacatatgatgatgcataaaggttcaatcccacacatataa

SEQ ID NO: 4540 - DNA, 480 bp, Zea mays
  Peptide Sequence Number=SeqID_46319
atggttggcaccacatctgatctccttttcctggtgttctctccttttgatccagacctgaaaagagcgatgcaaaaaccatctacacagcttaagaaaccgtcgagtggaatggtggctgataccaccaccgcaggagaactgtggaaggagccggcaccggcaccggcaccggcagtgctccctcccctccagctccagcggcacaaagtgaggcggccactcttacagcaggatctcccccacctgatcgcctccaatcttaccaaaaagcgcgatgtccgtccggtcaccgtcgttgaaaaccagctcgacgccgttctcagggggggccctccggggaaacgctgggttgtggatgccatgattgggggctttgtagcatcattgtaccttcccaagcttgtagattccaagctaatcatcatcatcatcatcatcattcatcaatggcgacggtggtggattcggctgctctag

SEQ ID NO: 4541 - DNA, 480 bp, Zea mays
  Peptide Sequence Number=SeqID_46320
atgtggtccaaaatgttaaataaaagaaaagcaatccattcatatctagtgcataaggttcaacacaaaccaataaatattcaagttagggacccaattcaaaaggagcaaaaaggacttgagtgtgctgtggactggcgcaccggattgtccggtgtgccaccggacagtgtccggtgcactaggaccgtacaagggtcaaccagccactctcgggaaaacgcaggcgagctccgctataattcaccggactgtccgcgctacagtgccggggcagaagtcagagcagtggtcagaggggcaccagactgttcggtgccacaagaagacaaaggcgccaacgatcaactgctccagaaccctaacggttgggtgacgtggcggcgcagcggacagcctacaatgccggtcaggtggcgcatcggactgtctggtgcgctcatcgacagcagcctccccaacggcgactttggtggttga

SEQ ID NO: 4542 - DNA, 150 bp, Zea mays
  Peptide Sequence Number=SeqID_46321
atgacgatgctgactccctcgctgctccagctgcttggccgtccctcgcttccccttcgttcgcacagccctgctcctgcactgctgaccatgatattaagctgtggcccttcaaggtcattcctgggcccgttgttgaatgctaattaa

SEQ ID NO: 4543 - DNA, 295 bp, Zea mays
  Peptide Sequence Number=SeqID_46322
gtacaggaggaagggcagggtggtctcggcagaggtgctgcgtggacggcgagggcgctgcgcgcggggcgcaggagctcgggcgtccagcacgcgggcgcggtcggcttccgtggctgcgcgtcgatgcttgagcttggtcgcggcgtcggctcggttggcgtgcagaggcggctcgggggcgggtgctcggcgaaatcgcgcgcgcgctgcgagctaggcgcgctcggcagcggggtcgcgcggcacggggctgggcgcgcggctcgcgcagcttcggcgtcctggcgcgcgg

SEQ ID NO: 4544 - DNA, 444 bp, Zea mays
  Peptide Sequence Number=SeqID_46323
atggctaacgcgctgcgaagaaatcggagttgggagcggcgaatgagcagcaacgagctttgggggcacgtgcggcaggggaataggggcacgatggcgacctccaggaacacgggcatggtggataagagaaatggcggtgcggcggagaaacgatggcacgacgaagagacaccgcggcaacgaaaggagacagcgtggggaaagaggaaaggcattgacaagagacaatcaggcaaggagcaacaagtggttatgcaggtgacaccatcgttaggccacaggttggtgtcaggcgatgggaggcgccgcagagccgctacacaggtgggcgacaggtggcaccgcgagcccatacagtcaccgagcgcgcaacaggcgacaagtgatagtcgacaggcaatgccgcgacaaatgatgattgaatctcgatggttatgttaa

SEQ ID NO: 4545 - DNA, 540 bp, Zea mays
  Peptide Sequence Number=SeqID_46324
atgtggatgagggggttcgctacgagcggcgcggcggaggggagcattgtccggaggcacgcggcgtgcagcatcaggcagagcccggcgcgcgcgcgggcgccggccgcgcagcacctgaagacgaagtggaaggtgaaggcgcccgtgcggacgccccccgctgcgcatgcggcggaggaggaggacgggatggtctgcgccggcggaggcctggaggcaggcgcggagggcggtgtcgaagaggaaagtggtggagtgcggcaatcggtcgaacaggctgagcacgtagcgcaggtggcgcggggccgagatggtgttggtgagcgagctgaggaggtgctcggcggaaggacggtgagcaatgcggccggacgtggtaaggagggcgtggagctgggacgcttgccgcacggagcgaggggttggccatggagacgccggcatggcacggccgcctgcagccgcagcggaggacaggacagcgcgtgtgcggtgccggtgtcacggtcacggggatccaagtttgagacagtatag

SEQ ID NO: 4546 - DNA, 1995 bp, Zea mays
  Peptide Sequence Number=SeqID_46325
atggggctcacggacgacgcccgccgggcgttcgacgagatacccgcaaaggacgcggttgtgtgggccacggtgatcggcgggctggtcaggtgggggctgctcgatgaagcgcggaggctcctcgtgcaggcaccggagaggaacgtggtctcatggactagtttgattgccgggtactcgcgtgctggtcggcctgctgatgccgtctattgcttcaactgcatgctttcagatggtgtcgcgccggatgaagttgcggtgattggcgcgctctcggcatgttcgaagctcaagaatttggatcttggtcgcttgctgcacttgctggttgggcagaagaggatccggatgactgacaatcttgtcgttgcgctcatcgacatgtatgccaaatgtggcgacattgcccaagcacaggcggtctttgatgctgtgggaaggggccaaaagcctgagccatggaatgctatcattgacgggtactgcaagcttggccatgttgatgtcgcaaggtctctgtttgatcaaatgggtgcccgcgacgtcatcacattcaactcgatgatcactggatacatccacagtggccggcttagagacgcattacagttgttcatgcagatgaggagacacggcatgcgtgctgacaattttaccgtggtgagccttctcactgcttgtgcgagcttaggtgcactgccacatggcagggctttgcacgcttcaatcgaacagaggatagtagaggaagatgtttaccttgggactgcacttttggacatgtacatgaaatgtgggagggtggatgaggcaaccgctgtgttccatcgcatgggcgaaagagatgtccacacttggactgccatgatcgcaggtcttgcgttcaatgggatgggtaaggatgctctggagtctttctgccagatgaagcgtgatggttttcagcccacgtcagttacctacattgctgttctgactgcgtgcagccactcaagtctgctcgacgaaggtcggctgcacttcaacgagatgagatcgttgcataaattacaccctcaggttgagcattatggctgcatgatagatttgctcgctcgcagcgggcttctggatgaagctatgcatcttgttcagaccatgccaatgcaaccaaatgccgtcatatggggatccatcttgagtgcctgcagagtccacaaaaacattgacctagcccgacatgccgcggagcatcttctcaagttagcccctgaggaggatgccgtctatgtccagttgtacaacatatacatagactctagacagtgggcagatgcaaaaagagtaaggatgttgatggaagaacggggagttaagaagacggcaggttacagctcgatcactgtggctgggcaggttcacaagttcgtcgccaatgaccaatcgcatccttggacgttagagatcatggcgatgatggaggagatcgcatgcaggctgaagtctgtgggttattctccagtcacgtcaaggatagcagttgacgttgacgaggaagagaaagaacaggcacttttagcacacagtgagaagatagccattgcttttggtctcatcagtcttccaccgagcttaccgatccatatcgtgaagaacctgagagcggaaccaaagccggcccacgctgctcgcctgctccggcgaccgccctccgcctccgccctgagtgacatcccctgcgaccagccgctcgccggcggagtcggcggctatggcgacgacggccgcggggtacggctgttgcttggcggggctaccgccctttccgttgttgcctgggatcctctcgacccgcctgcgccgggagccttctcctcctcgcgtggcccttgtggcctcctccccgaagctcagggcgccggcaccgcggttgagagtttcgtgcggtccaaggaggctcgcttcctcctctggcaaggccaattcggacgcggtgccgtcgccaacggttag

SEQ ID NO: 4547 - DNA, 1056 bp, Zea mays
  Peptide Sequence Number=SeqID_46326
atggcgaccgaggaggtactccataaggtacttcttgtggaagaaccccgctttggaaagaaccatgctgtccagagtcttatattgcgctgccttcagatgtacatggaccagaaagaagtggtcgatgccctctcccaccactcgaagatagagccctgcattactgaacttgtttggcgacaacttgagcatcaaaatcctctgtttttcaaggcgtactatatgagactaatgcttaagaatcaaataatggtcttcaacaagcttcttcaggatcagtttgaggttatcaataaagaattttcttcagggatcccttctatgtcgcttcctaatggctctaactccaacctattgaagcaaaatccatgctttttgccagagactgctcctggatctgcaatgccagatggtataatgcacaatggaagttcgcgtggtataataaatggcacaccatctggcgatcaattgctcaatgctagtaaagacttgcatggccttcataatggaatagatgcttcgactagtctgcagtcagaccagaacgcagctgctgtgctgtatggtgtagacaacgagacaagtgcaacgataaagaccgagtcttgctattcgagcaatgctgattttgctttctgtgggaatactttcctggaatcgtgccagtcaataggcgatgcatctggtggtggatccttcagtagctcagagctgaacgggcaaccactaaacgattcaattctggatatggaatcatcgtcatttagcttcttgaaccaaatgccccaaagcttcatctttccggacttgggagacgatttcaaccaaagtgcagagataacacaatttctcaccccggaaacaaatttctccgattcgacagggggagaccatacagtggcgacttctggtggacaaacatgcattctggtatttactggtgttcttcctcagcaggttgagcggggtcatgcacagcgcaccaaccatttgtacatacgctcatgggcagtcaaacctgcactgatgaagagcttgaggaccttttga

SEQ ID NO: 4548 - DNA, 933 bp, Zea mays
  Peptide Sequence Number=SeqID_46327
atggccaagctgctgctccagctgaaggcggcggcggacaggaggcacggccccggccccggccggcgccacccgctcgcgccccgccacgcggccgcgtccgccaccagattcgtgcccgcctgcctcgccctcgccgccgccgccaccacgctcgtcgcgctggcgctcacgctgcagaatcgcggcctcggccccgccgacccctctccctcctccgtctcgccacgcggcggcggcttcgcggtggttgtcaacacgtggaggcggcccgcgctgctgcggaggtccgtggcgcactacgcggcctgcgggggcgtggacgccgtccacgtggtgtggagcgagccgcggccgccgccggaacccctgcgccggggcgtcctcgggctcggcggcgcccggcggcgcgtgcggttcgagatcaacgcgggcgacagcctcaacaacaggttcaggcccatccgggcgctcgagtcggacgccgtcttctccgtcgacgacgacctcatcgtcccctgctccgcgctgcgcttcgccttctccgtctggcggaccgcgccctccgccatggtcggcttcgtgccgcggatgcactggcctaccgacccgagaagcactgaagatgcataccgatacggaagctggtggtcagtttggtggacagggacatacagcatggttctttccaaagcggggttcttccacaagaagtacctggaaatgtacaccaaccagatgccaccgtccattcgcagatatgtggatgagaacaggaactgtgaggacatcgccatggcttttcttgttgcaaatgctactggagccccgcctatatgggtgcaagctggtaccttcctcacatccctgtcccttgatatactaccgcaggaaggatatttgagattggatcgagcggcatcagcagcctga

SEQ ID NO: 4549 - DNA, 180 bp, Zea mays
  Peptide Sequence Number=SeqID_46328
atggcggcggcgcggatgcagttggggacttgggggtgggcagccccggcccggtggagactgggaggccgcctagtccgggctaggagcgaccggtggagggaaggctcactctgcaacgtactggtacagtctacaggtctggtgaagtgcacaggttcgatgaatttgtcatgctag

SEQ ID NO: 4550 - DNA, 672 bp, Zea mays
  Peptide Sequence Number=SeqID_46329
atgaaggtatgtccttcaagaccttcgtctgaagatcgttatatccaaaaggagataatgtttcagaggacgaagcggccaagtccggcctcgggcgccataggaaactccgcctcgcccgaccccagggctcggactcgggctcggctccggaagacgacaaactccgcctcgcccgaccctagggctcggactcggcctcggctccgaaagacaacgaactccgccttgcctgaccccagggctcggactcgagctcggccccggaagacgacgaactccgcctcgcccgaccccagggctcggactcgggcacgaccctggaagacgatgaactccgcctcgcctgaccctagggctcagactcagccttgtcctcaggcgatggtctctgcctcgcccgacccggggctcagactcgacctcaacctcggaagacagactcgacctcgacctcggaggagccaccgcctcgcccgacccagggctcggaccgaccatgtcatagggggggccatcattaccctatccctagctagctcaggctacggggaacaagaccggcgtcccatctggctcgccccgggaccccccggggtcgaaacgccgacagttggcgcgccaggtaggggcctgctgcgtgttgacgaacagcttcccgtcaagctctag

SEQ ID NO: 4551 - DNA, 936 bp, Zea mays
  Peptide Sequence Number=SeqID_46330
atgagtgacaccacccctgcggccacagcactgaaccactggaaccgctcgatccagctcgccgccgcgtcgggttcttacggccactgcctccgcctctacgcgggaccgctcctcgccgcgggcctccgcggtgacgcctccactttcccttccctcgccaaatcctgcgccgcgctgcgcctgccggggctcggccgtgccgtccacgccctcgcattcctctcgggcgctgccgtttctcgcgacgccttcgtgcgcacctctctcgtcgacatgtacgccaagtgcggcaggcttcccgacgcgcaccgcctgttcgacgaaacgccgtgctcgagccggacgctggtcgcctggaactgcatgatctcggcgtacggacggagctctcaggtcgaggaggccgtcggggtgttcaacgctatgcggcgcgcggaggtcaggcccagcgggagcacggtcgtcggcctcctgtccgggtgtgcggactcggtgtccgcgaggtaccctggggtgtccgtctatgggctcaccatcaaatcgggccttgacgcggatttgcttgtctcgaactcggtgctcaccatgcttgtccgtggtggccagctggactctgcaaggctgcttttcgatcgtgtggagaacaagtccgtggttacttggagcgccatggcatctgcttatttgcagacaggggactggatggaagtgtttgcactgttcagcagcatgcgagagacagagcaacctatggattcagtcgtgcttgccaatctaatcacggccgctatgctgttcggaaacaacttggtggctaaaggcgtgcacgcccttgcaatcaagtggaagaaggccagaagttataggacgctaataagcaagcaaggattagtcaagaagcctggatggagttacatcgagctgggtggctag

SEQ ID NO: 4552 - DNA, 756 bp, Zea mays
  Peptide Sequence Number=SeqID_46331
atgaacagtgacaccatactgttcgcgctgacttgtattcactcacacgtcatgcttggacttttaccttctgtaaagccgaagcatttgagaacaagtccccaacattggcgcccacctccggtgaactcattcgaccaccttcggcaagctgtgaccttcgtcatgccgccgaagaaagcttcagggctaggggctgcactgcagccactggatgtccaaaggaagaaggagaagatgcttcgtcttgctgatcttcagaggaagatcgacgaagccgctgaggaaatagctacaggctacaccatggccttcatcatacaagccaccccagcttcccatgtgtcggcgtttcgaacccgggggggtctctggaccgacgagcgtaaggaaaggatccaggtgtacaatgggggtgtagcagccgaggtcgagtccgagcccctgggtcgggcgaggcggagaccgtcggttgatgccagggctgagtccgagccctggggtcaggcgaagcggagttcgtcgtccttcggggctgagcccgagtccgagccctggggtcaggcgaagcggagttcgtcgtcttccggggctgcgcccgagtccgagccctggggtcgggtgaagcggagttcgtcgtcttccggagctgagcccgagtccgagccctggggtcgggcgaagcggagtttgtcgtcttccggggctgagcccgagtccgagccctgcggtcgggcgaagcggagtttcccatag

SEQ ID NO: 4553 - DNA, 456 bp, Zea mays
  Peptide Sequence Number=SeqID_46332
atgcaggcggcatgcaaccgcaccaagggggcgcaccctttcgacttcgacgcgtccagcatggaggcccaagcccacacgtcatgtaaccggcgcgccagttactacgtgcgagaaactgcaccgccacttgcgtcagtactgtgccttctcgactgcggaaccggagccgcgactcgaggcgaccctgcgcatggcccaacagtgccaaccgagcacatcggtcacggggaccgggaaaggggatactccgaaagggatccttctccgcgaaggaagcgggccctgagccctcctactgatcagaggttcgaaggctggcccctcggaagggttcgacagccgcctcagagcactcgggctccgcgcccactactagtcagaggttcaaaggttggcccctcggaagggttcgacagccacctcaggccactcgggctccgcacccactactga

SEQ ID NO: 4554 - DNA, 216 bp, Zea mays
  Peptide Sequence Number=SeqID_46333
atggagaactacagtgggtccttacctcgaggccaaagacacaccggcagcgaacgatttgagtggcaggccaattcctctctctcccttccatctctgcacgccatggctgctggattggcacaggggttcgcggcaacctatatatgcgtcagagggggcgagtccgagctgagagggtcggttgcgggagaaaccaaggtcggcatgtgttga

SEQ ID NO: 4555 - DNA, 523 bp, Zea mays
  Peptide Sequence Number=SeqID_46334
caagcagaggagggcgtccagcaagcagaggagggcggcggcgcttacagcagcagcaagcagaggagggcggcgctcagagcagcagcaagcagaggagggcggcagcgctcagagcagcagcaagcagaggagggcggcggcgctcacagcagcagcaagcagaggagggcggcgctcagagcagcagcaagcagaggagggcggcagcgctcagagcagcagcaagcagagaagggcggcgacgctcacagcagcagcaagcagaggagggcggcgctcacagcagcagcaagcagaggagggcggcggcgctcagagcagcagcaagcaggggagggcggcggcgctcagagcagttagcagcaagcagatgaagcggtggcgctcaactccagctaggttaaagactgtaacggcattggcacagtttcaggcttttcagcccccctggtgggccggcccaaatagaaaagagcagcctggagcccaaaacaaagcacctagtcgagaacaaccctaa

SEQ ID NO: 4556 - DNA, 402 bp, Zea mays
  Peptide Sequence Number=SeqID_46335
atggagacaatggaaacaatccagttgttggagggggtggctaagaactcgaagaatttaaagttggtggagaaccacgaaaacgagaccagggttgccacttatttgtccggaaaggttaatgcaatgctgtggcttgtcttgcttttagtcaatggtatgcttggttgttctgtcgtagttaaagaccgtgttgcaataagtgctagttctccaagggctatgaagaggggagtttcagatagtccaaaaacaccagggtacatagcaaatacgaaggttcttaggaaggaacagaagtgcgcaggccatttcgcgcaccatgaagcacccgcgatgagcagacgacaaccttggaacaaaacgaacctagagttcgaaggcggaccacactgcggatga

SEQ ID NO: 4557 - DNA, 741 bp, Zea mays
  Peptide Sequence Number=SeqID_46336
atggattcctcagccgcagatgaccctatggcagatgaagccggagtagaagatgccttcacacaggagatcaatcattcgtacgtccctagataccatgtgttgagttggatggaaactgtggaggggatggtggccggtgtggcgtcgcttccgccggtgtatttgatactgaacagagatcttcttgagacgggatggggatggaagaggctggtgccctacagacctggttatgttgagttgcatgtgttcaagaaataccttggggactatttcgaccataatcgtgaagcttttctttgtgccgagcagaagcctgatccatttggatggattgttgctgaaaagagtgccctgattgctgcagccaaatcgttgccaattaacttgcaccattgcaaaaacaatcaaaatgctttccagtgcctcaagatggagaaggcacttctcaggtactgtgctagctttctcactcctgacgacaaaaggctgatcctccggatcaaggaccaggcaaagcaaatgatccaatcagagggtgatcaatctttgattgtaactatatgcttggagtgtattgcgaaggaggccgagttaatgtacaattatttgccttgtgattttgacaccaccgaagaagtcgccgtctgcaataaggttcggcggtctgccttgaatcttatgctctacaaaggttctgaatctgctgttgctgctggtgccatgatgggtcagtga

SEQ ID NO: 4558 - DNA, 258 bp, Zea mays
  Peptide Sequence Number=SeqID_46337
atggccatcacctttaacaccgcgattgtcttcaacgtcaaggaggttttccacttcggatccctctcctacatcaccgaccgaaggggaatcctgcaccgcgtcgtggacgcagggagaggagcccctacaacggtgccaggaattatttctgggctattcatgggtggaggtttatgttggtcacaattgttcctacctactgtgtcacatgggacaacagtcttaggtgagctgatcatcatgatggatgagtag

SEQ ID NO: 4559 - DNA, 1194 bp, Zea mays
  Peptide Sequence Number=SeqID_46338
atggggccgagggcctcaaggatttttgttgaggagttaatggggacgcgtgtgggtcctggggaggtgatgtcttcactcgagctctgggaaacatcttcgcacatgttgaaggttaccgggggtcgatggcataggaaggaccctataccccgggtcaccgacgatgactattttatgtctcgtttggctcatgagatgagaatctttccttatgggacaaatattagtgttgttatgtcaatagtgatggagaaagattgccaagatgcgcagcagaagaagcggaatgcccctcttcggctggtggacccacgccgagatgcaaatgtggcgcggcctagtgcgaagggtatctctccgcctgcgacgatgcctccccccgtggtgtcggccgctacgaaactgcccttgccgccgcgtgtgactgagactatggtgtcggggaccggggggacgagccaggagttgttagtggacgactacctggtgggcagagtcaccatgtttgacgcccagactgggctgccgtctgctggggcagaggctgggcaactggcggtggtaccatctacggtgcccgtcggccaagtgggtgcagcaaagggtgacacagggacttcgccggacccatggccaaaattttgcatcgccgctgatggcggaggcgaacttgcctcgacggctgccgctgctagcgtagctgcgtctgtcgtgtggcagttgcgatacgtgacagcattcgccgaccaggttgcttcgggggcgctgacctcacaactgatttctaagaggaaacagcttgagggtagggttgagcaccttcggacgcagcatgccaaagcaatcagggacaagtcagcagccgaaaataagagttgtaaccttctcaacaaggtgacggcgcttgagaaggagaaagaggaccttagccgccaacttaatgatgaaaaggaggatgcggagaacgcccgcgcggaggcccaggctgcccgcaagcgtgttgccgacttggagctggaattgaagaatatgtgcggccaccacgagaagatggagtctgccacccgtgctggggtggattgggcgcacacacctttgtggaggcataccatgacctcggcgcgcagactatccccttcgacaaatcagggaggaggtggggacccgcttcttggggtggctacaggatga

SEQ ID NO: 4560 - DNA, 1266 bp, Zea mays
  Peptide Sequence Number=SeqID_46339
atgacctgggatgacatatatggtgatgacattgcagatgtgatgactgtacctacatctaccatgtccttagaatctgcttttagtttggctggcagggtgatcgaggagcgtcatcaacggcttacaagtgacatggtggaggtcttatcctgcatcaaagattggcctaatacactatcgtgccgtacttggactgcgaccaagtacttggactgcgcccaaggtggtcgtgctggcccgacacgagatggccagcgtgttgtgccgggtcgtgcccaaatcgtgtcgggcgatatatttggatattgttccgaaggagccctacacaggggtggtgagcctcctgacgttggaagtgtcggtacccgggactccgcttatgggccgtcacagagcctgactcgtatgggcctacttgccattgatcggcccagccatttaatggtcctggaactctcgaagggcttccattggcaagggtttagggcgcagcagagtctggtgtctcttgctccgaccccgttggcgactgagacgcgatccccttctcctgcactgccgtcctccgtcgctgcgatgcctcggtattactgtgactactgcgacacctacctgacccatgactcgccatctgtccggaaacaacataatgctggatacaaacacaaggcgaatgttcgaacctactatcagcaatttgaggagcagcaaactcaaagtttaattgatcaaagaatcaaggagcatcttggacaagctgcagctttccaagcaggtgcccctttcaaccaacatctgcttgcattcccaggagctatggcccgccctcgtcttccaattctgccaacccctggcatgcctcatgggtttcctcaagcacctggcgcaccattgatgccaggaattaggcccccgattttaccagctccaggttatcctggtcctccaccaaccatgcagcaaccaggcgccccacctgggtccatgccacaaccgggcgctccacctggttccatgccacaaccaggcgctccacctggttccatgccaatgcagatggccccactcccaaggcctccaacgctaccgcctccaacatctggagtcccaggtgctcccattcctaacagtggagcacctccagccatttaccaagcaaatccacaagcatctgcaggtccaacttctggtgctcctccagctccaccgactgctccacagcctgcgttctcctatgctcccccatcagaggggaaccactga

SEQ ID NO: 4561 - DNA, 1191 bp, Zea mays
  Peptide Sequence Number=SeqID_46340
atgcgtaatcccattatgttttatgaaaatctcatcaagcaacaagagcgtttttttcaaattgatgacttttatggcatgggagggacatgggtcgcattacactatgatgacgtgattactattctgaaagattctcgttttatcaaagatttacggaaattcacatcaccccatgataagcaacacccaaattcgggaaatacagctgcgagtaaaatgtttgactggttgatgaatatgccgaatatgcttacggtagatccacctgatcatactcgcctacgccgtctagtctctaaagcctttacaccacgtatgatagaagatcttcgtccccgtattcagcaaattgccgacgaattgttggttgctgtacaggaacacggaaagatggacattatttcagattttgcttacccactacccattattgttatttcagagatgctcgggattcccgccactgatcgaaaccagttccgtgaatggacacaaatactcatgaacgtctctgtgaatcctagtcaaggaaatgcagttacaacaacacttgaaaagtttattcaatacatcgaggtattgcttaacgaaaagcgtctaaatcctgctgctgatttgataagcgagctcgttcaaacaaaagagcaagaagacaggttgagtaataacgagcttctctcgacaatttggctgctcattatcgctggacatgaaacgacagttaatctaatcagtaatggtgtactctcattacttcaacatcctgaacaaatgaatttactaagggaaaatccttccctgattccttccgctgttgatgaactattacgctattccggcccggttatgtttattagccgtcttgctagtgaagatatgacaatacatggaaagaggattcgcaaaggtgatttagttctactctctctaactgctgcaaatattgatccacagaaattttcctatccagaagaattgaatatttcacgggaagagaataatcatttagcctttggagctggtatacatcactgtttgggagctccattagcgcgactagaaggacaaattgcattaggcactttgctacagcggcttcctaacctttgcctagcaatcaaaccggatcaattaaattataatcatagtaaaattcgttctcttgttaatctgccagttgttttctga

SEQ ID NO: 4562 - DNA, 204 bp, Zea mays
  Peptide Sequence Number=SeqID_46341
atgaagccgtggaaggagacttccaggagttccaagactacgacgagttctaggtgtgggttagcggcaacccccagtcggctgcctgtgaaggccgcgtttatctacgtttcttttccgcactttgatttattgctcacgggagaaggagacctcttcagagccgagaagaaaaatgctgattggggacaaaccgtcggctag

SEQ ID NO: 4563 - DNA, 387 bp, Zea mays
  Peptide Sequence Number=SeqID_46342
atgcgcaaagagcatgatgacgtgcggggcgacacaaagtgtcttcaagaagctatgtctcagcttcaggaggaccttcgcggggcaaaacttcaggtcgaggaggctgggtcgatcgtcagggaggtctccgctcgtctggagaaggcaaattcaaagctttcaagggagcatgacatggccagagagggcttcgctgtcggacggagcaatgaggagctggaccgcattgaagaacaagttcgccctcatgctcaggctcggttgatcaagtcagagcgtggtgacttggtcaccatgctctgcttattcagttgtatagatggggacgggatcccggagggagtcgcagccagaagcagattctttggcctggctgatgtgtag

SEQ ID NO: 4564 - DNA, 3003 bp, Zea mays
  Peptide Sequence Number=SeqID_46343
atgaagctggtggtcgaggtcgtcggcgcgcacgacctgccggcgaggcgcggccgcgtgaccccgttcgtacaggtcgcgttcggcggccagcgccacgcgaccggcgtgaggcccggcgaggccaacccgacgtggaacgagacggtcgtgttcgtagtcgacgcgatcgtcggccggctctcggaccgttccatcgacgttggggtctaccaccggcgcgcatccggcggcaagagctgcctcggccgcgtccgcctgttcggcgcggcagtcgctccgtccgccgaggaggccgtcctcctgcgctgcccactcgacaagcctcgcttcttcgctccggcgcgcggtgaggtcgcgctccggctctacttggcgccgtacgggccgccggccactctcgccgccgctgggaatgcctactctagcacgtatgccacaaccttcaacgacaccgcctccatggccggcggcccagagacagtcgtgggaggcgcggacacgcaatcgtcccctgcaccggtgaccaagaagaaagaaccggtgcaggagccggcggtgcatgtcttcaactccatcccaacacagtccagcaccgggtcactgatattcccgccaccgccgccgccgtccatgccaccgcccaccggagccgcaaaggccaccaagaaggcggcgcctggcaccgccggcgacgccaaggcggcggagtatctcatggttgataagctggagttcctgtacgtcaacgtagtgcgcgccaggggcctctccggcactgacctcacgctcggaactgatccgtacgtggaggtccgagtgggcaactactctgcggtgacacgtcatctcgtcaggaatcatgaaccagagtggaaccaggtgttcgccttctccaaggatcagctgcaggcggacaacgtggagttgatcgtcaaggacaagaacctcatcgtgtgggacagcatcgtgggcaaagctgacctgagcatcgccgaggtcccaagcttggctcttcctaatcgtcctctggcccctcaatggtacaggctcaagggtgccaagggacaatggacaggcggcgaggtcaatgtcgccgcctggaaggggtcgcagtccgacgaggccttcgcgggcgcactgcacgccggcgcacacgacctagcactgcccgccgtggccgccacccagacgaagagctactatgcgccacggctgtgctacctccggtgccacgtcatcgccgcgcaagacttggtccatcctgaaagcagccgccgctcccgtatgagcgtgttagcgagggtgcagctcggcgcgcagaggttgtccacgcgggcgtcaccaagcgccaggtgggacgagaacttcttcctcgtcgcagcgtggccgttcgacgagccgctggagatcgccgtcatggacatcgcctcgccggagcgacacgagctgctgggcgaagtcaccttccccaggggaagcatcaaggtgcagcagttcgacaagacgaagttcatgccgccggcgccgttatggtacgacctcaatctgccgcgctcgtccgacggcggcggcgatggtgagggcgatgcccgggacagaggacggcggcacgatttcagtagaaagatacagctgcgcgtctactacgatgcggcataccacgtcctcgacgaggccatgtcgtacgccagcgacttccagccatcggcgaaatcgctacggtcgcaggccatcggtgtcctcgagctcgccgtcttgcgagcaaccggccttcggtcaacgaagcgccccaacggcgggcgagtggccgtcaacgcttactgcgtcgccaagtacgggcacaagtggatccggacacgcacgcttctcgacacggcctcgccgagctggcaggagcagttcacgttcgacgtgttcgacccctgcaccgtgcttaccgtcgccctcttcgataacagccagctctccgacgaggcctcgcggcgtggcgacaccgacgcgccgctgggcaaagtccgcatccgcgtctccacgctggcgtccggccgcacgtacgagcagccctactccctgttcgtggtgcaccccaccgggctcctccggtgcggcgagctccacctcgccgtccggttcacgcacacggcgtggctcaacatgatatcgctctacctccggccaatgctgccgaaccagcacttcgcaaagcccatcccgacacacctcgtcccaaggctccggcggcacgccgcggacgccatcgcgtcccgcctggcgcgagctgagcctccgctgctcccgggcgtcgtgcactacgtcctccgcgacccgtccacgtacccgaggccagacgtatcgcaggactatgcgtacagcatgcgcaggtcgctcgccgcgtgcgcgcgcctgcgcgacgtgctggcccctctcgccgcctttgggcgctggttccggggcgtccgcgactgggacaacccggtcaccaccgtcctcgtcctcattgtgttcttcgtgctggtgtggatgccctccctaatcatatcgactttctttctctacctgttctccctcggcgtgtggaacttctggcggcggccggcgcggccagcgcagatggagcactacagtgacggcgtgccccaggccatgttcgaggaggagttcgacgccgggtttccgtcggggaccacgccggaggcactccacgaacggtactggcgactgcgagggacggccactagcattcaggtgttcatcggtgacgtcgcctcgaagggcgagcgggtgcacgcgctgctggcgtggagggatggccgcgccacagtgatcgcgctcgttgtggtggccgcgctcaccgtcgtgacatacgcggtgccattcagggcgctggtgtctgtcaccggggtctacgtgatgaggcatccgttgctgaggcggaaggaaccgtcggcgctgatgagcttcttccggcggttgccgtccgacgccgaggtcatgctgtga

SEQ ID NO: 4565 - DNA, 552 bp, Zea mays
  Peptide Sequence Number=SeqID_46344
atgaagatccaatatcttgcatcaccaaagatgaccaacaatatggagaacaagaagcaaatgccttgcaagattgagcaacacatttgctacaactgccatgagaaatgtcatctaagaaagagctaccaagttatggataacctctgtactgttataacacaacatcgagataacgaaagtcttggtttatcactttggtatcatcgagacaaggacattattcacatgcaattggctcttcgagtaaagccccttgtcgtgaggggggcataccatgttctagctaagtccgggtcctccaagctaagggtcaaggctagacttggccaagtcttagggccctatagactagggcccataattaaaggcctcccaaacattcctcaagacacccctatgtccgatagccctaagattggacgacccaagaggtatgaccccattgccatgtgcacctttgatcaaggcgaccacatgttaaaagagcacactatcgtcatgcgtgtagctgacactatagccacacctagacgtggagacatcccataa

SEQ ID NO: 4566 - DNA, 432 bp, Zea mays
  Peptide Sequence Number=SeqID_46345
atggtgcctcccccttcatccctagaaatcgagcatgaactctccatggtgaggattggcgcccctgctgtcttcttcaaggagccttcgcaggagcagcagcataactccatggcgctcggcagcaggattgctctatgggcgtcgcctctccccgtcttcctccctgcagcctcctctcctctgcgacagcaaggtgtagggagccctcgtagaagtagtagcacaactccatggcgctcgacagcaggattgctctatgggcgtcgcatctccccgtcttcctccttgcagcctcctctcctctgcaacagcaagcaggcatccccagctctactccaccctcagctcccaaatggcgcccagattttccagccatcttccaaggccgacacccaccgttcctcctttcctgtttccccacggcagtag

SEQ ID NO: 4567 - DNA, 264 bp, Zea mays
  Peptide Sequence Number=SeqID_46346
atgaagatgcaccttgttggtatggatactctattaattctattaagcctcgggccaggatatcacaacgtcaaggagcgggagatctcggccgagttcaggacgttgggccatgatctcatgacaaggtcgatgtccaagtccatcttcctccgccgcaaacggggagtctgggaagcgcagcagcgccaccggaccgcactgcttcggtcgaatgagcagttggcacggaggagcgccgaagtggctgacctgacgtcctga

SEQ ID NO: 4568 - DNA, 669 bp, Zea mays
  Peptide Sequence Number=SeqID_46347
atggttggcattgaaacaaatattcaggagtgggattgtggtgggggaagcaagaggctagacgaaatcgtaacgacgaggcacacaggtagaaaggtgcctgccgtggcgggtgtggccgtcgcacctgctgctggcgctagcggcggcctacctcctcctcatctccctcaagttccgccgcgtgctggacctggcggccaccgacctcgcagacgaccctaccgccgccgccgccttctcctctccgtcctccgccgactacctgcccccgcctgggtccacttccgccacctcctcctcgtcggccccgttccggtccgcctcttctggcaccgctacgaccgtgtgtccctcccagacctcgcgtcccgcaaccgctctgcgcttgactgcatggccgacgacgcctgggcgctcggcctcaccgcctgggaggacgctgctgccttcgcgggagacccctgggcgctgctcctccagcttctctgcctctactttcgacgatgcctcgcggaggcctcagcgttggtgctgccgaggaatcacgaaaggctcggtgttgtgctgttggcgatgacgcgttgtgagagaagggagcagatttctagcaacacgacccttgggaactgccaacggatgcttcgggaaatggctagtcaaagatag

SEQ ID NO: 4569 - DNA, 309 bp, Zea mays
  Peptide Sequence Number=SeqID_46348
atgaccaagctgggcatcatacccttcaccatagtcttgaaaaccatctttctggacaagaagttcagatatatcgaccgctatagccggctatttaaaccttgctctatactcgtaccactccgtagtcgagagagcaggaagaagaccgaggctgccggcacgctgcccgtcgccgcacagatgagcgagaaggactcggcgccaagagcttgccacgggcggagaacaagggcgaggagaccttcggttacatgccgaggacgacggcgaagagcgcattcaccggccggatcagcgtcatgctaa

SEQ ID NO: 4570 - DNA, 432 bp, Zea mays
  Peptide Sequence Number=SeqID_46349
atggacgacaagtcccttaaggcgccgcttctgtgccttgcgccaaatgtcggcagattcaccccggttgagcccgctgatggacgagtgggatatcatatcaagccaggggtcaggctaagggctccgaacccctacccggcgtgccaaatgttgaaggggaaattctttggatgggtggcggaatgcacccgctctggtcctaagatgaggagggggcctagaggccccatgttagaggcttacgtcaggagtccccggccacgcgtcggcaccggacctctacctgggcagaaatcaggcctaggaatgtgtgacaatgtggcacccccggaccacccttactggggggtcagggagcccctccagaccccctctccggggatccggtgggcccatgtggaggtctgggtcccatccgtggggacctag

SEQ ID NO: 4571 - DNA, 591 bp, Zea mays
  Peptide Sequence Number=SeqID_46350
atgagggccagcggtggcccccacattgactacgcccccaaaacggttgttcacttcaggagccttgattttgtcatcaacgaggagggcgatttgatcagggcgatgccggccctacctcctctgttcgagatccccaacattgtcttggagaccctcggagccctctgccttgccccgcgcaagtggtcatacgacgcggaagcgtcatcctactacggtaggtctaatagaggttgtcgtgccttcccgcctcgactgctccacgccccaactgtgattgttgccctagtggcccgtggccacctccccacctccgatgacttggagttcgtagggatggccgacgatgacgggacctcatcttcgacgctctacaccgactcggacttggatctgagtccccctgagagcagtaagaataaccccccggtggatatagaggcgagagttcgcttttacgctcttaagacatgcaagggtcgtcgactctgcatccccccttgttgctccgaccaggggccaggggtcatcgccttcagcagggcaatctggagcgagttggacgcctggtcagccaccgaggcctag

SEQ ID NO: 4572 - DNA, 447 bp, Zea mays
  Peptide Sequence Number=SeqID_46351
atggagcgtgtgtacggcgactgccccaaggccagctccgcgcgcaggcagcagctgctacgcgagtgcagcatcctgtcaaacatcgagtccaagcagattgaagtctggttccagaaccggaggcagggagtagacgacattgctaggggagagcacgcgacggccaccatggtcggcaaagagatgggctcgacaaacatgggtgcagggccgagtggtgctgctagccagcagccgaggcaggggcagagccgggtggcacggtcgcgacggagggaggcgcgactgggcatggaggaagccacgcgggtggcagaacgtcggatcctcccgtgcactcacgtggctagcggcggggaggcggttgccatgaccgacaaccggagaggggagggcgccaggctccagtgcgctagggaagaggagcgcccgagccatgagtag

SEQ ID NO: 4573 - DNA, 1935 bp, Zea mays
  Peptide Sequence Number=SeqID_46352
atgaaggaggcgggcgaggagaggtgccttgacccgcagctgtggcacgcgtgcgccggcggcatggtgcagatgccccccgtgcgctcccgtgtctactacttcccgcagggccacgcggaacacgcgcacggcggcggcggcgccacggacctcgccggggcgcgggcgcgacctctcccgccgctcgtgctctgcaccgtcgccggggtgcgcttcctggccgatccggagaccgacgaggtcttcgccaagatccgcctcgtgccggccgcgcccggcgaggtggagttcggagagccccgcgagttcggcatcgaccccgaggacgcccgggagaagctgtcctccttcgccaagacgctcacgcagtccgacgccaacaacggcggcggcttctccgtgccgcgctactgcgccgagaccatcttccccaagctcgactaccgggccgacccgccggtgcagacggtgctcgccaaggacgtgcacggggaggtctggaagttccgccacattttccggggcacgccgcgccggcatttgctcaccacgggatggagcgcgttcgtcaaccagaagaagctcgtcgccggggactccatcgtcttcctgcgcaccgagcatggcgagctgtgcgtcgggatacgccgtgccaagcgggtgtcctgtggtggcatggagtgcatctctggctggaacgccccggtgtacggggccttgtcggcgttcttgaaggacgaggaaggtaagatcactaagggtcctggtgggtacatgagaggcagggggaaggtggagatcacggacgttgttgaggccgcaagcttagccgcgagcgggcagccatttgaggtggtgtactacccgagagctagcactccagagtttgttgtgaaggctgcatcggtacagaacgcgatgaggaaccagtggtgccctgggatgaggttcaagatggcatttgagacagaggattcgtcaaggatcagctggtttatggggacgatagcttctgctcaggttgctgacacaatcagatggccaaattcaccgtggaggcttcttcaggtgtcatgggatgaaccagacttgctgcagaatgtgaaatgtgtcaatccatggcttgtggagattgtatcaagcattccaccgattcacctagggacattttctccacctagaaagaagttgcgggtggcccaacatccagactttccatttgagggtcagctgttgaatccaattttccatggcaacccacttggtccaagcaacagcccacttcgctgtttctcggacatcgctcctgcaggcatacagggagccaggcatgctcaatttggtttacccctaacagactaccagcttaaccagctgcacctcggtttcaaccggcttggtgctatgactccgacgccccgtatatccaagggttttgtgatcagcagcgcaccagccagtgagagtgtctcttgcttgctgacaatcggcacaccacaggccacagagaaatctgatgacataaagagaccccacataatgctgttcggaaagcctatccttactgagcagcagatggattctggaggatcgagggaaggcctatcccaagaccgcaaggcttctgagcttgggctagaagacgggcactgcaaggtgtttatggaatcagaggatgttggccgcaccattgacctatctgtctttggttcgtacgaagagctgtacggccagttagcggacatgtttggaattgagaaggcggaaataatgaggcacctttgctaccgtgatgctgctggtgctgtcaggcatactggtgaagagccgttcaatgacttcatgaaagtagcacggaggctcaccattatagagggcacggaggggagaccgcagaaacctctcgtggaatacatggtcgagcgggcttga

SEQ ID NO: 4574 - DNA, 318 bp, Zea mays
  Peptide Sequence Number=SeqID_46353
atgaacagaaaactgatcgcaatgaacaagcttctcatggaggagaatgagcaattgcagaagcaggtttcccagctggttcacgagaatgtgtacatgaagcagctgctgcagagtcctagtccagatttgtttggtattgtgaccatttcccatggtggccatggtgttgttgctcgtgcctttggtcttgagaacctagaaccaacaaaggtaactactgctcttgccttctcaattagaaataaccaaagcggcgtacactacacacactcgctcgttgcccctactgaaagtcacctagaggggggtgaatag

SEQ ID NO: 4575 - DNA, 144 bp, Zea mays
  Peptide Sequence Number=SeqID_46354
atgcagcaagaactccagcaacacagggaaacaaacaaaggaaacaccacacgatgtaggaagaagggatcaaagaacagtgaccagagaaaggatgtgtctgtcgctgctcctcctatgggctacgggctgatgcaagagtaa

SEQ ID NO: 4576 - DNA, 198 bp, Zea mays
  Peptide Sequence Number=SeqID_46355
atggactgcgggttggttttgctaaaactcagggactcatatgctaatttgcttcgaccgagagactatgtctattgtgaaccatttgatcaaatttggatggattggattagatcaacccacgatgaagcggtacatgctgactacccttggacccgagatctgctgtcagggtttaatgaagatttgaatgtctaa

SEQ ID NO: 4577 - DNA, 327 bp, Zea mays
  Peptide Sequence Number=SeqID_46356
atgggaaggagctctaccaccgcagcccctaaggcatcctccagcgatgcatctccatcaccgaagaaggcacccgggggctacacccgccacgccaagtgggcgcacctctccgacttccagcgcgcccagcatggaggcccaggcccacgcgtcatgcagccggcgcgccggatgctacgtgcgagcaactgcaccgccactcgcgccactgccacgcctcctcgactgcggaaccagtaccgcgactcgaggcaaccctacgcacgacccagcagcgccagcctggcgcgacggtcaatgcggccaaaaatgggccggcagtaa

SEQ ID NO: 4578 - DNA, 498 bp, Zea mays
  Peptide Sequence Number=SeqID_46357
atggggctgaggcaagcagatggtggagggggagtcctcgacggactggggaatactccggcgagcaatcgcgcacaactaagggcataccaggggaaattaagggtgggggcaaggcgagtgctgggggttgcgagtgcgcgagtgagggggaaggagaccgagtggggcactgggcatctagaaaagggctggagtggggacaggcacagcctcggtgtgtgtcgtgggcgtggagtccacggtgacgcgcggatcgtgcatgcgggtagttcgagagggacatgtccgacagatgggacccacgagtcagcgagagcgggcgagcgaatgggtggcctggctgacgagcgggtctcgcgggacagagagagccgggctcgaggggagttggcgctgacagctcagtcccaccggccagggagagagagcggggatgcgcgggcgcgggttggcaccgagaggcggggcccggctgttagagggaggcgagcgtga

SEQ ID NO: 4579 - DNA, 348 bp, Zea mays
  Peptide Sequence Number=SeqID_46358
atggcggggtcaatcggcgagatccgagtacggcatgatatgcatcagggacaagcgcgcgtggcagcagccatggttgacgagcctaacgacacagggccaagcgacgaatgcgttcggcgtgcacacgtgagccgaaccgaaggcggggaattgatgaagcgaagttcgtcgacaagcaccatggaggaatcagcgacgttgttacccacacgacacgaagacaacgacaacaacccacaacagcaggaacatgaaggcttggccgaggcggggtccgagcgggttgacggtgagctaggacgcgacagatcgaggctgaggcacagcatctccaaatcaaattag

SEQ ID NO: 4580 - DNA, 642 bp, Zea mays
  Peptide Sequence Number=SeqID_46359
atgggggtgtttccacggggctttgcccgcagctacccgccatggagtttctcggccacaggtgtggcgaattcacggcggaattcaacggcgtcgagctaccccagagtctatgctagtaaaatttgggcacgaggcgattctccaccgatcaaggaacatgacaaagctgagggatggaaattaccagcggacacgacccgccgcgagagtagttcgacgcccgaatgtcttcactggcacctgagcctagccggcggcaaggatgattctggcaacccggacccacgcgccagtgaaaggaagacgcagagagcaagcggccgcgcggcgcaagggaggctgacccgcgggccccagttgtcggcgcgagtgtgcggaagcaggtcccagaaatgggccgagcgcggacactctccccccctggtgggccgaattaccatctggcggcccagcgatccacccctccggctccggctcctccgagcgctccgtgtcgtggctcgaactgccaccggcgtcgtcgtcgtctccgtctccgtcaaggggaaggcgacctctcagactccacctcctgctgaggcgaggggaagagtcctgctgctcctgctcctgtcgttggagctcctgctccttgtgtag

SEQ ID NO: 4581 - DNA, 651 bp, Zea mays
  Peptide Sequence Number=SeqID_46360
atggacggctcccgctatcttaacccaatcggtccccagtttctaatctgggtcgttcgccgtgcatccaacggtgcccggatacccctgccacaaccctgccgcacggtggcgcacccgccgaaccgcgacggcgccatcgccggggatccaatcctccacatcctggagctaatcccacgcgcaacccggtgcaaactgaagcggacgcaatgggggtgtttccacggggctttgcccgcagctacccgccatggagtttctcggccacaggtgtggcgaattcacggcggaattcaacggcgtcgagctaccccagagtctatgctagtaaaatttgggcacgaggcgattctccaccgatcaaggaacatgacgaagctgagggatggaaattaccagcggacacgacgtgaatcactcggtgcggggcgagtcgcgaacgacggcgaggcaatcgcggtcgcagctggcaaggcgggcgcgattttcgccgagcaatacgcagagagcaagcggccgcgcggcgcaagggaggctgacccgcgggccccagttgtcggcgcgagtgtgcggaagcaggtcccagaaatgggccgagcgcggacactctccccccctggtgggccgaattaccatctggcggcccag

SEQ ID NO: 4582 - DNA, 246 bp, Zea mays
  Peptide Sequence Number=SeqID_46361
atggcacaaatgctggtgcgatggcgtgatcgtcacggtgctggcgttgggttcggacgactgtacgacgtcgacaacacgacgaggctaagcagtagagtcgccgaacttcggcgagcatgggcaaggctccggcgagcagcgtcgatggcgaataacacagacgagcgcggcagcacgacgcgagcgtgggcgtacaggatggcgcagcagcagtggctcggcaggggattaggttattcataa

SEQ ID NO: 4583 - DNA, 1149 bp, Zea mays
  Peptide Sequence Number=SeqID_46362
atggggtggtacgacgggctgcttctcatgaaggctcttgttgttcttaccggcagcatgctggtgctcagcgccgccgccgtagagcggcggcgggtgccggcgatgtacgtgttcggggactccaccctggacgtgggcaacaacaaccacttgcaagggaagcaggtcccccgggccaacaagccctactacggcatcgacctgcccggctccggcaagcccaccgggaggttcagcaatggctacaacgtcgccgacttcgttgcgaagcatctagggttcgagaagagccccctggcttatctggtgctgaaagcgcgcaattacctgatcccgagcgccatcaccagaggagtgagctacgcatcggcaggagctggcatcctcgactccactgtaaggaacgccggaggcaacctcccgctgtcgcagcaggtgcggctcttcgccgccaccagggccgccatggaggccaaggtgggcgcgcgcgcggtggccgagctcctctccaggtccttcttcctcgtcggcgtcggcagcaacgacttcttcgccttcgccacggcgcaggccaaagggaacagcacggcggtgggcgtgggcacccagagcgacgtcgtcgccgccttctacggcagcctcgtatccaactacgcagccgccatcacggagctgtacaagctgggcgccaggaaattcggcatcatcaacgtggggcctgtcggctgcgtgccggccgtgcgcgtgctcaacgccaccggcgggtgcgccgacgccatgaaccagctggccgcggccttcgacggcttcctcgactccctcctggccgggctcgccgcgaggctgccggggctcgcctactccgtcgccgactccttcggcttcgccgcgcgcaccgacccgctggcgctggggttcgttagccaggacagcgcgtgctgcggcggcggcagcctcggcgcggagaaggactgcctgcccggcgcccagctctgcgccgaccgcgaccgcttcctcttctgggaccgcgtgcacccttcccagcgcgccgccatgctcagcgcccaggcgtactacgacggccccaaggagttcaccgcgcccatcagcttcaagcagctggctgacaagatagtaatcaaataa

SEQ ID NO: 4584 - DNA, 168 bp, Zea mays
  Peptide Sequence Number=SeqID_46363
atgcagggatcaactggtagtaagcttttctgccaaaaagggtcttcgataattgataagctttaccttgagtcccaaatccagcatacccttgagagtcttttctttagtcgggagggattcttgctatctttagctcctaatagttgcttcgtggggaggccttga

SEQ ID NO: 4585 - DNA, 567 bp, Zea mays
  Peptide Sequence Number=SeqID_46364
atggccacctgggccacggcccggggcgcgcaggcccaaaaaaacgaaattctctcccagcccagaacggcagaacagaaccctagcgctagcagccaacccgccaagcgccagccggcacggcgccgccgccagcgcacctgctcgctgctgctagctgctcggtcagacgcgctcggctgcacctgctcctgtccggctgtcccagcctcccaggagcgccgcttgctccagtgctcctgcccggctgcccctgcttcgaccttggcagttggcaccttgcccgcccggtcggcggttgcccggcgcccgccagccgctggccgctgccgtgtgggcagtgggcgtgcgggtgtggctcggctcgcctcgcccctcgccggtcggctctcgcctgcccgccagccgccaggccacgcgccgtggcccgtgccgtgcgccgtcgcgactgcagctcagagctcaccatcaccgagtctgcgagtctgcgagtcaccaatcagtcaacaccttgtcagctcgctcggccacgcttcgtccgtccgtcaaaatgaagaagaggcctag

SEQ ID NO: 4586 - DNA, 2424 bp, Zea mays
  Peptide Sequence Number=SeqID_46365
atggccaacctagcggcccagctcgctgccgtgctccaggcctgcatcaagcgtagcggtggccgcaagcccagccgctcaaacgccaaggccgcgcacgcgcgcgtcctcgccgccggcctcgccgcagataccttcctcctcaaccgcctcgtcgagctctactccctctcgggcctgccatgccacgcgctccgcgccttccgcgcgctgccccaccccaacgtctactcctacaacgccgccatctcagctgcctgccgcgcgggggacctcgccgccgcccgggacctgctcggccgaatgcccgaccggaacgccgtctcctggaataccgtcatcgccgccgtcgcgcggtcgggctccccgggggaggcgctagagatgtaccaggggatgctgcaggagggcctcgcgccgacgaacttcacgctggccagcgtgctcagcgcgtgcggcgccgtggccgcgctcgacgacgggaggcgctgccatgggctcgccgtcaaggtcgggctcgacgggcaccagttcgtcgagaacgggctcctcggcatgtacacaaagtgcgggagcgtcgccgacgcggtcaggctgttcgacgggatgcctagcccgaacgaggtgtcgttcacggcgatgatgggcgggttggcgcagggcggggccgtcgacgatgccctcaggttgttcgcgcggatgagcaggaccgggattcgtgttgatccggtagcggtctccagtgttctcggcgcctgcgcgcaggcctgcgctggtgactacaatgtcgctcgtgcaatccagctcgcacagtccatccatgcattggttgtcagaaaaggttttggatcggaccaacacgtgggtaactcgttggttgatctgtacgcgaagggcatgaagatggatgaggccatcaaagtctttgagtcgttgtccagtgttagtattgtttcttggaacattcttataactgagtatggtcagctgggatgctatgagagggccatggaagttcttgagtttatgcaagagtcaggctttgagcccaatgaggtaacctacagtaacatgcttgcttcttgtattaaggcaagggatgttccgtctgctcgtgcaatgtttgacaagataccaaagccaagtgtgactacatggaacaccctattatctggctacggccaggaggaactgcatcaagaaacaatcgacttgtttaggagaatgcaacatcaaaatgtgcagcctgaccggacaactttagctgtgatactcagttcatgttctagattaggaaatttcgaactgggcaagcaagtgcattctgcttcagtaagactactgcttcataatgacatgtttgttgcgagtggtctgatagatatatattcaaagtgtggtcaggttggcatcgcactgatcattttcaacatgatgaccgagagagatgtggtatgctggaattccatgatctcaggtttggctatccattctttgagtgaagaggccttcgatttcttgaagcagatgagggaaaatgggatgttccccacagaatcctcttatgctagtatgatcaatttgtgtgctagattgtcatccatacctcaaggtaggcagatgcatgcacaggttctgaaggatggttatgatcagaatgtatacgttggctgttccctgatcgacatgtatgctaaatctggcaacatggatgatgcacgccttttctttaactgcatgattgtgaagaacttagtggcatggaatgagatgatccatggatatgcccagaatggttttggagagaaagctgtggaattgtttgagtacatgctaaccacaaaacagaagcctgacagtgtgactttcattgctgtactgacaggatgcagtcactctgggctcgttgatgaagcagttacattctttaattccatggagagcaattatgggattacaccattagttgagcattacacttgcctgatagatgcactggcgcgggctgctcgttttgctgaagttgaggcagtgataggtaaaatgccatacaaggatgatcctatactgtgggaagttctactagctgcatgtgttgtacatcacaatgctgagttgggggaattttctgccaagcatctattccgccttgatccaaaaaatccatcaccttatgtgcttctatcaaacatatatgctactttgggtagacatggtgatgcctcagctgttagggcgctgatgagtagtcgcggtgttgtgaaaggccgcggatacagctgggtgaatcacaaggatggttctcgtgcctttatggtagctgatgatcttggaacggatgttggagaacgcacaatgttcagtgataatggggacacttctgggatgacagaagtgcacatagatgaaacctgtgctggatga

SEQ ID NO: 4587 - DNA, 1269 bp, Zea mays
  Peptide Sequence Number=SeqID_46366
atgcgccttccgccgccatcaaccaccgcggccgcagccgctgccaccgtcggggccgtactcgccgcagtcgccctccgccgctacctgtccgcttctcgccaccgcgaacccgcccgcgtgcccatgtccgcggccgccggagccaccacgcttgtggtgtacggcaaatcggcgcaggagcaggagctgctggcctccgcggccggttccgtcgtcctcggtgagggcgatccgtccggtgatgtcgccatcgcgctcgcctacgagagcgcgggcttcgacgccgccgcgtacatgagcgcgctccgggcgcgccggttcgggaggtggatgctctggacgcccaggattggttccacgcaggatctcatcacgcggaactttgcaaagctaccggtgggcgttgtgtgcgttgccgacgtgcagttcaaagggagaggccgttcaaagaatgtgtgggaatcgccaccaggctgtctcatgttctctttcacatcacagatgcaggatgcacggaagttgccccttatgcaatatgttgtctgcctttcgataactgaagctatcaaggagctgtgccgtgccaagggactaccagaacttgatgtgagaataaaatggcctaatgatctctatctgaaaggattaaaagttggtggcattctatgtacctcatcttatgaacccaaagtgtacaatatttgtactggtgttggtttgaatgttgacaatgagaagcctaccacatgcttgaatgctgcacttcaagaggcaaatcatacatcacccatattgaaacgagaagacatattggcatacttcttcaataaatttgaaaaccttttcgagatcttcatgaaccatggatttcaggttcttgaggagcaatactataactcatggcttcatagtggccagagagttgtcgtacatgatgcacatgaaaacaagtcaggcagtgtcgtcaccatccaggggttaacaccaactgggtacttacatgctattggtgaggataacaaaagctatgagttgcacccagatggcaacaggttgcacatactatcacttgctaagacttaccaacaaatagatgccagagcaaagggcagaaccacggaaagggtaataagtgggcatataacaggaagcatctgtgttccattccctgagatgttcaatggtgcaccaagccttctgtctgcagatgagctgcggcagaagtttcagcaagcaggcaggaatttccctagacaaacccattga

SEQ ID NO: 4588 - DNA, 753 bp, Zea mays
  Peptide Sequence Number=SeqID_46367
atggagggtaagaagaggttagccactgtcgccacttggtgtgcgcacgtcgtgctcttgctgttcgtccagccgcgacaagtggcgggtcggcggccatgtctcaactgccaccggcgcgccgcgcgccctaggtccgccgctgtcttcaaccgcatcgtcatgagcaccgccttggcgactgctggtggtggcgctgaggtgacggataacaaagtcattatcctgtctcttggctatacgagacactggataatgatttcgttatatgagacactggaatacgatcacttgacacgggcggggccgggagacgacgagtcacgtaacactaagggaagattaatgctcatgagatacacatgcacatcactacagaagatgattcctctgctaactgaaagtcgcctagaggagaagaacaagtacaagggtaagaaagatgactctagcgatgatggcaagaagaatgataagccatacaaaagtaaggatgataacaaaaacaaattccataagaagggtagtgaggcttacattattgatggttggctcactgacattgtatcatcaagtggatcgtctttgtatgatagcgataaagaaaaaaaagaaaaggtggttgcacttggtattgggatatctctaccaccaccatcatcctctacacatctacgtcttatggacaaatgtgatcgaaaggtacaaagtgatgataattgtagtgttgataatagtgatagtgatgaataa

SEQ ID NO: 4589 - DNA, 267 bp, Zea mays
  Peptide Sequence Number=SeqID_46368
atggtggagcttgaccaggcgaagggtggctgtgatggccggaccatggtggccggggctcgggtgacaatggcgggtgttggcatgcttggttcaagagaaataccagtgaaggtgcacttgccaactggtcatggattgaagcttttcttggcatgggtgaggagttgtcttgtcccaaaggttgatctgtctcaagggcccaaaccgagaggaacactagcgttttggcctgtcaaaaagcttggtcctaatgccatcttatga

SEQ ID NO: 4590 - DNA, 156 bp, Zea mays
  Peptide Sequence Number=SeqID_46369
atggccaggattcctcggaggttgtctcggccgtgtggtgccagttccctactcctcgcagaactcccagcaggagtgaagattcaagtggaagtggtgactgaagaggaatccactccagtatccttcgatcaagtggaggagccatctaactag

SEQ ID NO: 4591 - DNA, 204 bp, Zea mays
  Peptide Sequence Number=SeqID_46370
atgaacgagggccagcggggatcccgtttttatggtctgggcgagggtaagttgtccagttcggcctccgattccggcgcgatgccgttggagatcgccgcgggttctgtttcagtgcggaagaaaggtgcggacatggtggacccacgtggcagtgacaagcttgcactcgagatcggccgttccacgcgtgaggggaagtga

SEQ ID NO: 4592 - DNA, 840 bp, Zea mays
  Peptide Sequence Number=SeqID_46371
atggagcgacccggtgcgcgctgcaagccggacacctacacgtacacggtgctcatttcctggtactgccgcatcggggtgggcacgggatgccggaaggcggcacggcggaggatctacgaggcggggaggctgttcaggaggatgggagaaaaggggctcgagccggatgtcgtgacttacaactgcttgatcaatggcctgtgtaaaacgtaccgcgtggagcgcgcccacgagatgttcgatgaaatgctgaggaaggggtgcacgcccaaccgggtgacttacaattcgttcatcagatactacagtgtggtgaaccaggtggacaaggctgttgaatggatgagggaaatggttgcgaggggccatgggatggcctcgtcgagcacatacacgcctgtcatccattctttgtgtgagagccggcgtgttaccgaggcgaggcaattcttgattgatatggctgaaagtggacatgtgcctagggaacatacatacaagctggtgaaggctgcaatcgacgatgctggtgaggatgccttgccagcagggctatgtcaatcaattgaggatggcattacagcaaggtttcgacagttcattaacggttgtaaatgccttccaatcccacaaggaaacaaaagaatggttggaaatgtcttcgtgggaagtcacgtacaatttctacaaaaaataacttcacacatgagcaggaatgcccacagcaacaagaccccaaaaattagctttcacgcgatgcacacaacttctggtctatgtatgacagaggattttatactgatctgtcacactggtacagaaatagaagctctataa

SEQ ID NO: 4593 - DNA, 1389 bp, Zea mays
  Peptide Sequence Number=SeqID_46372
atggcgttcgagaccggcggcgtgctgcggctgctgctgctcatcgcgctggcgccgctcgcgggcctcctctactacctggtgtccgagccggcgggcatccaggtgctcatcttcgcgtccatggcgggggccagggtcgcggacatcgaggccgtggcgcgagcggtgctgcccaagttctactgcgccgacttgcacccggagtcgtggcgcgtgttctcggcgtgcggccgccggtgcgtgctcaccgcgaacccgcggatcatggtggaggcgttcctcaaggagtacatcggcacggacattgtcgtcggcacggagctcgtcgtgtggcgaggccgcgcgacggggatggtgcgctcgcccggcgtcctggtcggcgagcagaaggcggacgcgctccggagggtgttcggcgacgacgccgcgcccgaggtcggcctgggcgacaggaagacggactacccgttcatgaggctgtgcaaggagggctacgtggtgccggccgcgcccaagctgaggcccgtgccacgcgaggacctgccgaagccggtggtcttccacgacggccggctcgtgcagaagccgtccccggcgctcgcgctgctcaccgtgctctggatcccgatcgggttcctgctcgcgtgcctgcgcatcgccgcgggcgcgctcctgccgatgcgcgtggtgtaccacgcgttccgcgccctcggtgtccgcgtcatcatcaagggcaaccctccgccgccggccagccgcgagacgggccagaccggcgtgctcttcatctgctcccaccgcaccctcctcgaccccatcttcctctccaccgccctcggccgccccatcaccgccgtcacctactcggtctcgcgactgtcggaaatcctgtcacctatccgcacggtgcgcctgacccgtgaccgcgcggcggacgcggcaatgatccggcgcctcctgaccgagggcgacctggtgatctgccccgaggggacgacgtgccgcgagccgttcctgctccgtttctcggcgctgttcgcggagctgacggacgagatcgtgccggtggccatggagaaccagatgagcatgttccacgggacaacggcgcgcgggtggaaggggttggaccccttctacttcttcatgaacccgagccccgggtacgtggtcacgttcctcaacaagctcccagccgagctcacctgcagcggcggcaagagcagccacgaggtggccaactacatccagcggctcatcgcgtccacgctgtcctacgagtgcaccagcttcacccgcaaggacaagtacaaggcgctcgccggcaacgatggcaccgtcgtgtccaagcccaacatcgacaaaaacaaggccatgggctgctag

SEQ ID NO: 4594 - DNA, 693 bp, Zea mays
  Peptide Sequence Number=SeqID_46373
atgccagccccgacctcgcgcccatggcatccgcgcccggctgttgcgggcggtgccgtcctcgccgacccctcagatataaagccgagcatctcaacagccgggccgttccacgcgctgctctgcgtggggcagttcttctcccccgagggtgctgcagagggctcaccggaggacgtcaccgactacctcgaggggcgcgcttccgtgcccatcccgacctacttcaccggcgactacggcccagccgcgccgcgattgctatcgaaggccgccgctggtgctcgcgggccaaaagatttgctaccaggcaatcggtcgattcattctgcttatttggttttggattttggatgttcatcgacgcaaaccagttctctcgtgttcttcaaggattggggcgctccagttcagttagccaaaaagtttggatatcactctgctgttcttcaaggattcgaaaccatcgccaggagggcaattcacacagtcaggattatcacattgccccaaaggcccagacatcatcaaatgttcattctttggaacctgcccactgtaagaccacaccacacattcagacttcatattgaagaaaagacaactcccataatgttaattgatgtagatgaaattcatggacttgagttggggcgaaacattgtgaagaacctgcacttagctgctaaatga

SEQ ID NO: 4595 - DNA, 1023 bp, Zea mays
  Peptide Sequence Number=SeqID_46374
atggaccggtaccatagggtggagcgggcgcggaaccagtcgaccatcgaagagaacgagatccgcatcaccgcgcagggcctcatccgcaactatgtctcatatgctaccttcctcctccaggaaaggagaattaaagagattgttttgaaggccatgggacaggcaatcagtaagtctgttgctgttgcagagattatcaaggtgctccagcatatgttgaacatcccaggcaacagcaggtgccaccactgcagcgccaacctcgcagaccatcaggacaacaattccagcagctggagtatgaagattcctatgcacggggtcgaggaagagggaggggccgtgggcgtggaaggggttgggctagaggtggctatggtggatatggaaacaatcaaggtggctataaccaaggtggtgggtattacgacaatcaaggtggatatggtggctatgatgatcaaggtgggtatggtggtggatatggctacaaccaaggcagatatggaaactatcaagaaaatggtggatataaccgaggtagaggaggtggtatgcgaggaagaggcaattggggttaccgtggaggctatgaaggaggcaggggtggtggctatgaaggaggcagggtcggcggcggctatgaaggtggcaggggtggtggctatgaaggaggcagggtcggcggcggctatgaaggtggcaggggtggtggtggtcctggtggaaggggatatggtggccgaggaaggggtagaatgggtggcggcggacgagcgaactaagtgcatgcagacttctggcgtttccttcaatgcatgccttatcaatatatcagggaaaatacgagcattttatgttggaagcagttcagttacgtgtgaggctggcccaggggaagggtttctccacgcagaaacccgagagcgcaaggttcccgagtggaattttagtggcacaccggacagcgcaccggacaatgcaccagactgtccggtgtgccatcagcccaacggctag

SEQ ID NO: 4596 - DNA, 1947 bp, Zea mays
  Peptide Sequence Number=SeqID_46375
atggacaagctccgcgtccaccgctgtaccggcgacgcggtcgagtggtccccctcccctatcgtcgcgctcgccgcctctccttgcgcctctcaggtcgccgccgcgcgtgaagacggctcactcgagctctggctcgtctccccgggctccgtcggctggcacaaccagctcactatacaggggaacgacgagtcgagggtcacatcactggtgtgggggcggagaggaggtgaagcgaccggccggctgctctcgtccagcgttgatgggtcggtttgtgaatgggatctattctacctgcagcaaaagattgttctagatactgttggaattccaatctggcaaatggcaattgagccttcagttgatgctaaaaatactgaaaataatagctcagagtttgctgtcaatggccatccaaaccaaaatgactccagcgattctgacttaagtaacattgatgatggtgataactctgaggatgaagatggttctaccaacacaatatcttcatatcatgtgaatgatttccagcgactggctcttgcgtgtgatgatggttctgtacgattgtataatgtgcctgaatcaggtgcattgacttactataggtctcttccaagagtgagcgggcggactctaagtgtggcgtggagtagtaacgccaaatttgtattttctggcagcagcgatggatgctgggattcaacatctttccatgaaatgtatcgtatcactgttggattgggaggggctagtaactcacctgaactttgtgtctggtcactattgtttctgaggtgtggaactattgttagtggagatagtaccgggagtgtacagttttgggatagccgccatggaacacttctgcaagctcactcttatcataaaggcgatgtgaatgcactaacaactgtgcctagtgggaacagggtattttccgcagggtctgatgggcaggtaattttgtacaaaatatcaaaagatgaattcggtgctagtaaaaatgtgatcaaagagcaagttcagaaatgggtctatgtgggatatctcagagctcacactcatgatataagggcattaaccatggctgtgcctatctgtagagaagatgcattacctgaggaaaaggtggtgaagattcgccggcgtgaaaaacatgaattcagctaccacagatgggctcatcttggggttccgatgcttatatctggtggtgatgacgccaagctgtttgcatattcagcaagagagtttactcagttctcacctcataacttctgccctgcacctcaacaccctttgataaagctggctaggaatagcacagtcaatggagattatgtaatgcttgtccagtcttcgaacttcttggatgttttacttgtgacagttcagaacaagctgacgactccaaatggtgtgagaccctgcctctttgcactaagacataagggtggaaagaagtacacccttgacaaattagagctgccaaaaggattgccctgttctcagaaaggacagcgccgcctgcgccactccgactgcagtgccactcgacagagtgagtctgacaggcagtcaggccttgccaaaggcgccacggcgaactccgctccgcccgaccccagggctcggactcgggctaagacccggaagacggcgaactccgctccgcccgaccccagggctcggactcgggctaagacccggaagacggcgaactccgctccgcccgaccctagggctcggactcgggctagcacccggaagacgacaaaactccgcttcgcccgaccccagggctcggactccgccctggcctcggccgaacgacttccgcctcgcccgaccccttggctcgggctcggccacggcaacaaaaggcaaactcaacctcggcttcggaggaacccccacgtcgccctgcctagggcatag

SEQ ID NO: 4597 - DNA, 399 bp, Zea mays
  Peptide Sequence Number=SeqID_46376
atggatggcggcgatagacccgccctctgtgtcgccaaggagctcctctccatccccgacgtcgccccaacccccatcaccgacagggaacccacctctcacgtcgacaccgccagaggaggagatggtggagatacgggcgctacgatcacgtcgcggctaagcgaggcgcccgtcagggatgcagcaggcacagagagagcggagagtgacggcgagagcgaggacaacgtcgattccgcctcgtggagggacgccaccacgacggacaccagggagcaagttgttcgtggaggagatgtgggcgatgatgcccttgtcctccatgactgcctccattcccattcctccccgtcaaagaagcaacctttccttgatctccccgacaaccctacctga

SEQ ID NO: 4598 - DNA, 1245 bp, Zea mays
  Peptide Sequence Number=SeqID_46377
atgaaagcgctcggacgggcgatgaggtgggcttcctgctgcaagctctcggacggggatgaaccaggtaggaggaagaaggacgcatcgtggcggatcttttcactgaaggagcttcagtcagcaacgaacaatttcaattacgataacaaggtcggcgagggtgggtttggcagtgtctattggggccagctctgggatgggtcacaggttgctgtgaagaggctcaagagttggagcaacaaagctgaaacagaatttgctgtcgaggtggagattctggcacgggtgaggcacaagagccttttaagcttgcgcggatattgtgctgaaggccaggaacgcttgatagtctatgattatatgccaaacctgagcatacacgcccaacttcatggacagcacgcagcagagtgcaatctcagttgggaaagaaggatgaagatcgccgtcgattccgcagaagggatcgcttatctgcatcaccatgcgacgccacacatcattcatagagatgtcaaggcgagcaacgttctcctggattcgaatttccaagctcgggttgctgactttgggttcgccaagctagttccagacggcgcgacgcatgtcaccacaagggtgaaaggcacactcggttatctcgcaccagagtacgcgatgcttgggaaggcctctgaaagctgcgatgtcttcagtctcggagtcatgctcctagagcttgccagcgggaaaaagccagtggagaagcttaaccccaccacgaagcgaaccatagctgagtgggctcttcctctagctcgggacaggaagttcaaggaaattgccgatccaaagctcaatggtagcttcgtcgaggacgagctgaagcgaatggtgctcgttgggctcgcctgttcccaggacaagccagagcagagacccgtaatgtctgaagtcgtcgagctgctcagaggagaatctaccgagaggctttccaggctggagaatggtgatctgttcaagcctgatatctcgttccatggctcatccggacctgatagctcggactgcgtcacggaggagaggagtcccaaggcagatgcgacagaggaggctgttgattcaagtgagacggttccctcagcaaggtgtgcagtacaagaacgatggtcgacggttgaggcgaaggtcatgcaggctcgtgctgatgaaccaggagcggtgaaggacgggtgttgggtcttagctgacggaccggagtag

SEQ ID NO: 4599 - DNA, 363 bp, Zea mays
  Peptide Sequence Number=SeqID_46378
atgggcaaccgagctgggcgctggagaaagagtggagcaggggccgcgacactaggacagggcaccggtgagcagcaagcagagagagaaggtgtggcggccaggatgaacgtcagggagcttcggctggccctagaaccgagcagtgatgcaccatggggaagaaaccagcgcgcaacagagaagctcggtgaggaagatggggcaggaactcggcgccggcgaggggagcagggagatgaacaccaagaatgctgccacaggggaaaacgccatggcgagcgcagggtcttcactgcgctcggcgcggcgaggaatctccatggtgaggtccgagcagaagacagggtgatccgatggtga

SEQ ID NO: 4600 - DNA, 285 bp, Zea mays
  Peptide Sequence Number=SeqID_46379
atggtgatcgccagatttggaccccaagataacggtcagttggtggagtccgaaggagttgcaggtgaagagcctgagcagcagctggttggtgaaggcaagtgtcccttgacccatctatgtcctattcattcttataatttactccctgcatttaaacaatttatacttacctctgccaacgattctcaagacaaagaccttacatggaagcagtgttgccaaatgccaaagctaccattcagctttggttcaagtcaagcagaagaagaaaagaccagataa

SEQ ID NO: 4601 - DNA, 240 bp, Zea mays
  Peptide Sequence Number=SeqID_46380
atggagtcctgggcgcagggaggtggattggcgctgggcagaggaggccggccagagttagaagaaaagggcgtcgtcgagggaggtgcagagctgctgctcggcaggaggaggaagaagacagggagcatgagatttagcttcttcgaccccttccttccccatagctatgccaatatttggagattctcgctcagctctttcttcagttacagcaggcttcgtctcaggagccactga

SEQ ID NO: 4602 - DNA, 357 bp, Zea mays
  Peptide Sequence Number=SeqID_46381
atgccttgcgactcagcttcctccctgcgtttgtgctgctgcgcctgcgccgttgatgcttgctatgtgctcccatggcgcgctgcagcagatgctgtggagcagcccctccatgccttgcgactcggcttcctccctgcgtgttatgttgtcagaagggcatcgatagaaatttatgtgatgagtaggtttggaaatacaggttatgtgaggattgaattagtacactctaaatgcgtatggttatggtcgcggatgaaaagtattggtgctcatgtgatgtctaagttaaaatgcaaattattgggtgaaaagcgcttcgatattgattatcgtggagaatgcgttgttaattga

SEQ ID NO: 4603 - DNA, 342 bp, Zea mays
  Peptide Sequence Number=SeqID_46382
atggaacagcatctcccgcccgaggttagcctcggacgagacgaaactgcctctcccatccgaggttggcctcaaccgagtcggaactgcgttttagtgcttgtaaggatccaggagatatctatatcccacaagcccccgaggctcaagccaatttttaaggctttgttctgcctttgcatccaggtgcacccaatgggtgtagccctcgagcttcaagttgacttgagaaacaatcagcttgaaggtagacttagtgccccgaaagcaaggtctaccggcaacactgcttctcgcccatacaccatgaagaaggggtatttccatgcaaggcttggctag

SEQ ID NO: 4604 - DNA, 345 bp, Zea mays
  Peptide Sequence Number=SeqID_46383
atggttcatgatgctttcaacctacatgacctagaactattttggcagaattatattaatggaaatacccatgtagtgaacactgcttgggcgatgctgtcgttgatatatgctggacaggttgagcgagatcccataccactgtaccaagcggcaagagaattaattaacatgcaactagacacaggagactttccccaacaggcgcggacggtccgcggcccagggccggacggtccgcaacctggcgcgaggcggcggtgctctctggtcaggcgcgaacggtccgcagcacagggccggacagtccgcgacctggtgcaggagctcgggttccctgcctga

SEQ ID NO: 4605 - DNA, 606 bp, Zea mays
  Peptide Sequence Number=SeqID_46384
atgcagactatcgaaccctgcagatcgcgtcttgctcgaccgtcgtcgtcgctggagtcacccatgcctagcatgacaaccatcagcgaagatggtcgtgcctcatggggcgctgccgccacttgcatgtcggggtcgccgtcgctcgcccacctcagggcccaggtgtcgccaccgctcactcgtcccggcgacctgtcgccgcttgccctccggatcggggagccgctgccaccgcacctccaaatatgggaaccgtcatcgcgactctggatcgaggaaccgccgccaccgcgcgtccggatcggggagccaccatcgccttgccttcggatcggggcggtggcgcccagagttccgccgtcgcgcgcattcttgggaaaccgtcgttgtcgcacacacctggacgtcccgttcgtcttctcggccttcgccctattcttcctctccaatctgctgcccccgcccaaggtcacagttgtgagccaaccgacactcgtcgacgcggatctgagaaattggacaaccaaggcctgtagcgcggagcagtcgacatatgctgcgaagttggtggtggtgttgtgtcgcctcggcgggtcaaggtaa

SEQ ID NO: 4606 - DNA, 471 bp, Zea mays
  Peptide Sequence Number=SeqID_46385
atggctcctatgctctttggggctataaaagggacccctaggcacatggagcaggttttctacactctaggaggaggtcacagacgcctcagagttggcttcgtcgcgcgcatgcgatttgaggcggcggccggaggctggcacagccgcagctggggcaacgatgacaacggcgccgtggatgcctccgccgccgccggatcaaagggagtatttgtaccgggagggccgcaggcacgacggcggcgaaggcgacccgctcctgctgcccgccccaatgcctccgcgctggtgggactcgccgtaccacccatcgccaccaccacatctgcgggaccatgcgcggccctcgccgcgtcgagcgccgatgtcggcctcctcagggacggccgtgacatgaggggttcaaaccggaggtccccatacaggggtggctatggaagtgacttctcccaaaaccatccagagtag

SEQ ID NO: 4607 - DNA, 225 bp, Zea mays
  Peptide Sequence Number=SeqID_46386
atggagcataaccttcaacctcctatggcaacaaaagagaagtcgaaagagatagataggcttgccagggagcagaaagcagaggagcgtcaaaagcagaggggaaaagagtctgatgtggaggcagggatagagataccagaagagagagctttgtaccattctggatatttggaatcgaatgttaaattagtaaggctggtgctggacttcgtatatggatga

SEQ ID NO: 4608 - DNA, 618 bp, Zea mays
  Peptide Sequence Number=SeqID_46387
atggcgggagccgacgacctgaaggtgctgggaatgtggacgagcccgtttgtgatccgagtccgcatcgtgctcaacctcaagggactggcgtacgagtacgtggaggaggacctcggcaacaagagcgcgctcctgctcagctccaacccggtgcacaagaccgtgcccgtgctgctccacgcgggtcgccccgtaaacaagtcccagatcatcctgcagtacatcgacaaggacgaggcaccaaggaagaaggcacgccttggatgggggcaaggtttgaccaagtatgagaagcagaaggttcaaggccctgtggatcctgctgaagctattgctgatggaagtccagctgatggtgaactgaagaccgcctctcttgtgcctgtgcctgccccttatgttgcacctgcacctcctgctgcaccagtgcttgcgcctgctcctgcgccagcaccttctgctgctcctgcatttttgtctgcccctatgcaatgctcatctccagttaccgggccaccatattgttcctcaggtatgcaagtgacgcctctcctcgatgaatcaggtcacccgcttaaatctgctctgccgtactcatatcatcgaatcccttaa

SEQ ID NO: 4609 - DNA, 954 bp, Zea mays
  Peptide Sequence Number=SeqID_46388
atgtggaggctgaaggttagtgaaggtggcgggccgtggctgcggacggagaacggcttcctcggcaggcaggtgtgggagttcgacgccgacgccggcacgccggaggagcgcgccgaggtggagaggcttcgccaggagttcacccgccaccgcttccagaggaaagagtcccaggacctcctactgcgcatgcaggttaataacatggcttaccacttgatgagattaacagtaaagaggaaggcccatattctagaagagggagtaaacgagaaacatcgcaagtatgcaaaatcaagccaacgattaagcccttcaactccatcgatgaagcttgaaaacagtgaagaagtgactgaagaaataatactaacttcgttacggcgagctttaagtcaacagtctattttacaagcacatgacggtcattggcctggagattacagtggatttctggttattatgccaatgtttatattctctctatatgttactggatcaattaatacaatcatatcaccggaacatcggcacgagatattgcgctacatttacaatcatcagaatgaagatggcggttggagcacgcatgttctaacgacaagcaccatgctaggatcatgcttgaactatgcagccttgaggcttctcggcgaggtggcacatagggaggaagatgctttgtcaaaaggacgggcctggattttatcccatggaagtgcagctgcgctaccacaatggggaaagatatggctctctataattggtgcttatgattggtcaggaaataatccaattatccctgaattgtggatggtgccatatgctcttccaatacatccagataatggagaaaaatatctggcttccatgattccatctcataaggaggatagcagctcatccgtctgcccccaacaaaagaacaaatctccaagccaccatctctaa

SEQ ID NO: 4610 - DNA, 402 bp, Zea mays
  Peptide Sequence Number=SeqID_46389
atggatgctctaaagtttgaatacctagactatgaagatccttcagacaatgttggagctggagagaaaaggaagagagctgctaagagtgaggctgatgaagagccaccttcgggtctggtaaagaagaaggctaaaatgtctgtccagaaagatacaactatgaagaagacctcggctccaaagaagaccacagctgcccaagagcatgaaaagggtagcatcactaccacttcgtcatataactgcacccggattctcgagataatgactcaactgctaccattttcccctttaagtccctttggaccaacattgacttggtttatgccaacttcaaaggattctacgaaggcgaaaaatcttcgaagggccaagaaattttatctgaagaggaggtag

SEQ ID NO: 4611 - DNA, 318 bp, Zea mays
  Peptide Sequence Number=SeqID_46390
atgtccgacccctctgcttggcgtggcccggccaaggcgcggtgctcggcgcagccccgagtgctcggtgtggctggccatggccccctgcccctgcccggtagcccccgccctgcccgcgtggcgtgccgcggccccggcacgaggaactggggtgtagttcgcttcgacgttgtgccgttaatggggctcggtgtatgcggctcgctctgccaaggtggtgatgaggatgatggttttggttatgactatggtaatggtgaagatgaagtcgtggaggaggacttccaggagttccaagagtacgatgagttctag

SEQ ID NO: 4612 - DNA, 450 bp, Zea mays
  Peptide Sequence Number=SeqID_46391
atggaccgacacacctggtcgatcaagtaccgttgtgtagtctaccagcatagtcgcgggatgtacccggaccgctgggaagctacctgtttggtgcgccgtccggagcatgatctccggggtactgaggtctgcttagagcactattctatctctgagagggacactgtagaggcggccatgcaggatgttgcacgacgcaatcctaggttgaacaggacaatcaacctagttgttgtgttcaacactgagctggaccacactcttgacaagttgagtagggctcgtgctaagatcgtggagttgcaggctaagcgtgcagagcgccgtcaccaggagtatggttctcccgccctcgctgggactcagcacccgtaccgctcaccgccatgtggacaccatgcttatggcactcccgatggtaggaccaagataaacctggatccatag

SEQ ID NO: 4613 - DNA, 444 bp, Zea mays
  Peptide Sequence Number=SeqID_46392
atgacgacggcggttctcagccccctacggaagcaaggagacgtcagcaaggacccgacagctccgacagctgtgctcctacagggctcaagcgctcctccgacggccacgacatcacatgaacagggcgacaatttactcgtcgttcagcacacaagcgcatcgctgaccatcaacgagaactatgactctgatgtgcaggctgacactgagacttttcttaacagaattgttccagagggccacaatgctccttggaaacacactatggaaggacctgatgacatgccagcacatattaaatcttctatgtttggttgttccctaacgattcctataactgatggacgtctcaatacgggcacttggcagggcatatggctgtgcgaacatcgagaccatgccagccctcgcaaaattgtgattactctcaacggtgtttaa

SEQ ID NO: 4614 - DNA, 405 bp, Zea mays
  Peptide Sequence Number=SeqID_46393
atgcccacaatttttgcacttattgatgtcctcccgcccgaggtcgccaagctcctccccaagaaccgcctcctatccgagttggaaacttcgggtgtagttggtcgatttgctggtctcgaggtcaagcctggttccactgttaagtgtgagcctgaatatggttttatgctgcacctttcccaggagaaccggttgaagcaagtgcaagaaatgcaatcgaattgtgataaaggcctcaaacacatgagctgtgaagctcctctgctaggacctatggctgagctatggaagctgaagaacccagatatttctgagagcgagtgggcggtgcaagccgccgccgcatcaatctactcgacctgcaacatggccatgagaacagagaacgtgtcttgcttctga

SEQ ID NO: 4615 - DNA, 393 bp, Zea mays
  Peptide Sequence Number=SeqID_46394
atggatggaagggggcgacgccatggaagtgggagtcgtggggaggcgcggtttgcgggcacggctgccatggatgggaagaatcacgggattaaatcttgtctgcgggatttgggaagcaacttcccttgcgcgggcgcggcggctggcatcggcggcgggggctgcgggcgcggggaggaggaagcggacggatcgcgcggctgcgggatgcgcgcgtggggcggctgtgggcgtatgcggggaggctgcgggttgcggcgcggcgcggctgcgggatgcgcgactggggcggctgcgggcgtacgcgggatgcgggcgcggcagaacccaaccgccgcttatggggttccaattcccgaggcgcctaaaagtgcttttggagcagtctaa

SEQ ID NO: 4616 - DNA, 762 bp, Zea mays
  Peptide Sequence Number=SeqID_46395
atggacgcgtccctagctggcgtggttctacgacgtggacacatgatctcaattggtcacaggaagattcgttccatccattatctacaccgaccgcacccaccggtacgtggctacagctctcatcattacaaggagaggatcgttacacatcgtgaattcgtcatggaccaagacgactacctgtcgctgtgcctcgcggcggcgctggtcgccgcgtcccaacaggccgccggcgacgcgccaccgttacgcgcgagggcggcggcgtccgagctccggccgctccacttccgctgccccatctgcggcaaggcgttcgcgtcgtaccaagcgctgggcggccacaaggcgagccaccgcaagcctgctgctgcggcggcggcatacgatggcaaggcgccatcatcgccgtcgtcatccggccagcaccagaagggagccgtggcggccgggatcggcggcgccagcgccggcgggcggcacgtctgcacggtgtgccacaggtacttcgccacagggcaggcgctcggcggccacaagaggttccattacctgcacggcccgtcggtgccggcctcatcgctgccgcccagcactgcaggtgctgcggccggcgtgggctggcttgacctcaacctgacgccccttgcgccggacgtttcatttgccggagtcagacgacgacggggcgaggatgacgaggttcagagcccattgcctttgccggccaagaagcatcgggcgtcaacttctgcgtga

SEQ ID NO: 4617 - DNA, 2388 bp, Zea mays
  Peptide Sequence Number=SeqID_46396
atggccgaaatgctcgcccttccgctgcccctccgagctccggcgccaccgccgcgtcctacaattcccaaccccatcgtcacccatcgccaacctcacacaccgtcctcctcccctcctcgcctcttctccccgaactccctcctctccacttcccgccccactccagcctcatcctcccgcaaaccgcgcctcggccgcccgctcgacaccttccgcggcgaacagccgtggcacctgcctccgtccctgtccctccccgcccgccgcgcgctcctcgccctgctcgccgacccggcggaacacgcttccccgcgcgacgtcctctcggcgctcccggagaccgatctccccgccgtcgtgaacacgctcgcctcccgagggggccaccccggcatcgctgtcgccgtggtccgcgccgcgcgggacctccacggtgaccgcgctctccatcacccgcgcgtgctgcctactgccatccgcgtgtttgcgcgcgccggctgcctcgccgaggcctctgctatcctcgaggccgcgccggcgcccgacgccagcgcatacactgcgctcgtgtccgcgttctcccgcgccgggaggttccgggacgcggtcgccgtgttccagcgcatggtggatggaggcgtgcagcccgcgctcgtcacctacaacgttgtgttccatgcctactccaagatgtctgtcccgtggaaagaggtcgtggcgctcgtggactcaatgaaggaggacggcattgagcgggacaggtatacgtacaacacgctcattagttgttgccgtcgaagggggcttcacagggaggcagcgcaggtgttcgatgagatgaaggctgctggattcgaacctgacaaggtcacattcaattccctgctggatgtatatggtaaggcgcggaagcatgaggaggcaattggggtgctaaagaggatggagaatgccggatgtacacccagcgtggtgacctacaactcgctcatctcggcttatgtgaaggatgggttgttagaagaggctctggagctaaaacaggagatggagttcaggggtatgaagccggatgtggttacatacacgacattgatctctggccttgacagagttggcaaaattgacgcagcacttgctacatacagtgaaatggtgaggaacggatgtagcccgaacttatgcacctataatgcattgatcaagttgcacggggtgagggggaaattcacagagatgatggctgtctttgatgacctcaggtctgctgggtatgtgccagatgttgtcacctggaacacgctcttgtccgtgtttgggcagaatggtctagattctgaggtttcaggggtgttcaaggagatgaagaaagctggctatatccctgagagggacacatatgtttcactaattagttcatatagtcgatgtggtttgtttgatcaagcaatggagatatacaagaggatgatagaagccggtatatatccagatatttcgacttataatgctgttctatctgcattggctcgtggtggtcgctgggaacaagcagaaaagttgtttgctgagatggtggatcgagattgtaagccagatgagctcagttattcctcattgcttcatgcatatgctaatgctaagaagttggacaaaatgaaaactttatcagaagatatatatgcagagaggattgaacgacacaactggctagtaaaaacattggtcctggtcaataacaaagttaataatttacctgagacagaaaaggcgtttcaggaactgaggaggcggcgttgctccctggacattaatgttcttaacgccatggtatccatatacgggaaaaataagatggttaagaaggtggaggaggtcctttcactcatgatggagaattctatcaaccacagtgctgcaacctataatagtttgatgcatatgtattctcgtttaggtgattgtgaaaagtgtgaatcaatcctcactgagatcaagtcaagtggcatgcgccctgatagatactcttataacactgtgatatatgcatatggaagaaaaggacagatgaaagaagcctcaaggttgttctctgaaatgaaatgttcaggcgtgaaaccagatattgtaacatacaatattttcatcaagagctatgttgccaacataatgtttgaagaagctattgatttagtacgctatttggttacacaaggttgcaggccaaatgagagaactttcaattcaatactgcagggctactctagacatggaaggatggtagaggcgaaatcattccttagcaaccttcctaagatttatcctggaatatcgaaacaagaaaaacaacgactgtcggaactgctggcaaaacacacttcgtaa

SEQ ID NO: 4618 - DNA, 1371 bp, Zea mays
  Peptide Sequence Number=SeqID_46397
atgatgcagttcacgcacactgcgccaccgccgccgcctctgcaccctaacggacatgctggagggctagggctcgggctgttccttgacgtcggcgcgcccagggccgcacgcccctggccggggagcttcccgacgcctgcgtccaagatctcgctcggcaacctcaacagcaccagctgcatggagcagctgctggtgcactgcgccaacgccatcgaggccaacgacgccacgctcacgcagcagatcctgtgggtgctcaacaacatcgcgccgccggacggggactccaaccagcgcctcacggcggcgttcctctgcgcgctcgtcgcgcgcgcgtccaggaccggcgcgtgcaaggcggtcaccgccgccgtcgccgccgccgtcgagtcggccgcgctccacgtgcaccgcttcacggccgtcgagctcgccagcttcgtcgacctcacgccctggcaccgcttcggctacacggccgccaacgccgccatcctcgaggccgtcgagggcttccccgccgtgcacgtcgtcgagctcggcacgacgcactgcatgcagatcccgacgctcatcgacatgctcgccagccggcccgaggggcccccgatcctccggctcacggtcgctgacgtcgcgccctgcgcgccgccgccggccctcgacatgtcctacgaggagctgggcgcgaagctgaccaatttcgcgcgatcgcgcaatatgtccatggacttccgggtggtgcccaccacgccggccgacgcgttcacgtccctggtggaccagctcagggtgcagcagctggtcatggacgggaccgaggcgctcgtcctgaacttccacatgctgctgcacaccgtgccggacgagacggcggggtctgtcagcctgacgcatccggtatcgctccggaccatgctcctcaagtccctccggacgctcgaccccaacctggtcgtggtggttgaggaggacgcggacttcacggcggacgacgtggtggggaggctccgcgcggcgttcaacttcctctggatcccgtacgacgccgtggacacgttcctgcccaaggggagcgagcagcggcggtggtacgaggcggagatcgggtggaaggtggagaacgtgctggcgcaggagggcgtggatcgggtggagcggcaggaggacagggggaggtggggccagagaatgcgcagcgcggggttccgggcggtgtcgttcggcgaggaggccgccggggaggtgaaggcgatgctgaacgagcacgcggcggggtgggggatgaagcgggaggacgacgacctggtgctcacgtggaaaggccacaacgtcgtgttcgcgtcggcgtgggcgccgtcgtga

SEQ ID NO: 4619 - DNA, 285 bp, Zea mays
  Peptide Sequence Number=SeqID_46398
atggcgccctcatgcagcctcagggacgaccacatggcagctgcttcgcaactactaaaggttatctccagtattttctttgaggcagaaagaaaatacaatagaaccaatcaggggcggacccaggcctatggccgcctgggccacggcccagggcacaggcctaaaatatttttagaagaactcgtgtttgagtctggctggattatgctgaagaactacaaacctgcatctgccgtcgcgtcgcctctgccggtctgcccctctggtctcgctgagtcatag

SEQ ID NO: 4620 - DNA, 666 bp, Zea mays
  Peptide Sequence Number=SeqID_46399
atggctatagttgctatagaggagcaacctgataataacccagaagatcagggctttacaccagaagaaaatattgacaccgatagaaatgataaaaatgtgagtgatcatgagcctatggttaattcacctcctacagaaaatgctagtgttgatgaacaacctgtttttactgaagatatctatgatctaagaaattgggataatcttgataacaagtcaagggacatattagtagagaagggacccatcagagatgaaaatattgaatttcctttggataccaatggcagacatttttcatatactcattactctacaaagatgagcaatggagaagtttattatagaaagtggttgcttttcaagagttcattgggtcatgaggggttcagagattggaggcgtattaatgagaggttgaaagaacatgagggtagtatacaacatatcataagcatgaactcttggaatgaactgagggtgaggcttgtgctagaaacagtgagaaaaagaattggaaaaagagttggctatgtgcagcaaactccagctcggcttggcacaccggactgtccggtggtgcaccggacagtgttcagtgcgccaggctggtccgtggtgaactcgccgctctcgggattcgacagcggcgtacggctataa

SEQ ID NO: 4621 - DNA, 681 bp, Zea mays
  Peptide Sequence Number=SeqID_46400
atggagggaggcgtggtgctgctcaactgctccgtgagccccttcggcaaccgcgtgcgcatcgcgctgaagctcaagggcgtggtgtacgaggagaaggccgagaacctggcggccaagagcccgctgctgctgtcctccaaccccgtccacgccaaggtccccgtcctcatcgtcgggggcaagcccgtgtgcgagtccctcgtcatcctcgaattcatcgacgacgccttctcttctaccgccggcgagctgcggctcctccccgccgacccctacgcacgcgcccacgcccgtttctgggcctcttacgtcgacaccaagctcaacgattgcgcgatgcgcgtgtggcggcagcccaagggcgcggcggcggcggtggaggcggcggcgaaggacacggtggccgcgctcaagacgctggaggccgagctgggcgggaagccgtacttcggcggggacgccctcggctacattgacgtcgcgctggtgcccttcgcgccgtggttcctgacctacgagcggtttggcggcttcggcgtcgccgccgagtgcccggcgctggcggcgtgggcagagcgctgcgtccgggagaaccagtgcgtggccgagtcgctgccggaggccgagcacgtgttccagttcgtgtgcggcatgaggaaggcgttcggcctcgactag

SEQ ID NO: 4622 - DNA, 333 bp, Zea mays
  Peptide Sequence Number=SeqID_46401
atggaggaaggcattcttggcaacaaggtgacggaccacccaatcctaagagagggtaagggagaggacgacatgaatggtggtgaacttgacgacagggctgaagcgctacaccagtgtggatcagcgagggcggcggctaatggaggagcgaactggggaggcgcccggaggagcgtcgaccatcattatcagccgatcgatggggcaaagaacgctggtggtgtgacgagtcaccatcgagtggacgtggtcgaggttgtggtggatggcgaccgggtggtacaccaggggctcggtactgggatgagtaggcgggttggtgggaactga

SEQ ID NO: 4623 - DNA, 504 bp, Zea mays
  Peptide Sequence Number=SeqID_46402
atggccaccctgaacgctgtcgacatcgccgccaacgcctacaacaagatcccgggcccacgcacgggggaccaagactttcgggacgtcttccaccgcaccccgggacctccgggatgctcccgcgtccggaacaggaccagaccgcatcccctcactacccgccccgtgggctacgctgacgtgggcgtcgaactgctcatcgacacgcggcggtcgccgttcctcaagcaccacggcagtgagtcgcagtcgcacgacctcgaggtccacctgcacggcatcgccggctggcagggcgaccgcggcgggttcgagttggtggtggaccgggacgttgcactagtgaacaagttcgacgactgcctcgccgatgagtaccccgtgcctgtgcgctggaaggtacaccacaacaagagcatggtgaagggaggcgacggcaggtgggtcttggaggaccatgaccctgattacgaagacgaggatggcaacatcaacttgtag

SEQ ID NO: 4624 - DNA, 1164 bp, Zea mays
  Peptide Sequence Number=SeqID_46403
atgggtttcagctgccaacaccgttccgcctccctgcgcatcttcctcgtctccgtcgtcctcctgctcaccgctcctgcggggcgttgccattgctacaagcgcatcttcagcttcggcgactctatcatcgacacgggcaacttcgcgcgcagcggcccgataatggagtacccatttggcatgacctacttccaccaccctaccggccgcatcagcgacggccgtgtcctcgtcgatttctacgctcaagcgctccagctgccgctgataccaccaaatctgccggagaaggacacggggctattcccgacaggcgcaaacttcgctgtgtatggctccacggcgatgcccccggagtactaccgcaggtggaaccacgacgtgcgggcctgttacctgggcgtgcagatgggatggttcaaacaaatgctgcaacgaattgctccctgggatggtagagtgccccgtaggcgccaagaggcatccgttcatatgcccaatcgactgatcattccgtcaggcgccaagaggcagatcctgagcgagtctctcatcgtgctgggcgagatcggcggcaacgactacaacttttggttcgctgcccgtaggccccgcgagcaagccggccagttcatcccagacatcgtcgcgaccattggctctgctgcccaggagctcatcggcatgggcgcgaaggcgatcctgatcccgaacaacttccctatcggctgcgtaccgacatacctgagcgggtacaggagcggcaaccgcgcggactacgacgagcacgggtgcctccggtggttcaacgacttctcccagaggcacaaccgggcgctgcgcggcgaggtcgaccggctcagggcgcagcaccccggcgtgaagctcatctacgccgactactacggtgccgccatggagttcgtcaaggacccgcacaggttcggcatcggtgaccccctcacggcgtgctgcggtggcgatgaccagccgtaccacatcaacaggccgtgcaacagagcggccaggctctggggcaaaccgagcggcttcgccagctgggacggcatgcacatgactgagaaggcgtaccaagtcatctcccatggggtgctcaacgggccgttcgccgacccgccatttgctaaatggagctgctag

SEQ ID NO: 4625 - DNA, 114 bp, Zea mays
  Peptide Sequence Number=SeqID_46404
atgggcggctccggggccgccacgtgtccagagaaagtgatatactctaaggcatcaacagtcactcgaaacttggaaaaccgtgcatgcaaaaatgatacccatgctatttag

SEQ ID NO: 4626 - DNA, 354 bp, Zea mays
  Peptide Sequence Number=SeqID_46405
atggctgaggaggaggtgacggggaaattattatcatactttacggtggatcgccaccagaagattaccaagcacggagagatcgatattgcatccctcctacctttgcttcaaatctcaaataacctattgcggcgcaaaacacaccaaattattgtataccgcaacaacaatatgttcctcaccctacatatcagagccatggcgcgccatgcgatcataggcagagtgtcgttctcgattggccatggcaggaaggtcggcatagcaatgcccgaccaaatgagccctacctcccaaggaccggttgttggaacttgcgctcctgagcaagttgatccaacgggggagtga

SEQ ID NO: 4627 - DNA, 945 bp, Zea mays
  Peptide Sequence Number=SeqID_46406
atggggctcccgttcgtgcggccgtatctgagcggtcgccgcgcggaggacttcgcgtccggcgctaacttcgcagttggcggcgccacggcgctcggcccggacttcttccgctccaggggtttcgacatcggcgacggacgtgtgcacctaggcatggagatgaagtggtttcacgatctgcttgagctcctctgccgcagcggccgctccggtgtttggcgatggaacgagaaaggttgctcagacatcatgagccaatccctcttcatagtcggagaaattgggggcaatgactacaacctacctatgctctccagagtgccgattgaaaagatccgctcattcacaccaaacgtcattgccaaaatttcttcaacaatcaccgagttgattgggctaggagccaagactctggtagttcctgggaacctcccaatcgggtgcgtcccgaaatatcttctgatattcaagagtgatgacaaagaagattatgagccagagacaggttgcctcagatggatgaacgaattttcagagtaccacaacaagcttctcttggaggagctggagaagctgcgtaagactaatcctaccgtgactattatctatgctgactattatggagctgcaatggaaattttccgttcccctgaacgatttggtatcgaggaacctttggtggcttgctgcggtggagaaggaccctatggtgtgtccctttctacagcctgtggatacggagattacaaggtgtgtgacaatccagacaagtatggctcgtgggatggtttccatccatcggaagctgcatacaaagccattgcaatgggccttttgcgcgggacatacacacaaccatctattgcttccaccaccagttcctgtccacagctcactgagctcggctcttctgttgaatacaaggtcctctacgatttatag

SEQ ID NO: 4628 - DNA, 609 bp, Zea mays
  Peptide Sequence Number=SeqID_46407
atggaggcccgcgaagaagagtggattccaaggaactatgaggagtcgggtccaagccacttccctaaacagctagctgagaaggcctccaaaggtccttttatagcaaatcagtccaagactccttctgcgtctaataagaagaagaaggagagagccctaatggtgatcttggacgatggggaatctcctcagagccctcgtcaatccaggcgtgtgaagatatgtttgcttgaaagtgtcccggttgagttggtgcctgttactagggtttctgatcctctagtgatcgagacatcaaggatcgagccacctagagctctagagggtacaccatcgagtacatcatccctagatctaggtccagtagcagtacccgccaagcctcggattgcggaacctgatgtcggtcagatgactccatcgattgagtcctctagcacgctagccatgtcttctatcaggctgagtcctcccctggccctcgtgaagccaagaggtcaagaaggagtcatcgtcgactactcaaacaaaaatctcctagagcttactgaaaagagcaagtctatgatggccaggatcatcttggatattgacatctcaatttga

SEQ ID NO: 4629 - DNA, 1083 bp, Zea mays
  Peptide Sequence Number=SeqID_46408
atggggggtgccatcctcctcgtttccctcgtcctcctgctcaactcgccggtgggtttgtgcggctgcttcaagcgcatcttcagtttcggcgactccatcattgacaccggcaacttcgcgagcacagtccgttcgaccccgataaaggagctcccgtatggcataacctacttcaaccgctccaccggccgtgtctgcgacggccgcgtcataatcgatttctacgcgcaagcgctcggtctgccggtaatcccgccgagcataccaggggaggcaacctccccgttccctaccggcgccaacttcgccgtgttgggggccacggggctttcgccggactactacaaggccaactacaacttcaccatgccgttgccgtccagcctggacctgcagctccagtccttcaggaaggtgctcgcgcggatcgcgccgggagacgacaacaccaagagcctcctcggtgagtccctggtggtgatgggcgagatcggcggcaacgactacaacttctggttcttcgcgcgcaactcgcgtgacacgccgagccagtacatgccggaagtcgtcggccgcatcggcgccgccgtccaggaggtggtcgacctcggcgccaagaccgtgctcgtcccggggaacttccccatcggctgcgtgccgcagtacctgtccgcgttccagagcaatgacgccagctccgactacgaccagtacggctgcctcgtgtggttcaacgacttctccaagaagcacaaccagctgctgcagcaggaggtcggccggctccggtcgcagaacccgggcgttaagatcatcttcgccgactacttcggcgctgccatgcagttcgtccaaaaccccaagaactacggtatcgatgatcccctggtcgcgtgctgcggtggcggcggccggtatcacactggcaaagggtgcgacaagaatgcgacgctctggggcaacccgagcgcgttcgccagctgggacggcctccacatgacggagaaggcgtacagtatcatcgccgatggggtgttgaatgggccgttcgcggacacaccgctgctcaaaacctgctaa

SEQ ID NO: 4630 - DNA, 426 bp, Zea mays
  Peptide Sequence Number=SeqID_46409
atggatcgacataggcgccatggctgctttgttgcaacctctggtcccgtctctaggaagttcgtgcgccgccatggcctccacctcatcaacaacgacaccgcccgattcctgctcgacacctccttcttcatccagtgtttggcgccgacggtggtcgacggacggcatcaacctgtcatcgggcacagtggccctattggtggcctcacgggtgggcgtgaggtaggattactcggatctatcgtcgaaggaggaattgcgtctgcgtgtgggccgctcgccgcgacggccagcaagtgcactggcatcggctcctgccatggcctcatcgtggtacggctcgtagacgacgggaggatgcgacggagggctcgccacgtcgtggaacggctcgtccacctcctcaccttgcggcaacaatag

SEQ ID NO: 4631 - DNA, 1386 bp, Zea mays
  Peptide Sequence Number=SeqID_46410
atggcggtacacctcccggtacctcagccttcttctggcctatgcgcgaaaccccagcagcagcggggcaatgcctccaccgcggcggcggcggtggccacgccgccctccacattcgctccgcagaccacacggctgtcggctccgaccatcgcgctgaacatcagacacacgacgacgccggcagcgccgccggtcgtcgtcatgaccgagagagtggcgaagaagcagaacgaggagacgacggcgacgctggcgagcatgtggcgggagattcagggcgcccgcgactgggccggcctggtggagccgctgcacccgctcctccgcgccgagatcgtccggtacggcgagctcgtagccgccacgtacaaggcgttcgacctcgacgcgtgctccaagcgctacctcaactgcaagtacggcaaggccaggatgctcgaggccgtcggcatggccggcgccgggtacgacgtcaccaggtacatctacgccgcgccggacatcgcgctccccggcgcggccgggccgtgcccgagccggtggatcgggtacgtggcggtcgcgtccgacgagacggcgcgccggctcgggcgccgcgacgtcgtcgtctccttccgcggcacggtcaccggttccgagtgggtggccaacatgatgagctccctcgagcaggccaggttcgatccggcggacccgcgccccgacgtgaaggtcgagtcgggcttcctctccgtctacacctccgacgacgccacctgccgcttcacctacggcagctgccgaaaccagctgctttccgaggtcactcgcctcatcagcaaatacaaacacgaggagatgagcatcacgctggccggccacagcatgggcagctccctcgccctcctcttgggctacgaccttgccgagctcggtctcaactgcgacggttgcggcgacaccgtgccgatcaccgtctactcctttgctggcccgagggttggcaacactgggttcaagaatcggtgtgatgagctcggggtgaaggtgctaagggtggtaaatgtcaatgaccctatcaccaagttgcccggcatcttcttgaacgagaacttcttcggggccggcaggttggagcttccatggagctgtgcctgttacacgcatgtcggtgtcgagcttgccctggatttcttcaaggcgagagatcctgcttgtgtgcatgacctagaggcctatatagggttgctcaagtgccctaacaaggttgcagtggtgaaaaacgacggggagcatgttttgagcaaggcaatgaagtttgtgcttcaacacagttttgatacttggagatggcaaatggccgcaatccaagttggtgagttagtgcaagccattgggttgtag

SEQ ID NO: 4632 - DNA, 2529 bp, Zea mays
  Peptide Sequence Number=SeqID_46411
atggtctgctgccatggcggccggcgccgcagcgccgcgctcctattcttggccgtggccgtggtcgcctgcgctgctgctgcggcggcgcaggagcccaacaccgacgcctacttcgtctctgggtttttctccaagctgggccgcgccgcgccgtcctcgtccggcgccaacggggtgtgctcctggtccggcgtgtcttgcgacggcgcggggcgggtcgtggcgttcgtggccgccgggatggacctggccggcgccatcccggaggacaccatcggcaagctcgcgcgtctgcaggtcctcgacctcagcggcaaccgcctgaccgcgctgcccaacgacctgtgggagctcggcgcgtcgttaggcgcgctcaacctctccggcaacgccatccgcggtgcgctccccaacaacatcggcgacttcgcgcgcctcaaggtgctcgacatctcccacaacgccttcaccggcgcgctgccgcaagcgctcggctccatcgtcggcctgcaggtgctcaacgccagccacaaccagttccagggacaggtccccaacgccatcgtcttcggctgtgtgagcgtcgtggctatggatctctccggcaatgcactcgacgggggcttgccggacctgtcgccactccgctctctagcccgtctcaatctgtcgggcaacaggctccgcggctccatcatcggggcgttccaggagcagttgagggtgatagacctcagcaacaacggcttctctgggctgaatttcagcagtgggtatgccggctcggcgttggtgtacctcgacttgtcaggaaacgagcttacaggagaattcaccattgccggccggttccagaacctgaggcatgtgaatcttgcacacaaccagttgtccaatgctaatttgctggtgtccatgggtgggatatctgggctagagtatgttaacctttcaagcactgggctgcatgggcaaattcctgctgatttctcttcccgattggttggattgaaggttctcgatttgtcacggaacaatatcagtggggtagtcccagacatgagttctcttggcctacacttgctggacctgtcggtgaacaatctcacaggtgagatacctgtggcattggtgaagaagctgacatccatggatcggttcaacttctcatacaacaacctgactgtttgcgcatctgagctctctgcggaggcgtttgccactgcatttgctcagtccaggaatgactgcccaattgctgtgaatccagacagtatcgtgaaaagtagagggaaacataagggaatgaagttggttctggctgttgtgctctccttgttcttctctgttcttgggttgctttgcttggcagcggcatgtcgaagggggaggaagaggtgtgatgagctgcctgtggttaagcaggtgtcgtcgttcgatgagcctgctgtatcagggccattttctttccagaccgattcaactacatgggttgctgatgtgaaggttgcaacttcggtgccggttgtcatctttgagaagcccttgctgagcctcacatttgctgacctcttggcggcgacatcaaacttcgacaggggcaccttgttggcagaaggcaggtttgggccagtgtacaggggattccttcctggtggaattcaagttgctgtgaaggtgttggtccatggatcagcaatcggagaccaagatgctgcaagggagctcgagcggctgggacggatcaaacatccaaacttagttcccttgactggttactgtgtggcaggggttcagaggattgccatctacgagtacatggaaagcggcaatctgcacaacctactgcacgacttgccgcttggagttcaggcaaccgaagactggagtggcgacacatgggaggacaacaccggtggtgttgcaacaactgaaatcgtcacgccggaaggtactgcgacatggatgttccggcacaaaatcgccctaggtgccgcaagggcgctggcattcctccaccatggctgtatcccgcagattgtccaccgggacgtgaaggcaagcagcatctacttcgactgcgcaatggagcctaggctgtccgatttcgggctgtctatggtggcaggaaccagggccgatctgctacaccattccccgggctacgcgccgccggagttctccggctcggagaacgccgcggcgaccgccaagtccgacgtctacagcttcggcgtcgtgctgttcgagctggtcacgggcaagaaaccgctgggcgacgagtaccctggggtgcagaaggaggcgagcctggtgagctgggccagggcgatggtgaaggcgagcctcgcgccgagcatcatcgaccccaagatccgcgacacgggaccggagcggcagatggaggaggcgctcaggatcgcctacctgtgcaccgcggagctgccgtccaagaggcccgccatgcagcagatcgtcggccttctcaaggacatcgagccgaaggtggaagaggagggggactga

SEQ ID NO: 4633 - DNA, 156 bp, Zea mays
  Peptide Sequence Number=SeqID_46412
atggacgacgacagctcgggggtgctcatggtggtgactggtgagctcgggggtgcccagcaagatgggggatatcagagcgaggatcggatgcggcgcggcttgcaggggagacggaaaaaggattattcgagtttccaagtcttcacgtcgtga

SEQ ID NO: 4634 - DNA, 915 bp, Zea mays
  Peptide Sequence Number=SeqID_46413
atgacggcctccgtgctggcggcggttccagccccagcggcgccagagaagctgcggctgtcggacctcgattggatctgcaacctcggcgctggcggcttagccagcgtctgcaaggcacgccactgccgcaccggcgcggtcttcgctgtaaagatatcgttcgaccaggacccgctcgtcgtagagaaggaggccgaggtgctcaaaatcgctgctggggcgacgcacgtcatcgacttctacgccctgctccgcgagcccggctacaaggccgcgctcgtgctcgagtacatggacgctggttctctaggcagtctcctgcggcggcgccggcgcggggggctgcgaatcccggaggcagccgtcgccgaggtggccatgcagtgcgtccaggggctactccagctccactaccgcggcatcgcgcacctcgacgtaaaacctgacaacatcctcgccaactcccgcggggagatcaagtttagcgacttcaacatttcgagggtcgttggctccggcgaggtgcccatcaccggcggcactaagaagtacttcagccccgagcggttcgcgcccaaagcccgcgctgggccaatcggcgccatgaaggcggatgtctggggcctcggcgtcaccgtcctagagctcttcatggggcgactctccctcgtgcccggagtaaagaacccatctactgaggagctgaagcaggcgatctgcgacggggagactccatccgtgccggaggatacagaggcgtcggcagagctgcgcgccttcctggcggcgtgcctggagaagaacccagcgcgacgcccctttccggtagagctgctcgaacacccattcttagcgcggcgcgacgtggaggcgtctaggcgcgcgctgctcgagattcttgcggctgcgtaa

SEQ ID NO: 4635 - DNA, 543 bp, Zea mays
  Peptide Sequence Number=SeqID_46414
atggctggccctgccctagggccctcgctggcctccgtgacaccaagctccgacgagtatgggtgggggttgagtgcgagcacggtggtgttgaggccgagaccagtggaagagcctatctcagatgggtcacggggtggcagtgtcaaggacgggggcgaggcgcctgcggctcttttccctccccacattgcacatccactagaccacgaggtctacaccgcggttgagccagtcgttgccgagctcacggggagggagagattccgctgccacttccgaattcgcgtcaacgtcgcgcccggattactgcgactgggagggaggggctttgccgagtctccgtggtctgtcggctaccttcgcagcgggagagatccactgggtggtcggcgatttcccgccggcctcgcagtgctgccgtggaaccgcgcgctcccgtggccggagctacctgtgtcgcaacccctgctccggccaagctccgccgcggctctggtcaacgccgctggcaatggctggaggggggaagagggcgcttag

SEQ ID NO: 4636 - DNA, 867 bp, Zea mays
  Peptide Sequence Number=SeqID_46415
atgaacaccaccgagctgtcgtccacgtccatgtccatgcaccagcaccaccacgtcaagaacagcggcagcaacgcgacgtcgcacaatcaggacgccatcatcagcggcagccatgcagcgccgtcggccccggcgatcaagctgcgactcttccacagcgcgtcagatggccatcccgatgctgctgcctcacgagatgtgccggcggaggctccagcgccggcggcgccagagaagctgaggctgtcggacctcgagtggatctgcaacctcggtgctggcggcttagccagcgtctgcaaggcacgccactgccgcaccggcgaggtcttcgccttcgcggtcaagatatcgttcgaccaggacccgctcgtcttagagaacgaggccgaggtgctcaaaatcgctgctcgggcgacgcacgtcatcgacttctacgccctgctccgcgagcccggctacaatgccgcgctcgtgctagagtacatggacactggatctctaggcagtctactgcgccggcgccggcgcagggggctgcgaatcccggaggcagccgtcgctgaggtggccatgcagtgcgtcgaggggctactccagctccactaccgcggcgtcgcgcacctcgacgtaaaacctgacaacatcctcgccaactcccgcggggaaatcaagatgggcgacttcaacatttcgagggtcctctacgtcggctccggcgagctcctcgaggtgcccatcaccggcggcactaagatgtacttcagccccgagcggttcgcgcccaatgcccgcgctgggccgatcggcgccatgaaggcggatgtctggggcctcggcgtcaccatcgtggagctcttctag

SEQ ID NO: 4637 - DNA, 654 bp, Zea mays
  Peptide Sequence Number=SeqID_46416
atgggcattccgacgacagtgatgttccgagtagtcgtcatcgccgttttcaccctatcgaccgctgcagccgcaggcaatgcgacagcgagtccgagctccgtgaccaattcaacggcgagctcgaccaagaacaccacggcgccactgttgccgccgtttggcacgaaccacgcggtgggcgacggcgcggggtggatcttcgactggaaggcgaacgcctcggccgccaactactccgcctgggctgcgaaccgcactttcttcctcggcgactacctcagcttcaggacggacaccagcaacacggtggtgcacacgaccaacgccacggcgtacaggttctgcagcgccggcgtcgcggcgagaggcggcggcggcgggtggaagccggaggaggcgttcctcgtcgtgatgctcacggcggagggcaccaactacttcttctccgacgccttggacggggaacactgccggaaggggatgcggtttcaggtcggcgtggcacatggccgcggtctcccgtcggtgcccccgtcgtactacgagccactctccggcgcgccggcggggacgcgagcgcgacacgatggagctgtggccgtgtggggcgttgcgatggttgcagcctttgctgcacttgcgttttcttga

SEQ ID NO: 4638 - DNA, 312 bp, Zea mays
  Peptide Sequence Number=SeqID_46417
atgacggcgaggaatttgatcgggctctgtggggcaagattcacgacgaagtgtctgctagttaacaacgaagaatggatggaggttggggatgaaatgtgggtcccatgcgctagagagaacgattgtgagagtggggcgagggctgacgcaggggacgagttgtcatcagtgggctttggtgaacatggagcaatgccgataggggggatcctctccaaagcagcgccgaagctatcgactataaagcttcgacacagtgacatgtctcaagacgaaggggtgaaccgacttaaagatgaaatgacttaa

SEQ ID NO: 4639 - DNA, 1551 bp, Zea mays
  Peptide Sequence Number=SeqID_46418
atgaagccccgaaatcccgaaaacaccctcgcacgggtctctctctcagcgaagagccaaagaccgcgactcatcccacccacgtgtctttctccgccgccgaactcgaacgcggcacgcctcttgcctcaccacaggccagacgaagaagcggaccacacgccaccagctccacctccacggaatcagacggtctcctcctccttttctttctcccgtggactgcagcgccgccgggtagagatcccaaatctgcgcctcgaccaattcctccttcctccgctgccgttggttcggtcacggattatagatcagctttatatcctgtatgcattgatatttgggaaaattccttgtataccacagcaattttgcctgagaatggtgatcctctatccagggtgtgttgctccaacagttcaccgtgattttctgcccagatgggtgctgctgaacaacagctcgagaatgtactgccatgtctttccagatagaacgaaaccgaaaaggcaatacaggcatcagtgggtgccttgcttctccaagggatcttcgttccaagcagaggaactaaagacatatcccaacactgttcctgaggagatatttaacacgatcatactagatgactccgatgcattctatgtgctagaactgagcacgagtagagaatttagttcctctttggataaaaattctgcaatcttaatctgcctatttgatgtcgatggtgactccctattacaaagagtaccggcaatctatttgggtcaacctacacatggatttaagacagagcagcagatacccttccaaagtggttcagttgatatcgttactttcaaggggtcaaaactgaaaacgattaaagaagtctggatcggtcttgaatcaggttcatggagattagatggtttgagcttgaaagtaatacatggaccagttggtcagcctaaagaaataaatggaactccagaacagaagttcagcggtttgcagtacacttttgagaacgtaaatgtgttccttggagatgatggagcttcagtagctgaagcaaggccgacggctatcactgacctctcaggagtcggcctttctgatcttcaacaagggatgttatcctcaagaagcaaagcttcaagcattcaggaagtaagagaggatgggttgagagagtacgccgaccttaaacaatctctgctgctctatgacgcatctatagtgataaccggcttctctaccttcatcttggcttcaaatgacagcgctgcctattcgttcctgataggtggcattggagggttcctgtacctgttgctgctccaaagatcggttgatggtttgcctgtgatcggttcaccttcagaagctggcggtgcagttgcactgaagtatggtgctggaggcgacagctttgcgctcacacccaccgacctctttgttggcactgcagggttcctagcaaacaaggttgctgttcttcttgcagcgttcatgcctatgctaagtgactcaaagagtgaagatggatctggtgacagcagttaa

SEQ ID NO: 4640 - DNA, 1587 bp, Zea mays
  Peptide Sequence Number=SeqID_46419
atggctgcatccggaaggaaagctgtagtagttctcatcctgtgcatgttgtgttgcaatacctcgctgctaccttgctcagcttcctccgattccttcctgcaatgcctgtcggcgatgatgccgagcgagctggtgtaccagcagagctcgagcagcttcacttccgtgctgcagtcctccgtgcagaaccccaagttcgtgaccaacaccacggtgaggccgttgtgcatcatcacggcgtccgacgtctcccacgtccagaccgccgtgcgctgcggccgctggaacggtgtgcgcctccgcgtgcgcagcggtgggcacgactacgagggcctctcctaccgctccgtccagcccgaggtgttcgcggtgctggacctagccaggctccgcggcgtgcaggtgcgccccggggacgacagcgcgtgggtggacgccggcacaacgctgggcgagctgtactacgccgtgggcacgaccaacccggggttcctgttcccgggcggcgcgtgcgcgacggtcggcgtcagcggcttcatcagcggcggcggcatcggtctcatgatgcgcaagtacggcgtcgggggcgacaacgtcgtcgacgccaggatcgtcaacgccaacggcgacgtcctcgacaggttcgccatgggggatgacctcttctgggccatccggggcggcggcggcgagaccttcggcgtcgtggtggcgtggcggctgaagctgtctaaggtcccgccgacggtgacggtggtcaacgtcctcaggaccatggagcagggcgccgccgacctcgtcgccaagtgggagacgaccatcctccagccgccagtcctcccggacctcaccatccgggtcgtcctgcagtacaggcaggccttcttccagacgctcttcctcggcgggtgctcggacctcctcaacacgatgcgcggcctcttcccggagctcggcaccacggcggccgactgccacgagatgagctggctgcgcgcgatggcgttcatctacttcggcaacaccgacacgccggtggaggcgctcctgaaccgaaccaacaacgtgggcaactactacttcaagagcaagtcggattacgtgcgccgcgccgtcggcaaggccgggtgggacagcctgtaccagcagtggctctcccagaacggcaacgggcagatcatcctggagccgcacggcgcggcggtcggcggcgccaacacgatgaccacctcgccgtacccgcaccgcaggggcgtgctgttcaacatccagtacggctccaactggtgctgcggtgccaacggcacggaggcggcggcggcgcttgggtggctcaacggcctctacggcttcatggcgcagttcgtcaccagcaatcccagggaggcgttcgccaactaccgcgacctggatatgggccagaacgtcatcggcagcgacggcttgtcatcgtactggagcgccagggcgtgggcggagagatacttcatggggaactaccggcggctggcggcagtgaaggcggcagtggatcccactgactacttcaggaacgagcagagcataccgccacttcccaagtag

SEQ ID NO: 4641 - DNA, 348 bp, Zea mays
  Peptide Sequence Number=SeqID_46420
atggcggagtgcgccgtgaaccccggagcacattgcgtggaccctttcctttcccccgatcgttataaggtggccctggtcgcggtcctcccctttctttttgccttgcgcacaccagtagccacaccgccgtcgagctctagtaaggacgccgccgccaccgcgccatactctgatttgggggtgttccggtaccagggtgggtgtctagggcttcctcgcgtgggcgcaaacgtggtagcgtcgacctgggagatcgggagccagtgtcgcgcccgtaattgctcgtcgtcgctcttctggacggcggatctgcgcggtgcgagggcagctgtctccattgcctaa

SEQ ID NO: 4642 - DNA, 147 bp, Zea mays
  Peptide Sequence Number=SeqID_46421
atggctgacccaggggcccgcgtggcagagggcgtcaagcgtgcgtgcgtggagaaggcgggtggggagttaggctatgcaggtgtaatcagaagtgggccgaatggagcaaagaaaaagagcgttaaacggactgaaaatacatga

SEQ ID NO: 4643 - DNA, 1428 bp, Zea mays
  Peptide Sequence Number=SeqID_46422
atggtcggcggcatgtcaccgccgcggcggacgctgtcgatggggagcggcggcgccatgggacgccgcgcggcctctgccggcgtgatgggcgacagccccaagcgcgggctgtcccgatcgatgaccatgggcggcgagcgcacggtgaagcggctgcggctgtcccgggcgctgacggtccccgagagcaccaccgtgctggaggtgtgccgccggatggccgcgcggagggccgacgccgcgctgctcacggactcgaacgcgctgctctgcggcatcctcaccgacaaggttggccgtggcccttggcctttgctcttcaattcgtgttcttccccctttcacaaaattttcagcaagttcaggcacctgccggtggtggataacggcgaggtggtggccatgctggacatcgccaagtgcctctacgacgccatctcccggatggagagggcgtccgagaaggggaaggcggcgatcgccaacgtcgcggctggcgacgacaagtactccatcgtcgaagctctcaaggagcaaatgttcaggccctgcttgtctgccattattggcgaagactcaacagtcgtcatggtgtcgcctggtgattccgtccttgcagctaccaagaggatggtggaagcgcatgcgacctcagccgtagtggccgtggggagcaagccgcaaggcatcctgacttcaagggatatcttgatgcgcctggtcgctaagaacctgtcagcggacgcgactccggtagagaaggagcgcaagttcttgcatcttccagtgatggacagagacggctcaatcatttcaatcatcgacgtcattgacatcgcacatgccgcgatctccattgtggagagcagtggcggcggcggcgacggcagcgcggggagcgacgaggcggcatcgtccatgttccagaggttctgggactccgccatggccttgggccccctggacgacgagacggacacccagtcccagatgagcgaggcgtcgaggtcgcagatgatgatgtccgatgtccaccaccaccaccaccaccacgactccgcgggcggcggcagcgaggcggggttctcgctgtcgtccttctccttcaagctccaggacaggcgagggcggatgcaccgcttcagctgtgaggttcagagcttgacgcctctggtgacctgcatcctgcggaggctcggcgccgacatcgaccctgaccgcctaccgcaaatcctgggtctgaagctgttcctggactactccggcaccaccgggcgcaggaaagcggtggccaccccacgtggcgccatggcggtgggcatgtccagccgggacgcgtgggcggcggcgtacagcggggtcgccgccggggctgccctcgtcactggcatcggcgtcatggcgtacctgcgaagatctgcctag

SEQ ID NO: 4644 - DNA, 600 bp, Zea mays
  Peptide Sequence Number=SeqID_46423
atgtccaaagatcctgcaattggaacgaatcagtcaggaaaggcttattggtgtcgcatcagcgactactacaatgaacacaagaagacaactaatgctaggacacaacactccttggagcacaagtggagcgacattcaaagggacactacgaagttttgtgctgcgtacgacaaagtgataaggttgaagcaaagtggcaaaagcgaagacgaccaggtaaaagatgcactacagatgtttgaaagcatgcacaagaaacagtttaggtttatgcactgttggtacatgcttcgccaagaggtcaaatggacgacctggctctcaagttgtgaaactccacataatactgggaatgtcaacgtcaacgaaaccgggtcccaggcgaggcagggggaagaccaatttggttcaccgtctgatacctttgtgcgaccaatgggtagggaccgtgcaaagaaggctcgtagtaccagcacttcgatcaattcaactgcctgcatggcgatgctccagaagttccaagaggatagagcaaggttcgaagaaaaggctacaaagtatgaagatcaggccgcagcatcaacagaagaggattga

SEQ ID NO: 4645 - DNA, 450 bp, Zea mays
  Peptide Sequence Number=SeqID_46424
atgggcaagagcaagaaaggtggtagttcttcgcatcactccggcgataagcggaagcgtgagccaactcctccctcggaggacttcgacgactcggagtactcggaggaggagttctcctccgagtcagagggctcaccggtccatgcctctcccccggcgtcgtctgatgactcagacgactcccaggggctcgtcgtagaggtgtggacctacattcaggtcgtcgagcacgccgggctcgagggctcgaatgagtcggagtactcctcagatgaggagaactccttggactcgtccgaggagggcggcggcgacggcgatggcggtgacgacgacgacgacggaggcgatggtgatggcggcggtgatggcagagaaggcggcggcaagggcggcgaaggcgacggtgagggcggcagcaagggcagcaacaaggccagtggctag

SEQ ID NO: 4646 - DNA, 360 bp, Zea mays
  Peptide Sequence Number=SeqID_46425
atggcgatggcgatggcgatggcggggctccgttgccggggtgaccacttccagtggcacgggtgggggcaaccactgtgtgggcgtgtccaggccggcgcgcggccttggctctgtagcctaggactcctccattccattgtctccctctgctccggttccgaacgtctttctttgtcaaggcggctgtggatgtggctttgcgctttcgctatcctcagtcagtcagcatcactccgtttgatcatgccaggaaagcgaaagctttccaaggtcttgcattgctccgcccacaaggatgggccggccatcacagatcttgctcagtcagcatcacggatgtccattgaggatggttaa

SEQ ID NO: 4647 - DNA, 1776 bp, Zea mays
  Peptide Sequence Number=SeqID_46426
atggagcgctctcttgctaccgggacgactgaatcgccacaagaggagtgcttcaagggcaacaagggcgggttcagagccctccccttcatcttctgtgagttccgccctcgatctcatcttactggtcatatggcaacaaatgagatgctggagaaagttgctggattcgggctcaacaccaacatgatcacgtacctgaccgacaagtaccacctcagcaccgtcagctcccagacgatgctgttcgtgtggagcgcgatctccaacttcacgcccatccccggcgccgtcctcgccgacatgtacctcggccggttcatggccgtcgcgctaggctccgtggcgtgcctgattgggatggtcttcctatggctgagcgccacggtccctggagcgcggccgcctccgtgcagcggcgaccagtgcgcgccgccggggacgaggcacctcgcgtggctgctcgccggcttcgcgttcctgtccctcggcgccggcggcgtccggccgtgctccatggcgttcggcgcggaccagttctccaggcaccccaggcagcgccgggccagcatcctgcaatcctacttcaacgcctactacgcgtccatcggcgtggccttcacggtcgccgtcacggccatcgtctacctgcaggacaacgtcgggtggagcgtcgggttcgccgtcccgatgggcctcatgctgctctccgcggtcagcttcttgctgggatcgagcctatacatcaaggagaagggcgagaggcggatgttcgccgggataggcaccgccgtcgccgcggcgatcaggaaccacggggcgcggttgccggacaagaccgtcgatggcgtgtaccatcacctcaaggactgcaagctcgctgtccccacggacaagctgaggttcttgaacaaggcgtgcttgctccgtgccaccaaggacgacgcgccctgcaacggctcggacgcggcggcggcggcctccgagcggcacggccacgacgggacgaggctgtgcacggtggaccaggtggagcagctcaagtcggcgatccgcgtcctgccgatctggtcctccaccatcttcctcgcccttgccatgaaccagagcttcgccgttaagcaggccgatgctatggaccggcgcgtcggcgcgggcgggttccgcgttcccagcggctccttggccgtcttcaacatggccaccatgtcgctgtggtcggcctgctacgacaggtgggtcgcgccggcactgcagcggtacacgggcaacccgcacgggctcaccatgaagcagcgcatcggtgggggcctgctcctcgccaccgcgtcgacggctgtctccgcggcggtggagggcgagcggaggcggctggcgcagcgcggggtcaccatctcggcgttctggctcgtgccgcagttcgcgcttgtggggctcgccgaggcgttcggcgtcatcggggagatcgagttcttgtacaccgagctgcccaagagcatggccagcttcagcatgtcgctgctgtacatggccttcggagtgggcaacctggccggcgccctcatcgtgaaggtggtgcaggtggcgagcgggcaaggggtgggaacgggctggctcgtcgacaacttgaacgtcggccgctacgactattactactggctgctcacgggctacggcgtggcgaacttcgtgtacttcgcttggtgctgctggttgtatggcgaggaggggaagaacgtggagtgggaagaggaggacaacacggagcagccctag

SEQ ID NO: 4648 - DNA, 234 bp, Zea mays
  Peptide Sequence Number=SeqID_46427
atggcgctttccccctcctccttgcggaaaggcgacgaaggggcttttttagtgaccacagtaccaaaggtgtccgaggaaatcagagacagaaaaggtgagagggccttaggcctaagaccaccagatgaggatgtcaacattgttatgcaagtatggacagagattatgtgcttatctacttcgtttggcataaggatggtgcaagaaaaatttgagatcaatgtaatgtaa

SEQ ID NO: 4649 - DNA, 1437 bp, Zea mays
  Peptide Sequence Number=SeqID_46428
atgcccggcataccgagggatgtcgccgagcactcgctggatattcgggccagagcccgacctgtcaggcagcctctgcgccgactcgacgaggagaagcgcagagtgataggcgaggagatccacaagctaatggcagcagggttcatcaaagaggtattccatcccgaatggcttgccaaccctgtgcttgtgaggaagaaaggagggaaatggcagatgtgtgtagactacactggtctcaacaaagcatgtccgaaggttccctaccctctacctcgcatcgatcagatcgtggattccactgctgggtgcgaaaccctgtccttcctcgatgcctactcagggtatcaccaaatccggatgaaagagtccgaccagctcgcgacttctttcatcacgcccttcggcatgtactgctacgtcaccatgccgtttggcttgaggaatgcgggcgcaacgtaccagcggtgcatgaaccatgtgttcggcgaacacatcggtcgcacggtcgaggcctacgtcgatgacatcgcgaaaggcgtcaagctcaatcccgagaagtgtatcttcggggtgccccggggcatgctcttggggttcatcgtctccgagcgaggcatcgaagccaacccggagaagatcgcagctatcaccagcatggggcccatcaaggacttaaagggcgtacagaaggtcatgggatgtctcgcggccctgagccgcttcatctcacgcctcggcgaaagaggcctgcctctgtaccgcctcttgaggaaggccgagtgtttcgcttggacccctgaggccgaggaagctctcgggaacctgaaggcactccttacaagggcgcctatcttggtgcccccagctgatggagaagccctcttggtctacgtcgctgcgaccactcaggtggttagcgccgcgattgtggtcgagaggcaggaagaagggcatgcattgcccgttcagaggccagtctacttcgtcagcgaggtactgtccgagaccaagatccgctacccacaagttcagaagctgctgtatgctgtgatcctgacgaggcggaagttacgacattacttcgagtctcatccggtaactgtggtgtcatccttccccctgggggagatcatccagtgccgagaggcctcgggcaggatcgcaaagtgggcggtggaaatcatgggcgaaacaatctcgttcgcccctcggaaggccatcaagtcccaggtgttggcggatttcgtagccgaatgggtcgatacccagctgccgacggctccgatccaaccggagctctggaccatgtttttcgacgggtcgctgacgaagacgggggcccggcgcgggcctactcttcatctcgcccctcgggaaacacctacgctacgtcctacgcctccatttcccggcgtccaacaatgtggctga

SEQ ID NO: 4650 - DNA, 186 bp, Zea mays
  Peptide Sequence Number=SeqID_46429
atgtcccaagagggaatttctgttgatccagataaagtacatgagagcagcgagaaagatggggatgacgccgacccgacagccccacccggcagtgagatagagcaggcgcgcgtgcaagtaaggagactggcgacacgggcccaagccgtcagcgacttacccagcacgcactggaaagagtga

SEQ ID NO: 4651 - DNA, 594 bp, Zea mays
  Peptide Sequence Number=SeqID_46430
atggattatcgcgatggagaagcctgccacgcggaggtgcaggtcagcggtggcataaaaccttcggtgagaaatttttccgcgccaaccgaaccaccagtccagacgagcagcagccaaccactagaggtctcgtgcgagcacccggggtccactagtgcacttcgatcggaccctttggcggagatcccagacgcgacggcgcacgatcatacttccctcttcttcttcgccgaaagtggagatgggcagtggccgttgcaatgccacgcgatgagcggcggtctggtaggatttggggaggactcagctgatgaccgggtcccacccgacaacagcgggatgaggcggacgaggttgacacacagccccgggtggcaatgtgcacacgcggcgtggagagaagaaaaaaacgaagaggtgggccacagagaaggaagtggaaatggggatgtggggttgacagttgggccccaattgtcagtcttagagcaggaacacagggaaggtggcacggcatttgggcgagaaccactggatcggttccagccggtggaggatttggaggattcatttctgtttgctgttgcctga

SEQ ID NO: 4652 - DNA, 363 bp, Zea mays
  Peptide Sequence Number=SeqID_46431
atggcaggaagtgccccccgagagtcccgttttatagtcctcatcaggagacgaagtccgcgcggggaccaagcttttcccccggcgatagaggtggtcgttgcaatgccgcgcgatgagcggcggtctggtaggatttgggaggactcagctgatgagtgggtcccacctgacagcagcagggtgaggcggacggggctgacacatgggcccgggtggcagtgcgcacgcgcggcatggagagaagaaaaaaaacggagaggtaggacgcggagaaggaattggagatggggatgtgggttgacatttgggccccaattgtcagtcttagcgcaggaacatggggaatgtggcgcgggttag

SEQ ID NO: 4653 - DNA, 501 bp, Zea mays
  Peptide Sequence Number=SeqID_46432
atggcttcgcctaccctcgccaatggtgcagacacccgcttcagctttactacctttttcgagagggttttcacctctattttgtgggaggccctgcaaagcgatgctatgacgcatttgattgggcttgctcaaactgcaaagactacccttgatgatacggaagtcttcgtagtcgatctgtcctctgagttggtggagaaggatctccaaattgagcaagtgggcaatcacacccgagagttggagcaacaagtggaaatccgggacaacaccattgaagtcctcgagaatcatgtccatgatgtgcaagaagagctagatgatgccaatgctcatttggatatgaaccatcaggacatgaaccaagcattggaggcagattggaacaacgaggacaggatcccgagatggcaacaagaccccgctgtgggcaaaatgagcatgttccccgccaccacactaagctccaacaatgcaggagttgatggcccaacataa

SEQ ID NO: 4654 - DNA, 963 bp, Zea mays
  Peptide Sequence Number=SeqID_46433
atgccgccgctcagggcccccaaagtcataggaagccaaaaagccaactccactccatctccatcacgtgcacgtcaagtctgtaggtggccagaagccagcggccaggcggtagtggaggccagcggccagcgaccaggctgccaggcggcagcgccacaacagactgcaggtggtcagaagttagatcagacgcaacagcagataatgtcttcaagaaaatatccatctggtagtgagaaaagaaaaagaaaaaaacaggaagatgagttcatacaaatgactttattgattcgttgtgttaacttgtcttatggaaagataaacattgaggagtattttttggggttcctgaaggtggatgacacatctggtttaggcatttttaatatattgattgatgctatggagtcatttggatatttccttggtcaccgctgcctacagacttcggcttcttccctcacgtccctctcttcccaaccgctccttccagccctcacctcgccggtctggcggtctctagcacctcggcgttgtctctgtctcagccggccgctcgaccctagcatctgctcgcttgccttcactctgtccccagcttgccccgaggtctgtcctctatgtgtttcttcaagctcgccatggctggcttcggatcctgctcgcgagtttcctcagcgccgtcagcttgccggcctccagctcgcctgtatcatggtcgtcgcgccgtctttgctcgttgggtcttgcgttgccgcgcacacgtgccggacacccctgcttctctgttggctgcgcgcgccggactacgtccttcgcagctcgctggctttagctgcaggacaccaccagccgtgccttcctcgactcgtccacagcgtcgctcgtgaggtgctcgacgtaatggcggaattacgtaatggcggaaatgaaaatcgtagctgtgctcgtgacctttga

SEQ ID NO: 4655 - DNA, 1143 bp, Zea mays
  Peptide Sequence Number=SeqID_46434
atgaccgcgtcaaaagaggctggcccctcggaagggttcgacagccgcttcagagcactcgggctccacgcccactactggctggcccccgaagggttcgacagccgcctcagagcacacagagcgagggatgactctgggtacgtccgatacacggccgaggctcgtgctacgctcccgagtcacttcgcccctccactgactgacctgacaggaaaacagtgccgcctgccctgctccgactgttgtgccacccgccaaggcgccataggaagctccgcctcacctgaccccagggctcggactcaacctcgataccggaagacggtctccgcctcgcccgaccccagggctcgggctcagcctcaacaccggaagacggtctccgcctcgcccgaccccagggctcggactccacctcgacctcggaagacggtctccgcctcgcccgaccctatggctcggactcaacctcgacctcggacgacggactccgcctcgcccgaccccagggctcggactcagcctcgacctcgaaggaatcaccgcctcgcccgaccttgggctcggaccgaccacgctacaggggggcccatcattaccctacccctagctagctcaggctacggggaacaagaccgatgtcccatctggcttgccccagaagaggtgctggaatccacaagatgccgatgggtcgagcctatttccaaccggctggcttggcctcataccgcaacgatgactgaccatgatcgtgctgatggcgttgctccaggagttgacaagctggtgcatgaagcccataggctggggtcttctactgctcgggtagcttcattgaaaagctatcgtcgtgctcggggtctctatgatcgctgtgcggaaaggtggttcaggggacacaaatgccccaatactgtagaactacaagctatcgaagaggtttgggatttgttggatgaactagaggatagtgaaacagtccaagacagccagcctcaattactgatgacactgtctgaggcggcgtggacagggacagatgcagtatccacattatgttttcagggcaatattcaacagcatcctttgatgatacttattgattctggatcaacccactcttttattagcgactga

SEQ ID NO: 4656 - DNA, 531 bp, Zea mays
  Peptide Sequence Number=SeqID_46435
atggacgtccgggatccaaaggcccggcggcccggtcatggggtgcggtggcgccattggacctcgcggcgaggtttcaccggagacgaggggggcggccacgatagggctttaggggtttggggaagggctcaggcatgctcagggcgatctggcgcacttagtcgtgggcgcaataccggcatggaggcaccagagagcgtgaaacacggcgaagcggagcgcctgggtgacggaagggacgtggtgaagcctcaagtcgacggcggtggactccggctgcgtaagaaatgctctggtgagcgcggaccagatgaactagagcagaagagggcaaaccaaggggtgtcccgagttgctgacggcaaggcggaactcactgaggtaacggacgcggcggcggccttcggtgagcggcggtggagctgcctggttgcgcgcgcagggcgagagagggggcgagggagctcggctgagggcgcaaatgagcaggggaagtgggcgatcggggtgcgggctctaaaggggtga

SEQ ID NO: 4657 - DNA, 780 bp, Zea mays
  Peptide Sequence Number=SeqID_46436
atggtgactggtcagttgagtcacctagagagactgcaccaccgtctacgtgaggagcaggaacgccagcgtcaagagagggagcagcaggactcttcctccccacctcagcaggaagtggagtctatgagtcgccccgaccccgtgcctcagctagaagcaccccctgcaccaccacagggcatcgtggctactagaggagctattggaggagctgctggaggagatcctgatggagacaacgacagtggcagctcagaccatagtaccgagctcttcgaggacgaaggcaatcctaggttaagcagtacagtcaacctagtcgttgtgctcaacactgagctggaccatgctctggatgagttgagtagggctcgtgctgagatcgcggagctgcgtgctgagcgcgcggagcgccgtcaccagaaggatggttctcccgcccccgctaggactcagcacccttgtcgctcgccgccacatgaacaccatgcttatggcacccccgactgtaggaccaagatagatctggatccttatatcatgtctaacaataggcgccgaggagggaggcgtgctcagcaggagcagtgtgtcccacagggtgaggagtcacagccgttgcggcccccgccacccccttatgacagtggagcaaatgttcttcatgcaagcctaggcagtgcaagctattggacagactttggtagccatgcagcaagtgcaacaacaacttcagccacaagcgcagatgtagatgccacaaatgccgagggataa

SEQ ID NO: 4658 - DNA, 640 bp, Zea mays
  Peptide Sequence Number=SeqID_46437
acttctcgtcgccgtgcggcttggtggcaacaatgaattccgccgctacggtaatgatctttcccagctctcctgcacgctaggcgactgggcactcgacttcccgcacaactggcttggacatgattggagcgaggcagccgatgtttatactcagcagggagacgagtccgcgccctgtggagctatctcgagattgcggcagagattgcggagattcagttgtaacggacttgattggagctcggactctgaagaagaaatcggccacagtgccccatatgctagcgatcaggagaataatctgatgtcatcccttacctcacatggtggcaagcaaataaacaaaacaaaaagggatgtgggcatgggcatgggtcgtgcggtgaggatgtcagctcagggtagggtgatgatgacgcctcctgttgacgtggctggtgtgcgccctagtttgggtgatgtggaagctcctccgaagccgaggtcgagtctgtcttccgtggccgaggtcgagtccgagcccctggttcgggcgaggcggagaccatcggctaaggccagggtggagtccgagccctggggtcgggcggagcggagttcgtcgtcttctagggctgagcccaagtccgagccctag

SEQ ID NO: 4659 - DNA, 477 bp, Zea mays
  Peptide Sequence Number=SeqID_46438
atggcgaaggggcttaccggtggcgagatagctccggtgaggcgtacagggaggtcggggaagtcacggtggtcacgtcgatgtgcggattgtcgtcggaggtggacggagctggcgggtccatgcgagcaggcggggaagatcgtcggcagtgaggaattcggcctggtagctcggtctacatgcgatggcggacaaccgaagtccggcgacggtgatctcgctgctccagggaggcagggcctcgatccttgcttgaagaagcttcacggctccgcggggacactgtccagaggctcgggtgaggctaagggtctctggaaatggctggccgcgatggccggcgtttgggtggctcgggcgggcggcgcagagcttgccggagttaaggacgaggtcaagacagcgggggtgagcgtggagtggagtgtcacatgtctaggggtggtccttaaggtcgcgggcgagctcggctga

SEQ ID NO: 4660 - DNA, 225 bp, Zea mays
  Peptide Sequence Number=SeqID_46439
atggccaggatgcgaggaggggcaacactgggggtccagcccacaaaaagggaaagtctcaacactagcgccaccacccctatcgtggcaagtcctctgaatcgggtacttcaaaagggagtactcagagctcatcgtcgtgctgagtgtcaatggggtggcaggtgctctatctacaacaaggatcccaaggatgtgggcactgtcaacatgatggcaacctga

SEQ ID NO: 4661 - DNA, 825 bp, Zea mays
  Peptide Sequence Number=SeqID_46440
atggtggcaatctcacccttgcgccgtgtgtggatggttctaggaggcgtttcttctctcgtcgtgccagttcatgcgtctcctggaaacatctcgcgctccctccccctccccccaaaaccccacctcccccgctcgccggcgtactccgacgacagctccttttggacactagttccctccaccggcgctccaaaggtccagttcggttgctacatcatcaagcaaaaaggaagggggagaaaggaagaaaggaaaggaaaatatggacaacaccttgtacgggagagcgacgccttaagtagcgtgaatctggagggggatctaggcgaggccggcgccgacagcgcctgcagcagcggcactcagtggttcctggtggccgccagcgcggcgggtggcgtcacgggggccaggtccaccggctgctgtagcggcctagtgcggcaacagaggaccgtcgtggacgagccggttgctgctattgctgctgcgggtggccggtggtcgtcaagcgatacgtgccatgagtctcactcatcatctaccccttcccactactcatttgttgacaaacgtaggaaagtagtaatagtggcattgaagaacacacaatcactttctgccatctctattgactattgtgacattcaagtttatgtcgaagggccaactcgaccaacaggaggtgttgttgctatagcaatgctcattggttctaatgctccaatttctttcgagagaaaatatagagcttctcacatgactcatgtttatgatttctgcaaacctgatcttacaagtaaatatccaattagtttttga

SEQ ID NO: 4662 - DNA, 2379 bp, Zea mays
  Peptide Sequence Number=SeqID_46441
atggcgtccgtgccttccgttgccgtccccgtcgccgcctcgggcttcccggctgccggcggggctgactcccggaggccgccaccgagctccgtctccgccgccgataagaacagtcggttgctaggactgcgggcggggtatccatgggctcacccattttctacacctttgcagaacaattggaatggcaggagcatccaagcagcgcagaatggcagcaccatggaagcgccgctgcggcctctcgacgtcggcgaagcaatggccatgctcagggaggggaagacggtgcagtcggcgatgtacgtgccactgctgcacgtgtgcgtcgagaccggcagcctcggcggcgccagggccttgcacgggcacatggtcaagacggggaccagcgcggacatgttcgtcgccacatctctcgtcaatgcttacatgcggtgcggggcgagccaggacgcgcgtagcctcttcgaccaaatgcctgagaagaatgtcgtgacgtggaccgcgctcatcacaggctacactgtaaactctcaactgttggaggcactcgaggtgttcgtcgagatgctggaggccgggaggtacccctcacattacacgctgggtgccatgttgaatgcgtgctctgcttccaacaacgctgaccttggcagccaggttcatggatacacgattaagtatcgtgctctctccataacgagcatagggaactcgctctgtcgaatgtatgccaagtctgggagcttggaatctgccatgagggccttccggatggtccctgataagaatgtcatcacatggacgacaatgatatctgcctgtgctgaagacgagaactacacggagcttggactgactctgttccttgatatgcttatggatggagtacttcccaatgagtttaccttgacgagtgtcatgagcttgtgtggtacaaggctagatcttaacctaggcaagcaagtccaagccttctgcttcaaaattgggtgccaaacaaacattccagtaaagaactcgacgatgtacctctatttgagaaagggtgaaaccgatgaggccatgcggttttttgaagagatggatgatgtcagtatcatcacgtggaacgccatgatctcgggctacgctcagatcatggagaccgctaaggatgatcttcatgctcgttccagaggtttccaggcactaaaggttttccgcaacctcaagaggtctgcaatgaagcctgatttattcaccttctcaagcatcctgtctgtctgtagttccatgatggccttagagcagggtgagcaaatccatgcacagacgataaagactggtttcctgtcagatgtcgttgtgaacagcgcactggtaaacatgtataacaagtgtggttgtatcgaagatgcaactaaagcctttgtcgagatgtcgatacggactcttgtcacgtggacttctatgatctcagggtactcacagcatggccggccccaggaagctatacagctctttgaggacatgagatttgctggagtgagaccaaatgaaatcacatttgtatgcgtgctctcagcctgcagctatgctggtttagccgagaaggctgagcactacttcgatatgatgaaggaagagtacaaaatagagcctattgtggaccactatgggtgcatggttgacatgtttgtgcgcttgggccgactggacgatgcatttgccttcatcagaaggacgggtttcgaaccaaacgaagccatctggtccagcttggttgctggttgccggagccatggaaacatggagcttgccttctatgcagctgatagactgatcgagctcagaccaaaaggaattgaaacctatgtcttgctgttgaacatgtacatttccaatgagagatggcatgatgtggctagagtgcgcaagctgatgaaacaggagggtcttggggttctcatggaccgcagctggattacaatcaaggacaaggtatatttcttcaaagctaatgataagacgcacgaactgagtgatgagctgtatcaactgctggagaatttactggagaaggctaaaaccattgggtatgaaccgtaccagagcgctgagttatctgacagcgaggacgacaagaagcctcctgcaggttcagtaagacaccacagcgagaggttggctgttgcactggggctgctccaaacacctccaggcgcaacagttcgcgtcacgaagaacatcaccatgtgcagggactgccacagctctattaagtttttctcattgcttgcgaacagagagattgttgtccgggatagtaaacggcttcacaagttcaaggacggccgatgctcttgtggagattttggtgcgttactgtga

SEQ ID NO: 4663 - DNA, 213 bp, Zea mays
  Peptide Sequence Number=SeqID_46442
atggccatcaatggtggtctccataatggggaggaagaaggggaaacgggggaggagaagagggcggtcgtgcggcggtttccggcgcgggaccgaacaggcgcgaccatcgaggggcgcgacagggagtggggcctgcccgtcacgacaacgactggggacgatacagagcacgacttacgcaagttcgatgccaacaacgatgacgggtag

SEQ ID NO: 4664 - DNA, 681 bp, Zea mays
  Peptide Sequence Number=SeqID_46443
atgcgctcgggccttgccgcgtttgacgaggaccccgcctcgccgggcaatgaagacaagatggacgaagccgccgacccgctggcattcgtcctgtcggtgccgcaggccgatccccctggcacgcgctatcgctacaattcggtcaccgcttataccgctggggtggtggtggccaaagccacgggcggtaccctggcggcctttgcggacgcgaacctgttcgccccgcttggcatcgcacactggcaatggagcgcagatcgcgcgggctataccaagggccagggcaatctgatgctgacggcgcgcagcctcgccgcgattggcgaaatggtgcgcgacggcggacgctatcacggtcggcgcatcgtcagtgcggcatggctgcgtgcggcgctcgaacccaaggtcgcgatcggcgagagtgatccctttgccgatggctatggctatttctggtatgccaagcgccagcagatcggcggggtggatattccggtgtcgtttgcctcgggcaatggcggcaacaagatctatgtcgtgccgagccgccatctggtggtggcgatcacctccagcgcctatggccacggctatgggcagcgccgttcggaggcgatcttgaaggcgatcctgtccgccccccgccctctcggcgtcgttcggcgcgcgggatga

SEQ ID NO: 4665 - DNA, 381 bp, Zea mays
  Peptide Sequence Number=SeqID_46444
atggtcggtgccatcgggcggttcgcggtcgcgctcaccatgcttgtttgcttggcctgtgcgcgcccggcgcgggccgaggacggatacgatctctggctacgctatcgcccgctaccgcaactgcagcggccggcggcaaccgtctccgcaatcaccgtgctgcgcgaatcgccgacgcttcgcgtggcagcggaggaacttgagcggggtttttcgggcctgtccggacatgcggtggcacggcgggacgccatcaccgccgattcggtcgtccttgccaccgcccaagtgcccgaggtggcggcgcttgccctgccggtcgcggcgctgaatgacgagggatatctgatccgtccggcgacgctcggtgggcggcgg

SEQ ID NO: 4666 - DNA, 318 bp, Zea mays
  Peptide Sequence Number=SeqID_46445
atgaaggacacggttgacggcaccgacaggcactcttttaccgacgattctgaggacgagcactgcagtccaacaggccaaattgaagacccaaagtgtcgcgaattccttcggaaggtatctgaacgtgtgcatcagaaccctgaaccgtcgtacctgctcggtatgggcatgcgagatctacttggagaaacctgggatggtagtccagatgggaagttccctactggaagaaaaatcacagtcaccggagttcgtatgactggaatatgggtctggctggtcttaggtggactggacaacatgatgtatgagtag

SEQ ID NO: 4667 - DNA, 402 bp, Zea mays
  Peptide Sequence Number=SeqID_46446
atgcacgtggtatcgatgaaagttgtctctgaactcctcctaggcgatggcttcagggttggcatgggtggcgaggcggggaccatacagaaccttgtcacggtcattgcactaagtgactccgactccatcgatctatggttccaagtctatctaggtcctgcagtcaagggtgccataagcatgatgaccatggggcgacaagcagtaatggtgctgaatctcgataggagcgggggaaccatcctcctgatggcggcgctatgcgtgcttagcacgcagtttcgcaatctctgcccgagccttgcccaacttgtcaagggcgtggttcagctcggtgttgagcacgacgaccaggtttaccatggtgctcaatctaggattgccctcaacaactggtga

SEQ ID NO: 4668 - DNA, 414 bp, Zea mays
  Peptide Sequence Number=SeqID_46447
atggcggcgcatctgcgctcggcggcggtgcgtctcggcgctctctggccaaagatgaggggcggtgcatctcggcgctctcccaactggcggcgcgcggcagctccctacaggcccatgccaggcgccacgtccaccccggcgtcgtgggccggtccctgtccgagggagggcgagggcgagggcgtggatacggggactgagaaggggctggagatcgcgaggctggggacctcgccgcggatcgtggagaagctcgccgcgcggggcatcaccaggctcttccccatccaggtgctgcctccctcgtggactgggaagaccctggcttttgttattcctatcatggacaagatcctcagctacaacgagaagaatgggttcgtttctctttcacatgtggaattcttttaa

SEQ ID NO: 4669 - DNA, 465 bp, Zea mays
  Peptide Sequence Number=SeqID_46448
atgctaggttccgacggcgtgccgtcgggatcaacaccacccaccacctccatcgttgccacatctattgatgtgacggctgtcgccactggtccaatctcccaggcgaacttcatggcattccaacagctgttggtgcagcagttcgccgccctcaccgtttccatcaatgacatgtctagcagtacaccgcctccagcttctgccaccaccagtgtagctgctttaacctatggcatgttgggctatggtggcatagccccccttcccaccaccatcgcacactaccaccaccatcgttcccttcccatctaccacaacacctcttccatcgtcgatctccaccttggtgccaccagcgtcaagcatgctcgtatccatccatcagattgccttcccacactcctcatccttgatcccgtcgttcactgcccccatgcttgtgccgccacagcagcactatga

SEQ ID NO: 4670 - DNA, 276 bp, Zea mays
  Peptide Sequence Number=SeqID_46449
atggttcaaggcttcaagcaggttttacatgataggttcagtattgtgaccgttaattttcagaatttaacacaagctgataatagtttcacggagtggtggcaggatgccactgaggctgctaatgtttcagcaagacaaggacttaattctcttatcatcttaggtgcttggatcctttggaagcaccataatcgttgtgtctttgatggagcttctccctgcatgactgtggctttggttcaggctagtgaggagcgtacgagctggagctag

SEQ ID NO: 4671 - DNA, 1689 bp, Zea mays
  Peptide Sequence Number=SeqID_46450
atgcaggttgcaatattttccagcatagcttgctcacctacttctcaatttagaagacttcaatttctggatctgagcatcaaatcaagaccataccactttagtcagtcctgtctgatggcactggctgcagctccagccagtggtgattcacagagtggtcctcagaggaactatcaggttgttgtggctgccactcgtgacatgggcattggcaagggtggggtcatgccatggaagcttcttggtgatcttaaattcttcaaagaacttacactaactacaactgatcctgccaaaaagaatgcagttataatgggaaggaaaacatgggagagcattcctgttaagtcaaggccactgcctggtcgtttgaatgtcatacttactcgatctggtagttttgattttgcaacagtagagaatgttgttatatgtggaagtatgaagtctgccttagagctgctagcatcaactccatactgcttatcaattgagaaagtttttgtcataggaggtgggcaggtactgagagaatatttgaatggacctgcatgtgaggctatccatctgactgatattcagtcaagcattgagtgtgatactttcatccctccagttgacttttcagtgttccagccatggtattcatctttcccagtggtagagagcaacattaggcattcttttgtgacttttgttcgtgttagaaagtcagtggcagaaactcatgagtcaaatggcaaggaatcaactgagattgataccaagaatgacaaatttgaaatagagaatttctcttttctccccaagatagtatatgaccgccatgaggagtatcaatatctcaatcttgttgaagatattataaggttcggtgctcagaaaaatgacaggacaggaactggaacattgtcaaaatttgggtgtcagatgcgattcaacttaaggaaaaattttcctctgctgacaacaaagagggtgttttggcgtggtgttgtcgaagaactcctttggttcatcagtggctcaacaaatgcaaaggttttgcaagaaaagggtattcatatctgggatggcaatgcttcaagagagtatcttgaccgtattggcttggcacacagggaggaaggtgatctaggtccagtttatggatttcaatggcgacactttggtgccgaatatactgacatgcatgctgactatactggaaaaggctttgatcagctaatggatgtgattgacaagattaagaacaatcctgatgaccgccgaataattttatcggcgtggaatccttcagatctcaagaagatggctcttcctccttgccacatgtttgcacaattttatgtggagaacggggagctatcctgccagatgtatcaacgctctgcagacatggggcttggtgttccattcaacatcgcatcatattctcttttgacatatatgattgctcaagtttgtgatctttctccaggagattttgtccatgttataggggatgctcatgtctatagaaatcacgttcgagctctggaggaacagattcagaagatgcctaaaccatttccaattttgaagataaatccttcgaaaaaggatatagattctttcatggcgtcagacttcaagctggttggctatgatcctcaccagaagctagagatgaaaatggcagtgtaa

SEQ ID NO: 4672 - DNA, 2745 bp, Zea mays
  Peptide Sequence Number=SeqID_46451
atggatgactcggagaacaacgcaccctcgacgccggggtcccccgggttcagcaccgaccggctgccacccaacaccaccaccagccgcggcgccaccgacccgtcatcttactccgacgacgatggcgaagctgaggtcgatcctcacgtgctacccgatgacgacgaccccgccgctgtagcggctcccgacgaggacgaggagggggaggacctcttcaacgacaactacctcgatgattaccgaaggatggatgagcatgatcaatatgagtcagttggtttagatgattcactcgaggatgagaggaatcttgatgaaatcatggctgatcgaagggccgcggaagcggagcttgatgcaagggaagtgaggactggtgcaacagctgataggaagctgccacgaatgctccacgatcaggatacagatgatgatacgaatttcaggcgtcctaaaaggcacagggctagttttagacaaccaagtggaccaagaacaccaagaagtgatgatgatggtgatggtgccactcctagttcacctggaagatctcatcgtggaatgtcatctggtggtgatgtgcctatgactgatcagactgatgatgacccatatgaggatgaatttgatgaagaagatgagatgaacatgtaccgtgtccaaggtacattgagagagtgggtcacaagagatgaagtccgtcgctttattgcaaagaaatttaaagaatttcttctgacatatgttcatccgaagaacgatcaaggagagtttgagtatgttcggcttattaatgagatggttttagctaacaagtgtagcctggaaatagactacaagcagtttatttatatacatccaaacattgccatctggttggctgatgcgcctcaatcggtgcttgaagttatggaagaagttgccaaaaatgttgtttttgatcttcacaagaattataggaacatccaccaaaagatctatgttcgaatatcgaaccttcctgtctatgatcaaatacgcaatatcaggcaaatccatctgaacacaatgattcgaattggtggtgttgttacccgacgatctggtgtattccctcagctgcagcagactatatataggaactaccagaaactcactcttcaggaaagcccaggaattgttcctgctggaaggcttcccagatacaaggaagtcatacttctgaatgatctgattgactgtgctcgtccaggagaggagattgaggtcactgggatatacacaaataattttgacctgtctttgaatacaaagaatggtttccctgtttttgccacagtggttgaggcaaactatgtggcaaaaaaacaggatttgttttctgcatacaaattaacggacgaggacaaagcagagattgagaagttgtcaaaggatccaaggattggagaaaggattatcaaatcaattgcaccatccatttacgggcatgaagatatcaagactgccattgcacttgctatgtttggtggacaagagaagaatgtgaagggaaaacatcgcctgagaggcgacatcaatgtcctcctcctgggtgatccaggcactgcaaaatcacagtttcttaagtatgtggagaaaacaggacacagagcagtatatacaactggaaaaggagcctctgctgttggtcttactgctgcagttcacaaagatccagtaacacgagaatggacacttgagggaggtgcactagttcttgctgataggggcatttgcctcattgatgagtttgacaagatgaatgatcaagatagggtaagtattcatgaagctatggagcaacagagtatcagtatatcaaaagcaggaatcgtcacatctcttcaagctagatgcagtgttattgctgcggcaaacccagtagggggaaggtatgattcatcaaagacattcactcagaatgtcgaattgacggatcccattatttcacgttttgacgtcctctgtgtggttaaggatattgtcgatccatttacagatgaaatgctcgcaaggtttgttgtagatagtcacgccagatcccagccgaagggggctaaccttgaagacagggtttcaactgatgtggatgatgatccactggctgctgcaaggcaagctgacccagatgtcctttcccaagacatgctgaagaaatacataacctatgctaagctgaatgtgtttcccaaaatacatgatgccgatctagacaagattagccatgtttatgctgaactccgccgtgaatcctctcatggccaaggggttcctattgcagtaaggcatatagagtcaatcatccggatgtcggaggcacatgcaaggatgcatctgaggagctacgtgtctcaggaagatgttgacatggccatccgtgtcttgcttgactcttttatttcgactcagaagttcggtgtgcagaaagcacttcaaaagaatttccggaagtacatgacattcaagaaggactacaacgagctgctcctgctgctcctgcgcacactggtcaaggacgccgtgcacttcgaagaaatcatggcaggatcagcctcacgtcttactcacgtcgaggtcaaattggaggacctgaggaacaaggcccaagaatacgagatctacgatctgaagccgttcttctccagcgcgtgcttcagggacaacggcttccttctggatgaagggcgtgggatcatcaggcatccactggcggagtaa

SEQ ID NO: 4673 - DNA, 699 bp, Zea mays
  Peptide Sequence Number=SeqID_46452
atgacaccgatcagtgaacagcaacaagccaacaaggagcctcctcatcacacacagtctgcaacatgccatattgctccagctccaagcgaggtagcgggagtggtcggggacgcggagaacgccgaccaggagcaggagcaggaccagcagcagcaggcagcgaggcgggagcgggacttccttgcggggatcaggaagctgttcaagagcttcaagagcctctcccacatcttcgagatatacaaggacgacgacgatagcgacgacgaggacgacgacatggacacaagcatcgagatcgggcttccaacagacgtgcagcacgtggcgcacatcggcctggacggctccaccaacctgtcgagcctaataaggggccgggagggggccagggagctgttctcgctctccagtctcaccaccctcgagcagttcgagctcgccatggcctcgctggctgctaccggcaagcagcgaaacgggctcatccgtggtgcccctgctccgaggccgaatcagaccttgatcgacctttcgttgaccgcgcatttagaactagaactaaccgtgtctgaaaaagaacaggcgcaacaaagacttcgctgtcttgagatcgatgacaaccaatcaaagacccctccaagggggctcagagcaatgccccgcatcatgccaaccaagcgcaggccgatgtga

SEQ ID NO: 4674 - DNA, 510 bp, Zea mays
  Peptide Sequence Number=SeqID_46453
atggagcgtggccgcagcagcacctcttgccggtccttgctgctcctcctcctggtctgcttctcccacggcgccggggcggcggcggcggctcggctcctgactccactgcaggcagctgctgccgttcctcctcctctggctcttcaccaagcggagagtaatggcgccacggcggcagctgccgacgacggcctcgtgatgactcaggaaggtgacgctgacgccacgagcaatggcaacgacgacgacgagatctcctccgtctcagagtcagagacgatgacgggcgcagaagaaggcgtgtgggacggagggcaacgacgaggaggagtgcctgcagaggcggctgctcggagacgcgcacctcgactacatctacacgcagcacaagggcaagccaaagaaagatgcgaccttttggttcggtgtaggtcgagtggccagcagtgcccaacagtggcccctccattatctggatctgatgaagctaagcagcaagcacagtga

SEQ ID NO: 4675 - DNA, 504 bp, Zea mays
  Peptide Sequence Number=SeqID_46454
atggactccccgaccttttccagcgacaatggtgtgccacaatccgccgacggctccagcgacaacgaagaacaagaggcagcaacagagtttcctgagggatcgagcagcgacagtgaagaacttgagggagcgagcagcagtgacaatgaagaacaagagtcagcagtagagtttcttgagggagcgagcgacgacatcctggagatcgtccggatcttaatggacaatgtcttcgtggaggacgacccccaactcacgttgcagattgtccggaacttaatggacggtgtcgctggcctggagaagcgtgtcttcaactccactgcggagccagggcgcgacgacggctgcagaggctgtgcgatctgcctcgaggacttccaggacggtgtggaggtcgccgtcatggcgtgctccggccagcacgagttccactccggctgcatcacgaattggttgcggcgaagcaacacgtgccctatgtgccgccacgctctatag

SEQ ID NO: 4676 - DNA, 867 bp, Zea mays
  Peptide Sequence Number=SeqID_46455
atgaaccactcacttttgaaggatggcagctggggcccactggccgcgtcagggccacctgctcgtggcagcctgagaccaggcgcgaggatgctggcggtgttcagcggcgaggtggtggaggtgccggcggagctggtggcggcggggagccggacgccgtcgcccaagacgaaggcgtccgagctcgtcgcgcgcttcctggggaccagctgccccgccgccgtgtccgtgcgcctcgccgacctcggccacctcgcctactcccacgccaaccaggccctcctccgcccaaggtcgttcgcggcgaaggacgaggtgttctgcctgttcgagggggtgctggacaacctggggcggctgagccagcagtacgggctgtccaagggcgccaacgaggtgctcctggtcatcgaggcctacaaggcgctgcgggaccgggcgccgtacccggccagcctcatgctcgcgcagctcgccggcgcctacgccttcgtgctcttcgacgcgtccaccaactcgctcctcgtcgcgtcgggcggcgacgtgcccctcttctggggcgtcaccgccgacggctgcgtcgccttctccgacgacatcgacgtgctcaaaggctcctgcggcaagtccctcgcgcctttcccgcaaggtctgctgcctttagttcctctttctgaatcatcaaaaaaagaaaggagagggtcgtcttcgtcttcgtctctgactgagtacccacttcctgcaccgtacacaggttgcttctactctaatgcccttggaggattgaagtgctacgagaatcccaagaacaaagtgactgccgttcctgcaaacgaggaggaaatctgcggcgcaaccttccag

SEQ ID NO: 4677 - DNA, 540 bp, Zea mays
  Peptide Sequence Number=SeqID_46456
atgacgcacaccgacgacccttttgggcaccaccattcctcgacaatacgggggagtggtatgggtgtcatctacacccataaccatctcccagccaacggttcttccttcagtccactcctaggacaattacccaaactcaatttccccaccttcgatggaaaaaatcttaaactgtggcagtttgggtgtgaggattatttctacatgtatggtgttgatcctaacaaagctgctctaatattgtcggggaccataattaggggtaccctcaaggctcctgattctcagctggcagtcaggccctgccgaaggcgtcataggaagctccgctccgcccaacccagggttcggactcgggctcagccccggaagacggcgaactccgctctgcccgacctagggctcgaactcgggctcagccccggaagacggcgaactccgctccgcccgacccagggctcggacttgggctcagcccccgaagacggcgaactccgctccgcccgacccagggctcggacttgggctctaccctag

SEQ ID NO: 4678 - DNA, 420 bp, Zea mays
  Peptide Sequence Number=SeqID_46457
atggactcactccttgtaggttcggatgagaggaggcatttttataggtcacgttgttggagatgctctaaccaaacacactgtaaaggtgcagtccagggctctcgactccaccagaagcttcttcaacggatctatgatcgcttcgatgacgaggacaagcgttggagtgcgctcaagtcgaaggtggacgccaacttggccgatgtcacgtccctgcaggcgaaactggacgacactgacatcgacaccttccgctccgacctgcgccgcaccttggagcaccaattggacacgtgcgtcaccaaacttgagtcatcgacttgggaacggttggatgccgtcgtggacgacactactacacatgtggctcctggagaacgactagggagtgttcgaggcttggtgtcgaaggattga

SEQ ID NO: 4679 - DNA, 459 bp, Zea mays
  Peptide Sequence Number=SeqID_46458
atggcggcggcgaacggagctgccggtgcggtgctgttcagcgaggaggacctgagggaggtgagtggggtgcgctggggagaggacttcgtggaggtgacgtgcggatgcaccagccaccgctacggcgacgccgtcggccgcctccgcgtctttgcgtcaggcgacctggagatcaactgcgagtgcacgcccggctgccgcgaagtgtctatcttgcaatatccgtgtatcagtgtgtgcctagagtactactgtaggaattttaatagtataatttggaaagcttgggcgccaccaaagtgcaaattcttcagttggcttgctgttcaaaatagagtttggacagcagacagattcggtgcaccaatggtggtcgaatcttgcagcatccgcagtgagaagcgtgaagggattgcgaaccctcatcatcctcgtgtcttggacaatttggtgtga

SEQ ID NO: 4680 - DNA, 246 bp, Zea mays
  Peptide Sequence Number=SeqID_46459
atgcagagccggagcctggagagcggcgccgcacggaacggatccggcagagactacggcgacgaccgacgggtcacctgtgacgacgaggaggagcgtgcaagccgcaaggtcctgcggggctgctcccgcgcgccgtcctgcacgggctgcatgaagtgcgtgtgcttcggctgcgagacctgccgcttcaaggactgcgactgccagacctgcgttgacttctaccgcaactccaaggaataa

SEQ ID NO: 4681 - DNA, 1659 bp, Zea mays
  Peptide Sequence Number=SeqID_46460
atggcgagcaacggcatgtcgcttgtgcatcgagccgccgaggcggtgcgccgcacgccgcgatggaagaagaggctcgtcttattcgccgtcggagctagcaccttaacttacgcttgtcaagacaatcgagttcttcaaatttgtgatgggactggaaacaagaagaaggtggttatccttggtacaggatgggcaggtgcaagtttcttgagaaatatcgacacatctttgtatgatgtccatgtggtatcacctcgcaattacttcaccttcactcctttgttgccaagtgtgacatgtggcacagttgaagcacgtagtattgtggagccaattcgcaatattgtgagaaagagaaatggttcatttcgattttgggaggctgaatgcatcaagattgatccaagaaacaaaaaagtccattgcagatcagatgttgggacaaacattaatggaaacggtgaatttgttgtggattatgattacctgattgtcagtattggggctagacctaatactttcaacacacctggtgttactgagaattgccatttcctaaaggaagtagaggatgctcaaaagatcaggaagagtgtcatgaaatgttttgaaagagctgcccttccaaatctttctgaggaagagcgaaagaagaaccttcattttgttgttattggtggtggcccaactggggtagaatttgctgcagagttgcacgattttgtgaatgcggacttggcaaagctgtatcctgatgtaaagaagtatgtaaacatttcagtaattgaagcaggaggtcatatccttacaatgtttgacaaaagaatcaccgaatttgctgaagagaagttcaagagggatggcatagatttgaaaacaaattttaaagtcgtgaaggtgtctgataaggatattaccatgaccaatcctgctacaggagaggtcgctgttccttatgggatggcagtttggtcaactggaattggaacccgtcccatcatcttggatttcatgaagcaagttggtcaggagaaccggcgtgtgctagctactgacgagtggcttagggttcaagggtgtgaggatgtatatgctcttggtgattgtgcaacgattgctcaaagaaaagttatggaagatgttgcttccatattccgagtagcagacaaggataactctggcactttaaccgtgaagaaaataaaagatgtccttggggacatatatgagagatacccacaagtggaattgtatcttaaatccaaccaaatgaagagcttccacgagctacttaaagactcagatggtaactccaaggagttgaaagaactgaacatcgaacagttcaaaaaggcccttgctcaagtggactctcaagtcaagatgctcccagcaacggctcaggttgctgcacaagagggaagttacctagccgactgcttcaacagaatgaagacgtgtgaacaatatcctgagggtcctataaggatcagaggtgcagggcgccatcggttcaaacctttcaggtacaggcatctcgggcaattcgctccactgggtggagagcaaactgcttatcaattgccaggtgactgggtgcatgttggacacagcacccaatggctgtggtattctgtctatgcaagggcactatga

SEQ ID NO: 4682 - DNA, 222 bp, Zea mays
  Peptide Sequence Number=SeqID_46461
atggaaattatcagccaatggttagatggaaatcattctcatgagcgtacacctatccacacttcaatcctttcggggaaaaacatgtcaaagaaattctacaaggacataaggatgatacaactgcctccaatcaataccccaattgttatatctagtgttgggggccttcggctccgaaggtcctcaaaaacaggatttaacagtgtttctggagtataa

SEQ ID NO: 4683 - DNA, 1173 bp, Zea mays
  Peptide Sequence Number=SeqID_46462
atgaggcgatgccgtggtgtagcatgtgtagtgattatactgtcaacagcattcctgttggtagtttacttggctcctattactacttttgctgtgcggctgttcagtgtgcattacagccgaaaggcgacttcctttctatttggaatgtggttatctttatggccgttcttgtttgagaagataaacaaaaccaaggttgtcttctccggtgaaaatgtgcctccaaaacgacgtgtattgttatttgctaaccacaggaccgaggttgactggatgtacttgtgggatcttgcactgaggaaaggccatttaggatatatcaagtacatacttaagagcagcttgatgaagttgcctatttttagctgggcatttcacatttttgagtttatcccggtagaacggaaatgggagattgatgaagcaattattcagaacaagctatcaaaatttaagaacccgagagatcctatctggttggcggtttttcctgaaggcacggattatactgagaagaaatgcatcatgagtcaagagtatgcttcagaacatggcttgcctatgctagaacatgtcctccttccaaagacaaagggcttcatttgttgtttgcaagagctgaggagttccttagatgcagtttatgatgtcacaatagcatacaagcatcgactcccagattttctggacaatgtgtatggcgttgatccttctgaagtccacatccacgtcagaatggttcagctccatcacatccccacaacagaagacaagataacagaatggatggtagagaggtttaggcagaaggaccagctcctggcagatttcttcatgaaggggcactttcctgatgaaggaactgaaggagatctgtcgacgccgaagtgcctggcaaacttcttaacagtagtctatgttgtagcaagctgcgcttacctctcatttgttacctattactccatactaccaccccaactgataggttcaccagagggtgatgtcaaggccaaaaagaccaagggaggagagatgattgcatatcagttggactatgggtcccaatcaactgtggcccaacaacctcaatcttattatggtcatcgagtcatatgcaacacatctcttcggtcgtgccacattgtcgaggatgacccactattgtggtag

SEQ ID NO: 4684 - DNA, 456 bp, Zea mays
  Peptide Sequence Number=SeqID_46463
atgacgcggttggcggcctcttactggccgtctatctatgggtggaaggtggaggacatgtacaactttgagcctggtgcggtggacgccctcgtggccatcattgtgtaccatggccacgatctcctgcagaaggggtttcatcacacagtagacctcactaagatgaaaaacataaacaacactagatctatctttgcatatattgtgatcggtggagagcagcggtaccgcgacgccgtcgtgggagtcgccgcagttggagacgacgatgcggcgccgaccaacgacgacgccgataggggtggacctgacgaagagaggactggggtggagttggcggcacagtgctcggggaggaggcaagtcagaggaggtggtgacgtggcgctcgggaaggaggctataaggaaaatggagcccgggccatttggatcaataggttttggtgtttga

SEQ ID NO: 4685 - DNA, 204 bp, Zea mays
  Peptide Sequence Number=SeqID_46464
atggacgttgctgacgttgtgagtgtcctcgaacatgatgggtactacctcgctgatgagcccgaggtgcacttcgtttggcagcccaaccaagagtcatcggtactcgtcatgtcgcgcgtgttcgacgactactttatcgaggattgtggcgtcatcttggcaccggagtcatcgatagcttttgtgtcgatctgcctttaa

SEQ ID NO: 4686 - DNA, 711 bp, Zea mays
  Peptide Sequence Number=SeqID_46465
atgggccagtcagccgcgggagaaggcgcgacggtcgatgtggccaaaaatgggccggcagtaatggtggtgcgggacaggcggcgcctctggcaggagaagcgagcgacgcttcgccttcgccataatgaccgcgtcaaaaaaaggccccgagcctccctactgatcagaggttcaaaggctggcccctcggaggggtttaacagccgcctcagagcgcttgggctccgcgcccactactggtcagaggttcgaaggtcggccccttggaagggttcaacggccgcctcaggccactcgggctccacgcccactactgatcagggcgccgcctgcgccgctccgactgctgtgccacacgacagagtgaggctgacggcagccaagcccggccccagacgctatgggaaactccgcttcgcccgaccccagggctcggactcgggctcagccccggaagacgacgaacttcgcatcgcccgaccccagggctcggactcgggctcagccccggaagacgacgaactccgcttcgcccgaccccagggctcggactcgggctcagccccggaagacgacgaactccgcttcgcccgaccccagggctcggactcgggctcagccccggaagacgacgaactccgcttcgcccgaccccagggctcggactcgggctcagccccggaagatgacgaactccgcttcgcctga

SEQ ID NO: 4687 - DNA, 309 bp, Zea mays
  Peptide Sequence Number=SeqID_46466
atggcgagctcgtcggcgctcgccgtgccctccatccctctccctcccccgagcgcctataaaaggaaccgcccgagcccagtcctcaccacaccagctccggccaactcctccgcctccccgcgagcgaatcaagctagcgtcgccgtgcttcccccgtcgctccgtccaattaaccagtgcccgaagctccgccacactctcacggtcacaaggcacccctttccccctcctattgcacccggcaaccgcaccggcgacctcaccaccgtggacacccgccaccgcgccgcggaccggccgccatag

SEQ ID NO: 4688 - DNA, 360 bp, Zea mays
  Peptide Sequence Number=SeqID_46467
atggcgtccggccctacactcttctccctcggcgcccctctgtgtagacccgcgcctctactccggccggcagcagccctgcgcagcgcccctgcagcagccctcgctcgctctgtcctctactccgcagcaccgccattgtccttgcctaagcgcagtccaaatccctgcaacaagcctcgccaagcattgccccgcagcagcatgctccttcgcctcgcgcgtgggtgctcgacgaatcgcagcagcgagccacgccctccgacttcgcttcggtctcccatgcgcgacgacgcgttcgtcttcacgccacatgtgcagcaacctcgaccgaggtttgatatggatagcgtgggttga

SEQ ID NO: 4689 - DNA, 540 bp, Zea mays
  Peptide Sequence Number=SeqID_46468
atggctattctccggcgacagctctgccgtatgggggcggcggcgccgctgctctggtggtggcgggcatgggagaagccccctagttgtggatttgaggatgagcgggcgagattagtcctcggtcacttaaaaaccaaggtcgtcgatccatgcgccaacggctgggatcaacctcaattcacaacgtttcgtcgatctgattcgggcccttggatttcgatctggcggtcgagaagttgggcgggctccgatctaatcaggcgcgtaggtgctagatcgggcggtcaagatctcaccgtaccccttcgcccgaaccatttttcacatgagcccctcggcttctataaaaataacccgcagtccagctcggattattattatgtattttgtttacttgtttggtgttatgttaatttcctctttatactatgtttgattgtattgaggcgagtagaagagccgatggctgaggattctggggttcagcagatagaagtagctaagcatgagctcattgaaggcaagttgtgcccttga

SEQ ID NO: 4690 - DNA, 399 bp, Zea mays
  Peptide Sequence Number=SeqID_46469
atgcaaaggagcgggttatcaggatcgtttgcaactgctgagctgtgcgaggtcgaaactctatatcatgagctccaagttcgcatgcccacttggatgtcctccggctcgcgagtgatgggtctagcgatccatccctctggctcctgctccactaagagcttcgtgctgtggctcgaactgccatcgtcgtcgtcgtcatctccgacagggtctcctccagtagccgggataccctgtggtgatgtaggggcatatctgactgaggtgctgggaaaggttgcctcccagactccacctcctgctaaagcaagggggaatagtcctgctgctcctactcctggcgtcggtgctcttgctcctcgtgcaggcgaagatgcaatctctccagagggctag

SEQ ID NO: 4691 - DNA, 729 bp, Zea mays
  Peptide Sequence Number=SeqID_46470
atggggggttgctcacctcgagtggagactctagagcacctgagcaacggcgggatgctgggagacctcgggtcaacggtggcagagctctggttgcaaggtgaggaagctggtgggcgcggactgggcgaaccaaaggggctgggggcaaaccggaagatgtcccatgttgctggcgaaaaggcagagctcaccaaggcaacgggtgtggcagaaactcaacagcggccacagaactggcggtggaccacggcgagcttcacgacacgcgtgcagagcgagagagagagagagagggcgagggtgctcggctggggtgcaactgagcgagggtgggcgagtgagtgtgggcgggctccagaaaaggctcgggtgcatggggacagtgtccggtgcaccagaggacttcaagctgaactcctcaccttcgagaattttcagaggtgcttcgctataattcaccggactgtcctatgcaccaccggacagtgtccggtgccccaaggaagagcgactctgaactcgccagcttcgggaatccgctctgctaaaattcatcggactgtccggtgtgacagcggagcaacggctacttcgcgcgcaacggtcgactgcaacgcattaaatgcgcgcctgcgcgcgcagaggagcagagcacgcgcgggtggcacaccggacagcctacagggcctgtccggtgcaccaccggacagccaggcgggcccataa

SEQ ID NO: 4692 - DNA, 198 bp, Zea mays
  Peptide Sequence Number=SeqID_46471
atggggagcctctggctgtcacgtcgaggtgaaggaggtccagcgaagtgttttgtcttttctggcgaggtaccgttcggttcaagcgggtgggaagctttactagcctctagggaagctggccgaggagctggactggacagggttgggctagagtggccggactatagtggtcgtcgcgtcgttttggctatctaa

SEQ ID NO: 4693 - DNA, 111 bp, Zea mays
  Peptide Sequence Number=SeqID_46472
atgggagatggtgggagtagcagttaccctcctagcaagaggctggatggtaggcatgcccttgagagtcttttctttaatcgggttacgagtcactttgattgtggttga

SEQ ID NO: 4694 - DNA, 300 bp, Zea mays
  Peptide Sequence Number=SeqID_46473
atggaggagggcgacgacgggcgggcggaggaaacgagaagagtggatcctgcaccgtgcaccgtggatccgcgggaggaggacgacggggggcggacgagcgggcgggtgggggtgcctcctccacgtcgcgcgcagtcgctacccacacgcgtgaaagagctcctgtgccgagcgcagtggatccatgagcgcagtggatccatggaggagggcgacgacgggcggaggggacgagaagagtggatcctgcaccgtgcaccgtggatccgcgggaggaggacggcggggggcggatga

SEQ ID NO: 4695 - DNA, 489 bp, Zea mays
  Peptide Sequence Number=SeqID_46474
atgggcaagaacaacaagcgcaagcatgagccaactcctccatcggaggagtttggtgactcggagtactcagaggtggagttctcctctgagtctgaggggtctccggctcccgtccccctgcgtgagtcgtctgacgactcagacgactcccaggggcttgcggcggaggtctggacgtacatccaggccgtcgagcgctccgggctcgagggctcggatgagtcggagtactcctcggatgaggaggactcggacggcggcggcgaggacgaggacgacgacgacgacgacggcgatgacgacgatggcgacggcgacggtgacggtgacggcagcggcagcggcagcggcagcggcggcggcagcaaggacggtgacggcgacggcagcaaggacggtgacggcggcggcagcaaccggggcggcagcagcaagggcagcaccaggggcggcggcggcggcggcagcaacagggccagtggctag

SEQ ID NO: 4696 - DNA, 522 bp, Zea mays
  Peptide Sequence Number=SeqID_46475
atgaggattctagagattgttgatgaggccaatacaaagctcatgagggattatgtcgtggagagaaggtcctggattggagccaagtctctaagggtctggaacatcctcctcgccgtcggcgacctctacccactggcgagcttctctccggtaggatcccttctctttcgttatatctgctctctgcctctcttttgttcggcgttggacaggcacaggcagcaccgcgcgttgggattgtcctcggcgccgtcaaagcacgcggtcgcggagccagccggactggcggggtgtgcggcgctagccaagcagacttgcctgcctgatgactgctctgctagtagtaaaaggatggcggtgttgcgcggtgaaaaagtgaaacacaatgctgttgaacagggttttaatctctggcttagctggggaggggtgttgaagagcacgtttaaccccctcggttacgtcgtgctcgcaccaaaggtggggtacaaggactacgactcagacgaggccgcctaa

SEQ ID NO: 4697 - DNA, 204 bp, Zea mays
  Peptide Sequence Number=SeqID_46476
atgaccttctctccatctccgtttggctttgatgagagttctagcccaaaggttcctaatcaacccgtcagaggagctattgcgatatatctgagttgccacttccggtgggtactgcagagcgtgcctagcccgagccagcggttgctcatgatggcaccgtccatgaaggaaacaggcgacacccaagagggggtgaattag

SEQ ID NO: 4698 - DNA, 1908 bp, Zea mays
  Peptide Sequence Number=SeqID_46477
atgtcgtccgcagccgtgtcgggcagcggcggcgccgccgccgcggcggacggcggcgtggagggcgcgccggcgctgtcggcgtcggcgtcgcgcacgtcgtcgctgcggcaccgcgcgatgagcgcgtcgtcgaagctgctgcggagctcgctgagccgcaagtcgatggggcggcgcagcagcaaggtgatgtcggtgtcgatcgaggacgtgcgcgacgcggaggatatgaagcaggtggacgcgttccggcagacgctggtgctggaggagctgctgccggcccgccacgacgactaccacatgatgctccggttcctgcgcgcgcgcaagttcgacatcgagaagtcgaagcagatgtggtcggacatgctgcagtggcgcaaggagttcggcgccgacaccatcatcgacgagttcgtgttcgaggagatggaccaggtgctggagcactacccgcagggccaccacggcgtggacaaggacggccggcccgtgtacatggagaagctggggcagatcgacaccaccaagctgctgcaggtcaccagcatggaccgctacgtgcagtaccacgtgagggagttcgagcgcgccttcgccgtcaagttccccgcctgctccatctccgccaagaagcacgtcgaccagagcaccaccatccttgacgtctccggcgtggggtacaagaacttcaacaaggccgcgagggacctcatcggacgcctccagaagatcgacggagacaactaccctgagacgctgtgccggatgttcatcatcaacgcggggcaagggttcaggcttctctggaacaccgtcaagtcgttcctggaccccaagaccacggccaagatccatgtccttggcaacaagtaccagagcaagctcctggaagtgatcgatgccagcgagctgcccgagttcttcggcggcacttgcaactgcgagggcggctgcatgcgctccgacaaagggccatggaaggaccctgagatcctcaaggttccgtctacctgtctagattactttgcgctccactccgacgaagggccagccatcctgaacagcaagcaacacatggagcatgcaacgcgcagaacagaacgctgtgtcactgacagtgacaccggtttccgatccacactgcagaagcaagactccatgcgccgcaacgccgtggattcccccaaggtggcgcgcgagaagatcgagcacccgcagatgtccccgctccacgagatgaagaccgccagcgacccggaccctgccgccaaggacagcttcgacggcggcgggctgttccccggcgtggacaggggcatggacttcaactggagcggcgaggtgagcgaggagaagctgcagatcgcgcgggacatgtacgcgcagctgccggacgcgtacaagcagggggacgcgggagaccggcaggtggtgtcggggttcatggcgctggtgatgggcgtggtggccatgttccgggtgggcaagatcgcgccgaagcgggccatggacgcggccatgggcatcgccaccatggaggccatggccaagaagacgcggcagatgcagatgcagcagcagctgcagctgggcgggcccgacgccgtcgtggtgtcggcggcgcagtaccaggcgctggtcaagcgcgtggacgacctggaggccaaggtggcggcgctggcgtcgggcccgcccgaggtgccgcccgagctggaggagtcgatcaaggccgccgccgcccgcgtcgacgcgctcgagacggagctcgacgccaccaagaagctactcgagacgtcgtccgcccagcaggaggaggtcctggcgtacatcgagaagaagaagaagaagcgagggatgacaagaaacaggggggccaagccgctcgttgtcctgatgtaa

SEQ ID NO: 4699 - DNA, 1815 bp, Zea mays
  Peptide Sequence Number=SeqID_46478
atgtcgggccacctcgatcgcttcgcgcggccatgttttgaagggcgctcaagtcatgatgaatgcagagaccataagtcagactttgaagtctctgaagacgaaaagaagaccagaatgggctctttgaagaaaaaagcaatagatgcatcaactaagattaggcattcattaaagaagaacaggaggaagagtggtagccgggtcctttctgtgtctattgaggatgtgcgtgatctagaggagctgcaagctgttgaagcatttagacaagcactactcttggatgagctgttgcctgcaagacacgatgactatcatatgatgctgagatttctaaaagcaaggaaatttgatatcgacaaagcaaagcaaatgtggatggatatgcttcattggcggagggagtatggcactgatacgattttggaggacttcgaatacactgagttggacgctgttttgcaatattatcctcatggttatcatggagttgacaaagaggggagacccgtttatattgaaaggcttggaaaggttgaccctagcaaacttatgaatgtcacaacgatggatcgatatgtgcgataccatgtgaaggagtttgagaggagcttcttgattaaatttccagcttgctctgttgctgcaaaaaggcacattgattccagcacaacaattctggatgtccagggcgtgggtttgaaaaatttcagcaaaactgcacgtgaattaattcagcgactgcagaaaattgacaatgataactacccagagactctataccaaatgtttattgtcaatgctggtccgggtttccggctactatggaacactgtgaagtcctttcttgatcccaaaactaccgccaagatacatatagtccaaagtggtgaggttcattgtgctcgtcaaattgtaactatttccaatggtgaagaaaaaattattacttatgccaaaccgaagcaccattcaatgcgagggagtgacacatcaactgctgagtctggctcagaagctgacgatgctatctcccccaaagctctcagaagttacatacaacatcctaagttgaccccagttcgtgaagaggtcaaaattgtcagggctacgagcttttctactcgtctccctgaatatgatgtacctgttgttgacaaggctgtggatgctacatggagaagagagcagccacgaaagataccattcatgccccaagatgcagactcttctgtgaaaactatgtccaggccatctgattcctcctgggataagatcgttgcaactctgatggcttgtcttatggctattgtaatgttggttcgatcagtcaaagatcttgtcacaaggagattgccatataaaggcgggtcagaagaaatccactctacgctgtacccagaccccatccagaaagaggaattccgtcctccttctccgatccctggatttgctgaagccgacctgttcgccgtggtcttgcaaaggctgggagagcttgaagagaaggttcagatgcttcaagaaaagccttccgaaatgccttgcgagaaagaagagttgcttaacgccgctgtgcgtcgtgtcgatgcattggaagccgaactaattgtaacaaagaaggctttgcacgaggctcttatcaggcaagaggaactgcttgcgtacatcgaccgcaaagagattgccaaggctcagcataattggttggttggttgggtggccttagccgagccgataatatggccagctgttgactctaagcaggggcatggctcgtgctggaagagcgttggtgtgatggagagataa

SEQ ID NO: 4700 - DNA, 678 bp, Zea mays
  Peptide Sequence Number=SeqID_46479
attttggagctgttttgtgttggatctaggaggtataaggctaaggctacttgtggaattggcgagagcattgaggtagaaggaagggttcagtcaggtagtggcagttcagggttggttcaaaaatatctgaagaagatctttttcccctgctgtgttcatctgatgtattcaccctctccccggacccaagatcgagcttctccagtgtctggcacaccacacctgtgcctggtgaccaaagacaaccgagggctcacctcaccgtggccgagacacttggagcaattgcaccctcggttaagaatggagtcgcgccatcgtggaattggcgccgcagacagcttcatcggcaacccttcgaactacgtcgtctccagccaatctcatgcgcgcaccgagagcttgaaaggttgctatggaatcaagctcgttggattgactgttccaccaacaccgtcgatagtcgtgttctcggatcatcgtggtcaaattaagcacgtgcccgtgtttgtcgtagtctggggagtctgtcagtgccctcgccgccgtcggtgttgcgccaccgtgaccgatcagaacacatctaagaagtggtgtttgaagtgggagcctactccagtgtttactgatcaagtggaggagccatctaactggatatttgatagagggatctag

SEQ ID NO: 4701 - DNA, 384 bp, Zea mays
  Peptide Sequence Number=SeqID_46480
atggcggcggcggcggtggccgcggcggggagcagcaatgtcgagttcatccgcgcgcgcagcgacaagcgggagtaccgccgcgtggtgctcgccaacgcgctcgagatcctactaatcagcgaccccgacaccgacaaggcggcggcgtgcatggaggtcgaggtgggctcgttcagcgatccggagggacttgagggcctcgcgcacttcctcggtgagttcagtacttcactcctggtctcctcagcctccccatcccctctctcatctcgctttgctcgtgtccaacgctttgatttctccttcgatttgttgcgtgctcgtgctgatcgaatcatcagtcgaattcgtgttgattcgtggagtgaggatctggtttag

SEQ ID NO: 4702 - DNA, 924 bp, Zea mays
  Peptide Sequence Number=SeqID_46481
atggattggtgggaggaagcttcagaagtgtcgaccggtctcattaagaagggtctcaactctctcattattttgggtgcttggataatgtggaatcaccagaacaaatgtgtttttgatggctggacacccaatttagctttaattcttaggcttagctgcccattgtaccatatgcatttgttctttcttttatgcaatactttctctttatttagaatattctgggagtccaaaaaatttgaaggatctacgagttctgctgagccctggtataacacaccattttcagttgaaaatgtcactccttcagttatacaggaatggattgaaaaagctcctactgaaaaactccatcttccaaaacctaatattttcataccaaaggatttatctcttaaagaagtgcatgaaaaggttacttttccaacagtgttaaggaagagcccactttcacagttgtggtataagcctgatatgctgttctccacaccaaaggttcacattatcattgatttccactgtccattatccagccactcccctgaagcagttgttgctactgagctctttgttgatttgttagtagattatttgaatgcttatgcttatgatgctcaaattgctggtttattctattcaatatatgttacttcagctggattccaggtttctttaggtggttacaatgacaagatgagagttctcttaaatgccatactagtgcaaattgtgaaatttgaagttaagccaaacagattttctgcactgaaggtgatttgcttgcacgcttgcacagaaggacagagatgcagcgactaccccattcaagatcccctccggcacgtcgaggtgccgatggtgacggccaggagggggccgtctttctgtttacgatcgtttgggtccaagagatggcagtag

SEQ ID NO: 4703 - DNA, 642 bp, Zea mays
  Peptide Sequence Number=SeqID_46482
atggatcagttttgccatcataatttgggaagtccaacttctggaatcgcgggggtggatcctagtgatgatcgtcggttggatgtattggattccgccatagcacccatagcagaggttgatgaggttgcgtcagatggtggtgaagagatggatttgggtggagggagtggtggggaggatcgccccatgacagttccactcctgccagaagatcccaaggttcagatattcagacaacataatcatcgtgggcacagaattacgttggtatccacaaccatcaggcatataagtgctccaggacacgaggagccccatggagttaggcttataagtgccctgggacataaggaaccccgaggacttagactcgccaattccgtggcgacggcgggttcagagagggtctcctgcatcatcggcttctcagaggaccttgccgcccgtaacgaagcctctctgcgttgcgccctcttggtcgtgattgtgggtacaagaccggtggtgatcgctgatgagatcttggatgaggtggcacggagcttccaactggacatccaagttcatccttgtgttgcagccctgtttgcgacttatattcgttccatagttggagatggtgctgctattttgttctaa

SEQ ID NO: 4704 - DNA, 412 bp, Zea mays
  Peptide Sequence Number=SeqID_46483
gtgtcaaaggttcacatcaagccaaaataaaaggaccaaagttgggttcatattgagaggtaaaggcaaccgaaggcacctctggtctgggggcaccggactgtccggtgtacaccggacagtgtccggtgcaccaccgaacatgtccggtgcaccagaggacttcagcacaaactcgccaccttcgggaaattccaggggcgactccgctataattcaccggactgtccggtgtacaccggacatgtccggtgctccaaggaagggcggcctccggaactcgccagcctcgggttttcacttcagctgctccgctaaaattcaccggactgtccggtgtacaccggactgtccggtgcatcctcggagcaacggctacttcgcgccaacggctacctgcgacggcatttaa

SEQ ID NO: 4705 - DNA, 804 bp, Zea mays
  Peptide Sequence Number=SeqID_46484
atgaggcgttgtgcggtggccatctgggcagtcagagcggcactcatgacacgctcttgctccaggacgagtgtcgcaacgcgctcgcgggaagcgggaagcagcaacagccacctagatggtggcgatggtcgtagccagcgccgaggaagctggcggggaagcagcgacgtcagaccatgtaggggctacgagggcggggaagcctggaggggaaccacggtgcggttgggcagcgatggtcacgtcgaggaggggcccgaggccggcgatgtagggggggcctctaacagcgagctcgttgtggggccgaagccgaggccggtgctcgaggggcgaggcccgcagcagcaagggcggcgacgtccgccgctcggaaagttgcggcggtggcggctgcgcatggggtggcgcgtgcgagctgggcccctggggcgacacgcgcgggctgggctacgacagcggactggagagggaggcgacgcccgcagccaaggccgtgttggcaatggagggggaaggaggaggggccgtcatggctctaggttggcggtggcaggcaggaggctgggggtcggcagcgcagagcaaggggaaggctggggccagcagcggtcggaggggagggaggggagagaggaggggcggccggcggtagggagacgtggctggtcggggccggcagtgggaaggggtggccgcggctgctggaggggagagaggaaaaaagacctagctctataccatgtgggaaaccctaaccctggattagggttgggtgttgtgttaatagacttgagttaa

SEQ ID NO: 4706 - DNA, 231 bp, Zea mays
  Peptide Sequence Number=SeqID_46485
atggcagggaccgggcggccgctttggccctttcctccagccatcagaggtggcgtcgccctcgtcggcaagacgctcgacggagacgaggggcatggacgctctggggtcttagggtggctaggatggcttgggaagatggggaagggtgcggggaacccaatggtggggctgaaccgtggtgttgctttccttaatgccttagtccaagtcacttttagcatcgtgtga

SEQ ID NO: 4707 - DNA, 231 bp, Zea mays
  Peptide Sequence Number=SeqID_46486
atggtctccgacaaccctaaacaatgggagtttgcaaatgacgatttcattaggggacaacaacaccgattgaaaaatatacacagtcgcaagcctatgctcagccattcatcgcacactcagggttctagaccattagcagatgctgaaaggagggattatggggaggaaatagaaaggcttaatggcagatttggtgacgagagatcacgagggattggaggagattga

SEQ ID NO: 4708 - DNA, 750 bp, Zea mays
  Peptide Sequence Number=SeqID_46487
atggcgaagtcgcgtggcttcgtgatggcggctgtgatggtggtggcggtggtggtggccgtggtatcggtggcgccgcgcggcgcggaggcgaagacgacgatcgagccgtgctcggggtccgactcctgcccggcgctgctgggttacacgctctacgccgacatgaaggtgtccgaggtggccgcgctcttcgccgtcgacccggcggcgttgctggccgccaacgcgctcgacttcggcgccccaggggcggcgcaccgcatcctgcccatgggcctcttcgtgcgcgtgcccacccgctgctcctgcgccgacggcgtccgcaagtccgtctccgtccgctacgccgcgcgcccggccgacacgctcgccaccgtctccgacgtcgtctttgcggggctcgcctcctccgaccagatccgcaacgagaacggcctcacctccgccgaccccgacgcgccgctggacgccggccagaagctcgccattccgctgccatgcgtctgcttcaactcatccgacaacaacctccccgcggtgtacctctcctacgtcgtgcaggtcggggacaccgtgcccgccatcgctgcaagctacgagaccaccgtcacggatgtcatgaatgtcaatgccatggggagtcccgtcgccgcgccaggcgacattctcgccatcccattgccagatgaaaacctgttcaagagtccatctcagatggttgtaattaaaagcaatccaaaaaagtag

SEQ ID NO: 4709 - DNA, 666 bp, Zea mays
  Peptide Sequence Number=SeqID_46488
atggccaagactcagcttatcagcaataagagaggaggtccagattgggtccggcatgaggcgagtgcgcttgctgcccctcacctcccatatgtcctccgcgtcatcagtggtagcgctgagggcctcagcgagcgtgggtgtggcgccggactggaggaggatgaaaggtgggcacagttcgccggagaacgagatcagcggccatggacgcaggggtgcgcatggcgcggatatttatgcgcatccctggggaaaattgggatggaggcggcggcattaggggcggctgtgcaccagaggaggcgcggtgccagggtcatggcggcggatccactctccctcccggatttctttatgcaggcatcgcggtgcatcccggctcgtgggcaacgacggcggtgtcaggagcatggcgatctgatctgggtctcgcatatatatcggcccccagaggagagcccgagtaggtgcggtagcggatatgcaggattgtcgctgaatccggtggaaaggtgtcccaggggaagcgggggttcgttggagaggatggagataaaactgaccgtgagggcccacctatcacacacaaggatcggcgtccccagtgtaacacccaagattttattcttggagctagaaagattctccaaaggtttcgaataa

SEQ ID NO: 4710 - DNA, 417 bp, Zea mays
  Peptide Sequence Number=SeqID_46489
atggcccgagcatactggcgctccatcgagcgctctaggctcggtgggtcggatgagtcaggcgtctcttcggatgaggtagactccttcgactcttccgaggagtggagcggcgacgatggtgacgatgagggtgacgacagtggcgacaacaacagcgaggatgacagcggcgatgacggcggcgagggtgacagcggcggtgatggcagcgagggcgacagtggcaacgacagcgacgacaacggcgatggtggcaacagcggcagcaagggcgacgatggtgacggcagcagcaaaagcgacgatggtgatggcagtggcgacggcgacaagggcgacagcggtggcagcagcgatggcggcaagggcaacgacagtggcggcaaggccagtgtcatagtgccactggtttaa

SEQ ID NO: 4711 - DNA, 327 bp, Zea mays
  Peptide Sequence Number=SeqID_46490
atggatcctaagggaaaggggatggtggtcaacgataaggagaaggagtccatcttcaacgagccaagggacgacaagcccactaactctggctcgagtcacaagaagaaggacgggaagaagaagaggcgcatcaagaagatcgtctactacgacagcgacgaatcttcttcttcaccaagagacgacgacgacgagaaaaagaaaccggttaattcgaatttttcatttgattattctcgtattccttttaattccgatgctcatttgattccaattcctcttggaaaacctccagactttgaccaattctctacatatcgctaa

SEQ ID NO: 4712 - DNA, 600 bp, Zea mays
  Peptide Sequence Number=SeqID_46491
atggcggaggatcagggacgcctcaaggcgacagtggtggagctctggcagcacaggaagaactccggtgagcacggaccgggcggaccagaggggctgggggtgaaccgaggggcgttccaggtggcgagtgatagggcggagcttaccggggcaatagacgcggcagggagtcccacaacgaccgtagaacggacggcagacgtcgggcgagagagagggcgagagtgctcggttgagggcacaaatgagcagggggaagtgggcgagcggggcatgggctctaaaggggtgagggcgtgcagaggtggccgaagattgtgcggacgtggccgcgtccacggtggtgccatgggcgggaggttagggacggggtctgacgggtggggtccgcggggcagagagaggatgagcgcgtgcgcgaggaaattggctctgacaggccgaccccacagagcagtgagagggagagagggagagaaggggcgcgcgggcgggcgccaacaagcggggtccgcctgtcaggggcttagggcgcgcgggcacggggctggtcctgctgggtcgacttcggctgaaatgggtttttccattttctag

SEQ ID NO: 4713 - DNA, 210 bp, Zea mays
  Peptide Sequence Number=SeqID_46492
atgcgctatctgcatgaagacgcgacgctggaggagatgctgaacccaagacaatcaagtgttcatgcccccagcgtgcggcgcggacctgagttcctccagcgccgccctggcctggtcctgcagcaggttcatccgacgcaggaccagggcggccgaggcgatcctgcagctgaggtcgatggggatcaagtcgatggggaagtttaa

SEQ ID NO: 4714 - DNA, 2001 bp, Zea mays
  Peptide Sequence Number=SeqID_46493
atggtgcaaggcgaggagagttcttggaggatggagagggcagcgctgcctctcaaccaggcgctcgcgtacggagtccaagcccacgccgccgccgccgctgcaccgccgacctgcttccttccatcgccaccgcccacagcgcttcctgctggtctcttgttggtcgtagaactagcagtggccatggtgcaaggcgaggagagttcttggaggatggagagggcagcgctgcctctcaaccagctggcgctcgcgtacggagtccaagcccacgccgccgccgccgccgccgcggctgcaccgccgacctgcttcctggacttccagcctgcggccgcatccgctgcctacttcgggttcggtgagctggaggaggccctcatccacggtggtggcgccgccagcgccggcggcggcgtcgatccgggcgtgatcatcaagaacgacgtcgcgcaggcaaagtcagcggcaggatatctcgcgggcgctggcaccggcaggccccccacgctggagatcttcccttcgtggccaatgaggcaccaacagcagctgcacagtgggaattcgcagtcagtagggagcaccggcactgactcgagctcagctcagaacacaatgtctcagatggagttggtgtccccagcctcctctgcgccgcggcaggaggtcatgatggtgaccactgatgattacagctacaagccaggcctcgccgctgcgcccgctgctgccgccccgccgagctttcagcagcaccacccgctcccgctgcagctgcacggaggagagggagggggagaccatgacaagaggaagcatggatccacaagaaaagatggcaagttggtagatgccaagacggaacggcggctggcgcagaacagagaggctgcgaggaagagcaggctgaggaagaaggcttacgtgcagcagctcgagactagcaggatcaggcttcagcaggtcgagcatgagctccagagagcacggtcacagagctttgatatgtcgtgggcttaccgtggtccagggcctgttcgttggagggtgcagcgccgccggggacatgagctctgctgtggcctgcagctgcagcttagctgccgcagccgcagcaggccgcagcgcggcgccgccatgttcgacatggagtacgcgcggtggcttgacgacgacaccaagcggctggcggagctccgaggcgggctgcaggcgcacctgctggacggcaacctgggactcatcgtggaggagtgcatgcagcactacgacgagctgttccagctcaaggcggcgctcgcgcgctccgacgtcttccacctcctcaccggctcctgggccacccccgccgagcgctgcttcttctggatgggcggcttccgcccgtccgagctgctcaagatcctgataccgcagctggacccgctgacggagcagcagctgctggggatctgcaatctgcagcagtcgtcggagcaagcggaggaagctctcgcccagggcctgcaccagctgcaccagtccctggccgacacagtcgccgcgggcacgctcaacgacggcgccgccgcccccaactacatgaacatcatggccgtcgcacttgagaagctcgccagcctcgaaaatttctatcaacaggtcaccatctttttaccctccatttcctgcatcgttgaccgccatcctcaagatcttattctcactgtagatcatgaactgcacagcaacgtaacagttgcaatggagctggtcctcgtcctacgagctacagggtctggtcctgctttctccatggcaggggcagcccaaccttttgtcagaaagctagctttaagggccccaagcgccgacaatctaaggcaccagacgttgcatcagatgcgccggatcctgaccactcggcaggctgcgcggtgcttcctctccattggggagtactacagccgcctcagagctctcagcaacctctgggcttcccgtccccgcgagtaa

SEQ ID NO: 4715 - DNA, 786 bp, Zea mays
  Peptide Sequence Number=SeqID_46494
atggtgaagactgaagagcattattccttaccttcagcaagatgcggcgacagctttattgagcagcggccacgcgaggacagaagagagaaggcggcggtggtgggcgagggcgagggggatgcaggatgcggcgacaactttattgagcagcggcctcgcgaggacaagagagagaaggcggcggtggtgggcgacagcctcgcgaggatgggagagcgaagctccggacgacgaggtgggcgagggcgagacgatgtaggacgcagcggtagcgttggtgggcggtggcctcacgaggacgggagagagaagacgctggtggttcgtgctcctgtcctgctcacgcctgcctcccagtggttcatggacctcaccgcctcctcgatcccgcatggcgcgtcgccgcacgccgtggcggcgttccacaacatgctcatccgagcggacgcgaacgcgaaggcagcatgtcgcgcgtccgaggcgctcgatgccatcgtgtcctgcctcgtcgacctcgacctgtgctcactcacgtcctcgctccgccacatcgagcgcctcgtggacgtcgtgggcctcctaacgcgggcgctcggctcatgcctagactccgtcttgccactcgtcgtgtccgtcgtcgtcaatgggttatgcaagtcggggcttgtggacgacgcatgccggctgctcaacgatatgcctcgcaatggcgtgaaactgaatgtgttgtgccggggcggaggcaagcgtggtgactttggcggctacctgtcgacgcggtag

SEQ ID NO: 4716 - DNA, 1383 bp, Zea mays
  Peptide Sequence Number=SeqID_46495
atggagcttctccctgttgaagtcgttggcaacattctttcccatcttggtgttgcgcgtgatgttatgattgcctctgcggtatgccgcaagtggcgagatgcatgcaggaggcatctccgtttgctgtccttcaactccaatgactttccacgggacatgactacacgtcagttggagattgtcatcacacagactatatttcagactatggggctgcaacgcctttcgattcacattgataacacccatgagttctctgcagcaccagtgattgcatggctcatgtataccagggagaccctccgaagcctgtcttacaatgtcaggacaatacccaatgtaagcattcttgaaaagtgtggtaggcaaaagctcgaagtgctagatttggaattggaccataacaccatcacaggtgtcgaaccaagctatcagaggttcacttgtctgaaatccctttccctgaggcatgtcagcattttggccttggatttgagccttttagttgctgcttgcccaagaatagagtcattagcacttgatgtccttgaggttgtcacttcagaattacagtctacgatggagctcacaagccatacattgaaaagtctatttgcaaaatcggtaggtgtagataagatcatacttgatgcagataatttggaagttctgcacctgaatgctttaaatctcgatctgtttgagcttaacgggaaaggaacactaaaacattttaagattgatgatgtcagtgttactcatttggatattggggacaatactgatcatttggaggcagtagacgtgagcaacttcacaatagtctggccaaaattctatagcatgatatccagggcatctaatttgcgtatgctacgattttggggtgttgtgtttgatgacgaggatgagatcgtggattcagaaactatagctgtttcatttcctcttcttaggcatctttcattgagttatgaattacgagatgggttacttcactacagccttcagggatcatcattactggagaatgtctcagttctggaacttggttggacagtaataagtgagcactttggaccctgggtgtttggtatgattggaaggtgtccaaatctcaagaaacttgttattcatggtgttctttctgagacaaaaacgcgagaggatcgccagatgttagcaagctttacctcattcatagtctgtgtcatgaggaagtatgtgcatgttgatcagccatgtgccgcgccctgcaccgcgacccacgcgctgcctctgccgctgtcacccgtgcaccaccgccgcgacctgcgcgccgccgccaacgtcgtctcttcccttaagacatccctacatcactccaaggcgtcctcatag

SEQ ID NO: 4717 - DNA, 237 bp, Zea mays
  Peptide Sequence Number=SeqID_46496
atggactggcctgatcctaatttatgtttgttcatgaccacggtggcgctagagctccgaggggcacaagataacctgagaagggctgtccacgatggggtgtctcacggcgccgttttgaccgattttggggaaattcggaattcacgagctatggtggatgatctatgtcacaccaggttttggaaggtccttacggagaggtactcaggaaagagcctgagccccctaaagtaa

SEQ ID NO: 4718 - DNA, 669 bp, Zea mays
  Peptide Sequence Number=SeqID_46497
atgaaccaatctcattttcttgatagcctcttcctgaatctcgagggcgagattcctgttaaggggcccatctcggcggcccaccttgctgcccccacggcccaacaacgccttctcctggcatcctgcgcgcacggcctgccctttgttccccggcccatcccgctcacgcgcgcagccgatggcccagccgcatccgcgctgttgtgcgtgctctccctgccgcgcctgcgcgcccgcccagccgcgcgcagcccagcacgtcgcgcccccgcgcgcttgtccaaccgccaccgcgcccaggcgcgctcgcccagctggcccaccccgtcgtggcccacgcgcgcagccgctcgcccagctgtgtgtcgcgcacactcagccaccgccacgcccctgctcgtcttgcgcgtgtggaagacgggaatcgtggccacaaccactcctctctccctctcctcgcgcactgcccctcgccatggatggtacgcacggctggcgctgcccgagggcgtcaacaggaagtcgtgccccatcatcaccatcgcgcccatcaacatcgtcgggcccaaagctacctgtgtcgagcccatctcacgccgaggtaaaggagaaggcgtcaaggcggatctccaggagttccaggacttcgacgagtttgaggattag

SEQ ID NO: 4719 - DNA, 393 bp, Zea mays
  Peptide Sequence Number=SeqID_46498
atggcgtgggagagaaggagaaggggctgctgcagggggcccttggccaaggtgctaggtgagctcatgagggagatgcggagggagctagagccaagccgccatggatggggagctgaggaagagccgaccatggggtgctcgtggagaggaggaggtgtagggtgtggcttgggagaggagcccgaggaggaagagatgtgtgggagaagggacaggggtgggctgccttttatagagaaggagctctggacatgtcagccagctctagcaggtggcacgtgctacaataatgactttggacagacgtttttggcattttcccgttggattcggatcttggtcactgtagaagatattttccttgatctacactctacaaatcctatatag

SEQ ID NO: 4720 - DNA, 411 bp, Zea mays
  Peptide Sequence Number=SeqID_46499
atggcccagattagatcccgcagacgagcgcacgagctgaccagctgggcccgacgagcgcacgagctgaccagacgagtgtggctgataattggggacgaggcgccagcgcccagaggagaaggcaggctgaccagctgggcccagcgccagggggcgcaagcgctgactggtgggcccaaggacaggcgcgcgggcgcgaatcagtacccgggcgacagagagggcgagggtgcttggctgagggcgcaaatgagcagggggaagtgggcgagtggggtgcgggctctaaaggggtcggggcatgcggaggtggccggaaaacacgcggacatgggcgcatccacggcgagagtgcacaggccgagggttttcaattcaaattcaaaccaagtttcaaattcaaactaa

SEQ ID NO: 4721 - DNA, 408 bp, Zea mays
  Peptide Sequence Number=SeqID_46500
atggaggagcaaggaaggcgccacacgcttggaggagagagggagcggagccttgagcgctggattatagatggagagctcgggttcggctccatggcgtcggtcgacattggaggaaggaaggaggagcagaggtgctgcttagccccgtggatcctggcagccatgggccagagaagggcgccccaacctggaggaggaggaagggggcgactggagctacgacacagagagcgcggggttgagcgccatggccagttgagggagctgagcggctgctccctgggagcttctgcgcagaaccagagaggagaaggaagatgccaggagaatccttctatgctaaggaatagagaagggaggcaccggctagagaagaagacagggagtgggagagcgcagagatga

SEQ ID NO: 4722 - DNA, 204 bp, Zea mays
  Peptide Sequence Number=SeqID_46501
atggaggggataagcacgggcgtgggcgtccattttataggcaagaaaggggaggtcgaggggcgccgggacgaagacagagggtcggccagggagagagtaaagggcggcatcaactccattgatggcattcatcaatgggggaagtgttacaaatctacccctcttaaaaagaatctcgtcctcgagattaaggaaggctag

SEQ ID NO: 4723 - DNA, 603 bp, Zea mays
  Peptide Sequence Number=SeqID_46502
atggcgttccccttcctcgctggagctagtctgagccttagcacacctggttacctctccccacggccgggattcctcatcggaatcaacccgacccaccagaagcattccctccgctattctatcgtctctggtccggtctcatggccggagtcccacgagaggaggcatcacatccaggcggttaatggtcttctcatgtacgaaggtgagtctctccgcccccacatccctctctccatcctcgtcggccaagtgacccccctgccctcgtgccagctcgtggcggctgcgacccacgtgccattttgcggctggcggctatggcgccctgctcggcagttcgaccctacacggcctctgcccgacgagcccagtcgataccccacgcacatactgagcaggctacaaccagtatcttgcgcgcaccttggccacccgcaaggttctcggactgattttgctgcgatggcttttcagacgggggattcctatgctgagcttcctagaactgtagcgggttttctaaagctagtggaactttgtaaaggccttgtagtggtaccctgcctcgcttctttggtagaggtgtatggggtctga

SEQ ID NO: 4724 - DNA, 222 bp, Zea mays
  Peptide Sequence Number=SeqID_46503
atggccttcccggacagggagaatcaccgggctctcggcaatcgctcgctggagcatacactcggccgtagatgcacaactcaccgcggccagactttgccgcaacattgccaccggcctcatcgccgcgtcggtgctcaggggaggaagaaaaggcgtcgaccgttggatcctagtcaacgacggagatttgagcgactagataccagttcggggaattga

SEQ ID NO: 4725 - DNA, 261 bp, Zea mays
  Peptide Sequence Number=SeqID_46504
atgaagctgtggaaggagacttccaggagttccaagactacgacgagttctaggtgtgggttagcggcaacccccagtcggctgcctgtgaaggccgcagttatctacgtttcttttccgcactttgatttattctcgccggaggggatgaggccgtcgtgcggtgaagagtacgcggagaccgcggtcgctggagattggatggcggctggcaagcggcgggggcgctggaggccgcgggtgctgaagattagggtttag

SEQ ID NO: 4726 - DNA, 417 bp, Zea mays
  Peptide Sequence Number=SeqID_46505
atggagctccggctgcacagtgaaaaggccggtaagcacggactgggagaaactgaggggctgggggcaaaccagagggcgtctcgcgttgctagcgaggaggcagagctcaccgaggcaacagacgcaacagaagctcgacgacatccacggaacggacagcgaaccacgacggaggtccacaggtgcgcgcagtgcgagagagaggagcgagggtgtctggtgagggcgcaactgagcgagtgggtgcgggctctagaaaaggggtcaggcgtgtgggggagtggctgggaaacacatggtgtgggcgcgtccacggcggagagcgcgggcgggaggttagggaaggggaggtggctgacaggtggggtccgcaagccagcaagggcgagcatgcgaacgggcggtcaacgttga

SEQ ID NO: 4727 - DNA, 282 bp, Zea mays
  Peptide Sequence Number=SeqID_46506
atggagtttgcccctgctcacgtggagccaaggctgcagccaccttcgctgattttgccgcaccgagtcctccgcaagtcccgaaaacacctaatgacgaagattgacttggctaaataccaaggccaatggtgcagtgtgatgcctaaggttatcaaggatctgcaagccaagaagaccttaatggaaggagtccaaggtatgggaccattatattatcttttggaataccaagaagaattaaaagttcataaggaccagctaatgacattgatgacttag

SEQ ID NO: 4728 - DNA, 297 bp, Zea mays
  Peptide Sequence Number=SeqID_46507
atgtggtatgaatgggtctccggcttggacgcgctgttggaggggtgggcctgcagctgtagctggtctttggctaagatgccgatgactttgccatcttctattgcgtctttgccctatggtggagcaaaacctggtggtggtgctcgtggtacgcctccggagctgcagcacgaacagtgggcgccaaatgttggcacttgctctcatgggcatgtagatccaacggaaaagcgggaagagtattggcaaagtttgtcgcgggatggcaaaagctttgttaatctccccctgtga

SEQ ID NO: 4729 - DNA, 207 bp, Zea mays
  Peptide Sequence Number=SeqID_46508
atgggcatcgcccccggtgttgcaccctcctcgaacctccaggagagcctggccaccaccaacactacgctcaaagttgataatggcgaggtggccattctccatgctcgcataaaggtggcagattgtcacgtcgcggagttagagctgggggtcaccaaccttcatgagggtgtggatgaggtggttgcatttgttcgtgcctag

SEQ ID NO: 4730 - DNA, 777 bp, Zea mays
  Peptide Sequence Number=SeqID_46509
atggccgctgtcaccaccgtgcgtgacgtgctgtaccactacgccttcgcccgcggcgtctacgagcgattcatcggcgactgcgaccgccacccgcagatggcgcggaacgcggtggcgctgctgctctggttcgaccagggcaccaaccaggtcatttccctcctgccgggcatgagcaccaccgccctaggccacctggtcaccgaggccagctgcgtcatccgctgccttcacatgaaggacgtcgtccccggcccgccgacgccgctcctctcagcgctctgccaggacagccgcatggactgcccccgcttcttcgactccaaccggggcctcatcgtgcgtggcgtcgccgacctcctcgacggcgtctgcacgctcatcttcgacgatcgcctctatcacctgctgcgccgctaccagacaggcctggtcggccgcatcccggagctcgaagcgccctacgccagcgccgtcgtcgtcaccgtgccggaggactaccgctccatgttcgtcacgttttcccgaggccagtctgtcgaacgagacgagatctttaactacttcagggagacctggggcgactgcatcgtccgtgttctcatggagaagaccacaggtggcgcgcagccaatgtacggccgcgtcatcttcaagagaaaagcgttcgtgagcctgctactcaacggcgacgatcgcgccccgatcttcataggcgggcgtgagatctggctccgcgagtacactccccgcagcagcagcaacagcaactga

SEQ ID NO: 4731 - DNA, 258 bp, Zea mays
  Peptide Sequence Number=SeqID_46510
atgaagggtgtatctcgtttcggtgtaaaaggaaagcttgcaccccggcgctctgatgaacggttccaatggtacagtgaatggataggatcagattcagtgaacctcgccgtcggcgacctccatgcaaggattcacactgatcgcagtgattcattcgtgcaacgtggtcggatcattggtgtcgtcgtgtacaggctcaccggcgctcagtctgccgtcgtgctgcgtcgtggaccaagtgttgtgaagaaatag

SEQ ID NO: 4732 - DNA, 393 bp, Zea mays
  Peptide Sequence Number=SeqID_46511
atggaattgaatgctcaaggcaaagaccgtctggtcccaggtggcggaccgtccatagttgaaggattgatgtttggacagaactcgagtagttctgtgttggttttattttttgaactgcggaccgtccggggcctgagtgcggaccgtccacagtacaaatattttgtattgcggaccgtccagggtccaggtgcggaccgtccacagtacaaagattttgtattgcggaccgtccggggtccaggtgcggaccgtccgcagtacaaatttcagcaaatgcgcagagtcagcaaaactttgttttggctcagttttatgtatcgcggaccgtccgaccttgaggggcaggccgtccgcaagtcatttttgaatgctttgacacttttataa

SEQ ID NO: 4733 - DNA, 1113 bp, Zea mays
  Peptide Sequence Number=SeqID_46512
atggaggaggagcgctgcttcaacaactgggatctggacgccgtcgtgcgcttgggctgccgccgcctcctctccccgtcgccgcagcccgacccgttcgcttcgtttctcccgccgccgccgcagaaggagaagcccgtggcgccagcgccggctaaagagccagagccacataccgcgtggcgcttccctgaccttggtgctggcggcgggcaagacggcgaagagctcctcagggccctgttagccgaccagcctcccctgcatcagcctctgccaacgccagcggcaacgccaacgccaacgccaacggcaacgcctcccccaccatcacaacagcagcatctacagccgactgtgacagccgtggacgtggctccaccccaggtgcgccccgctccggctagggcgcagccgagcgggcggcaggtgcccggtggcgtgccaagatccaagagaaggaagaaccaggtgaagaaggtggtctgccacgttccggcggacggctcgtcgccggacgtgtgggcgtggcgcaagtacggccagaagcccatcaagggctccccctacccaaggggatactaccgatgcagcagctccaaggggtgcgcggcgcggaagcaggtggagcgcagccgcgcggaccccaacactttcatcctcaccttcaccggggagcacaaccacgcggcgccgacccaccgcaactcgctcgccggcaccacccgccacaagttcccgtcgtcggcggcgcctcagccgccgccgccgtccgtcgtggtgggcggtgacgcgcaggaccggcagccgagcccgagcccgacgtccacgtcgaccgcggggctctcgcccacgacgccgctgcgcacgccgtccatggaggaggaggaggaggaggaggaggaggaggaggaggaggacgagctgctggtggaggacatggagatggctggcgaggacgagctcctgttcctcagcaccgacgccgacgccggggcaccgacgtcctcgctcttcgacgtcgtcggcgagcccttcctaagccctccctgggtgacagccgccagcagcgccggcgagccagccacaggggcagccggcgctgggagctga

SEQ ID NO: 4734 - DNA, 297 bp, Zea mays
  Peptide Sequence Number=SeqID_46513
atggattctaagggaacagggcttgtgatcaatgacaaggaaaaggagaaggagaccctctacgttgatgagacaaaagtatttgggaaattgtggaaaacggaatgcaatttgacagtagtgacaattatgggggacagatatcccccgggtccactagaagtcaaaaacccttgcatagggccacaaaccagtcaccctacaaagtcgtctcatcgtgggccgggaaaagactacaatggaagtgggccgaaccaagaaggcaatgggctcatgcctggatcgcccgcagactaa

SEQ ID NO: 4735 - DNA, 297 bp, Zea mays
  Peptide Sequence Number=SeqID_46514
atggagggaggcgggcagggcggcaagcagcaaacgaccggcggacggacggacaaacggcagtcggcaggacgcagcaagccagagatggaggcgggcagtcgcaggcggccgcggctgtggacagacgagctcacgagcagccgagcaggtggccggcccgccgggcgaggagcgggcgagctgctgacctgcgagcgggcgtcttgtgctgcggcggttgggcttggcgtgcggcatgcagcgtcctgcggctaccggctaggagacggagggggcacctcccctaccttgtaa

SEQ ID NO: 4736 - DNA, 189 bp, Zea mays
  Peptide Sequence Number=SeqID_46515
atggccgtgatgcctggtgacttcaccgccctggccgtggaccacgcgcaccgagatggcccctcaccgtcgagcgtggccgatcatgcgcccggctcgaggttgaagacaaccctgacagccgcggcccacccggggactcaggctgtttcccgagtacctctccgtaaggacctgttcattggatga

SEQ ID NO: 4737 - DNA, 360 bp, Zea mays
  Peptide Sequence Number=SeqID_46516
atggaaggtctgtgccttcgaaggactcccaggatcgatgtgttggaattgtggactatggacgccgatggaagggcgctgattaagatcgtggacggcggcgagatggatggggtcgcggaggggagcacggggaggggacacgggcgagggtgggatgaaccgggaagaatatgggaggcgctcctggcgtggctggggacggatagggagggaggtcgcgtttggggccgaccatcgtgggaggcagggcgagcgtggacgacggcgagatggatggggtcgcggaggggagcgcggggaggggatcacgggtggggcgggatgaacggggagatggtcgacgtcaccagggggtag

SEQ ID NO: 4738 - DNA, 165 bp, Zea mays
  Peptide Sequence Number=SeqID_46517
atggagatgcttgttgaagctgagaaggcgaacaccgaggctgcgaaggaagcactagtggctctttcccgtgatcctttattttatgaactggccaatggcctttgtggttcaattattatgcttcctgtgttcttcagtttgccaatggccaatggtgaatga

SEQ ID NO: 4739 - DNA, 474 bp, Zea mays
  Peptide Sequence Number=SeqID_46518
atggcgaccggcgacgagtcggagacggcggtgcgggcgtctgaggagttgcgggactggtccgacatgacgccagtgtgtcttgccgaagcgttctcgcggctggcgctggaggacctgtggcgcggcgccatgccgtgctgtcgctcctggcgggacgccgcgcgctcgcgcccgggactcttcgcggtgcttgacctcgagcccgggtttgctgagtccacacctggcgccgaggcggcagcgtggtggacgccctccttccagcgccgtgtcgacgccatggtgcgctccgccgccacgttcgccgtgggggagctgtgtgagatccatgtccgccactgttccgacgacgcgctcgccttcgccgccgagagcggtaaggtgagccaaggcgttggaccaccgtctggacgcctaggcgaggtaggcgggcaaggctcctacgcgttggacctccgcctggatgcctag

SEQ ID NO: 4740 - DNA, 1956 bp, Zea mays
  Peptide Sequence Number=SeqID_46519
atgggtatcgctctcctcgcgctgctgctggtgctgccggcgagccatgcgcgggtgtgcccgccgtgcgggtcgacggccgtgccgtacccgctcagcacaggcgacggctgcggcgacccggcgtacaaggtccggtgcgccgccgccaccaactcgtcgacgtcgtcgccgacgctcatgttcgatgcgctgaacggcacgtcgtaccggatcacgtccatctcggccgcgacgcagcggctggtggtcgcgccggcgccgttggtggcgcagggcagcaggtgcgtgtcggaggggcgcggcggcggggtgcagctgaacgcgtcgctgccgttcaacgtgagctcgtccaacaccatcatgctgctcaactgcaccagcgcgctgctgctgtcgccgctcaactgctcctccaactcgctctgccacgtctacgccaacgccacggggtccacggcggcggcttgcgcgccgctgccgctctgctgcaccttcgtggcggggggctcgtccacgtcctacagcatccgggtgtccccgcagttctgcagcgcgtaccgcagcttcgtggggctcgacccggcggcgcagccgccggccacgtggggccgccgcctcgggctggagctgcagtgggccacgcccagggagccgctctgccgcacgcaggccgactgcgaggacggcgccaacgccacctgcgccgacgacccgctcacgcccgcggcccgccgctgcttctgcgtgcccgggctctcgtggagccccctcgccggcgcgtgccagctgaatccctctgattgccagatcgctgggggctgcggaggatccaaccatgcgcctctcattgcagggctggtgtgcggcctcggcggcgcgttgctgctcgccgcagcggggctgctggcgtaccggcggcagcggcgcgtccggctcgcccgggagaggctggccaaggagcgggaggagatcctgaacgccaacaacgcgagcgggcgcaccgccaggaacttctccggccgcgagctgaagcgcgccacgggcaacttctcccgcgacaacctcctgggcgccggcggctacggcgaggtctacaggggcgtgctcggcgacggcacggtggtggccgtcaagtgcgccaagctgggcaacaccaagtccacggaccaggtcctgaacgaggtgcgcgtgctgtcgcaggtgaaccaccgcagcctggtccgcctgctcggctgctgcgtcgacctggaccagccgctcatggtgtacgagttcgtccccaacggcactctcgccgaccaccttcacggcgccacgagcctgagccgcccgcccacgctcgggtggcgccagcgcctggccatcgcgcgccagacggcggagggcgtcgcgtacctccactccgcggccgtgccgcccatctaccaccgcgacatcaagtccagcaacatcctgctggacgcccgcctggacgccaaggtctccgacttcgggctgtcccggctggcggagcccgggctgagccacgtgtccacctgcgcccagggcaccctgggttacctggacccggagtactaccgcaactaccagctcacggacaagagcgacgtctacagcttcggcgtcgtgctgctcgagctgctcacgtccaagcgcgccatcgacttcgcccgcggcgccgacgacgtcaacctcgccgtgcacgtgcagcgggcggcggacgaggagaggctcatggacgtcgtcgacccggccatcaaggacggcgccacgcagctccagctcgacaccatgaaggcgctcgggttcctagcgctcgggtgcctcgaggagcgccggcagaaccggccgtccatgaaggaggttgcagaggagatcgagtacatcatcaacatcgaggccgccggccatcctatcgagcagcagcgaacttgcctagactccagcgagtga

SEQ ID NO: 4741 - DNA, 573 bp, Zea mays
  Peptide Sequence Number=SeqID_46520
atggaggcgcgcggcggcgccagtggcagcaaaggagcgcgccgaggaggtccctttagctggccgaggggcgccgaggaggcagtagctgggtggatctggggcagagcggtgttgtttttaagattcttcacgggcctggccgcaccagttttttcggccttgggccatggctcagcccaacaacagggcactaagcttaacccacctgctctctcggactctctcggccatggaggccgcaagcccgcaagcaatcaggagccggggagatgtggagacgccggcgacgaggcgaagaagaaggaggcggcgcttgcatcaagcaggctcctcgacccggcgttcaagccctccaaactatcccaggaccggctcgacaagtttaaggaattacacaagaaacggttacagataactgaaaagccgaagtataaaagaaaactgaaagaaatgataaattattacaaatgtaccttcggcttgaaggaagataaagagtacaaccgtgacgcaaaagcaaaatgccaagccagcgtgaacagtacgagagtactgttcatctatttatag

SEQ ID NO: 4742 - DNA, 1332 bp, Zea mays
  Peptide Sequence Number=SeqID_46521
atggccattaatatattatctttgtatttgttccacaaaaggaggtcccatgttaattttcaaggtctagaaattaccacattagttgaaggtgtcgcggctggcgctggtgttgcaatacttgctgctgccatttttttgttcgtgaggcgcaagagaaagcagaagagagtggtcaactcgtcttcgaagctcctcaagtacagcggctctggcgggaccccgcgttcacgggtcggtgacatggagtccggcagcatcgaggacccgcctacgcatctcttcacctacgaggagcttgaggaggcgaccagttgcttcgacgaaaacagagagctcggtgacggtggcttcggcaccgtctacaaaggcagcactaataacaccgggcgctggtcctcttcttccttccctgtgctcggtcggtcagggtacctcaaggacgggcgcgtggtggcggtgaaacggctgtacaacaacagctaccggcgcgtggagcagttccagaacgaggcggccatcctgtcggggctacgccaccccaacctcgtcatgttctacggctgcacgtccagccagagccgcgagctgctgctggtgtacgagttcgtggccaacggcacggtcgccgaccacctgcacgggcagcgggccgccgagcgcgccctcccgtggccgctccgcctcggcgtcgccgtggagtccgccgcggcgctcacctacctgcacgccatcgagccgcccgtggtgcaccgcgacgtcaagaccaccaacatcctcctggacgccgactaccacgtcaaggtcgccgacttcggcctctcccgcctcttccccctcgacgtcacgcacgtctccaccgctccccagggcacgccagggtatgtagatccagagtaccaccagtgctaccagctgacggacaagagcgacgtgtacagtttcggagtggtcctggtggagctcatctcgtccaagcccgccgtcgacgtcacccggcaccgcaacgagatcaacctggccggcatggccatcagcaagatccagaagtgccagctggaggagctcgtcgacatcgacctgggctacgagaccgacccggccaccaagaaggcgatgacggcggtcgccgagctggccttccgttgcctgcagcagaacggcgagatgcgcccgccgatcaaggaggtgctcgaggtgctcaggagcattcagggcgaataccagacggggaaggacggagacaaaaacaaggacggacccctctctcccaccacggttcatgctccgtgggagagcagggccacgacgcccaacaccagcagggactag

SEQ ID NO: 4743 - DNA, 954 bp, Zea mays
  Peptide Sequence Number=SeqID_46522
atggcggctctctgctcgccacgccgccgcctgccgctgccgctgctgctgccgcttctcctcgccgtcttggttgccgcttcccgcggcgacgacccttccggcgacgagtacttcaaccgctccatatgcaagctgcaaccatacagatgcggcgaagtgaatatcacctacccgttctacctttccgacgacacggcggacgtcctggggaactcctcctcctactgcgggtaccctgggctggccatcgactgcgtggacgacgagtaccccaccatccagctcggcggcggcagcagcacaggctactcctacaacgtgacggacatcgactatcccacctccaccatctacctcgccgacccggacgtcctcgacgacgcgagctgcccgcgggtcgaccacaacgtcaccgtctcgccatcgccgaccttgtggctcaacctgtcggactacaccgtccgttacctgctcttcttcaccaactgctccgtccacgttctccacgttcccaaccagtctgacatcagcccgatcgcgtgcgcgagcggctctgacggggacgactactctttcgtggttccttcggagatgccccaccagcttctgtcgcagcagtgcggtcaagtaaccctggtgccggtgcttcagaacgccacgctgacgccggtcgatcccctgtggagcaccagcgggtaccgcgacgctctcaagcagggcttccagctgcagtgggactcggacatgaagaccgagcggtgtgatgactgcgagagatccagtggaaagtgcgcctacaacacatccggggagttcgtggcctgcctgtgcgccgacggccacgtgaccgaccatggctgcaccaacgaacttgaccagggccagggccttcggcttctccgcgtactccagtctgcccatcgcagtcgcaggcacacaccttccttctag

SEQ ID NO: 4744 - DNA, 489 bp, Zea mays
  Peptide Sequence Number=SeqID_46523
atggcaaggctgacaatagctaagtccagcctcaggcgcaacaggaggtctccgcctcgcccgacctcaaggctcgacctcaacctcgacctcgaaggatggtctccgcctcgtccgacccgagggctcggcctcaacctcgaccttggaggatggtctccacctcgcccgaccccagggctcggcctcaacctcgacctcgaaggatggtctccgcctcgcccgaccccagggctcggcctcaaccttgacctcggaggatggtctccgcctcgcccgaccccagggctcgacctcggccccgacctcagaaggaatcgcgtcctcacccaaccccggcctcgccctcaggaggagtctccgcctcgcccgaccttgggctcggaccaaccacgccacaggggggtcatcattaccctaaccctagctagctcaggctacggggaacaagatcggcgtcccatctggctcgccccggtaaacaagtaa

SEQ ID NO: 4745 - DNA, 771 bp, Zea mays
  Peptide Sequence Number=SeqID_46524
atggactcggagcactggatctcgcgcctggccgccgccaagcgttactacgcggcgcagctcggccgcgtcgacgatgtgcccgggatggggacggaagaggtggagatggaggtggaggacgacggggacatggagatggagttggagatggcgctggagctcggggacgcgacgtggccggaggtcgcctgcccctactgctacgaggaccatgacgtcgcatccctctgcatccacctcgaggaggaccacccctacgagccccacgccgcgccctgccccatttgctcccaaaggattacaagggatatgcttaaccatatcaccatgcaacatggttacttgttcaagaatggtcacagatcccgtagatttattgttccagagagccatgcgatttcattattgagtcgagatctacgtggtactcatttacaggctcttctagggggtggtcatggccacagatcaaataacgcagtgaccacaaacatttccagtgatcctcttctttcatcgtttggcctgagcttctcagcatctgatgcaccagaaccatcaaaatcagcatcttctattccagacggtaccgcaatacgtaaggagacaccagttcagccttgggaatcaagcctctgcttggacgcggttcagagtggctgcaacgcgatgtccatcgtcaagcagggggacctcatggtcgtcgccaacgtcgatgactcttgggttgttctgggcaccgcatccgatgacagcgccatcatgtag

SEQ ID NO: 4746 - DNA, 831 bp, Zea mays
  Peptide Sequence Number=SeqID_46525
atggcagaagcagccggcggcggacccctgctccccgaggaactcgttatctgggagatcctgacgcgtctgccggcgaagcccctcctccggtgccgcgccgtctgcctctcctggcgccgccgactcacctccgacgctaagttcctcctcgcccaccaccgtcgccagccgtcgctcccgctcctcacccaaggggacaggagcaccgaggacaggaggatcgacgccctggactaccgcaccggcgagcggctccccgtcgcgcggacgacgggccggaccgccgccaacgccgacgacctgaacgtgctcgcttcctgcgacggcctcctcgtcctcatcgccaacggcggcctccacatctgcaacccggcgacccgccagcgcgcgccgctcgcccttctccacggcgcctcctgcatctccgcgctttacccttaccgcccgtccgggtcgtaccgggtggcgggtgctctgctgcttcgagagagccgaggacggccacgccgtgtaccacgtgcacaccgtcgggtcgcgcgagctcaggtgcgtcggagaacctcccgcgctgtgggcgtccggagacgtggcgatggcgatgccgatgatgttgtgctttcacccgcacgtcgtggcaggcagcaggatctactggcagccggtcacgttgttggagatgctcttagcagacatacgttcaaagaaagtctagtccaccatgacttcttctcgatggaaggtaatgcggctggtgtggatgaaaaaccattgttcgatggcctgtcaactgtggcattgcttcgtgaagatacttctgagccacattga

SEQ ID NO: 4747 - DNA, 246 bp, Zea mays
  Peptide Sequence Number=SeqID_46526
cgtcatgtctgcgttgactggttcatcggggcaggcaaggcagagcgctccggtggcaaggaagtcgagggtgttgaacttgacgcagcacccaaggcgaatgctgatgaaccggccatcggagtgaagaatgtcgtgtggcatgctaacggctcccctacctggcgtgccaactgtcatggttttagaaacctggggacaataagatttgtgttcggcaggagtgctagcgtggactcactctga

SEQ ID NO: 4748 - DNA, 417 bp, Zea mays
  Peptide Sequence Number=SeqID_46527
atggagaaggatcgtcaagacgatgcgcagaagcaccaggcggtcgtcaggatcgcggatcctatgcgcgaggcgaagagggcgcgggtgagcgtgaaggctgctgccttcggcagtagcaaaccggtgccggctgcgaaaccggccgcccccggacacagcaaggcgtcggctagtgagaaggctaccgcctctagcgggagcaaggcacccccgggcgggcccgtgaaaggacgagggtcgggtgaggggcaactggctgttgtcccgcctctggtggcgaccacttcaccaacggcggtggttggggcgaagggtgccgcgcgggacccttgggggctgctttctgtgcgagcggcgagattatgttggccgctgccgctaaggacgtggcaggctccatgtcccagcgactga

SEQ ID NO: 4749 - DNA, 2436 bp, Zea mays
  Peptide Sequence Number=SeqID_46528
atgcgggacttcatgaccgcatgtgactactgcctcttcgactgttccgacggtagccgcagcctcgacgacgaggactgcggcccaagccgcgaatgtttccacgtcgatctagggggtccctccgaaggcaatcatctcggcatgccggaggacggtgatctccctaggccggtgccccgcgttgacatcccacgggagctagctgtggtccccgttcaggcggggggccatgacccacagctcgagcaaatccgcggggtgcaggccaggctcgacgagggtacaggagcgcttgagccgatccgccgggacgtcgggcaggcatgggcgggccaacccccggccggagaaatacgtcatctgccccagggtctccagcaccgcgtcgccgatgacgccaggctcaggccgccacccacatctagtggcgtcggccagaacctggctgcagcagcgatgcttcttcgcgcgatgccggagccatccaccaccgagggtcggcgaatccagggggagctcaagaatctcctggaaggcgccacggtccgacgggccgagagctctgcctcccgaaggcagggatacccctcggaacctcatgctgcgacttcccgattcatgcgggaagcctcggtctacaccgggcgcacgcgcaacaccgcgcctgcggccccgggccgcctcagcaacgagcaccatcaccacgaccgtcgggcccacctcgacgagagggctttcagccgggccatccgacgggcaccattcccgacccggttccgacccccggctactatcacaaagtactcgggggaggcgaaaccggaactgtggctcgcggactaccgtctggcctaccaactgggtggaacggacgacgacaacttcatcatccgcaacctccccttgttcctctccgacaccgctcgcgcctggttggagcacctgcctccggggcagatctccaactgggacgacctggtccaagctttcgccggcaatttccagggcacatacgtgcgcctcgggaattcttgggacctccaaagctgccggcagcagccgggagagtctctccgggactacatccagcgattctcgaagcagcgcaccgagctgcccaacatcaccgactcggatgtcatcggcgcgttcctcgccggcaccacctgccgcgacctggtgagcaagttgggtcgcaagacccccaccagggcgagcgagctgatggacatcgccaccaagtttgcctctggccaggaggcggtcgaagctatattccgaaaggacaagcagccccagggccgcccatcggaagatgctcccaaggcgtctactcagcgcggcgccaagaagaaaggcaagaagaagtcgcaagcgaaacgcgacgccgccgacgcggaccttgtcgccgccgccgagtacaagaaccctcggaagccccccggaggtgccaacctcttcgacaagatgctcaaggagccgtgcccctatcatcaggggcccgtcaagcacacccttgaggagtgcgtcatgcttcggcgtcacttccacagggccgagccacccgcggagggtggcagggcccgcgacgatgacaagaaggaagatcaccaagcaggagagttccacgaggtccgcgactacttcgtgatctacggtggtcatgcggcgaatgcctcggctcggcatcgcaagcaagagcgccgggaggtctgctcggtgaaggtggcggcgctagtctacctagactggtccgacaagcccatcaccttcgaccaagccgaccaccccgaccaagtgccgagcccggggaaatacccgctcgtcgtcgaccccgtcatcggcgatgtcaggctcactaaggtccttatggacggaggcagcagcctcaacatcatctacgccgagaccctcgggctcctgcgcgtcgatctgtcctccgtccgagcaggcgctgcgcccttccacgggatcattcccgggaagcgcgtccagcccctcggacgacttgaccttcccgtctgctttggaacgccctccaacttccgaagggagactctgacgttcgaggtggtcgggttccgaggaacctaccatgcagtactgggaaggccatgctacgcgaagttcatggccgtccccaactacacctacctgaagctcaagatgccgggccccaacggggtcatcaccgttggccccacgtacaaacacgcgttcgaatgcgacgtggagtgcgtggagtacgccgaggccctcgtcgagtccgaggccctcatcgccgacctggaaagcctctccaaagaggtgccagacgtgaagcgtcatgccggcaacttcgagccagtggagatggttaaggccatccccctcgaccccagtggcgacatctccaagcagatccggatcggctccgggctcgaccccaaatag

SEQ ID NO: 4750 - DNA, 487 bp, Zea mays
  Peptide Sequence Number=SeqID_46529
atgggcgtgtggaccttccggtctcctagcgcggaccatccgccctctagcagagccgcctatagatcttgctcatacatttcagccacagatggccaatcatcagccgggggcagtgtctctttagatgctgaagatgcaccacactcgcatccagactatcctattgacgtcatagggtggacgtatccaaggatgcgattccctgtggctgaatattcttcaaagaggattgttgatcaattttctcttcccagtgacaccaacattcagtattttcatactcagctgcagttcgatgtcttctgtggaactcttatggacaccaaattccataagcatcaagtgtcgctccgctataattcaccggactgtccggtgcaccagcggagcaacgcgcagcccagagcaggagtcggcgccgacgtgtgggccaaccgggttagtctcagtcgcgccgcattcacaagttctcagccgctggcag

SEQ ID NO: 4751 - DNA, 2421 bp, Zea mays
  Peptide Sequence Number=SeqID_46530
atgtcccaccgcgtccggctcgccgcggcggcgctcgtcgtggtcgccgctctggcgcttgcccccggcgccgcggcggcgtggcagctgacgaagaacggcaccgtggtcagctacgaccgccgctcgctcatcatcgacggccgccgggagatcttcttctccgggtccatccactacccgcggagcccgccggacatgtggccggagctcatcgccaaggccaaggagggcgggctcaacaccatcgagacctatatcttctggaacatccacgagcccgagaagggtcagttcgacttcgaggggcggtacgacattgtgaggttcttcaagctgatccaggagcacaacatgtacgccatggtccggctcgggcccttcatccaggcagaatggaaccatggagggctgccctactggctaagggagatccctgacattgtgttcaggacaaacaacgagccatataagatgcacatggagacgtttgtaaagatcataataaaaaggctcaaggatgccaaccttttcgcgtcacaaggagggcccattattctagcacagattgagaatgagtaccagcatttggaagcggcgttcaaaaatgatggcaccaagtacattaagtgggcagcaaatatggccatctccaccaacgtcggcataccatggatcatgtgcaagcagaccaaagctcctagtgatgtgattcctacctgcaatgggaggaactgtggagatacatggccaggtccaatgaacaagagcatgcccctcttgtggactgagaactggacagcacagtacagagtattcggtgacccaccatcccagcgttctgctgaggacattgcatttgccgtggcgcgcttcttctccgtgggcggtctgtacaaggagcctaagtggggccatctgagggacctgcacctggcgctgaagctgtgcaagaaggccctgctctgggggaagacatcgacggagaagctgggcaagcagttcgaggcgagggtgttcgagatcccggagcagaaggtgtgcgtggcgttcctctccaaccacaacaccaaggacgacgtgacgctgacgttccggggccagtcctacttcgtgccgcgccactccatcagcatcctcgccgactgcaagaccgtcgtcttcggcacccagcacgtgaacgcgcagcacaaccagaggacgttccacttcgcggaccagacgacgcagaacaacgtgtggcagatgttcgacgaggagaaggtgcccaagtacaagcagtccaagatcaggctgcgcaaggccggcgatctctacaacctcaccaaggacaagaccgactacgtctggtacacctccagcttcaagttggaggcggacgacatgccgatccgccgcgacatcaagacggtgctcgaggtcaacagccacgggcacgccagcgtggcgtttgtgaacaccaaattcgtaggatgtgggcacgggaccaagatgaacaaggcgttcacgctcgagaagcccatggacctgaaaaagggcgtgaaccacgtcgccgtcttggcgtcgacgatgggaatgatggacagtggcgcttacctggagcaccgtctggccggcgtcgacagggtgcagatcaagggcctcaacgcgggcacgctggacctgacgaataacggctggggccacatcgtcggcctcgtcggcgagcagaagcagatctacaccgataagggcatgggcagcgtcacatggaagccagccgtgaacgacaggccgctcacctggtacaagaggcacttcgacatgccgtcgggagaggacccgatcgtgctggatatgagcacaatgggcaagggcttgatgttcgtcaacggccagggcatcggccgctactggatctcctacaagcacgccctcggccggccatcgcagcagctgtaccatattccacggtccttcttgcggcagaaggacaacgtgctggtgctgttcgaggaggagttcgggcggccggatgcgatcatgatcctgacggtgaagcgcgacaacatctgcactttcatctcggagaggaacccggcgcacatcaagtcgtgggagcgcaaggacagccagatcacggtgaccgccgccgacctcaagccccgggccacgctgacgtgctctcccaagaagctcatccagcaggtggtgttcgcgagctacggcaaccccatgggcatctgcggcaactacaccatcggcagctgccacacgccgcgcgccaaggagctggtggagaaggcctgcctcggcaagcgcatctgcacgctgcccgtgtccgccgacgtctacggcggcgacgtcaactgccctggcaccaccgccacgctcgccgtgcaggccaagtgctccaagaggtcgcccagagccgcgcagtaa

SEQ ID NO: 4752 - DNA, 423 bp, Zea mays
  Peptide Sequence Number=SeqID_46531
atggtggtcctcgtcgtgtatggaagggacacagcgcagccccttggatctcgccaggaatggaatggatttctctctcggcctcgaagatggaaggggatctctgagggacacggcgcagatgccgtccatctcgccagggaaggggcgccgatggtggagcgctgggaggagggtgggcacgggcttgggtgctttgtggtcgcaactcccgttgatggggcacggcggctgacggggattgcaggggcgttgacggggctcggattgttcgcagctgggaaggtgaggagcgagggagggagcgcgggatccgcgaggatggaaggagggcggaggatggaaggatgccgcgctccctcccgcgggcggttgcggcggagagttcggccgcaggctgccggcgattcagaagcaaagtag

SEQ ID NO: 4753 - DNA, 576 bp, Zea mays
  Peptide Sequence Number=SeqID_46532
atgccctcgcccccgccagtccgccaccatcgcgcggtgccaccaactgcgcccgagccctgcgccaccaactgcgcccgagcccccgccttcacacccgtccccatgcgcggcgtaggaggagccatcaacgcccttccccaggccggcttcaacgccgatggagccatcctcaccccaaatccttaccgtagtcgacaccgcacctcccatctacacccgtccccacatgcggcgcaggacgagccattagcacccttccccaggtcgccttcaacaccatcaccacgtgcagtgcaggccaagagccatccacgccccaattacttgcagcagtcgacggccacctcccatctacgcccgcctccacacccgtccccacgcgcggccaactgcgcccgagccattagcgccagcgcccttccccaagtcacctttaatgtcgtccccacgcgcggcacaggccgagagccatgctcgccccaaatactcgtagcagtcgatgaccacctcccatctatgcccgcctacacacccatcccacgcgccggcgtccgtcaccgacccactccttga

SEQ ID NO: 4754 - DNA, 969 bp, Zea mays
  Peptide Sequence Number=SeqID_46533
atggccatgatgggttcaacatcggacaagatgtacctctatcggtctgcaggtttcattgaattcgagctcgacttcgcaggaaccgacatccaccacgtgagctccgacgatttctcggcaggcgagcacgtatggagagtaaaatgctacccactcgcagagaaggttggtagtgtcatttacctatctctcgtcctagggctcacaagcgacgacgccaagtgcgacgacgtcgatgccatcctcgacgctttcctgctcggcggagaccatggtgcacgcgccccgtcgtcgtctccgcacgcacagcgtagcaggttccatttgtatccacccaaggtttcgcaaacgtgtgggtcgtgtgtacacttcatgaaatggatcgttctggattctgagtccgtcacggacggctacgtcacattcatggttggagtaaaagttctcggcgattgccccatacccgtgccgtcctctgatatcggcaagcatctcggccacctgctggatcacgccgacggttctacagacctcttcggctccatggagaacgccaagacgcgcagcatcttgctgcacggcatccggccagagacgttccgggtcttgctgcggttcatgtacacggatgcgttgcccggagacgagctggtggagagctcttccgacgtcgacttgttccatgatttgctcgcggcagctgacatgcaccagcttggtcggctgaaactcttgtgcgcccgcaagctctgggactgcgtatcgcccgagactgtggccaagattctaggctgcgctgaaacgaacaactgctcggagctcaagagcgcgtgcctggacttctttcttctcgaggaaaatttcaaggttgctgtactgacggatgagtacttccagctcatgcagagttttccgtccgtcatcgatgagataagagcgcgccgtgggttcgacagacagacctaa

SEQ ID NO: 4755 - DNA, 885 bp, Zea mays
  Peptide Sequence Number=SeqID_46534
atgtttccgatcccgccgcccgtgattccggcccccgcgacggtggtgggccgtttccagatcgtgtccgtgggtgccagcaactacatcgaggagttgaaccgcatcggcttcctcctccagatgtttccatatgtggcgatagacaccgagtacccgggtaccttgcacggcgcgccggcggggcccgcgctcaccaccgccgcacgctactacgcgttcgtgaaagcgaacgtggatgagctccccgccctgcagctcggtctgaccctctgcgacgagggcggaaaactcccggaggccatcgacgactatggccgctcagtgcagctcgcctgggagttcaatttcagcgattttgatatcgcccgcggccgccacgccccggagtccgtgcgattcctcatgtcccaaggcttccacttcgacgtcgcacgtgagtacggcgtcccctccgcctacttcgcggactggctcgccggcgtgctggcgaggctgccacactggtgccagccgccgacgtgggtggcgttcggcggcgccttcgacttcgcctatatggtaaagatgctgtccggtgggcagccgctgccggacaccccagaagagtttgtggcactggcgaggtatctgctccgtggcccggtgttcgacgcaaagtgcatggcccagcactgcggccgcccggagctgtgcggtgcagggctcaggaccgtggctgccgtcctcggcgtgccgcagctcgacccggcgccgccgagacttgcgggtcccaagagccacacggcatgccgcatctacaccgtaatgaggacgctcgtgcatggtggcgacggctatgcctatgcctatgcctatgaaggcctcatcgatggcatctactga

SEQ ID NO: 4756 - DNA, 492 bp, Zea mays
  Peptide Sequence Number=SeqID_46535
atgatctttgtagtcctcactggttctctatttccaatgcaaatgatgaggtcgtttatcactgtggttcaagaaaactacccgaatcgtcttggggtattgtttgtcatccgccttcctccagttgtcagagttattgcacagacatttcttcaaattgcaatatcacatggtatccgtggagatgaggacgacattgcctccaagtctgctccaccggcatccatcgacggtgcaaggtacggattcgagcctccggtccttcaatctagccaccaggtcataatcgaagggtttacagggaggagatctgaacatagctcttcaatcccaaagttaacatcgttgattcagcaagaggaaaaaatctacatgttgatggcgtggatcagaaaaatggactatattgtacatgaccttgaaggagctgaccatgtgacagaccttgatcataaccatgttgcagagttgaagatattaggactatattaa

SEQ ID NO: 4757 - DNA, 1866 bp, Zea mays
  Peptide Sequence Number=SeqID_46536
atgaaggtctgggtgggactccctgctgctgcagctgtcgtcgtcgtcttcctcatcttcgccggcgtggcggctctaccagcggccatggcagccgtcgtcgagcacaccttcgttgtgagccaagtaaatctgacgcgcttgtgcaaggagacgctggtcaccgtggtgaacgggcagctcccggggccggcgatcgaggtcacggagggagactcggtggtcgtccatgtcgtcaacaggtcgccgtacaacatgacgatccactggcatggagtgaagcagcggctcaactgctgggccgacggcgtgccgatggtcacccagtgccccatcttgccaggccgcagcttcacctaccggttcaacgtcgccggacaggaaggcaccttgtggtggcacgcccacgtcccctgcctgcgcgcaaccctgcacggggctctcatcatcaggcccagacactcgccgtatccctttgctccaaagcctgacagggagatccccgtcgtcataggtgaatggtgggatatggaccttgcgcagttggacaggaacacgatggacggtttccttgtcgacgtcccaaccggaagcacgatcaacggcaagcttggagacctctacagctgctccggcgccgcgcaagacgggttcgtgctggaggtggagcccggcaagacgtacctgctgcggctgatgaacgccgccctcttctccgagtactacctcaaggtcgccggccacaggatgacggtggtcgcctccgacgccaactacgtcaggccctacaccacggacgtcgtcgccatcgcgcccggcgagaccatggacgtcctgctgccggccgacgcgcctccgggcaggtcctactacatggccgcgctggccatacaggcgcccgagcccgacgtgcaggtcccgccgaccatcacgcgcgggatagtccagtaccgcagcagcagcagcgacgtcgccgtcgatggtgtcgtcgtccctgcagcagatcccgcagtcgtcatgcccgacatgcctgaccagcacgacacgaccatcagcttccacttccacggcaacctctcgagcctgcgccgccgccaccgggtgccgccggcgcgcgccgacgaccacatgctcgtcacgctcagcctgggctccgtgtgccgcgacggcgggcgggcgtgcgccaggagcgacagcgacgagtccatcatcgtgggcaccatgaacgacgtctcgttccgggcgcccacggccgcggcgatgccgctgctggaggcgcactactacggccgcggcgacatggcgatggcggccgccgccggcgtggagctccgcgcgctcccggacgcgccgctgcgcgtgttcaacttcaccgacccggcctacatcccgtacgggcccaaggaggccccgctggagccgacggagaagcagaccacggtgcggcggttccgccacggcgccgtcgtggaggtggtgttccaggacacggccgtcatgcagagcgactccaaccccatgcacctgcacggccacgacatgttcgtgctcgcgcacgggctcggcaactacgacgccgcgagggacgtggccacctacaacctgctggatccgccgctcaagaacaccgtcgtcgtccccaggctcggctgggtcgccgttcgatttgtcgccgataatccaggaacatggtacatccattgccacttcgatttccatttgtccatgggcatggtagccgttttcatcgtagaggacggatcatcggcggacacctaccttcctccacctcccgcagatttaccaaaatgtggatctaacaaaggaggcctttatttgccagaggaattctacctccaaaaatga

SEQ ID NO: 4758 - DNA, 879 bp, Zea mays
  Peptide Sequence Number=SeqID_46537
atgtttccgatcccgccgcccgtgattccggcccccgcgacggtggtgggccgtttccagatcgtgtccgtgggtgccagcaactacatcgaggagttgaaccgcatcggcttcctcctccagatgtttccatatgtggcgatagacaccgagtacccgggtaccttgcacggcgcgccggcggggcccgcgctcaccaccgcctcacgctactacgcgttcgtgaaagcgaacgtggatgagctcccagccctgcagctcggtctgaccctctgcgacgagggcggaaaactcccggaggccatcgacgactatggccgctccttgcagctcgcctgggagttcaatttcagcgattttgatatcgcccgcggccgccacgccccggagtccgtgcgattcctcatgtcccaaggcttcaacttcgatgtcgcgcgtcagtacggcgtcccctccgcctacttcgcgggctggctcgccggcgtgctggcgaggctgccacactggtgccagccgccgacgtgggtggcgttcggcggcgccttcgacttcgcgtatatggtaaagatgttgtccggtgggcagccgctgccggacaccccagaagagttggtggcatgggcgaggtttctgctccgtggccgggtgttcgacgcaaagtgcatggccgagcactgcggccgcccggagctgtgcggtgcagggcttaggaccgtggctgccgtcctcggcgtgccgcagctcgacccggcgccgccgagacttgcgggtcccaagagccacacggcgtgccgcatctacaccgtaatgaggacgctcgtgcatgctggcgacggctatgcctatgcctatgaaggcctcatcgatggcatctactga

SEQ ID NO: 4759 - DNA, 342 bp, Zea mays
  Peptide Sequence Number=SeqID_46538
atggaaagcgacgagaccatcagcgtgacgaccatgaacaacgtcttcgagctactagctaataaagcggatattgcctcactttttcatgaccatgttgcaacaaaaataccatttgtaccaccatcgtcgccacacccgccatcaagaccaccagttaagtcaccttccacatggtctaagcggaaatggcccgacctaaactttcaactagatacccaaatattggatgcctggtactacaacagaagcagcctggactatgacgacaccgtggtggtcgagtttgttgacgggccaccgaaaattttcaacttcaccaatcgtgcgctgagcccatga

SEQ ID NO: 4760 - DNA, 1575 bp, Zea mays
  Peptide Sequence Number=SeqID_46539
atgggcagcctttccggcacctcttcgtccttggccgctgcgttcgacgccgactccgagcgcttccagccgctgaacgccgacgacgtccgctcctacctccacaaagccgtggacttcatctacgactactacaagtccgtggagtccgtccccgtgctcccgagcgtcgagccgggttacctggcccgccagctcaagtccgcgccgccgaacgccgccgcgccgttcgacgtcgccatgcacgagctccgcgaggccgtggtgccggggacgacgcactgggccagccccaacttcttcgccttcttcccggcgaccaacagcgcggcggccatcgccggggagctcgttgcctccgcgatgaacaccgtcgggttcacctggcaggccaacccggcggccgcggagctggaggcgctcgcgctcgactggctcgcgcagctcctcctcctgccggacagcttcatgaaccgcccctgcagcgctgtcgtcgccggccgaggcgcaggcactagaggcggcggcgtcatcctcggcaccaccagcgaggcgatgctggtcacgctcgtggcggcccgcgacgccgccctgcgccggagcggctccgacggcgtggccgggatcacgcggctgaccgtgtacgcagccgaccagacgcactccaccttcttcaaggcctgccgcctcgccggcttcgacccggccaacgtcaggtcgatccccaccggcgccgacaccgactacgcgctcgatccggcaaggcttctcgaggcgatgcggcgcgacgccggcgccgggctcgttccgacgtacgtgtgcgtcacggtcggcacgacgtcgtcgaacgcggtcgacccggtgggcgccgcggccgacgccgccgccgagttcggcgcgtgggtgcacgtggacgccgcctacgccggcagcgcctgcatatgcccggagttccggcaccacctcgacggcgtggagcgcgtggactccctcagcctgagcccgcacaagtggctgctcacgtgcctggactgcacctgcctctgggtgcgcgacacgcgccgcctcaccgactccctagagacgcgcccggagtacctgcggaaccacgccaccgagtccggtgccgtcaccgacctcaaggacatgcaggttggcgtcggccgccgcttccgcggactcaagctctggatggtcatgcgcacgtacggcgccgccaagctccggcagcacatccgcagcgacgtggccatcgcaaaggtgttcgaggagtccgtgcgcgcggaccaccggttcgaggtggttgtcccgaggaacttcgcgcttgtctgcttcaggatcaggccgagcgccaccgccagcatgacggaggaggacgccgaggtggccaatcgggagctcatggagcggctgaacaaaagcgggagggcgttcctggccaacaccgtgatcggtggcaagttcgtgctgaggttcgcggtggggtccacgctacaggaggagaggcacgtgcggaacgcgtgggatctcattaagatgaccacaaccgagatcataaacggagaggtggattaa

SEQ ID NO: 4761 - DNA, 816 bp, Zea mays
  Peptide Sequence Number=SeqID_46540
atgttgcatatttttcccaaactcctcaagcaatttccatttccaccacgaccactctcttcctcgcagcgcgtaccaacccgccgccgtctactgccactccgcctgctcatggcctcccctacgcaaggtgatgcccccctcgcggctccggctccggcggctgacgctacggacgcggccttcgccgccgcggccgcggtgccggatccaggcgcagagttcgggttccagcgtccggagctcgggaaggagaagctggtcgggacggtggggttccacgagcgccatgtgttcctctgttacaagggcccggatttgtggccgtcccacctcgaggcctctgagtctgaccgcctcccccgcctcctcgccgccgccatcaaggcccgaaagcccaatctgaagaagaccaccccggtatcacgtggttcgtttgtctggataagggcgagtggcgaggacgacggagtcgggcattggaggacgggcgcgaccgcgcgaggagacatcagaggatcggaggaccagcgcgaggaggccggtggagatgacaatccgatggaggtgaagagggcggcggcagacagtgttcgtcgtcgtcggggacacaatggcggccaccaactcggcgacgccgttcctgctggtctcgtaagaggaggcattcttcggtctggactctggactctgctggaagtgtcgtggcgcgtcggtatgatgaaaggtcagaagaacggttgttccttcgatcacgatcgtacgactataaagaaaagtgacgacgtggacacgctaggatgttatgggccttaa

SEQ ID NO: 4762 - DNA, 222 bp, Zea mays
  Peptide Sequence Number=SeqID_46541
atggcgccggggaggagctcggtagtgttgggcggcgtggaagcggaacaggcgaagggctcggcgtcgacagtgaggcggagcgcagcggtcctgcacgacgccagtgagtcgtggaggccaaagacggatgatgcgacacgacgacagatcagctacgaccgcatgctgtcagcatctcctccagcttctccggtgtcgggagccaacaccggtcgctaa

SEQ ID NO: 4763 - DNA, 405 bp, Zea mays
  Peptide Sequence Number=SeqID_46542
atgaagacaacagatccatctgggaaggccgcaacaatgatggatccgactgggaaggctgcgacatcgacagatccaacggtggcagcgacgaagaagggggagggcggcagggcgggtccaactaggcagggggctgcgctggttctaaccaggggagaggtcggccctgagcgccagtatcctgctcgtcggagcaagaaacatggtggcggtggccgggggaagacaacactggcagccgtgggtggaggaacatgcagtgccataggaggggcgacgccggtcagaccccaggcaggcgcaactgcggtcggggtggaggcagcaactagatgcatgtcggcgacgctccggaaaagggggctcgccaccgacggcgtagaagagaggggagggtcgtag

SEQ ID NO: 4764 - DNA, 246 bp, Zea mays
  Peptide Sequence Number=SeqID_46543
atgacggagcgcgtccgtcaagcgagaccgcatgtgcccagcagcgcgggccgctacggcagaggcaggcggcaggccaaccaccgcgccgcctgggtgtgggtggcaaagtgccgctgcttttgccaaaaagccctctgccgaccttgtcccccgtgtcggattaaaaacagaggagatggtggatgctctgaacttgcgataagatctataaaggctatttgccgcatacatggatacgaatga

SEQ ID NO: 4765 - DNA, 951 bp, Zea mays
  Peptide Sequence Number=SeqID_46544
atggggcggtcgccgtgttgcgacaagacgaaggtgaagcgggggccgtggtcgcaggaggaggacgccgtcctcaggagcttcgtccagaggttcggcaatgccggcaattggatcgccctgccgcagaaagcagggctgaaacgatgcggtaagagctgccgtcttcgctggctcaactacctccgcccggagctccggcacggcggcttcaccgacgaggaagacagcctcatcttgtctctctacggcgagattggaagcaagtacgacgcgtggtcggtgatagcgtccagactccccggacggacggacaacgacgtcaagaactactggaacaccaagctcaagaagcggtacttggcgtcgtccacgtccacgggagaagcaaggccgccgccgccaccaccagctcctcctagcgctagcggcgacgacagcagcgccgccgccgacagccaccaggcccaacaagacgaaccctctcttccgctgacacctccagccttcagtaccgacctcgatacgacctttgccgttgtcgacgacgacatgctcctcttcaagtccgatcagctgtacgccgagctcgtgggtctggtcgagaagaaatcgcaggccacagctggcccgtccactggtggtggcggggacgaggctaattcgacggccacgccatcgtcctcgtcgtatggaactgggacaacaaacagtcccacggttagcagcagctcaggtagctgcgccctgtggcccacggacgtgcatggcacaacgctgctgtccgaacccaccagcagcagcctgttcgacgacgcttacggtgttggcgacgacgcgttcggagcggcggctctgcctgcgtactccttccaagaccttctggcctcgtcttacgacgatgctactgctgcggtggtgacgcaggagttgatgcagtactaccagtag

SEQ ID NO: 4766 - DNA, 954 bp, Zea mays
  Peptide Sequence Number=SeqID_46545
atgggaggaattacctttagatacttgatctcattggcagtgaacttgaatttaaaaatgaaactaatggatgttgtgacagcctacctctatggaaacctggatacagacatctatatgaaaataccggaagggatcccagtcccaaatcgagatgagaaaaatagagcattatacagtgttaaacttaagaaatcactgtatggattgaagcaatcaggaagaatgtggtataatcgcttgagtgacttcctaagcaagaaaggctacataaacaacgaggattgcccatgtgtatttatacagcgatccccaaatggattctgtattatatcagcatatgttgatgacttgaacatcataggaacacataaagaaattgaagaggcaagctcatacttgaagtctgaatttgagatgaaagatttgggtaaaaccaaattttgtttaggcctccagcttaaacattttgaaggtggcatattaatccaccaatcaacttacactcaaaaagtattagaaagatttggtcttgagaaggcatatcctgccaaaacccctatgattggaaggtcattacaggtagaccaagacccatacagacctagggaagagggggaggaagttcttggagctgaatatccgtacctaagcgcaataggagcgttgatgtatctggcaaatagcacaagaccagatattgcatttgctgtgaacttactagcaagatacagtgcggaacccaccaaaaggcattggaaagggatcaaggacatcttccgttacctacaaggaagcaaggatcttggtttgttttatcgaaaaaatcaagatctaaattttatcgggtacgctgatgctggatacctgtctgatccacattcaggcaaatctcaaactggatatgtatttctttgtggaggaactgcaatttcatggaagtcgtcaaaatag

SEQ ID NO: 4767 - DNA, 501 bp, Zea mays
  Peptide Sequence Number=SeqID_46546
atgtcagtcatttggaatctagcaaaaagtaatgaagttctatggcacgtagggatctgcatgggtattcaaatgaacattcaggagtcagttcgtaaacaaatagtacaggagctcaaaataaaccaagcaacacagagccctcatatagttatgtgccatcaatctttttaccacaatggtgtaatatatcttgttcttgagtacatggaccgtggatcgcttgcagacattgttaagcaagtgaagactattctggagccataccttgcagtactttgtaagcaggtcttggagggtttattgtatcttcatcatcaaaggcacgtgattcacagggacataaaaccatctaacttgttggtcaaccgtaaaggtgaagtcaagattaccgacttcggagtgagtgctgtgctagcaagctcaataggtcagcgagatacatttgttggaacctacaactatatggcgtatgtgattcatcacgttcatgccatgtga

SEQ ID NO: 4768 - DNA, 387 bp, Zea mays
  Peptide Sequence Number=SeqID_46547
atgttccccattaatgtattgattcttgagctagaggtaggcctaacacatgttccaaaggccaatgaagacaacactctgattgagatagcggccgagccaccagccgactcaactctagcccctgaggacaaaggggttgaggaatcgactgctgcaatggtagtggcacagcctgactcaacattatccttcgagattaatgggactggagtgttggttgagtcatctgctaaaccactacaagccaaggatgtagagttgactaaatctgttcatgatcttgctgttaaagcactactttctaatgacgatactgaaagggaaatgtgcccttgggccatttctaagtgttttggtgatttagtgtccaacacaagtgcctaa

SEQ ID NO: 4769 - DNA, 193 bp, Zea mays
  Peptide Sequence Number=SeqID_46548
atgggattttgggtgcactccggcgatgcgccaccacgtccgtcgtgggcgccgctgtcggaagagcctgtgactgaggatcctggtgaccagcagatagaagtagctgagcaggagctcattgaagaagagcctatgactgaggatcctggtgaccagcagatagaagtagctgagcaggagctcattgaag

SEQ ID NO: 4770 - DNA, 699 bp, Zea mays
  Peptide Sequence Number=SeqID_46549
atgaaggaccgtggcgtggaccgaggacgggaggagctggctgttgcccgcggtcgcagacgcagtcacgactcgcccgaggccaacctcaggcgggagacacagtcgcgactcgcccgacgccaaccacaggcggaagacacagtcacgacttgcccgaggcattccctaggcaggagacgcagtcgcgacttgcccgaggccatcctcgggcgagagacgcatttccgattcacccgagggcatcttaggcaacactctaggagctacctgcctcgaccgaccactctgattctagaacggcgcctgtccccgccttatgggcaggtccggtgctaccacatgtccagggaatcgatatgctcagggacttcaccaatgggtctggacccccatgggtgggtcccggacccccatgtttgcaatctggaccccctgagaggtctaggacctccacatatacaaaccatacccccgagtagggaactggaccccctgtatggggtccaggtcgccaacaagggctctcagtgctacagggcacaacatgccaccaggccctactctggacccacgcatgggtccggtgacaccacgtggccgctggcgcatggtgcaatccttcgcatggaaacaaggcctcagcctgcattaaatgcaaggcggccaaggcgtgctcttaccaagcgcaaggcatag

SEQ ID NO: 4771 - DNA, 1872 bp, Zea mays
  Peptide Sequence Number=SeqID_46550
atggcctcgggcaagtcgcgactgcgtctcctgcctagggaatgcctcgggcaagtcgtgactgtgtcttccgcctgtggttggcgtcgggcgagtcgcgactgtgtctcccgcctgagcatcgccgcccccaagccatttctctccagcatcgccgccccccctctccgcctcaaggctctcctctcggagacttattcaagtagtgtaagtctgataggcaacccaataatggcagaagtcctatcaggatctcatgaacaccgtctaagctctgccttagatggacactacgacgagaagaggaaatccaatgtggaatacacagaggacgagaagaaagccgtgatcgcggctctgaaaaagaaggctttgagcgcctcacagaagtttaggcattccatgaagagggggaggaagagcagcaaggtgatgtccatctcgattctggatgagcgtgaacctgaggaggtgcaggctgtggatgccttccgccagcttcttgtacttgaagagctgctaccatcgcagcatgatgactaccacatgatgctaagatttctcaaggcaagaaagtttgatatcgagaaggcaaagcaaatgtggtctgatatgctgaagtggagaaaggagttcggtgcagataccattctcgaggaattcgaattcgaagaagctgataaggtggcagaatgctaccctcaaggttaccatggggttgataaggaaggcaggcctgtctactttgaacggcttggacagatcgatgtgaataggctaatgcaggtcactacaatggatcgctttgtcaagaaccatgtcaaggagttcgagaagaactttgctgttaagttcccagcttgctcaatcgccgcgaagcaccatattgaccagagcacaacaattcttgacgtgcaaggagtggggatgaagcaattcagtaaagctgcaagggagctcattggcatgcttcagaagattgatggtgacaattatccagagaccctgtgccgcatgttcatcatcaatgcaggccagggattccggcttctatggggcaccgtcaagagctttcttgacccaaagaccactgcaaagattcatgttctgggtaacaagtatcagagcaagcttctcgaggtgattgatgctagtgagttgccagaaatttttggtggaacctgccgatgtgaaggtggttgcatgaaggctgacaaaggcccttggaaggaccccgaaatcatgaagacccctggatcaccctattcttgtgatgtcccgatggttgaagaggccatagacgccatctgcaagagccacggaacaccaccagatgagaagattgccatcaccaaagctattataaatgtatcgaatggatccaagcccccactctttgctggcatcatagcacttgtgatgagcatcgcaacgatggtccgtctgacccgcagcatgatgcctgggaaggttctcggtgctgccataggtggagctaccctctcagaaggtaaatcaaaagtacaagagcgccagcggtccaagctatcagaagaggctgtggaggaagctgaagacgccgtctctgcaaagcgcctctcggagcttgaggagaaggtcattgcactcctgacaaaacccgcatcaatgcctgctgataaggaggaggttctgcaggctgctgtctcccgcgttagtgcactggaagaggagcttgcagctacaaagaagaccttgcaggagactcttgagcgtcagttggagatcgttgcatacattgagaagaagaagaaaagcaagggccagaaaaagaaactcaaggctcatgagccggttcagactcactcaggcttggctcgaagaagctcataa

SEQ ID NO: 4772 - DNA, 261 bp, Zea mays
  Peptide Sequence Number=SeqID_46551
atggtgaaggacgcggagccttctactcgaaagctaggaaccaccttgctcagcagcactccacccgggggatttacaaatgggacacggatccactctgaccggacatcttatgggctcccatcggaggcactatgcctgacggtccctccgactcctaccacgtgtggggaacttaggttcgagtctgagttggtgcagagcgcgtcgaagacgaagtctccaccaccgtcgaccatccctatgaactccaagtcgtaa

SEQ ID NO: 4773 - DNA, 747 bp, Zea mays
  Peptide Sequence Number=SeqID_46552
atgaggaaagcgacacgaccgagaaggcgttatgaccaagctcaattagctctcgaccacgcaccagatgctagcagtaagctatgcgccgatggcttgtcgctcgcagggacgctagcgagtagatcccactttcttcttgaacaaagggatgcatgtgagcgttctgcctatgatcttttggcggcgaagggcgaggccaccgaagcccatgcctacgccgcgttgatccatgacgcttacgatgccttggtcgagacgacaaggagggatgcaaaattggcgacccttgcacatcttggtagtgtgaaggtgagctccctccttcgtatcctagagcgaggaaaagaggttgccaaggcccgagtcgcgaccttggaggaagagttaggaggtcgaaccaaaaaggaggagaagctcctggcctcttggcaaggtagcgccttggacagcctcttccaaaaattatgcatctgttgctcgctttcccctttttacggctcatgtcctccaccgtcagccatacaagggaaattcgatgacgccgattggaattgtttcaaggtgcaatgtcgcctagaggagctggagaacgagaggcgcctcctatcaaaggtggtgggcaccatgtgcgggcgcatcgaagcacattgtttgccttggttcaagttgctggtctctcgcctcgagggcctcacaggcctgtttcaggagctcgaggtggaatctttctgccaagggatctga

SEQ ID NO: 4774 - DNA, 489 bp, Zea mays
  Peptide Sequence Number=SeqID_46553
atgtcaaaccttggaatgtcaactacaagtgatgtcactaaatgcaaagaatgtggtgtgttggcaagtcaaaacaatactataaataaaacagttgatgaacagacattcaagacacagaaggatgcacaaccaaaccaacatacaagtgacctgggaacatgttgttgttgtgccaaggttcataacaagccaattgaaaagaccaatgttgggttcaaaatagaggctgaaggaatctcggaaggctccctggtctggcgcaccggactgtccggtggcgcaccggacagtgtccggtgcaccaggggacttcgcgcagaacttctcagcctcgggaatttctcagagccgacacgctataattcaccggactgtccggtgtacaccggactgtccggtgtacaccggacagtgtctggtgctccaagaggacgcgactctggaacttggcagcctcgaaaatctgtagcggctgctccgctataa

SEQ ID NO: 4775 - DNA, 378 bp, Zea mays
  Peptide Sequence Number=SeqID_46554
atggggcgtgcggggctttacaactcggtggccggtgttgcctcctccgcgacggtgaggtcgccggagacgaggcagacgtggtcactggggagtctggggtcgccggggagggctagaacgggtcaagagggtctggcaaactcattagcagactaccagtcgcaaaaacgggatcggaaacgggagaacgacgaagggaaggcggagctcaccatggccaaagcgctggcagaagtccagcggcgatggcggaacgacgtgggcatgggtctggcaggcggggcgcacgccatgggcgtggcggttgtggaggcagaggacaggcgggggccgcctgtcaaggggaagcggacgcgcgggcgcagcgaggcatag

SEQ ID NO: 4776 - DNA, 312 bp, Zea mays
  Peptide Sequence Number=SeqID_46555
atggatccttcgcaaagagcaggagactcaggggctcaccctgcaaaaagggaggctcgccatgacctccatcgccatgggagcatgagactactcccccttctccttctggtggatagattgtgtgggaaggaacaatacgccccctacacaacacatcgtcatcaatggaaagtccgagcaacaacatggcaggccatgtacagaaacatgcccgggagctgcacagtcggatcccgcgacccacgacaaaatactcctgattcctccgaagacgcgcaggatgtagggaatcagggacgactggcttga

SEQ ID NO: 4777 - DNA, 987 bp, Zea mays
  Peptide Sequence Number=SeqID_46556
atgcagtcggcatgcaaccgcgccaagtgggcgcaccccttcgaccccaacgcggctagcatggaggcccaggcccacacgtcatgcaaccggcgcgctggttgctacgtgcgagcaactgcaccgcccctcgcgccactaccgcgcctcctcgactgtggaaccagtaccacgactcgaggcaaccctgtgtatgacccaacagtgccagctaggcgcatcggtcacggggaccgggaaaggggataccccgaaagggatccttctccgcgaaggaaacgtgccccgagcccccctactgatcagaggttcgaaggccgacccctcggaggggttcaacagccgcctcagagcgctcaggctccgcgcccactactggtcagaggcgccataggaaactccgcatcgcccgaccccagggctcggactcgggctcagccccggaagacgacgaactccgcttcgcccgaccccagggctcggactcgggctcagccccggaagacgacgaactctgcttcgcccgacccagggctcggactcgggctgagccccggaagacgacgaactccgcttcgcccgaccctagggctcgggctcagcccgagaagacgacgaactccgcttcgcccgaccccagggctcggactcgggctcagccccggaagacgacgaactccgcttcgcccgaccccatggctcggactcgggctcagccccggaagacaacgaactccacatcgcccgacccagggctcagactcagccctgtcctcagccgacggtctccgcctcgcccgacccaggggctcggactcgacctcggcctcggaagacagactcgacctcgacctcggaggggcctccacctcgcccaacccaggtcttggaccgaccacgtcacaggaggcgccatcattaccctaccccaagctaactcaggctacggggaacaagaccggcgtcccatctagctcgtcccggtaa

SEQ ID NO: 4778 - DNA, 522 bp, Zea mays
  Peptide Sequence Number=SeqID_46557
atgacaacgaagcgaggcgagcagggagtcgacggcgtgcaagcttgggactccaccaaactcgaggacgggtctgacaacttggcgagacgttggcgaggcaagggtcagggaagcgcggcgctgttggggtcggtggtcgatggctcggggctgaacacagtcgacaacgcggcacgacgatgttgttgtaggcgaaaggaaacggatggagcacccacagggatccctgcaggcgccagcacaagggagaaacctccagccccggaagacgacaaactccgcttcgcccgaccccagggctcggactcgggctcagccccggaagacgacgaactccgcttcgcccgaccccagggctcggactcgggcttagtcccggaagacgacgaactccgcttcgcccgaccccaggtctcggactcgggctcagccccggaagacaacgaactccgcttcgcccgaccccagggctcggactcgggctcagccccggaagacgacgaactccgcttcgcctaa

SEQ ID NO: 4779 - DNA, 453 bp, Zea mays
  Peptide Sequence Number=SeqID_46558
atggctgatcacggcaggatgcctcacggtggcgcgagtgacccgattttagggaaatccagtgactgtggactatggtgcacgacagaggctaactgcgggtggtatgagcgcgtaatagagaggcagagcgagggtagtgctcaatttaaaggaaccggctacgtgcttcgccaatttgagatgaagacggtcacgacggtgaatccactcgacacggttcctggtaccatggtcgcctcctattttcatctgatgaagcttggctccctgggaaatccttcgccaacacccttacctggaggtttctcccttgtgctggcgcctgcagggatccctgtgggtgctccatccgtttcctttcgcctacaacaacatcgtcgtgccgcgttgtcgactgtgttcagccccgagccatcgaccaccgaccccaacagcgccgcgcttccctga

SEQ ID NO: 4780 - DNA, 294 bp, Zea mays
  Peptide Sequence Number=SeqID_46559
atgacaacgaagcgaggcgagcagggagttgacggcgtgcaagcttgggactccaccaaactcgaggacgggtctgacaacttggcgagacgttggcgaggcaagggtcagagaagcgcggcgctgttgggaacagtggtcgatggctcggggctgaacacagtcgcaaagcggcccagcgaggttgctgtaggcgaaaggaaacggatggagcacccacagggatccctgcaggcgccggacggcttgcccgcacaagggagaaacatccagatacatgttgatccgaactag

SEQ ID NO: 4781 - DNA, 642 bp, Zea mays
  Peptide Sequence Number=SeqID_46560
atgtcgtcctccccctcccaaatcgcgtgctcatcatccactccccgccatcaatgccctcctccccacgcttcactcagctcagctcccactctcactttcgtcgccaccgtctcgcctgccaacccggcgtccagatcggtcgtcgtgctcacggctcccgaggtggccgctaagcttccgaggaacctcaggtgcgttgtcatcgactcgaatgagtacaagagcctctcctccgtcggcggtgtagcgtcgtccctgccggtggcggtgaagcagttcgacacggcgatcatactatactcgtcgggcaccacgggccgggtcaaggccgtcgcggtcttgcacctcaacctcatcgcggtgaccagggcgcacaggaacaaccgggttatagcggagaaggagtctgccgaggccggcgaggagccgctcatgcttacggtgacgctgttcattcgggttcatgatgttgctgaggggatactagctctgaggggtgctttaaatagcagacagctccagcaaaatatgcttagaccatcaaggaggaaatttggtctgatggttgtgtattatgccaagcgaggtgataagcatcacactcgtgcaacatttgagaacatgagacaaggggaatag

SEQ ID NO: 4782 - DNA, 2229 bp, Zea mays
  Peptide Sequence Number=SeqID_46561
atgcacaccgtggccgtcggcgcccgatgcctcgtcatggagtccaggccgcccgttgtcgccgacgttgtgccgcctctcgtcgtcatgcacaccgcttgcctcagggagaacaagactgcggttgttccacttggagatgaagagttgcatttagttgcgatgacatccagaagaaacttgacaaatcatgcatgtttctggggctataaattgccatttggtttgtataattcttgcttgaccatgttaaatcttcggtgcctgggtattgtatttgaccttgatgagacattgattgtcgccaatacatcacggtcttttgaggacagaattgacgcacttcaaagaaagctgagtaatgagactgatccacaacgtaggaatggtatgctatcagagatcaagaggtaccaggatgataagtccatcctaaagcaatatatagaaggtgatcaggtctatgatgatggaaaagtgtataaagcacaacctgagattgttccaccattgtctgataaccagcaaccaatgacacgtccagttataagattacaagataaaaacattatcctgacaagaataaatcctctgattagggataccagtgtgcttgtatgtttaaggccagcctgggaggatcttcgcagctacttaattgccagaggtcgcaagcgttttgaggtctatgtgtgtacgatggctgaaagagactatgctttagaaatgtggagattgcttgatccagattcaagattgattaattctgttcaactccatgatcggatggtgtgtgtaaaatctggtttaaaaaagtccttgctaaatgtcttccatgatggttcttgccatcctggtatggcattagtaattgatgatcgcctgaaagtttgggatgagaaggatcaattacgagttcatgtggttcctgcatttactccatattatgctcctcaggcggagtctagcccacatgttgacatagaatttcatggctcaattgacagagactttgatgaaggcctcttaccaaggattagcaatgttcactatgaggatgaagtaaatgagatatctgcgccagatgttggcaattatttgataacagatgatgaaaatgtcgcattagtgaatgggaatagagattcattgccttttgatggtatggcagatgcagaggttgagcggagaatgaaggaagccaatgctcaatcattccatcaaacagcgggagactttgtcatgccagtagcccctgcccagaatttcgtttcgacttcagttgcatcattagccccacctcttggcatgatgccatctccatttagccagccagttgctccaccaggtttttcagattcactgcaaggttctccagctagagaagagggtgaagttccagagtctgagttggatccggacacaaggagaaggcttcttatattacagcatggccaagacacaagagatcctacatctccactaccagcaataccacccgtccaagttccagttcctccagtgcaaccccatgggaattggtttcccacagaggatgggataaaccaaagtaacctgaatagaggctcagcaggattcactgtagaatctgattctattgtctatgagaaaaagcaaccacctcatccttcattctttcatggtggggatagtcctatgccgtctgatagatttggctatcagaaccagaggtttccctctcagctaccacacgaggatcaccccatgatgcagaaccatgcacctccaaaatacagatccttttctggtgaggaactagcatcttggcatgttccctcaagccagagaaacaaccagatagaatcaggaagacactttgcacaatatgctgggacctctgctggcatattagaggggattgctctgaaatgtggttctaaggtggagtacaagtcagcattatgtgatactgcagaactacaattctctattgaggtttggattgttggggaaaaggtcggtgaaggaattggtaggacaaggagagaagcacaacgccaagctgcagaaatgtctttaagaaacttggccagctgcaacaataccgaacttttgccaattgatgaatatcgttctggaagcttcgtcgtccaactacgctcgctggtgcgatctcatgatgctggtccttacaccctcgccgaccacgtcgagtctgatgacgccttccccgacgacccagcctag

SEQ ID NO: 4783 - DNA, 351 bp, Zea mays
  Peptide Sequence Number=SeqID_46562
atggtcaggcccgcgctcgcctcgcccttgggccacacctccacctctccgattgaggtgttcacatccagcaaaaaaacaagcagatccaaaacggatcaagcagatccgcagggtcaagggttcgttctggacgtccaaaacaagggccctggttctcaaggtagatctgcaagccttgcagactttgtgcgtcaggtgaagattcgcagggtggctcgctcaaatctagggcagttcgtgcgccaccgcgtctacggcggccgagttggggaggtggagggggatggggcatgggggttgcggcaggcacgggagagggcgtgggcggatagggatagccggatatag

SEQ ID NO: 4784 - DNA, 405 bp, Zea mays
  Peptide Sequence Number=SeqID_46563
atggccggagaggccaaatcgagccctagtgagctaatgtgcaatcgaaacaatgctacacgctatggagaggtcggtgaagatgttgagaaggttctcaacgacgaaggcgctatggtggggtcggtccacgagaagaggcggatctacggccgcggcataagaccggcgaccaaccgccgaggctctggtctcccggcgcccattgatcctcgcccaaaaccttcaccgacacccgcacatccacctgaagtcttcacaattgggagcaagcaggtctggaagggggaaggtgtccttcttttaagggtgtggcgagatgacggcatgccgagctatcgtcgagcggaggtcacgatagcggttgcaacaacccgcccgagaagatctccaggggagggctga

SEQ ID NO: 4785 - DNA, 435 bp, Zea mays
  Peptide Sequence Number=SeqID_46564
atggcccatcttagatgcactgcacggtcggtgatccctttcttgccctctcgccttgtggagcgtccactgcgctgcacggtgataggacagtcgagtcacctagagagaccgcaccttcgcctgcacgaggagcaggaacaccgacgccaggaacgggaggagcaggactcttccccctcgcctcagcaagaggtggagtctgggaggcagccctcccctatgcctcagctagatgtgccccctgcaccaccacagggcaccccagctgctggtggagaccctaacagagacgaggacgacggtggaagttcgagccacatcacggagcctttggaggagcaggagccggaaggatgggtcgctcgacctatcactcgtgacacctctcgcggttgtcatttccacgacgctctcgacaccttgccgcgttag

SEQ ID NO: 4786 - DNA, 234 bp, Zea mays
  Peptide Sequence Number=SeqID_46565
atgggcttctctgcaagaaaccaggggcctcagcgcaagaaacaggaatgtgggttatatttccaggaaaccgaggggctctttaacaaaataaccaagcgaaggggtatggggtgtcctcagccattctatcacagatcgatggccgagatcagcctggagcgcgagcgcgcacgggcgcggacgcggactaacaaccgagccagggaagtcaaggactggggagcaggctga

SEQ ID NO: 4787 - DNA, 189 bp, Zea mays
  Peptide Sequence Number=SeqID_46566
atggccatgatgggttcaacatcggaaaagatgtacctttgccaggaccgtgtcgatgtaggcttgctgaccgaggaccctttaactggtcacatgcctcatcatggtgctgtccgaacgatgatctccggggtgaagaggcctactgagagcattattctaccactgagcgggacactgctgaggtag

SEQ ID NO: 4788 - DNA, 1557 bp, Zea mays
  Peptide Sequence Number=SeqID_46567
atggaactatcaaggatttccacagaaaaatttgatgatgcagttaaatccatgactgatgctggtttcttgaaggaaactgttgaacaagcactgaaaaaactgataatattatatgaggaaaactgggagcatatagaagctgataattattcgactttggttgaagctttacttggtcattcagatcccaaagcagggcagaaaaagcgagctgagaagaatctcaatgtggattcagaccattataataagaagctgaagattaaaggtggtcagacgcctagatctagtatgcatggcagtgccaagaaagagttgactgaagaggcagattcccttgaggagagaaccactggtaaccaattgcaaaccagtcgtgcagagactacaataactggtgaaaacagttgtactttacttgaaagtcaagacccttgcacctctgagaccccaacagtcatgtgtcctaaagttttagggtccaaccgtcacaatggcatcaaaagacagtaccatgatgtcaatgatataacaagaggcgaagaatgtgtgagcattccaatagtctgtggagaggatggggttcttcctcctccatttcactacatatcacaaaataccaccttccaagatgcctgtatcaacctctcacttgctagaattggagatgaaaattgctgttctggttgttttggggattgtctagcggagccacttccttgcgcttgtgcaagagaaactggcggagactttgcttatacgagagatggcctgcttaaagaaggatttctagatgcgtgtgtctcaatgctccgggaaccacttaaacaaccgcacttctactgtaagggtgtctgtcctattgagcaaataatgaagggagtcagctcagcgaaacctgatgcttgtaaagggcaccttattaagaagtttatcaaggaatgctggataaaatgcggctgcaccagaaattgtggaaaccgtgtggttcagcgaggcattactcgcaaactgcaggcaagtgaagtgtttttagcttctcggaaaaagggatggggcttgcgttctgctgaaaatcttcctcgtggtgcttttgtatgcgagtatgttggtgaaatattaacaaacactgaactacataagcgaaacactgagctatatggaaaaaataataaaaaggctggtaaagcaaggcatacataccctgtgaatctcgatgctgactggggcactgaaggtgttctaaatgacgaggaagccctttgcctagatggtaccttttatgggaacgtggcgaggtttatgaaccataggtgcattgatggtaacatcatcgcaattcctgttgaagttgagacgcctgaccaccactactatcatctggcattcttcacaacgagggaagtagaggcttttgaagaattgacatgggccttgtggtggccaatttatggatttagagatatgatcaatgaatactttaccgcactggtggagagggagaggacggctagtttggaaactcaaatcctcttcgggattggagagggttag

SEQ ID NO: 4789 - DNA, 705 bp, Zea mays
  Peptide Sequence Number=SeqID_46568
atgtcgggagatcacgccaagaaggagatggtgaccgacgagaagcccgccacaagccatgggaaggctccatccggggagtccggtaacaaggtgaaggggtccccttcacacgacaagtcgtgtcggagcggtgacaagaagaagatgaagaaggtggtctactacgagactgactcttcatcgccatccacctccggctccgacacgccgtccgtcacttctaagcgccatgagcgcaagaagtttagtaagatccccttacgttgtcctcgcatttccaaacacacccctttactttccgtcccactaggcaaaccaccggttttttatggtgaagattattgtatgtggagtgataaaatgaggcaccatctaacctcactccatgctagcatttgggacattgttgagtttggtgcacaggaaccatccatgggggatgaaggctatgactcggacgaagtagcccaaatccggcacttcaactcccaagccaccactatactcctcgcctctctaagtcgagaggagtataacaaggtgcaagggttgaagagcgccaaagagatttgggatgtactcaagaccgcgcatgaaggagacgaggtgaccaagatcaccaagagggaaacgatcgaggggagctcggtcgcttcatgcttcaccaaggagaagatccacaagccatgtacaaccgtctaa

SEQ ID NO: 4790 - DNA, 2793 bp, Zea mays
  Peptide Sequence Number=SeqID_46569
atgtgcgtgctgctcctcgctgctgcttccatgctgagcagcagccataccaccaccgccgccgcacatggtgctgcttctgctactgcctctcctccaccagcggcgttgctgatcgccacggccgacgaccagcaggctctgctcgccttcaaggacctcgtcaccggcgaccctcacggggtgctgacctcatggaccgccgctggcaacacgaccgccggcgtctgcagctggagaggcgtggggtgccgctcccgccggcggcgccctggccgcgtcacctcgctggagctggcgtccgccaacctgaccttcaccgtctcgcctttcctcgccaacctgacgttcctcggcacgctcaacctctcgcacaacttcctgtcgggcaacatcccccgggagctcggcttcttgccccgcctctcgtacctggacctccggcacaactccctgcagggcgtggttccaggatccctcgccggcgcctccaggctcctggtcctgcagctggagtacaacagcctcgtgggcgagatcccagccaacctgagccacctgcagaggctggaggtcctggacgtcggctccaaccagctctccggtgcgatcccgcagtcgctcggctcgctctcgaggctcacactctctaggacggctgacaaggctcaggcgctcagctcccttgatttagcctacaaccatctcagcggcacaatcccagcaagcctgttcaacatctcatcagttgccaccttcgaattgtccggcaacaaggctctttcaggcgttctcccgtctgatatcggtgccaccctcccaaacctccagaacctgatcctcaacgactgccagctgcgcggccgaatcccccgatccatagggaacgcgtcgctgctcaggtacatacagctcggcgacaaccagcttgaaggggccctgccgctggaagtaggcagcctgaaggatctcgaggtgctaacagtggagagcaaccggctggaggacgagtggtggggaagtgatgactgggacttgatcgcctccttgtccaactgcagcaagctgttctacctgtcccttgactccaacagcttccgaggcgtgctcccgccttccatcgtcaacctctccagcacgatgcagaagcttcatctatcacacaacggattccacggagcgattcctacggatatccggaagctttcgagcctcaccatactcactctcaggggtaacttgctgacgggcagcatcccgccatcgatcggggagcttcacagcctaggagttctagacttgtccgagaacaacatctccgggggaatccctcctgcgctggggaacctgacaaacctctccatactttatctgttcaagaacagcctgcagggacccatacccacgagcctggggaagctgcagaacatcggtagcctggtcctgtcgctcaaccagcttaccggctcgataccagcggaggtcgtcagcctctcctctctgaccagctacctcggtctctcgtacaactccctcactggtcagatcccatcagaggtcgggaaactgacgaacctagtgctgctggatctgtcagtaaaccagctatccggcgacgttcctgcagctctaggcaagtgcgtggagctagcgcagcttcagctgaacgacaatcttcttcaaggcgccatcccgcagtccttgagtggactgcaaggaatgcaagagctggacgtcgcgaggaacaacttatctggccctgttccgaagttctttgccgactggccgagcctgaactacctgaacctgtcgtacaacaggttcgaaggctccgttccggtaacgggcgtcttcggtaacgcgagcgcgttctccgtggctggtaataacaaggtctgtgggggagttacagctctgcagcttccgccatgccccactgtcgaagacgaagagcccgacgacgctgacaacaggaggccaaggagactagcagtgataataggcactgttgttggttctacatctttgcttctccttgccttttgtggtcttctcctgttggtcatgaggcggcggaaaagggcccctgccaatctccctttggcggaggaccagcattggcaggtctcgttcgaggagatacagaaggcgactgaccagttctccccgagtaatctcataggcgtgggaagcttcgggtccgtttatagagggatcctcctgagcccaggtgcgcggcaagttgaagtcgcgatcaaggtcattgacctccggcagcatggagccgagcacagtttcctggccgaatgccgtgccctgagaagcgttcgccaccggaatcttgtcaaggtcgtcaccgcctgctccagcgttggccaccagggaaacgacttcaaggcgttggtctacgagttcatgccgaacggggacctcgacgtgtggctacaccaccaccataggcaagatccacaggatggggcgccgaggaggaggaggaggctgaccgtgacgcagagggtggacatcgcgctcgacgtcgcggcggctctcgactacctgcaccaccacggccaggcgcccgtcgtgcactgtgacctgaagccgagcaacgtcctccttgacggcgacatggtcgcgcgcgtggcggactttggcctcgcacggttcatccgtaacaagatggtgagcgagtcggcgggaggaagcagcacttggagcgtcgggatcaagggcaccatcgggtacatccctccaggttgcagagcttgttgtttagtttgttcttcctactga

SEQ ID NO: 4791 - DNA, 228 bp, Zea mays
  Peptide Sequence Number=SeqID_46570
atgggttggggaggagaatttcgcaaccgtgccactccgttcggcggacttcagactattggcatcattatcgtcgtaattgaatccgtgggcggatcctgcgccgagggccattctcgcgcctctgacgctgcccgtgacacattgagtgcttctgctgtcgcctgtgtgattgctagtgatctctacgccacagcatcagtaggagacattggccaaatactatga

SEQ ID NO: 4792 - DNA, 1497 bp, Zea mays
  Peptide Sequence Number=SeqID_46571
atggcgggaggaggggcggcctaccagagctcgtcggcgtcgccggactggctgaacaagggcgacaatgcgtggcagatgacgtccgcgacgctggtgggcctgcagagcatgcccgggctggtgatcctgtacggcagcatcgtgaagaagaagtgggccatcaactcggcgttcatggcgctgtacgccttcgccgccgtctggctctgctgggtggtgtgggcctacaacatgtcgttcggcgaccggctgctgcccttctggggcaaggcgaggccggcgctcgggcagcgcttcctggtggcgcagtcccagctcacggccaccgccgtgcggtaccgcgacgggtcgctcgaggcggagatgctccaccccttctacccggccgccaccatggtgtacttccagtgcgtgttcgccagcatcaccgtcatcatcctcgccggctcgctgctgggccgcatggacatcaaggcctggatggccttcgtcccgctctggatcaccttctcctacaccgtctccgccttctcgctctggggcggcggcttcctcttccagtggggcgtcatcgactactccggcggctacgtcatccacctctcctcgggaatcgccggcctcaccgccgcttactgggtagggccaaggtcggcgtcggacagggagcggttccctcccaacaacatactgctggtgctggcgggggcaggcctgctgtggctcggatggactggcttcaacggcggcgacccgtactcggccaacatcgactcgtccatggcggtgctcaacacgcacatctgcgcctccaccagcctcctcatgtggaccctccttgacgtcttcttcttcgggaagccgtcggtgatcggtgctgtgcagggcatgatcaccggccttgtgtgcatcacgcctggcgcagtggaaagaaagcaaactaaggaaaacaaagtcagcaaagaagaatcaaagcgtctgcaacttctgcattcagggctcttaggttcatcctacagccgcctaaatagactttttaaggcctggtgcaagggtgggcagccattgtcatgggaattctctcagaggatcgacgacaccctcggcgtattccacacccatgcggtcgctgggctcctcggcggcgccactactggactctttgctgagcctgtcctctgcaacctcttcctcgccatcccggactccagaggtgcattttatggtggtgatggtggatcacagtttgggaagcagatcgctggcgcactcttcgtcattggctggaacattgttatcacttccataatctgtgttcttattggcctagtcctgcccctccgaattcctgatgcacagctgcttatcggggatgatgctgtacatggtgaggaggcgtatgctatatgggcagaaggcgagctcaacgatgtaacccgccaagatgaaagcaggcatggcagcgtcgctgtaggagtcacacagaatgtttga

SEQ ID NO: 4793 - DNA, 2148 bp, Zea mays
  Peptide Sequence Number=SeqID_46572
atgtcgcacgtcgagcccgccgccgccggagtggaccaagtcggcgaggggacggtcgtgccgcacgacaacggtgtcagcggcaccgggggtgacgtggccaccacggaagcgcaagtggctgttgccgtttccacctccggcgacgagaggcggggggattacggcgatgatgcagagaacgaggaggaggaggaggccgcaacggtgcagggcagcaaggagggcactgacgagctgctccggaaggtggtgtgcagcgaagaggccgcctacaagctctactgcgattacggccaccgcatggggttcagcatccggaaagggaagcagtcctacttcaccggcaccaagcggatacgcaccaaggactacttctgctccaaggaggggctcaaggaaggggagaagctcactgatgcaaatttcaacgacccccacaccaggaccaattgcagggccatggtgcggttcagggtgaatgatcagggggagtggaaggttatccgactggtatctgatcataaccacaacctggcaaggcctgaggaacgacatcttttgcggtctgcaaggtcgcttatagcagggcggtcaagttctgtggaggtgatgttgtatgggggttatcaggtgcaaggtggggctccacaattgcctacagggagtactagtgcaaccaacaatgtggagaatcagaagcaagatttgctcctcggctacggtgctgcgacaaagacactgactataggaactggggatgtgcagagccttgtgagccatctgaaaagcagggcaaatgaagatggtatgttttactgggatgttcaattggaccgaggtggtcggatgactaatttcttttggcgtgatgggaggagcaggactgactatgactgtttctgtgatgtggtcgtgtttgattcaacttaccgcttgagcaaacataacctgatatgtgcaccgtttgttggcgtcaatcatcattggcagaccactatgtatggttgcgcacttttagctgacgagtctacgtcagcttttgtgtggctgttcaagtctttcttggagtccatggggaaccgacatccacaatctattttcacaaatctagatcaagttgtgacaaaagcggttgaggaggtcttcccaaatgcacgccatcgcattgctcattggcacatccaaaagaatgcccactctcgtctgggtgctcttaatgtctcaaaaacattcaataagatgttcaccaagtgcatacagggatgtgactccgaagcagagtttgaggaaacatgggctcaaatgctctgtgaatttaagttgcaagataacaagtggcttaaaaaattgtataagctcaaacagaagtggtgtagtgctcttaacaactgcacctttgatggtgggatcgagtatgaaccacaatgtgacagtatgagcaacatgtttaataatgtttctgataagttgacttctctttgtgcaattgctgttgctgtggataaacagactgaagattggagggaaaaagaattagatgaggatgcacggtgtttccaaaggccacctgcttgcatcataaaatacagtgatattttgaatcatgcagcaaaggtttatacacatagaatctacaaactgtttgagacagattttcttgatgggtgtggagccacaaaattcaaagagcttccgtgtcaagataacaatacatatcaatttgagatgactatgcaagggcgaggatcaagagtttgcacagttcatttcaatatgtctatgatgcaattaagttgcagctgcagtaagtttgagacaatgggtttactttgcccacatgctttgaaagctcttagtataaaaaatatatgcaaaattccagaaagctacatactgaagcggtggaccaaggatgcgaagaaatgggtttttaatccaaaacaatatgaatcatcatatcaggaatgtatgaatgatgaagctgcatactgcaactatgttatgagatatgcttatgatcttgtcacgaagagccaagggcaggatgcattaaggaaagcactgtgggagactcttgaaagtggtgagaaagaattggagagatacctagaaaacgttacccaacatgcaccttatgccacttga

SEQ ID NO: 4794 - DNA, 219 bp, Zea mays
  Peptide Sequence Number=SeqID_46573
atggcggccgcggcggaggtgtaccggcgggtgctgaaggcggtgcagaagcacgtcggtaggggcgccaccaagcagcgcttcctcgacttcggggcggccgagttccgtgcccccgtcggcacggaggccgacgctagggcgaggctgcggctcgccggggactacgcctacctcctcaccagcgtccaccaccacaaggtattggagattgatccg

SEQ ID NO: 4795 - DNA, 1149 bp, Zea mays
  Peptide Sequence Number=SeqID_46574
atgacggctttaggtcgcctttcacgtttgcttagttctatcgtccaccgctctggaggccttgtgcgcgccttctccatgttggtcgaggtcgtcgatgttgccgatgtctccgatctatacgtgccacgtgacgcccattgctactacatctttggttcacaagctactgagatctggattacccccttgtatttcagcaagacctgtggcttatcgattcttgacaccgatttcattgaagaaaaccttggtgtgctgcctgagttggatttactggtattcagatcactgaacatgagtcgctctgagtctgaaatagataattgctacaaaccattcgtgaagctcttcaaggctcttgaggtgcatcgacttttgagggagaagtgcccggcacgtggacagggtgctgcagccaatgcaatcatggtgacgattgaagagaaaatctttgacttcatgaagtcatgcagtacaaatgctatgctaattagttattctggtgctcatggtgagaggacaaagaagcacattgtgggcagtgaagatagaggagatgaggcgctgatatctgaagttagtgatgtcactaaagatctcaaagcgtcgaatgtcccactgaaagttagaaattttatgggcaacaaggagctcagtgttgagggcaaaacaaccaccgcagaaggaaacgttgagattgttccaggagatgagctgacagctactctcttggacgctgtgaatactattcagcgcactactactggatatgatcagattcgttcagcaaagaaaaaagtgatgtcacacgtcaaacagatgaggatgtaccagattcggctttttaagctgctacaagagaaagttatgcacaaagatctggaaattgatcttgagggtccaaagaatgcctctgtgaagttaaaagctgtgaatgcttctgctattgttgacacacacagacatggaatggctcatgctatgcagcctgataatgtaaatcttgtggagcatctgcctgaaggcaatcaagagagcctctccaaagagccatatgacgtgaatgatgtagtagatctgtttcagtacaagtgttcagagtatttgactattgctgttgctgaatttgatgagcgggaaatttga

SEQ ID NO: 4796 - DNA, 1080 bp, Zea mays
  Peptide Sequence Number=SeqID_46575
atggctggcacgcaccgcgcacgcatctggcctccaacaccacctgatcctaggccccgaccccaggctcatgaacacccctgcactgtcaggatcgccaacgccaccagcaggaagccttggcctgccgccatcggtgccggatggagcagaggaagtggaagcacgagcccttcccatcaccctcctgtaaccgcgacggagggcccgacggcttgtgatgaccccaactggatccgactccgtagcagtgagcacgaggacgggagcggagtcgcagcgtcgcggtgcgagagcggagaggagcgagatcgagggcgagagtttggggcagcgagagtagaggataggagagggaaggaagagagcagatcctcaccggggagaaggcagcggggagggttgtcgtcgggctgtgcgctgccgccgtgccggtcgcgtcaagccgccgtcgcgccagtcgcgtcgtgtccaggcttcgatccggagggtacgacacaagggttggttccgggccgtgggagaataacaatccctgaaatactggaggatgagtggttcaaaaagggctacaagcgcccggagtttgacgagaaatatgacacgccattggatgatgtggatgctgtcttcaatgactcagaagagcaccacgtgacagagaagaaagaagaagaacccgtagctctcaatgcatttgaactgatttcaaggtcagcaggcctaaatcttgggaacctatttgactcggagcaggaattcaaaagagaaacgaggttcacgtcaaaatgtccaccgaaagaaatcattcgcaagattgaggaagctgcaaaacctctaggatttggtgtccagaagaaaaactacaagttgaggctagagaaagtaaaagcagggaggaagggaaacctgaatgttgctacggagatactacaggttgcgccctcccttcatatggtacaagtccggaaagcaaaaggcgacactctggagttccaaaagttctacaagaacctttccaagaccttaaaggacgttgtctggaaatctgaagacctgcaaatgcgagctgcttcttag

SEQ ID NO: 4797 - DNA, 1431 bp, Zea mays
  Peptide Sequence Number=SeqID_46576
atgggtcgcaccatcaagaaggccaggaaagcgaaacccaagaagtctaagaagcatgttctttggctcaattcattcttctgtatttctgtgctgcagaaaactgaagcgtcttcatcgtccaatcatgcggttgcctctggtccggctaaggtctggcaaccgggtgtagatgcactggaagatggggaggagcttcagtttgatcctgaggcttataattatctccgaggttttggcattggctggtcttgcttgagttttgatgttgtgcgcgatcaacttagactcgtccgatcagagttccctcatacattatatggtgttgctgggacgcaggcggagaaagcttcattgaattatatcggtgttttcaagctttctaacataaatgggaaaaagcgggaacctataccagcttcagcagttgatggtgacactgatgtggatagtgacagcagcagtgatgaagaagatgaagaaattaacgaggatacaaagcccatcctacatctaaaaaaggtggctcatgcggggtgtgtaaatcggatacgctcaatgactcaaaagccacatatatgtgctacttggggagatactggtcatgttcaggtgtgggacttgagctccttccttaattctttagcagagtcaggggcatctgcacccaaagaagacgatataatccacaaacacttacccatgaaagtttttagtggccataaagatgagggatatgccattgattggagtccacttgttactggaagacttgtttctggtgactgcaataagtgcattcacctatgggaaccgacttcaaataactggaactggagtcccacggaagccgacatatttgcctcgtgttctgtggatggtacgatatcaatatgggatgtacgtacagggaagaaaccttctatttctgtcaaagctcataaagcagatgtgaatgttatctcatggaacaggcttgctagctgcatgatagcttctgggtgcgacgatggcagtttctcagttcatgatcttagatcaattcaggactcgttggtagcacattttgagtaccacaagaaagcaattacatccatcgagtggagcccacacgaagcatcatcattagctgtaacatctgaagaccaccagctcacaatctgggacctttcattggaacgggacaccgaggaggaggctgagttcagagcgaagatgaaagagcaggcaaacgcccctgacgatttgccgcctcagcttctctttgctcatcagggtcagagagacttgaaagaagtgcactggcacccacagataccgtcgatgatcatatcgacggcaatcgacggcttcaacgtgttgatgcctagcaacatcgatacaaccattcctggcagcacagatacagcaatgccgcctgctgagccatag

SEQ ID NO: 4798 - DNA, 1047 bp, Zea mays
  Peptide Sequence Number=SeqID_46577
atgttttttgatgggtccctgatgaaaacaggagcgggcgcaggcctgctcttcatctcacccctcgaaaagcacctccgctacgtgctgcgtctccatttcccggcgtccaacaacgtggccgagtacgaagctctgcttgtcatcgaccaagtcatgaagaactcccattgccgcgaccctaagatggaagcctactgcgatgaggttcggcgcctggaggacaagttctacgggctcgagctcaaccacatcgctcgacgatacagcgagactgcggacgagctggctaagatggcctcggggcggacaacggttcctccggacgtcttctgccaagacctacatcaaccgtcagtcaagaccgacgacacgcccgagcccaagaagaaggcacccgggggctacacgcacctgctggtcgctatcgacaaattatccaagtggattgaggtccgacccctaaacagcatcaggtccgaacatgcggtggcgttcttcaccaacatcatccatcgcttcggggtcccgaactccatcatcactgacaacggcacccagttcactgccagaaagttcctggacttctgcgaggactaccacatccgggtggactgggccgccgtagcccaccccatgatgaatgggcaggtagaacgtgccaacgacatgattctgcagggactcaagccaaggatctacaacgacctcaacaagttcggcaggcgatggatgaaggaactcccctcggtggtctggagtttgaggacgacgccaagccgagccacgggcttcacgccgttctttctagtctatggggccgaggctatcttgcccacagacttagaatacggttccccgaggacgagggtgtacgatgaccgaagcagccagtccagccgagaagactcactggaccagctggaagaggctcggaacgtagccttactacactcggcgcggtatcaacagtccctgcgacgctaccacgcccgaggggttcggtcccgagacctccaggtgggagacttggtgcttcggctatga

SEQ ID NO: 4799 - DNA, 1692 bp, Zea mays
  Peptide Sequence Number=SeqID_46578
atggtggccgacgaccgacgcggcgacggggtcaagcaaaccaatccatggatgccgcggattgcagaggtacgagtacgacaaaaggttcttctgcacagcacagaaaagaagaaagaaaacagagtaacttacaatttggaaagtgagaggtacttgaggggtgatccagttattgatggcctgcagtacagcttgaccgctgggcactgcttgctcctacggcaactacaatgcctctgctctggaccatcatccgttgaaagcaaggcaggcgtcacacatgtccaacctcgccatcaccgatgcgtgtctcgtgacagaatcagagcaagcatcatgcagcagcagcagccaggagcagagggcgccgtcatgaagccatcagagcctgctgaggatgagcagcatcagcagaagccaggactagagggcgccgtcatgaagccatcaaagcctgctgaggatgagcagcatcagcagaagccaggactagagggcgccgtcatgaagccatcagagcctgctgaggatgagcagcagcaggaggaggctgagcgcagaaggctctaccaggcttggaagggaaacaacatattcctgtgcggcgggcggctcatgttcgggcccgacgccgcgtccctcctgctcacgacattcctcatcgtcgccccgaccatcgtcttctgctaccagataaaatccacgttctacggctctggtgggcggcagcagcagcagatgcaccaggcagcagcgctcgtagtcaccgtcacaacgatcatgccagaaactgaaccgtggcttcaaacgcaggaccttgtcttcctatccatgacatccaccagagacccaggaatcgtgccaaggaactcgagggcgccccctgaagccgacgagttcctcggctgcaacacgccgtctatggactggagcggcgggagaaccccgcggatgaggctccgccggaccaaggacgtcatcatcaacggcttcacggtgaaggtgaagttctgcgagacctgcctgaggtaccgtccgccacgatcctcgcactgctccatctgcaacaactgcgtccacaagtttgaccaccactgcccatgggtcggccagtgcattggacttacaacatatgaaaactttagataccattatgacaagaaggacaatccctaccgcaagagcattgcagcaaactttgcggaagtgttctttaccaagataccacctccgatgaatgattttcgttcatgggtaggtgagggcgcacttgaagctggattctacactccatacattgggctggatgtgacaaacccaagggaaaagattgacctagacatggaaagcaaagaagtacttgttgggggtatccagattccaacggcacttcagaacatagactatggttccttcgaagagagttcaggtgacaagaacagaaatgctggccaaaaatcagcgcatttccctatagcttgggcacaaggaaatgaagctgctggaacatctgcaggagctaccgtgacattcaataacaaaacaagcgatgatggtgttaatgaattcgacagtccgaatacaactaccacccaagcatctacaaaagctaacacagaaccaccaggtgagggtgatactaaagaaactaatagttcaaatataattgccaaggctctgaaggaatga

SEQ ID NO: 4800 - DNA, 4311 bp, Zea mays
  Peptide Sequence Number=SeqID_46579
atggcctccgacgacggcgacaaggacatcctcctcctcgtccaccaggtcccactcgacatggaggatgtgccagcgccccgcctggcgcacctcctcgccccgctccaccgcgcgcctccaccgcccccgcctccccccttccgctcgccgcccccgccccaggccgccgcttccgccgagcaccgcctctcattccgcggctggctcggcatcccccgccactgggacgactgggtcgccaagctccggcccctccacgcccgcctctggcgccgcctcggcatccacgacgccgtccttgcctccaccctccgcttcaagcgcgacgcctccgccatcctccatctcgcctccttctggtcccctgccaccgccaccttcgccttcccctggggggaggccactgtcaccctccaggacgtcgccctcctcgccggcttccccgccctcggcgccccggccacggccccgctcccgccccagtggcgccccgacgaggccgccctcaatggcgtgcgcctcggcttcaaccgcagcgcctgcaagaaggcgcaccactccgcctgggtaaaacacttcctcaccgacgataacgcggacacagtcttcgagcacgccgccttcctcgcgctctggctcacgcgcttcgtcctcccgggtcatccggagtccaccatgcgccaggccgtcttccccatcgccgtccgcctcgcgcgcggggaccgcgttgccctcgcgcccgccgtccttgcctcgatctaccgggacctccgcgagatcaaggccttcctcatcgccacgggcgccgccgccaccaccggcaacgccgatatgatctcctccttatccgtctactcgccactctacattcttcagctctggatgtgggagcgcttccctgccctcaggccagcaaaggtgaacccactcgttgatggcgatccgcttgccgctcggtggcatgatctgagcaggaagctgaacccggcgcagatacgtgaggccctcagcacaggatgcaactttgtgtggcagccttatgtcagctccatggagcacactgggtgggttcacagcagtgatctagccgaggatgatgaactggcatcgctcgcacaatttttgcacccctgtgagctcgtagggatggattgcattgagcagtacctcccgcaccgtgttgccagacagtttggactggaccaagatgtgcctgcagatgttcaccgtgccaaccaggattgggcgattgcttggcagacctaccagctggaaggtaagaatgtggctttcttcatccctcactctgagcctgggatcacaacacggtatgcacagtggtggaggcagcaacttctgccttctggcattgatgctgctacagcaagtgctccagtagagtggaagacttccaagcgcaaggtgaaaaagacaccagcggccatggaagctgaagctgagaaggagcgtaagatgaagaaggcccgggtctctcctacttatactgataaaaagcgcaaacttgaagagttgtatgatgctaagttgtcggattggcttccaactgcaaggaatgagattagtgacaccactagtgatatggaatcggaggaggccttattgcctaatgttggaactacaaatgatgatattgtgctactcatgccaaggaagcagacaacgactgcacctgtaagggcattgatggataatgacatgatcctggctctaggagagagaggaaactttatggttgatgagcctccagacatccaaagtgaacctgaagctgttgtccctgcaacgctggatgaggaaatagttaaaattcctgaggttatttctcttgatattccagataagccagaagaaggagccactgcagtaatggaggagcagaaggaagctactagtgtatctgatagatctgaagaagctagtgctctggtcataggagaggtagaagaaaaggttgccatagagggagctatttgtgttacagggatgaatccatcgggaaacaactcagcaactgtaatggaggcagatgaaagaaatgcagttccaaaagaatttggaagggctgccaaggaagtaattgaagctgtgccccagagccaacatgaagttaatgcaggtgttataaacaattctcatgatgtggtggctttacctgaggaggcccatccagttcagcccacaaataattctggtggatgtcccgtggtatcttgcataatggaagacagtaaagttgctggagattcgggcaaaattgattatgaatatttttgtgattttgttgaggaacagagggagattccttgtgtacaagagatttctggagaaaacagtcgaatgggtgagaaagagagagaagaaacctcccatgaatctcctcaactagagattgtagaatgtgtgcaagacatcgttcttagggaaacagactatgatgttaatcaaaagatagtttatccagcagtggaggatgtagcaacttccgatagtatgagtacatctcttctgggtgttcctgaaccagaaaatgcagaactcaataaacatccttatctagcaattaaagatgaggaagatatacccatggaagctgcacgaggagaagtagcagaaatggaacaaattagtacttctgcaaagggaggtgccgaggagcatggggacttttctgaacttgatcacatgggccgagcagatgctaaattgcatttacacttaaattctgaagtgcctgagaaaattgatgaaatagagtgtaaagaagtcgctggcactatgagactaactgggagatattctgatcagaagcttggagatgtgcctgaagttgggtacacagaagatgaaaacattagggggctggtagtgaacacaagtgataggaaaccttcagaagtctctcaagtcgagcctgcaaaactggaacattctaaggatctggtgaaagaggaaacagacaaatccgaaaatattcctggattagaatgtataggattggaggaaactcgtggagatttgatggaagagtgtgcaaataccaagtctgataatgttcccgaattagaaaatacaggattaggaggaactcatgggccaatagaggatactgatggtagactgaaggaaattcatgatgtcaatgcagaactggataaacacaatgtgcatgagagcgatattgatagatccgaggacatcatgcaaatcgatccactaacacaggataaagctacgtggctggcgaaggaagaaactgaagataaaactacaaaagttcaagaagtaaagtatgaacaattaagaaatgagccaccgattcaagaggattccaaggaaaagccctgtgctgatagcaaggatctatcagagaatgttgtagttcagtccaaagaggtagataaattgaaacaagcaggagagggttgccaggcgttaatggagaaagacatggagaatgctagtggtgcttttgtactagaacagacagaagatggacacagaaaatcattgatagagacaagtataaataacgatagtgaaattactctagtcgagcagttggatggacaaagtgagagtcttacgaggacagaagattcaaatgactcaaccaatgaaaaggatgtggtagaagattcaaacgaatcaatcaatgctaagatgccatgtagttcagctactgtacagttaaaagaagataagatggaagtttttcatgaaggcaagatggaggagccatgtgctcaggatgctgaactgagtaatcagagggaaccatcatctgatgcaactgctatggagattgaggcagtggctctggaacaggacagcagaatcatatgcaaaaacatggaggcaacaacagtggaaggcagccacacactggatagtggactaagttccgatctagccaaggttaatgaaactcatgctgcacgggaaattaaaaaccaggaagttttggatgtggacatgaaagtagcaatgagtgtttgtggtgaatatcaaattaactcaattggtatggaggatgtcaaatctaccaaaggatcacagaaccaagaatgtttggaccagaaagaacaactagcaagagaggaaagatacaatttaggaactgcaattgaaaataacaaaatgaatttgttagaagacgaaaactttcttgtttatgggcgatatcataatagtccaactcataccaaggttaagagggtcaagcctaccaaaggaatacaaaaccaagaacttttgaataacaaagaaatgagtctacctagaatataa

SEQ ID NO: 4801 - DNA, 1095 bp, Zea mays
  Peptide Sequence Number=SeqID_46580
atggcggctttaggtcgcctttcacgtttgcttagttctaccgtccaccgctctggaggccttgtgcgcgccttctccatgttggccgaggtcgtcaatgttgccgatgtctccgatctgtatctgccacgtgacgcccattgctactacatctttggaaagcatgagcctctgaagttatcctataccagagtgatcagcatttcagagtatttcaaggaagtgtctttgctggacagggcacgtaggaaccgtttcattgaagatattgacgatgacctcccgttcttaacccatgataggattaagacttgtggcttatcgattcttgagaccgatttcattgaagaaaaccttggtgtgctgcctgagttggatttactggtattcagatcactgaacatgagtcgctctgagtctgaaatagataattgctacaaaccattcgtgaagctcttcaaggctcttgagggtaagtatgttgtaagggatgcaatcttcaagctacccaagtcacttgatctgcatttgaagtatcttgagttgcctattgtcaaggattatcgtgtgatatatggtcgaaccctcttcccgaagcttttgatctctataatgtactgcgaagtgcatcgacttttgagggagcagtgcccggcacgtggacagagtgctgcagccaatgcaatcatggtgacgattgaagagaaaatctttgacttcatgaagtcatgcagtacaaatgttatgctaattagctattctggtgctcatggtgagagggcaaataagcaaattgtgtgcagtgaagatggaggagatgaggcgctgacatctgaagttagtaatgtcactaaagatctcaaagcgtcgaatgtcccactgaaagttagaaattttatgggcaacaagaagctcagtgttgagggcaaaagaactaccgcagaaggaaacattgagattatttcaggagatgagctgacagctactctcttggacgttgtgaatactattcagtgcattactactggatatgatcagattcgtttagcaaagaaaaaattgatgtcacacgtcaaacagatgaggatgtgctag

SEQ ID NO: 4802 - DNA, 885 bp, Zea mays
  Peptide Sequence Number=SeqID_46581
atgagtgcagctgcaaccaaggtgaagagacgtgtgggcaagtacgagctcggccgaaccataggcgaaggcacattcgccaaggtcaggttcgccaagaacaccgagaccggggagccggtggccgtcaagatcctcgacaaggagaaggtcctcaggcacaagatggccgagcaggtcacttttccagctctgaagcccaatatgggctttggcatacttgttcagagttcagtcagtagatttggtggaactagtcatttcgctgacgatgacacaaactactacatggtgatgggaagtaaaacaaaggtctacattgtgctggagtatgttaccggcggcgaacttttcgacacaattaatctaaagccgtcatacttgcagccagaaaatctactgcttgactcatatggaaatctgaatgtctctgactttgggctgagcgcgctgtcccagcaaatcaaggatgatggattgctgcacacaacttgtgggactccaaactatgtggcaccagaggtcctagaagatcagggctatgatggtgcaatggctgatctgtggtcatgtggagttatcctgtttgttctgctagctgggtatttaccttttgaggactctaaccttatgacgctgtataagaaaatctcaaatgcagaatacacatttccaccatggacatctttccctgccaagaggttgttgacaagaatccttgatccaaatccgatgacgaaattttctcattttcatgatccaatttctagcaaggtagatttcatgtatcaattgactagaatagagaaagaagctaattgggtaattctaaccggcctggtggtggctaaaccaactgataacaagggcctatggtgtaattaa

SEQ ID NO: 4803 - DNA, 210 bp, Zea mays
  Peptide Sequence Number=SeqID_46582
atggagaaggcgcgcacaaggcctccagagcggtggacggtagaactaagcaaacgtgaaaggcgacctaaagccgccatctcagccgagcgagcggcgagaaccggcgccgggaagctttgggatctcgggcgtactgttccaaatacagttgaatttgcttactggattggtcgaacaaagcagaagaaaattcttgtgacttcgtaa

SEQ ID NO: 4804 - DNA, 519 bp, Zea mays
  Peptide Sequence Number=SeqID_46583
atgacgacgaaggccgccgccgccgtcgccaccgcttacgtcaggaccagaaccacggtagcgctccggctgctggcgttcgcggcgtcgctcgcggccgccgtggtcgtggtcaccaaccggcaggaccgctggggaatcaccgtcaccttcaagatgttcgccgtctgggaggcgttcgtggcgatcaacttcgcctgcgccgcgtacgcgctgctcacggccgtctacgccaagaagctcgccagcaagcactggctgcaccacatggatcagttctcggtgaacctgcaggcggcgtcgaccgccggcgccggcgcgatcgggtcggtggccatgtgggggaacgaggccagcgggtggttcgccgtgtgccgcttctaccgcctctactgcgacaggggcgccgtctccctcgcgctcgccttcgtcgccctcgccgccctcgccgtcgccaccggcctctcccgcttcccagcgcacgacacacaggcagtagtcgatcacccagatgattag

SEQ ID NO: 4805 - DNA, 261 bp, Zea mays
  Peptide Sequence Number=SeqID_46584
atggcattctctgttaagcatatgttgcgtaggaagtctcgggtgggaattggtccgttagcttgccatgttggccgtaccccggtgacacctcgccgtatttccggcggcgctgccgctgttcgcagggacgtttcagataggggtaacaggaaccgttcgatcgggatcggattaaaagagccagtagctgaggatcctggtgcccagcagatagaagttgctgagcaggagctcattgaaggcaagttatgcccttga

SEQ ID NO: 4806 - DNA, 603 bp, Zea mays
  Peptide Sequence Number=SeqID_46585
atgggcttacgagggcggaccttaccagactggacaatagataaatgtaatcatattactaaggaagagttcgttctcatgcaaccttttgggtgtaaggttcagggccacctaaatcgcctaagctctattgagcgtctgactcgaagggtaagcggtgcccggtggaggctgttgggtgctaccccgaatgccatggagcttatggctgacgggttgggtcttgaggccactggtgctcgtggggagctcccatgggacctccatggccgactatccacctcatgcatgattaggttgtcgaaggcgcaatccattattggcttgcttgctggtcaccatcatcatgccgagggatttgggactgaaccccctccgggcataggtttccaccgccttctacctgatggcattggcatggctgttgaggcaccgcctgagatcgacgacgagcatcttgagcagcctcggacccccttaggccggaggtccgggtggcccaccatgagggtcgaggtcgttcccaggggctcggcccctgggcgcaggttccgagagccctcatcttcaaggcacatggcgaacccagaccccctccgctag

SEQ ID NO: 4807 - DNA, 1986 bp, Zea mays
  Peptide Sequence Number=SeqID_46586
atgcccggcataccgagggatgtcgccgagcactcgctggatatccaagctggagcccgacccgtgaagcagcctctgcgccgattcgacgaagaaaagcgcagagccataggagaggagatccacaagctaatggcggcagggttcatcaaagaggcctacgtcgatgacatcgtagtcaagacgaggaaagcctccgacctcctttccgaccttggagcgacattccgatgtctcaaggcgaaaggcgtaaaactcaatcccgagaagtgtgtcttcggggtcccccgaggcatgctcttggggttcatcgtctccgagcggggcatcgaggccaacccggagaagatcgcggccatcaccagcatggggcccatcaaggacttgaaaggcgtacagagggtcacgggatgccttgcggctctgagccgtttcatctcgcgcctcggcgaaagaggcctgcgtctataccgcctcttaaggaaggccgagtgcttcacttggacccctgaggccgaggaagccctcgggaacctaaaggcgttcctcacgaacgcgcccatcttggtgccccccgctgtcggagaagccctcttgatctacgtcgccgctaccactcaggtggttagcgccgcgattgtggttgagagacgagaagaggggcatgcattgcccgtccagaggccagtctacttcatcagtgaggtactgtccgagaccaagatctgctacccacaaattcagaagctgttgtacgcggtgatcctaatgcggcggaagttgcgacactacttcgagtctcatccggttttggcggactttgtggctgaatgggtcgacacccagctcccaacagctccgatcaaaccggaactctggaccatgtttttcgacgggtcgctgatgaagacaggagcaggcgcaggcctgctcttcatctcgcccctcgggaagcacctacgctacgtgctacgcctccatttcccggtgtccaacaatgtggccgagtacgaggctctggtcaatgggttgcgcatcgccatcgagctaggggtccgacgcctcgacgctcgcggtgactcgcagctcgtcatcgaccaagtcatgaagaactcccacttccgcgacccaaagatggaagcctactgcgatgaggttcggcgcctagaagacaagttctacgggctcgagctcaaccacatcgcccgacgctacaacgagactgcggacgagctggctaaaatagcctcggggcgaacaacggttcccccggacgtcttctcccgagacctgcatcaaccctccgtcaagaccgacgacacacccgagcccgagaaaccccgtacctgcaatatctccaccgaggagagctacccctcgaccgagccgaagctcggcggttggcgcgcacctcgagcccttgttggaaacgccttccgacaaggcttctactggccgaccgcggtggccgacaccactagaattgtccgcacctgccaagggtgtcaattctatgcaaggaagacccacctacccgctcaggctctgcagaccatacccatcacctggtcgtttgctgtgtggggtctggacctcgtcggacccttgcagaatgcacccgggggctacacgcacctactggtcgccatcgacaaattctccaagtggatcgaggtccgacccctaaacagcatcaggtccgaacaggcggtggcgttcttcaccaacatcatccatcgctttggggtcccgaactccatcatcaccgacaacggcacccagttcaccggcagaaagttcctggacttctgcgaggatcaccacatccgggtggactgggccaccgtggctcaccccatgacgaatgggcaagtggagcgtgccaacggcttgatcctgcaaggactcaagccgcggatctacaacgacctcaacaagttcggcaagcgatggatgaaggagctccctcggtggtctggagtctga

SEQ ID NO: 4808 - DNA, 207 bp, Zea mays
  Peptide Sequence Number=SeqID_46587
atgatgctcaggggtgctattgtgaatgtcggtgctcctcgatcttactctgcctggaaccttcctccattggctgagtcgagcgacgatgatgatgtggtggatgctggtttagtggatgatgtggaaggtggaggcgtggtgaagacagccaggtatgttgtggaggcaatggaggaggaggagaaggtgctccccttggtctag

SEQ ID NO: 4809 - DNA, 186 bp, Zea mays
  Peptide Sequence Number=SeqID_46588
atggagggtgagactatggatactgttgagaaggctcctatttctgaggcaatgagggagtcgggtattgttgagccaaaggctggggaagaagcaaatgttgcagaaaagggtgttacagtgcttcatcttgagcccctgccgtccaatcgagatgaagtctgccaatgcctaggactgaattga

SEQ ID NO: 4810 - DNA, 177 bp, Zea mays
  Peptide Sequence Number=SeqID_46589
atggcggaggaggtagttatccgtgggggtagacttcaggtgaggcttgcacgcgggtcacatggccaattaatggatgcagggagccctgcctgcccgtccacacgaatcgcaggttttgaatttgaattcaactatgaatataaattttgtgctcaaactaaaggtggatcttaa

SEQ ID NO: 4811 - DNA, 258 bp, Zea mays
  Peptide Sequence Number=SeqID_46590
atggtggtgcacaccggcgaggtccccacacggcgagcaggcgatctaacacggcgcaggacgttgctaacccaaatcgaggtcacgacaaacgcaagggagggctccataacagttgtgaaggcttcgttgatgcctcccacggcgagacaccggttcgacagcagggacgccgggcggcaaggtcgcctgggcgccggtgtggccacacgagcactagtttgtggttacggtgcacgggctttcgaggtactgtag

SEQ ID NO: 4812 - DNA, 237 bp, Zea mays
  Peptide Sequence Number=SeqID_46591
atgaagaagacggcggagcggcttaccggcgttggttgggttccggcgaagggtcggggtattgggcatgcaggaaggcaaagccgacggatgcgtattcttataggcatgggctcgggcacgggcattgggtcgagcgcacggtcgagccgaccggagctcgtggcgtgcgcagcgtggtcagagtgcacccagctgaggtcgaacacgtggaggatcgcttctccccatgtctaa

SEQ ID NO: 4813 - DNA, 303 bp, Zea mays
  Peptide Sequence Number=SeqID_46592
atgggcctattgtttcacaagatcgtccttctgtgggccaggggagaactgctggcagaatgggccgacacagggaatgagcaaacgtgggacaaggcggctcgtaggggcctaaaggaaaaagacttgaaggcaatgaaagaacttggttattttgggggcaaggtcaaggtgcggcttgctggtgatgagacaacctcaaagccgaagagaaaggaggttatggttttcaaaagcttcttccaagccggcctttggctactgatgtatcagatgattgcaaaggttttgcaaaaatattag

SEQ ID NO: 4814 - DNA, 273 bp, Zea mays
  Peptide Sequence Number=SeqID_46593
atggagttcgtgcccacgacgcacatcgaggccatgcccaccccaccccggccatttctagcggcccgcaccccccaatccatgtccctcctccctcattcgagcacacgcagagcaccaacactcacctcgccccacgcctacaacagagaagagccaccgccatccaccatgtttgtgagcccgttctatagtcgccatggagccctcaccatgtccattgcctcgagaaagttgaaagctcttagtccaatccactcgggcttatgttga

SEQ ID NO: 4815 - DNA, 252 bp, Zea mays
  Peptide Sequence Number=SeqID_46594
atggaggagaacctcgggcagaatggaggccactccggcgagcaatacccaccacgatggggaataatccggcgcattgaggccggggaggggttgagcgcagaccgggcagagggattggtggaagggaaaaccaccgaggattctcggtgcacagaagctcaccgtggccgagacgatggcacaactccagcaatgatggtggaacggcaggggaggcgctgtgagctggatgtaatacccaacttgtaa

SEQ ID NO: 4816 - DNA, 336 bp, Zea mays
  Peptide Sequence Number=SeqID_46595
atggggggtaccttatcaagaattgggatgccaacgcttgcagaccacagaggatggtggcacggtggaggtgcccctgcgaagattgctggcccaatcccggacacagcgtcacagagtttaaattttcaagttgggagtgcacaatcaagaaaaagtcagcatgtaaattcagggttgttgggggtatgcttcgtagccgaagatactaaagaaagagaacaccttcggcagatcctatcagaagcagcgccgaagctatcacctataaagcttcggcacagtgacagatctcaagatgaaggggtgaaccgatgtaaagatgaaatgacttaa

SEQ ID NO: 4817 - DNA, 819 bp, Zea mays
  Peptide Sequence Number=SeqID_46596
atggacctaataggttttactattatgcgggtggaccgcctagtcccgggagagggcgagggagaggacaacccgaacggtggcgaacttgatgatgaggctgaaggtcttgccttagtccactttggggcgctgagtgaagccccgaaggatccaacaagctttgtagcgatcgagcgagtcgtcaggggtgagcttgtggtggaagatccacttgccgtgtacactatttttggctgtgccaggttcaatgaaaatgtaatgaacaagccaggttttgtggatgtatatccagcttcacgaataacaaggaatatacagcatcatttcgagtctgtttcccgttttaatactagcaaactgatgaacactgagaagcaaaaaggcctaaggattgtaacagaaccaagaaatctgtcatcagcactaagatggatttctgatgaggaagtcagaaaacaggtatatatcgttgggaactctgaacctcgtgaaaatattggcgttcttaatgaacttatacatgctcgtgatgaacttgcaaagattatgggatgcaaatcttatgctgaatttgctattcgtcctaacatggccgcgtcagccgatgtggttatgtcatttcttgaaaatttgagcaacactgttaagcataaagctgaagaggaatttaagaccatacataatttcaagagaagaacatgtaatgaaaagagtgccgatctagaaccctgggatgaggattacttcattggaatgatgaaatcatctgtatatgacctggacgcttcagtatgtgctaaactggcatctccgtga

SEQ ID NO: 4818 - DNA, 678 bp, Zea mays
  Peptide Sequence Number=SeqID_46597
atggcccaaaggcacatttccctttcagacccgccccgtgcaccgaccacacccgacggcaagcccctgcacgcccgctccacccacgacagagccgagagcctgcagccgcacatgcgaagaccccaagcccacacccagggtgccgtgcaccgcgacctcgctgccgagccgcaaaccgacgcccgagccgtgaccgagcacccgcaccgtccgttatggagtttactgcatccgttttctctccctcccccattactccctctccccattgatggacgccattcatggtgcttgaaacgccgccgcgccctctcatctccccacgccctcgcctataaaatggacgtcgagccctcttctctctccctatcccgagctcgctccctcctctctgttctctctccctcgccgctgctgcacaccatcgtcgctcgtccgttcctcgcctacatgctcttcctacgtgttcctgttgttactgcccacgtcgagatgcaacgtcgccctctgttttccgtcgccgtccagatcccggcgaaccatcgcgctaggaacaccacctcgatcgagcccctgctcgccaccgtgaagttcgcccacgcagcacccggcgaccgtgctcacgccgttctccgtcatctgttcatccctgcgcatgagcaaacccaaggttga

SEQ ID NO: 4819 - DNA, 726 bp, Zea mays
  Peptide Sequence Number=SeqID_46598
atggattgtctccctgctgacttgaattcgaaaggtataaaaccatggttcagggctgggctcgtacctctgaccggaggaggtgtctgggctgttcccgacccaacacctgctctccgaaaaactgcaaggcttaaccatggggatgttgaaactctttttcatgagtttgggcatgcccttcactctctgttgtcaagaacggaatatcagcatttctctggtactagggttgctcttgatgtggctgaaaccccctcaaacctatttgaatattatgcctgggactatcgtgtcttgaagacatttgctctagatgaaacaactggagatgcaataccagaaaagctggtaaaggcactaaatgcttctcggaacatgtttcctgctactgagctccagaggcagatcttctactctataatggacctaaccttgtttggcgagcaatcatccaagcctatggacacgatttccactgttgccgatttgagaaggaagcatacaagtgggaaatacgcagaaggcacacactggcatacacgatttactcatctcgtaacctacggtgctggcagtgccatcagggacaaattcttgcggttcggcgggtcaaaggacccatcatccctgctgaaggattttgcaggtgatgccgtcattagaaactccgggagtggaataatcccgaacgctagttccttgtgcaaagaaattggattgtga

SEQ ID NO: 4820 - DNA, 603 bp, Zea mays
  Peptide Sequence Number=SeqID_46599
atgtcccccgagtcgccgtcagcggcggcatcgcgggagtccactggcctgccactggatggtgctccacgctccagggcaagcaactatcgctggggtctcctggggaagtggccagtgaaagggggaggcgccgcaccacggcagggacggtcgccggggttgccggccaatgccctaaggccggacgccggagccagcggccctgggcctaggcggcgagcaggagggaccgagggagctgggaatgggggaggctggaggggcagagccgtggagggagcttggcgaggaggcggcgcgccggaccaccggagggagctgcggctgctggaggtcggagccggacgggaggatcgaccgggggcatcgggcggcaggccggcagccgatttggcggagttgagggtgccagaaaaaaaaataaggaaaaagtcctacagaagatatgggcctaatctagttatatgggccaggctgggtcatggaccgggtggcctggagtctgaatctaccctggacatgatttcatgtgcccttcgccagtcctgcatcaacagatcaccaaaattcaacttcagcacatgccccctgtttttttga

SEQ ID NO: 4821 - DNA, 420 bp, Zea mays
  Peptide Sequence Number=SeqID_46600
atggcagcgccgcctgggaccacttacgcatctcgtcaggtgtcgttggataatggtgttgtatatgggttgtcgtcgctctacactgtcgctggacgatggagcgtggcgttgccgccatcacattggagagacatggtcggggtcaccttagatgccaccaaaagagactgctgcacctctaagttgtttgcgcagtgtgccggaggtggccgtggtggaggttgtgctgctcgcgaaggcgtcgtggcaatgacacggctgagccaaagtgaccgccgtcacttcgccgctccactgaccgacctgacagaaggacagcgccgcctgcgccactccgactgcgggctcagactcgggctcagccccggaagacggcgaactccgctccgcccgacccagggctcggactcgggctaa

SEQ ID NO: 4822 - DNA, 303 bp, Zea mays
  Peptide Sequence Number=SeqID_46601
atggagaagtgcaggtcggtgccgcacgagcactcgtcggcgtactacggctgcggaggcgggtacgactacgaggacgtcggcggcgggcccgggcaggccggcaagtcgtacagcttcaacgggccgagcggccgggacgacccggaggcgaagcggcggcgccgcgtggcggcgtacaacgtgttcgccacgcagggccggatcaagaccaccgtccgcagcagcgtcaagtggctcaagtccaagttctccgacgctgttggcagcaaagatggatcggatcgatcaagaactgggtga

SEQ ID NO: 4823 - DNA, 2007 bp, Zea mays
  Peptide Sequence Number=SeqID_46602
atggggtgcgcgcaggggaagtcctcgcggggctcgcccgcccgcagcgacggccgcggcgtggaccgcctgaagcgcgacaacgactaccgccccggctccagcgtgtcccgcctctccgacccgctcccggccaccgccgagagcgttccggctccggcagctccgccgaccaaagagcacgcccggcgagccgctgccgtcgtcccaggagggaagacaccggacgacggcaacggcgacgccgcggcacagcaggcgacgacggccgcaacgccggcgaccccgccactgctcccgccacacccgccgcggcgcgaggacgagctggtggacgggtggccgacgtggctcctggacaacgtcccccgcgaggcgctgcagggcatcgtgcccaagagcgccgacgcctacgacaagatcgagaaggtggggcagggcacgtacagcaacgtgtacaaggcgcgggagcgcgggacggggcggatcgtggcgctcaagaaggtgcggttcgacacgtcggagtcggagagcgtgcggttcatggcgagggagatccggttcctgcagcgtctggaccaccccaacgtgatgaagctggagggcatcgccacctcccggatgcaccgcagcatctacctcgtcttcgacttcatgtactccgacctcggcaggctcgtcttgcgctcccaacagcgcctcaccgagccgcagatcaagtgctacatgcagcagctgctcgcggggctgcagcactgccacgagcgcggcatcctgcaccgggacatcaagggctccaacctgctgatcgaccgccacggcgtgctcaagatcggcgacttcggcctcgccaactactacggcgctgggcgccggcacccgctcaccagccgcgtcgtcacgctctggtaccgcgcgcctgagctgctgctgggctccaccagctacggcgtcggcatcgacctctggagcgcggggtgcctcctcgccgagatgttcttcggcaagcccctcatgcccggcagcggcgaggtggatcagctgctgaagatcttcaggctgtgcgggtcgccgccggacgactactggcggaagatgaagctgtccccgtcgttcaagccccccaagccgtacaaggcaacgacgggcgagcggttccgcgacctgccgccatcgtcgctcggcctgctcgccactctcctcgcgctcgacccggccgcgcgcggcaccgccgggcaggccctgcagagcagcttcttcaccacgccgccgatgccgtgcgacctctcgtcgctccccgtcgtgtacaaggaggaggaggaggtcgactcgaggaagccgaggacgaggcagcgctcgcataggcggaaggacggcaacggcaagcggtcggagaccaacagcgggtctcctcctgagaaagaggcgcagcccatgcagccgttggacattaccatttctctgtccggtccaggtttccagcgcttgggtctcggtgcatctccactacgtgcccccctgaatttgttccaggcccagacacgaatggcaatccctgtttctgctattagttccattgctaatgctcgctcacacgtgccccaggaccaggaggatgatgaattaactggcacggcgaactcagtaactgacacgacgcgagaacatgacataggccaaggatcagctgccgctgtgatgactgccgctaaagcctcttctggcgttcacgactcatcatcatcagagaaaaccatcgtcaacggctcatccagcacagtcgcgaagcagctgccgacggcccgccactcgggcagcgacgacgacgatcacgggaacatccacctggttccggctccggacgaggaggaggccgatggcgagccggcgtccggcagcggcgtgaaccgcgtcggcccggagagcaagtcgtctgctttcgtgtcggacttcgaggcggccgccgcggcgctacgcgcgtcggaggaactcccttcttccaattaa

SEQ ID NO: 4824 - DNA, 771 bp, Zea mays
  Peptide Sequence Number=SeqID_46603
atggcttacgtcaacagaactgcatttaaaacgaatcgtcgcgcgacgaagcgcgcaacacagcactgcgcgcggggcgcgaggccggggcacaggctcgggcaggggcatgcgagggcgcagccgaggtcacgactgagggcgtggcgcggggatcggggcgcggccaacggcgcgcggggcacgtggcgtggccgccagcgcgtggctagggcacgggggcgcgcgggctcgccgggacaggggctcactggggccggggagggcgtggcgcgcgaaggggctcgccggggagggccgagccgcggcgcggggagggctagccgggggtgcgagcgcgtggggaggggaggggctcgggtggccgagctcaccggggcgcggggcgcggaggggagggcgcggtgcgagccgccgccgccgggcacggggaggacgcgggaggcgcggggccggggccgggcgcgggacgtggcacggccaagccgccgccacggcgcgcgatggggcaggggagggcgcacggccaggggcgcggcgggcgcggggccggggcgcggctcgctggggaggggctcgtcggcggccagcgcgcagggcgatggggagggggcgcgacggggcgggacccgccagggggcgtgcgcgacgaagaaaggggaggggcgcgtccaggggaagaagaagggagggggaggatggagagagaagggaaggggaaaactcacccccgggaatccaaattccagcgatctcgactccaaaccctag

SEQ ID NO: 4825 - DNA, 102 bp, Zea mays
  Peptide Sequence Number=SeqID_46604
atggcgcgactaccatcattaaaaggccgatgccgaggccacacacgagaccaccaagcggacacacgcgagtacatccggcacccaccatcagccaggtga

SEQ ID NO: 4826 - DNA, 303 bp, Zea mays
  Peptide Sequence Number=SeqID_46605
atggctagaaatggcactaaagggaaagcgaaggtgatcaaggagaagattcccaccaacaatgttgccaagggaggagaaaccatcgactcaagatccgacaaaaggaacaaatgcaagaagaagaagaagaagcggatcaagaagatcgtctactacgacaataactcttcctcttcttcgcacaaagacatcgatgactcctcttcaaagaaaaagacggattataacaaagtgagcggtctaaacaatgctaaagaaagttgggacacattgaagatctttcatgggtcaatgacatga

SEQ ID NO: 4827 - DNA, 348 bp, Zea mays
  Peptide Sequence Number=SeqID_46606
atggacaatgactatgtggaactcgatgtgcataacttggaaacaactgatcgaactggggatgaaggcaagaagaacttcgagggaccgagtgcacgggagaaggtcaagaagaccaaggtacctaaagctaggggtgaagaagatggcttgcaaggagtcaagcaaaagtaccattctaggtcgtgtttgagaagaaacagaaaagctaaggagaggatgagaaagagagtgctatcaggagttgtaaacaaccacgactatggtgtaaccgtcattgacatagtggaagactcggtctatcacttggtgacaagcctgagcaaacagaggaatgacttgaaatag

SEQ ID NO: 4828 - DNA, 1029 bp, Zea mays
  Peptide Sequence Number=SeqID_46607
atgcgggcctccgtcgaggaggcgggcgcgctcctggcgcggagcgactcagccggccgccgccgccgctccccgccgccggtgcagaccgcgtccccgaggcccggtagcctcaggcgccagtcgtcgtcgttccgcgaggacgtcgggcacgccgcctccgagacttacctcgtctcgcgcctcaccttcaccctcctccagtacctcgggttaggttaccgatggatgtcacaacttctttcactcacaatctatgcaattgtacttatgccaggatttatacaagttggatattactatttcttttcgagccaagtgcgtagaagtgtagtctatggagaccaacccagaaacaggttggatctatacataccagaagataatagtaggccctgtccagtggtggcctttgtgactggtggagcatggattattggaaatttcccacaaggtacaataggggacatggttcatgatgcttctcaggggatttcttttgtgtgcaacaacatcgccagccatggaggagatcctaatcagatctacttgataggtcagtcagcaggtgcacatattgcagcgtgtgccctcatggagcaagcagtaaaagaatctggtgggaatcctgtttcttggagtcttacccaaatcaaagcatacttcggtttatctggaggatacaatatgcataatttggttgaccatttccacgagcgtggtcttaatcgctcaatattcctcagcataatggaaggagaggaatcattgtcacgttattctcctgaaattgttgcaaagacgtcaagtgctgaaaccatagctcttctgcctcttgttgttcttatgcatggaactgaagattattcaataccatcatcttccagatggactcatgaagctatgcaccaagctgaggcaggattaggtcaaacttttgttgacgtcctccaacaagctggtgctcaagcaaggttactattgtacgaagggaaaacacatacagatatctttgtacagttggattaa

SEQ ID NO: 4829 - DNA, 147 bp, Zea mays
  Peptide Sequence Number=SeqID_46608
atggagtacaagctggaatcttgcagcattcaagctcacaaaggtgacaacgttataatggactaccccggaaaaattactgatggaacagttttaaattcaagctatgaaagagggaatacatacttggagttggagcaaacctga

SEQ ID NO: 4830 - DNA, 477 bp, Zea mays
  Peptide Sequence Number=SeqID_46609
atgtccggtgcaccaggggactccaactccaactcgtcaccttcgggaaaatccagaggcaactccactataattcaccggactgtccggtgtacaccggacagtgtccggtgctccaagggagagcggccttcggaactcgcccgcctcgggaattcgcttcggctgctccgctataattcaccggacatatccggtgtacaccggattgtccggtgtatctgcggggcaacggctatttcggcgccaacggctacctgcagcgcatttattgcgcgccagcgcgcgcagaggtcaggcacgcccatgctggcgcaccagacactctacagtacatgtccggtgcgccaccggacatccaggcgggcccagaagatagagctccaacggtcggaacccaacaactttggtgacgtggctggcgcaccggactgtcccggtgcaccatacgacagccagcctgcaccaaacggctag

SEQ ID NO: 4831 - DNA, 1203 bp, Zea mays
  Peptide Sequence Number=SeqID_46610
atggatcccgtcgaccaaggggcgccacaccccaaacagcgccgccgcagctccaaatccccctcaactgcgccgccgcaaccacagcagcgccgccgtacctccttgcttgctgccctagatgcgatagggagagtagaacctggcaccttcgatagtcgacagagcacaccatcggcatctgtacatcgatctactgtgggcagcgctgatccctcgacggtgatgcctgattacagggaaactgcggggcatcctttggcggcagattttaaccgtttcctcactgtcctccataaagtacctcctatcagctgtcacgctttacttccgtgtgtgcttcatgctcatgctagaatattagtaaaattgcttgactggggcgaagatggccatagatcagaacaagaaattggtgcactaagagcagcgtttgcacaagaggtcgctgtctggcataagcttgagcatccaaacgttactaagtttattggggctataatgggcgcaagagatttaaatatacaaacggaacatggacagcttggcatgccaagcaatatttgctgtgttgttgttgagtaccttgctggaggtgcgctgaaaaattttctgataaagaacaggagaaggaaacttgcctttaaagttgtggtccaaatagctcttgaccttgccaggggattatgctacctccactcaaagaaaatagtgcaccgtgatgtcaagactgaaaacatgcttctggacaagacgagaacggtaaagatcgctgattttggtgttgctcgagtcgaggcttcaaatcctagcgatatgacgggagaaacagggacgcttggttacatggctcctgaggttctcaatggccatgcttacaacaggaagtgtgacgtgtacagctttgggatctgcctgtgggagatatactgctgtgacatgccgtaccctgatctcagtttttctgaggtcacctctgccgtcgttcgccagaatctgaggcctgagataccgcgctgctgcccgagctcgctagcgaatgtgatgaagcgatgctgggacgcgaacccggacaagcgtcccgagatggcggaggtggtgtccatgctggaggcgatcgacacgtccaagggtggcggcatgatccctaaggaccagacgcagggctgcctctcgtgcttccgccagtaccgaggtccctaa

SEQ ID NO: 4832 - DNA, 774 bp, Zea mays
  Peptide Sequence Number=SeqID_46611
atgtcctcccatccactggtatataagacccggtccagccgaaccaaggttggggaagaccgttcattcgaccaggaaaaaagctgtccaacagatatctgcaatgagcaaagtacactttgttcttggagatcaaattacttggcatgctttcaggcaagaatagctctggagaggcgtaaatttcttaaaaatgcaaacatagctgttcagaggcaaatgacatggtcaaatttggcccatgagatgacagctgagttccgaagtctatgtgctgaagaggcttatttgcaacaagagttagagaaactacaagatatgagaaacaaagcaaaactggaaggcgaactctgggacgaacggctctcaggctcatctgggcagaactctcatttggtttctaaggcaactcgtctttgggaatcaatattggctcgcaaaggccagcacgaggttttagcttctggaccaattgaagatcttatagcacatcgggagcacagataccggatatcaggatcacagttactagcagcaatggatatgagttcaagtgttccacattctgagttactatcatctaaagctggtgaaacttctataattttggagaagcaggaagaattttctcagctattccaagaaaaggaagaagcccttacaaggtcagatgataggaatggacgtactcagcaaactgttgatgtagctgaaattcttcgccgctggacccatgctttacaacgtattcataaacaatctcttcatttgtga

SEQ ID NO: 4833 - DNA, 345 bp, Zea mays
  Peptide Sequence Number=SeqID_46612
atggcggcggatcgggagaaggagcgcgaggcggagctggagggcgccatgtacactaactgcctactcctcggcctcgatcccgcggtcctcggctctccctcttcccccgccggccgcgtgggcctatttcgtcactccaacccccgccttggcgagcaactcctctacttccttctctcctcgctccgcggccccgcgcagtccgcgaaggcaatccgctggctcttccgaattttcggttcccttgattttgacaaggtctggccaatcttcgactccgctcagtccagggagttcaggaaggtgggatttctgcagtttgtttcacatttctttgtttaa

SEQ ID NO: 4834 - DNA, 294 bp, Zea mays
  Peptide Sequence Number=SeqID_46613
atggaggaacaatcaaagatcctttgcgagttcagtgaccgccttgcggcccaggaagcgcggtggcgtggtcaggagtccataattgaagcactgaaatctcatatcgtttcctctgatcgatgcttgtctgaactatcatcgggcctccgcattgacatggaagcacatttgacggggtcagatgtccacacgggcacgaggctatgtcagattgaggaggatgcaggtgctcgcgtcgccacggacgtctctgcaccaaccctggctcctgttgtcaatgccgacaactag

SEQ ID NO: 4835 - DNA, 453 bp, Zea mays
  Peptide Sequence Number=SeqID_46614
atggaagaaaggatggcagggcttaccggcgtcggtctagtttcggcgaagtggtctcgaagctcgacggtggaggtgttctggctagttggcgtcggtaggactcgattcccttggcggacaagctcctcaggtggtgggaagatgattccccaaaggaatttggctagggttggctatggaagcgggtctacactcaccggcgctcgggtgtggtccggcaagcagtggcgcaactctggcgaggcgtgggttcatgggggctcagagaagttatctgagtgtcggtgtggggtggaacatggtccaggtggtttggtcacggtggccggtgttcgaaggcgatggcggggcgcgctgagctcgccagagttggcaaggtctcaggcgggcaagggagtggccgaccgcgggtgccggggcacgcgcacacgtgggttgggcgcgctctag

SEQ ID NO: 4836 - DNA, 507 bp, Zea mays
  Peptide Sequence Number=SeqID_46615
atggagagcgagggcaggaggttagggaagggagcaatggctgacaagcggggtccgcagaccagcgagggtgagcgggcgaatgggcagtcagcgctgatagggaggtcccaccgagcaacgagcgagaacgagcgcatgcgcggacggatcagcgccgacagagaagaaattttatacccccaaatacagggtgttacagagaaccacacatgctcccacgagccccctcctttcccatctctggtcccaattcttctggtccatcttctctcggtggcccatgctcaaccgcggccactcctcaaccacctacaagggctgagcagaagatactgccacccccatagaaacaggagaggagatgagtggggagactccatagctcaaagacgaatgctacgagatgcgggagaggtctcgaacccactaggtcatgcggtagggacttctcagcagccatccgatgagaccattgattcgtttcaacatcggacgtcaccctga

SEQ ID NO: 4837 - DNA, 501 bp, Zea mays
  Peptide Sequence Number=SeqID_46616
atgtccagtatgttgatacgcgatgggaagtacccgtggttcttccacttcatgattgcctggcccaagagcttaacttgctctgtgaaattgataggtaaggaagagaactcttctcgagagcataccattttaagaactgctcaaaagcttaagccattctcgtttaacaagttctcagcaaacggctaccatgatttcctgccatcgcggcttcgtcccaagtttcagaacattgatgccaacgagtgtactttctctgagattctttgcctaatatgtggaagcccgttcagtgaatcagagctcctgaatttggaaaacacaaagctcaaggctcagaagaaaattgatctttatactgcccattgttgtcaaagttgccatttccagattctcccagcagctacagatatgtatggacatttcttttcgctactaccgaagttttggactgagaaagtggacgctgcatctgccagccatagctcactaaggtga

SEQ ID NO: 4838 - DNA, 471 bp, Zea mays
  Peptide Sequence Number=SeqID_46617
atgtcccaccccctagcatccgagcacatcgtcgacctcaccacctccctaggtgcgatcgcctccttggccgacctgcacgccgccctggacgtgcgccccaccttcgtcggctcgctccttctcccccacggctcgtcgaccctgagcgaacttgctgttgggggggacatcgtcgtcctcaggctcctccccaatgcctctcctacgtccttcgcgacacaacagcgtcgaggttccccgcagggcttccccaccctcgttgctcctacgtggatcgacgtcgtcgcttcctcgtcgactcctctgccagcttcctcgttgttggttatagctatcgccaccgtccagacggtcgtcgctttctcgtgggaccatgagcacgtcgcgactctcgccttggagcatgagcacaccatgggcactgccttgaccatccagatgccgccacctagaagtgcaacatgttaa

SEQ ID NO: 4839 - DNA, 192 bp, Zea mays
  Peptide Sequence Number=SeqID_46618
atgtcgcgctctgtgggccatgagccaagggcggtcgacgccgatgaagcggtcgcaccaccactcgtcgagcttcttagtccaggctccttgtctcctctccctttccctcaggcctcttcagggtgctgtgacgcttctcgcgtggcactggaggccaccgaggtcgaggctgagctacttcgcacctag

SEQ ID NO: 4840 - DNA, 702 bp, Zea mays
  Peptide Sequence Number=SeqID_46619
atgggcgaggaggccagctgcgacgccgtcagcctgacggaggccggcaccaacgccaagccggtgggcaaggaggtcggccgcgagccggctgcagcccccgccgccgcggccgacccccggctgcagggcatttccgacgccatccgcgtcgtgccgcacttccccaagcaaggcatcatgttcaacgacatcaccacgctgctgctgcgccccagggtgttcaaggacgccgtcgacctgttcgtcgagcggtaccgcgggatgggcatcgacgccgtcgccgggattgaggccaggggcttcgtgttcggcccggcgatcgcgctggctattggcgctaagttcatacctctgcgcaagccaaggaagctcccagaatcatgtgctgacaccggctctcggaaacaattattattattattattggaaggtgaggtgatctccgagaagtacgttctcgagtacgggactgattgcctggagatgcgtgtcggggccatcgagcgatccggcgagcgggtgctggtcatcgacgacctggttgcgaccggagggacactctgtgctgcgatcaggcttctagaacgtgctggagccgatgtggtcgagtgcgcgtgtgtcattgggctcccgaaattcaaggatttgtacaagttgaatggaaaacctgtatacgtgctggttgagtctcgtgaataa

SEQ ID NO: 4841 - DNA, 1015 bp, Zea mays
  Peptide Sequence Number=SeqID_46620
atggcgcgatcccgctgcccggcaggttcgccggtcggcggcatgatcctgttctacgaccagccgcaggtggtcaccaacgcgatcgtgcacaccggccagccctccgaggtgcgggcgctgctcgaggacggtgtgctgaccgtcagcgtccgcgaccagggcgtcggctacacctcgggcccggtggacagcgacccgctccgcgtgcacggccgcggcctcgagctggtcgacgccctcaccgcccgctggggctcggaggtcgaccaggtgggcatgacggtctggttcgtgttcgagcaggacgaggctgccgcggagctgaagtgcgtcgcggaggcacgccaggcggtggagaccgtggcgttcgatgcctcgcagcgggccgcgcaggccgcggccgggcagaggcgggagcggctgggccgtggggtggcggcgcaggtggcgctggcccggcgggtctcaccgaaccgtggcggcaagctggtggggctggcgaaggtcctcgagcgggagatgccgcacacgatggcggcctggcgggcgggccggatcaccgagtggcgggcgagcctgctggctcgggagaccgcgatgctggcgcgcgaggagcgcgccgaggtcgacaccgcgctggccgccgaccccgcccggctcgaggcgatgggggaccgggagctcgctggggtcgcggcctcgatggccgcccggctcgaccccgcctcggtcgccaagcggcgccgcaaggccgaggaggagcggacggtcaccctgcgacccgcccccgacaccatgacctacctgaccgcgctgctgccggtcgcccacggggtcgcggtccacgccgcgctcgtccaggacgccgccgcgaagcgcgccgccggagacgtccgcacccaggggcaggtcatggccgacaccctggtcgaacgcaccaccggccagagcaccgccgccgcggtcccggccgccgtcaccgtcgtgctgtcggactccgcgctgctggccg

SEQ ID NO: 4842 - DNA, 330 bp, Zea mays
  Peptide Sequence Number=SeqID_46621
atgacggcgctgcaggggtctcgcatccggcacctcgtggtcttcacgctgcgacacgacgaggacacccccgaggcggagtcgttcctggccgcgctccggtccctcgccgccctcgacggggtcgaggagctcgacgtggtgcgtcaggtcggccgcaagaacgactaccggctcgcggtgacgatggagttcgcgagccgcgcggcctacgacgcctacaacgcccaccccgcccacgtcgccttcgtccgcgaccgctgggacgtcgacgtcgcggacttcctggagatcgacctcgccgcgctgcgtcccgacgacgccggctag

SEQ ID NO: 4843 - DNA, 264 bp, Zea mays
  Peptide Sequence Number=SeqID_46622
atgtcgttctccctcggcccccacgcggccaacgtcggcgggcaggtaccgctgtcccaggtggtcgacgcgcaccgggactgcctcgacccgcggttcgacgaggagttcgaggccgccgacctccactggctcgtgccctacctggtccggctcctggccggcgaggacgtgacggaggagatcatcgtcgcgcaccgcgaacagcgcggccgcgctcccggatggatggagcagcaccgcttcggcgagacgaatctctag

SEQ ID NO: 4844 - DNA, 465 bp, Zea mays
  Peptide Sequence Number=SeqID_46623
atgccgctgccgtgtgggcctccccgcggtgagccaggtttctctctcgcatataccgtctcgggccagtgggactacctgtcaatgaagtttgggtcgtcgcttctcagactggccgctggcgggtgggggccaatacgcagacgcctcaacaacctgaccgtactcgccgccgcgttctcctcgcgccgccgcgatagttccgatttacccgaacctgccctccccataaaagttgtggcgcagggcgcccaccgatttgattcaccagaagcaatcccacgccaacgtagccaccgggggttaatcgggtggaaggccgctgttgacctgggaattgctcatcgtggttggagaaagccgtgggtgacgcgaattgcgtcgaagctaggtgccaccgcccccaatttgagatctgtagcaggatacccattcgtgggtgtgatctgggcgatcgggggctag

SEQ ID NO: 4845 - DNA, 411 bp, Zea mays
  Peptide Sequence Number=SeqID_46624
atggccggagccggcgactccacgcaggcgaagaaggcacgaggcggttgcagttggctggggggtctcggttcgacggcacggtaccgataccggcgatcaccggcgactaatcgacgggacagagaaaacaggggggggaagaaaaagaggtccggcggggaaattcaccttgggtggggcgagaacgatggtgaggctatgcctgacggtggtagagcacggtcggggacggtggccgagctctaccgacggcggattcgggcgcaggaggcctggcgacggggaagctccggcgagcttgaagaatgggtgcgcgtagctcgggtacggtttgcaaacagttcattcacggcagagggagcatcgcagaggcagcttcttccggcggcgttctgcgcgggcgcataa

SEQ ID NO: 4846 - DNA, 1923 bp, Zea mays
  Peptide Sequence Number=SeqID_46625
atgccggagccatcaaccactgagggtcggcgaatccaaggagagctcaagaatctcctggaaggcgctgcggcccgacgggccgagagcactgcctcccgaaggcagggatacccctcggaacctcacgccgcgacttcccgattcatgcgggaagcctcggtctacaccgggcgcacgcgcaacaccgcgcctgcggccccgggccacctcggcaacgagcaccaccgtcgtgaccgtcgggcccacctcgacgaaagggtgcaccgaggataccaccccaggcgtggggggcgctacgacagtggggaggatcagagtccctcgcccgaaccgcccggtccgcaggccttcagtcgggccatccgacgggcgccattcccgacccggttccgacccccgactactatcacgaagtactcgggggaaacgagaccggaactgtggctcgcggactaccgcctggcctgccaactgggtggaacggacgacgacaacctcatcatccgtaaccttccccctgttcctctccgagctgctcgcgcctgggtggagcacctgcctccgggctgccggcaacagccgggagagtctctccgggactacatccggcgattctcgaagcagcgcaccgagctgcccaacatcaccgactcggatgtcatcggcgcgttccttgccggcaccacctgccgcgacctggtgagtaagttgggtcgcaagacccccaccagggcgagcgagctgatggacatcgccaccaagttcgcctctggccaggaggcggtcgaggctatcttccgaaaggacaagcagccccagggccgcccatcggaagaggctcccgaggcgtctactccgcgcggcgccaagaagaatggcaagaagaagtcgcaatcgaaacgcgacgccgccgacgcggaccttgtcgccgccgccgagtacaagaaccctcggaagccccctggaggtgctaacctcttcgacaagatgctcaaggagccgtgcccctaccatcaggggcccgtcaagcacaccctcgaggagtgtgtcatgcttcggcgccacttccacagggccgggccacccgcagagggtggcagggcccacgacgacgacaagaaggaagatcaccaagcaggagagtaccccgaggtccgcgactgcttcatgatctacggtgggcatgtggcgaatgcctcggctcggcatcgcaagcaagagcgccgggaggtctgctcggtgaaggtggcggcgccagtctacctagactggtccgacaagcccatcaccttcggccaggctgaccaccccgaccacgtgccgagcccggggaaatacccgctcgtcgtcgaccccatcgtcggcaacgtcaggctcaccaaggtcctgatggatgggggcagctgcctcaacatcatctacgccgagaccctcaggctcctgcgcgtcgatctgtcctccgtccgagcaggcgctgcgcccttccacgggatcatccctgggaagcgcgtccagcccctcggacgactcgaccttcccgtctgcttcagaacaccctccaacttccgaagggagaccttgacgttcgaggtggtcgggttccgagggacctaccacgcggtactggggagaccatgctacgcgaagttcatggccgtccccaactacacctacctgaagctcaagatgccgggccccaacggggtcatcaccgtcggccccacgtacaaacacgcgttcgaatgcgacgtggagtgcgtggagtacgccgaggccctcgccgagtccgaggccctcatcgccgacctggagaacctctccaaagaggtgccagacgtgaagcgtcatgccggcaacttcgagccagcggagacggttaaggctgtccctctcgaccccagtggcgacacctccaagtag

SEQ ID NO: 4847 - DNA, 2004 bp, Zea mays
  Peptide Sequence Number=SeqID_46626
atggaaataaaatttatgcctcactttcacatagactgcgttcagggattgccactatggcgtgaaagtgcatcagttgtaaatgatgaactctttaagggttacagacaaaatggtggaggtagtggaggtggaaagacaaatgaatttgttgcaggttatgattttctaaatacaaatacgaatggtcttgaaatgaatatttggtacaactctacctataacaacaacactgcatacgtacctatttcattactacgagttccacgcttggttaatgcggcatcaaatgagtacattaaatttctcaaaggaagtggagtggaaatgtttctgcaatatgttaaagagatgcccaaagtaggaacaaagttgaaatttgacctctcttctcttcttggtgcactgttcttcacatggatcgttgaactactgtttccagtcatattaacatatctcgtgtatgagaagcaacagaagctgaaaattatgatgaagatgcatggtctgaaggatggtccttattggcttatctcatatgcttacttttttgctctctccgctacctacatgatattgtttgtgatttttggctcactgattggtctagatttctttaggaaaaatgcctatagcattcaatttgtcttctacttcatctacataaacttgcagatttcacttgcatttttggtatcttccttcttttcttctgtcaaaatagccacagttgttggttacatctatgtatttggctctggcttgttaggggaatttctccttcgcttttttgttgaggatactggttttccaaagggttgggtggtcgtaatggagatcattcctggattttcattgtaccgaggattatacgagtttggtcaatacgcatctgctggaaactcaatggggaccactggtatgaaatggagtaatctagatgactctcttaatggaatgcgtgttgtcttgattattatggttgtggaatgggcaatagttctccccttggcattttatgtggatcaagtctcgccactggggggtggattcaggaaaaatccctttttcttcttgggctgctttaagaagagtcctctatcattgcggagatatagctttgggagacaaggatctaaagtagtcgttgaaatggacaatcctgatgctgttcaagaaagggaggtggttgaacaacttctgctggaacccattgcaaaccaagcgatcctctctgataacctcaaaaaggtttaccatggtaaagatggaaaccctgacaaacttgctgtccgagggttgtctcttgccataccaaaaggccagtgttttggaatgcttggtccgaatggagctgggaaaacatccttcatcagtatggctgttgatgactctctgaagagtgttaatctgtttcatggtggcgttggtgataagcaagtgggaaagtacagtgggggcatgaaacgaaggcttagtgttgccatttcattaatcggggatcccaaagtagttttcatggacgagccaagcaccggactagatccagcatcaagaaacaatctgtggtgtgtcgtgaaggaggcaaagaaaaaccgtgccatcattcttacaacgcactcgatggaggaggcggaagtactatgtgatagacttggtattttcgtcgatggtggtttccaatgccttggtaacccaaaagagctgaaagctagatatggcggcacctacgtactaacaatgacaacaccttcggagaatgagcaggaggtcgaacagcttgttcaccgcctatcaccgaatgcgagcaggatataccatatttcaggaacccagaaattcgagctgccaaagcaggaggtgaaggttgcagacgtattccatgccgtcgagagtgcgaaacgccggttcagcatctatgcttggggcctggtcgacaccaccttggaggatgtctttattaaggtcgccaagggagcacaagcattcagtgttgttgcgtaa

SEQ ID NO: 4848 - DNA, 963 bp, Zea mays
  Peptide Sequence Number=SeqID_46627
atggacgcgccggcccccacgaggggccccgcgagcttcctcactcaggccaacgccctcctccgcaagaacctctgcttccagaagcggaacctgaagaccaacatcggcatcacgctcttcccggtgctcctctgcgtcattctcgtcgtgctccagggcgtcatcgaccgcgagctcgacaagcccaagtaccgctgcggctgcgtatgcgtcgacccgggcccggccgcggtcggggacgcgtgccgccggacggagtgcggcgtccagcactccaccctcgaccaggtcgggagctgcccgatccccaacccgaccccgtggccggcgctggtgcaggtgccgcggcccgagtcacgcgccgtcaggaccgccggccagccgttcgacggcttgcctgacccgacctgccgggacaccggctcctgccccgctgccgtcctcgtcaccggcagcaaccgctcgctagctcaaagtctttcggttggactatttcctgcttcgacttcctccttgaatttgacggattatctggatgcactatccaagatcgttgctggatcggacacgtggccgtggacaacagagttaatagagtcagcgtttatcccagggaataacttgtatctggtgcaacctcggtgtttgtccaacctaacgcagacagtttcatccaatgccggggccatacctcttcagctcagcgtcaacacctatatacttagtacgctcatgtttgaccggatcaagagcaatactaatagcacatgtactgtcagacaaaagaggagtcatcgtagaaaaacgaacactaaaatcctcaagcaaccaccattaccaagtaacctatatagtcacaagcgccgtagcacacaactcggcctctgcactcgaataagaaatggctacatgcttcttagtcttccaagcaacgcgggaaccattaagaaaagcaaatag

SEQ ID NO: 4849 - DNA, 870 bp, Zea mays
  Peptide Sequence Number=SeqID_46628
atgacgacggcggttctcagccccctacggaagcaaggagacgtcagcaagggtaatgatgacgcctcctgtgacgtggtcggtccgagccctgggttgggcgaggtggaggctcctccgaggtcgaggtcgagtctgtcttccaaggccgaggtcgagtccgagcccctgggtcaggcgaggcggagaccgtcggctgaggtcagggctgagtccgagccctggggtcgggcgaagcggagttcgtcgtcttccgaggctgagcccgagtccgagccctggggtcgggcgaagcggagttcgtcgtcttccgaggctgagcccgagtccgagccctggggtcgggcgaagcggagttcgtcgtcttccggggctgagcccgagtccgagccctggggtcgggcgaagcggagttcgttgtcttccggggctgagcccgagtccgagccttggggtcgggcgaagcggagttcgtcgtcttctggggctgagcccgagtccgagccctggggtcgggcgaagcggagttcgtcgtcttccgaggctaagcccgagtccgagccctggggtcaggcgaagtggagttcgttgtcttctggggctgagcccgagtctgagccctggggtcgggcgaaacggagttcatcgtcttccggggctgagcccaagtccgagccctggggtcgggcaaagcggagtttcctatggcgcctgaggccggacatggctactgttagcctcactttgtcgagtggcacagcagtcagagcggcgcaggcggcactgtcctcttgtcaggccggtcagtggagcggcgaagtgactacggtcacttcggctctgtcaactggagggcgcgcgtcaggataa

SEQ ID NO: 4850 - DNA, 296 bp, Zea mays
  Peptide Sequence Number=SeqID_46629
ggaagggagagaaaagtgagtgccaccgcggggacgagggaaactcgactcaccacctatcgctccttggagttgtgtcctggggattctccgggcttggaggaggaaggttgaagcagctcttccggggattcgtgttcacgttgtgggaattcctcgccaccaggaactaccctgccgtggaccgcgggtccgcgtggccaagactgtcctcgctgctagccttgattttggcgcggcccggcgatggcgccgccgtggctggtgactgctccggcgactggctgacgcagtga

SEQ ID NO: 4851 - DNA, 1343 bp, Zea mays
  Peptide Sequence Number=SeqID_46630
atggtggtgatatcgggaaatctcaggcgctcgtggctgagtcatgggtcccgactgtcagcgttggccacaaaacacgcgggcgcgggcggctgcggacctgcggtgtcgagcgtgcgcgtgcgacgtgtgaggctgtgcgttaacaggtgctccgaggcaggttttcagagcctctgccccatcattgccgccgagaaggtctcgggccgcatcttctacgcccgcatggagattctgctcgtcggtggggagatcgtggtggatggccataaccccactgtcgctgccattgacgacaccaagcttcgatgtcgcgtgcgctcctttaccaggcctaccgcagggaacatcttctatctcggatctctcgccccagcaatgagcatcgacaagacctcgccgagactcccagctacctcggtatgtgatgccaaccacctcctcgctcgacacctgaacaatgagatgattatgtgcgtcggtgcagagacttgtgtagatggtcgcagccctaggtttgctgccaacaacgacgacgagtttctaggtctcctccccgccgagagtcaccgcgtgcgctccgcctacacggccaccaataacgacaccgaccatcgacctttccacgctggccctatttgccggctgcagcatcccttccgcatcatcgctgccgagaagctccccggccttatcttctatgcccgccccactgctgctgccattgacgacaccaagcttcgatgtcgcgtgcgctcctttaccaggcctatcgcagggaacatcttctatcttggatctctcgccccaacaatgagcatcgacaagacctcgctgagacacctagctacctacgagacttgtgtagatggtcgtagccccaggtttgctgccaacaacgacgacgagtttctaggtctcctccccgccgagagtagccacgtgcgctctgcctacacggccaccgataacgacaccgaccatcgacgtttccacgctggccctatttgcctgcttcagcatcccttccgcatcatcgccgtcgagaagctccccggccttatcttctatgcccaccgcagccccagcaatgagcatcgacaagacctcaccgagactcccagctacctcgatggccgcaaccccaggtttgctgccaacaacgacgacgagtttctaggtctcttccccgccgagagtcaccacgtgcgctccgcctacacggccaccgataatgacaccgaccatcgacatttccacgctggccctctttgcctgctgcagcatcccttccgcatcatcgccgccgagaagctccgcggccttatcttctatgccca

SEQ ID NO: 4852 - DNA, 366 bp, Zea mays
  Peptide Sequence Number=SeqID_46631
atggcggtcagacgagggaatcttaagtgcttaaggaaaaatgcacgtgcaaagactcaggcgctaccttcgcccgcacaggccggggcgaagaccatcaaggactccggagatcgaacaatcaggaccacgaagaccatgcattcatcaaatgatttactactctcccaccgtttgagcttgcctgaccgcaagttaacaagttccaacatttggcggccatcattcgtgctacgacaaagcattcccgcgatggcccccaatagaccgaattcaaaggccgctattttcatcgatgatgcagcgaaggcagaacttctggcagagaagaaaggcaaggatcccattgcagacgccatcccttag

SEQ ID NO: 4853 - DNA, 228 bp, Zea mays
  Peptide Sequence Number=SeqID_46632
atggcggagagcatccgagaggagccgaaagcggggcactacttgctcgtggagaaggctaccgactctctaaggagttactcgaccaagatgcttgggcctcgggcactccacggcagcagcggtgccctctacagcgccctctacgcgccggtccccttctctctccccaaatctagcgtgtcactgttcatcaccctaaacactgtgctgtgggtccacgagtaa

SEQ ID NO: 4854 - DNA, 609 bp, Zea mays
  Peptide Sequence Number=SeqID_46633
atgaaggtgcagtgcgacgtgtgcgcggccgaggcggcgtctgtgttctgctgcgccgtcgaggccgcgctgtgcgaggcgtgcgaccgccgcgtgcaccgcgccaacaagctcgccggcaagcaccgccggctctcgctgctcagcccggcggcgccgtcctcgtcggcgcagcagacaccgccgcctccgctctgcgacatctgccaggagaagcgcgggctcctgttctgcaaggaggaccgggcgatcctgtgccccgactgcgacgtgccgcccgccgcgcgcccgccgccgtcggaggaggacgagaacgacagcagcagcagcagcatctccgagtacctgaccaagacgctgcccgggtggcatgtcgaggacttcctggtggacgagaccgccgccgcaactgccattggcgtctccgcagacgtgtcgtatcaggcgggagggctagctcggacaggcggcccgcaggacggctactactccgcgtggatggcgccggagcagatcttctgcgagggcaagggcagcaggatgccgcagatggcgatgtgcagcagcagcaagagacccagagccacgtcctcctattcttactggtga

SEQ ID NO: 4855 - DNA, 222 bp, Zea mays
  Peptide Sequence Number=SeqID_46634
atggggaagacaaacacccaggcgaaggcccaagcgcaggtaagtatcgaggccgaggacatcgccagccacgacttgaaggccctcagcgcgagctattcttcacaagcgaaggaaaccaagacgaatgggatcactggaattttcggatttgtcaagatcaggctcagcttctttctgctgcaggagttcctttatagttgtcgtctgatctgggtttga

SEQ ID NO: 4856 - DNA, 165 bp, Zea mays
  Peptide Sequence Number=SeqID_46635
atgaaagtggtggcagccaagatgaaagtggtggtggccgcatcaaaggagaaggtgcaacaagacgaaccgaaagctgctatctcagatgtgaaatgtgacaacccaaaagaggagggcaatgtgcagcaaaccaaaagttgttgcctcagatgtgaaatgtga

SEQ ID NO: 4857 - DNA, 218 bp, Zea mays
  Peptide Sequence Number=SeqID_46636
agcgcttccgcgcgcttagccattcaatttgtggcgcggcgctatatgtcggtgacctcaaccggggtgccacccgtgtgtcttacgcgtgcggccttgatctcgggcccgtccccaaccaccctgccctccttcgcgggggcgttgtgaacctagtccccctcgatccccggaagagcccgttgctgaggatcctggtgagcagcaggttgaagtag

SEQ ID NO: 4858 - DNA, 450 bp, Zea mays
  Peptide Sequence Number=SeqID_46637
atggggagcgccatcagcgaccaccacatccgcgacctcgcccaccctgctgcggcatctgagccatcaccgcccttccccaaaacctgcgccaccatcccgccttcaacaccgcccgagtcatcttcgcccatctcccatcgacgcagcgcgtggtgttacttaaagaccatgtcacctggcatcacaatctcccccaacacagatattcgctgccaatccccatccggtacatctctccccatcctcaggcggcggcgctctccaatccagcaagttgcggcgacgctctccaatctagcaagttgcaacgccaatcctcatccagacgacctcgaccacccatgcgttcttctccgggccgaggacgacgacattgaggagggcgagatcaccgacaacgcctgcgctcttgcctcgcccgccacgaaccctctcgagcactcctag

SEQ ID NO: 4859 - DNA, 615 bp, Zea mays
  Peptide Sequence Number=SeqID_46638
atggcacctggttgctgttgcaggaaaagggttgacaaggatctgatacacactgttgtcctatattccgctaggaagcttttgctcggccgaaagttcagtaagcaacaacacgagcagagccttaagtggcaatctcgcatgcagttgcaggcaaaaagatccacccacctacccattttcttttccctgcaacaacccagaaaaaaacatgtatccgagaagagcaagaatctggagagaatgaacgcaccccccataattcctcggtggtggagaaggtgtgtatggggcggatggagctccccaggtggcctgcttggacttgctctacgagttgtcgaaccagaaggtctaggagtgctcgagagggttcgtggcgggcgaggcaagagcgcaggcgttgtcggtgatctcgccctcctcaatgtcgtcgtcctcggcccggagaagaacgcatgggtggtcgaggtcgtctgcagtggtggccttgatgctcccagatcccatcgcaggcggagcggggttgcatatggatgggggatgacaccggggatggggcacaaagcgaggttgcgcgcgaggtggaggcctacacttagacatctaagttga

SEQ ID NO: 4860 - DNA, 369 bp, Zea mays
  Peptide Sequence Number=SeqID_46639
atgggaggacacgccttccatggacgacagagtcgcggagattgggatgtcacggacacgccttacatggagaactggggcggcgatctgcggcgcggtcgcggggtagagtggaccttccacaacgacctcggccttgtcttcgtcgccgcataccagaagatactccacctcctctacgtcgatgacctcctcgccgccgtccgcagggagttctcccacatctacgaccccaagcgcacctcctacgatgactttggggacatcttccgccagctccaccgcgaggccgaggtgcgcgccgaggaaatgaagaagtccaccgcgaggccgaggcacgcgccttccatggagagtgggggcggctga

SEQ ID NO: 4861 - DNA, 1611 bp, Zea mays
  Peptide Sequence Number=SeqID_46640
atgcagtatttagtcgcccgcatgcagctgaggccatgcacaggattacaggaagcagtcatgcaagtcctcctgcagttgctcccgttggttctctcggcggcggcggccatcctgatcgcctggcgtgcaacgccgccggtcgtcaaagcacgcctggccgccctccagtccggcatagcacgtgcgcgtaagccaataatgttggtcaccgacttcgccacagcgcaccacctgctcgtgcggggcagcagcgccggctccttctccaaccgcccgccgtccatggcacccagcgccgtcctctcgggccgccgctaccacaacatcaactcggcgccctacggccagctctggcgcgcgctccgctccaacctcacctcgggagtgctccacccgacgcgcctgcgccactacgccgccgcgcggcgccgcgcgctacaccgcctcgccgcggacctcagggagcagcagctcgccgacgacggcgtggaggcgctcgcggcggaaagcatccgtagcgcggtgttcggcctcgtctccaccatgtgcttcggcgacggcggcgtcgacgcggccgtggttcgcgccatggccgacgtccagaccgagctggtcctgtccctgtccgcggtgcgcaccttcgcgttcgtgccgttcctcgcggtgtccaagctagtctaccgcgggcggtggaacaagctcgccgcgatacggcggaagcaggaggagctgtacctcccgctcatcgatggctgccgccgcaggcgtggccgtgacgacgacgactccgacgggacgccgccgagttacgtgcgcacgctcctcgacctccgagtcccggtagaactcgacggcgaccacgatagcagtggaggcgagcagacgcagcagcggaggctcgaggacggtgaactcgtgggactatgctcggagttccttggttctggcaccgagtccgtgtcagcggcgctgcagtggatcatggcgaacctgatcaaacggccagacatgcaggacgccgtcaggagggagatcgacgctgctgtggatgccgatgccgaggaggtcggggaggaggtccttgggaagctggatctcctcaacgctgtcatcttggaggcgctcaggctacatcccaccatcaagtttggatttagggaggtgatgcaagaagaccaagtggttcatgatggccaccgtattcctgtcggcaccaagatggtcttccccctggaggctctagcgagggacaagacggcgtgggacgagcctgacgagttcatgccggaacgtttccatggatgctgcgcgggtggagaaagtaccaagaagctactgtccgtggcggcggagatgaagatgctgccgttcggaggcgggaggaggatgtgccctgcgataggcgtctcgttgctccacatcggctatttcatggcgaaccttgtgagggagttcgagtggcgggaagcggagggcggcgagcacgccggcgtccaactccaccccgacgccaccgtcgagatgttcaacttcatggagcgtccactgcgtgctcgcctcgtaccattacgtcgaccgggaggcaagaagttccgttacgtccattaa

SEQ ID NO: 4862 - DNA, 225 bp, Zea mays
  Peptide Sequence Number=SeqID_46641
atggatattctcatgaaggatcttaaggtgttcacctccttcaacagagagctgttcaaggagataacgcagttgctgcctgctgaccttagagaatttcaaatgctcatgggaggagggtcctctgctagtggacctagaaagggaatgcattctcgattgtttcctaacatgacctttgatcctatatctatagatttctatgtctcgaccaacttccaatag

SEQ ID NO: 4863 - DNA, 1077 bp, Zea mays
  Peptide Sequence Number=SeqID_46642
atggggggagcatccggaggcgaccacccgcagcagcacggcggcggcgacgatgggcacctgcagcaaggcggcggaggcgacatggtgatgccggggttccggttccaccccacggaggaggagctcatcgacttctacctccgccgtagggtggagggcaagcgtttcaacatcgagctcatcaacctcgtcgacctctaccgctacgacccatgggatctccctgctctggcttcgatcggggacaaggagtggtacttctacgtgccgagagaccgcaagtaccgcaacggcgaccgccccaaccgggtcacgccgtccggctactggaaggccacgggcgccgaccgcacggtctacgtcgaggtcaagcggccgatcgggctcaagaagacgctggtgttctacgtggggaaggcgcccaagggactcaggagcagctggatcatgaacgagtaccgccttccttcaggcgaggccgaccgctaccaaaaggaaatttctctttgcaaagtgtacaaacgaccagggattgaagacaactttcacctcagcaccaccacagcaagatcatctggctcaaaggctgcagcaaccatggaaaagaagcaccaccgaacatcggcgtcgccccgcatggcgccagtgttcgacggtggccactcatcaggttacatgaacaagccatacagtggagcaaacaccaccatgctgggcatggcatcatcagccgcagctcgagcagctacactggcaccacagacgtcaatgttcctatcaaccccctcacttagctccaccacgtcgacagaggaggacggtacatcactctaccacatgaagggtgttaacccaccaatgctgccttcttccacacacgccctgcttaatgcaaactccgctacaatggcaacaattccaatagatgagctgagtagggcaattggatgccaaggagaccctaaccagaccttgccaacacaagctccattgcttccttttcctaacttggaaaagatttgggattggaatccactcctagaatctcccaaggtttgcacaagcttcaagtga

SEQ ID NO: 4864 - DNA, 1344 bp, Zea mays
  Peptide Sequence Number=SeqID_46643
atggacgacgacgacctccacggcaacggcaagaacaagccgctgccgccgacgcggcgccgctgctactgttgcagctgcaccacggcggccacgctgctcatgttcctgctcaccaacgccgtctccgtcgccgtcgtctcttccggcgccgggtcctccctgctccgccgctacggcggcggctacaggcccgccgccaccatcgtccgcctctgggacggctccgcggcgctccacgcggacctcaacgccacgcaggccgcgctcgccgccggccgcgccgacctcgcggacctccacgcccgcgtccgcaccgccaacgagctcctccgcacgctcctgcacgccatgcgggaggagctctccgccactggcggcggcgaatggaagcgcgagcccgcgggcgagctcaggctcgctgtcggtgtcggcccgcgccaccacgatgtgaccgaggctgcggtcccggtcctgggccacgcgtgcgtccgcgttcaggacgatctcgagcgctacatggactacgcacccggcggggagtgcccgtcagacgagcaactcgcgcacaggctcatgctcagcggctgcgagccgctgccgcgccgccgctgccgcccgcgctcgcccaaggggtacccgcagccggcgccgctgccccggagcctgtggaccacgccaccggacaccaccgtcgtctgggacgcgtacgcgtgcaagagctactcgtgcctcgcggccgcccgcggtaacatcactggctgcggcggcgacggcgacggcggatcatgtttcgacctgcggcgcgggcggggtagatgggcgcgcgacgacggcgcgctgtcctactccatcgacgccgtgctccgggcgcgtcccaacggcacggtgcgcatcggcctggacctcggcggcggctccccctccggcacgttcgccgcgcggatgctggagcgcgcgggggccaccgtgctcaccgcggccgtcgactccggcgcgccgttcggcagcttcgtcgcgtcgcgcggcctcgtggcgcttcacgttacccccgcgcaccggctgcccctgttcgacggcgccatggatatcgtgcacgcggggcatggcctcggcgccggcgacatgctggagttcgcgctgtacgacgtgtacagggtgctcaggcccgggggcttgttctggctggaccacttcgtctgcgccgccatgcagctgaacgccacgctcgcgccgatgctggatcgcgtcgggttcaggaagctgcggtggaacaccggccaccggggaaaggagaaggaccagtggtacgtctcggcgctgttggagaagcccatgacatga

SEQ ID NO: 4865 - DNA, 2295 bp, Zea mays
  Peptide Sequence Number=SeqID_46644
gtttatgcatccgggggttcaagctggattattgatagcggatgcacaaaccatatgacgggggagaagaagatgttcacctcctacgtcaagaataaggattcccaagattcaattatattcggtgatgggaatcaaggcaaggataagtctgaaacccaagggaccctcaagcgcttcctcaggagagctcaaaatgagtttgagctcaaggtgaagaagataaggagcgacaacgggtccgagttcaagaaccttcaagtggaggagttccttgaggaggaagggatcaagcacgagttctccgctccctacacaccacagcaaaatggtgtggtagagaggaagaacaggacgctaatcgatatggcgaggacaatgcttggagagttcaagacccccgagtgcttttggtcggaagccgtgaacacggcttgtcacgccatcaacagggtctaccttcaccgcctcctcaagaagacgtcgtatgagcttctaaccggtaacaaacccaatgtatcttactttcgtgtatttgggagcaaatgctacattctagtgaagaagggtagaaattctaagtttgctcccaaagctgtagaagggtttttgttaggttatgactcaaatacaaaggcgtatagagtcttcaacaaatcatcgggtttggttgaagtctctagcgacgttgtatttgatgagactaatggctctccaagagagcaagttgttgattgtgatgatgtagatgaagaagatgttccaccggccgctatacgaaccatggcgattggagacgtgcggccacaggaacaagatggacaagatcaaccttcttcctcaacaacggtgcatcccccgactcaagacgatgaacaggttcatcaaaaggaggcgtgtgatcaagggggagcacaagatgatcacgtgatggaggaagaagcacaaccagcacctccaacccaagttcgagcgatgattcaaagggatcatcccgtcgaccaaattctgggtgatatcagcaagggagaggaactcaacaatttcaaacgcaatgaagtttggacactggtgcctcgtcccaagcaaaacgttgtgggaaccaagtgggtattccgcaacaaacaggacgagcacggggtggtgacgaggaacaaggctcgacttgtggcaaaaggttatgcccaaatcgcaggtttggactttgaggagacttttgctcctgtggctaggctagaatcaattcgtatcttgctagcatatgccgctcaccattctttcaggttataccaaatggatgtgaagagcgctttcctcaacgggccgatcaaggaggaggtgtacgtggagcaaccccctggcttcgaggatgaacggtaccccgaccacgtgtgtaagctctctaaggcgctctatggacttaagcaagccccaagagcatggtatgaatgccttagagactttctaattgttaatgctttcaaggttgggaaagccgatccaactctttttactaagacatgtgatggtgatttgtttgtgtgccaaatttatgtcgatgacataatatttggttctactaaccaaaagtcttgtgaagagtttagcagggtgatgacgcagaaattcgagatgtcgatgatgggcgagttgaactacttccttgggttccaagtgaagcaactcaaggactgcaccttcatctcccaaacgaagtacacgcaagatctgctaaaacggtttgggatgaaggacgccaagctcgcaaagactccgatgggaaccgacggacacaccgacctcaacaaaggagattccgactatgctggatgtaaggtcgataggaagagtacatcagggacgtgccaattcttaggaaggtccctggtgtcgtggaactctaagaaacaaacctccgttgccctatccaccgctgaggccaagtatgttgccgcaggacagtgttgcgcgcaactactttggatgaggcaaaccctccgggactttggctacaatctgagcaaagtcccactcctatgtgataatgagagtgctatccgcatggcggaaaatcctgttgaacacagccgcacaaagcacatagacatccggcatcactttttgagagaccaccagcaaaagggagatatcgaagtgtttcatgttagcaccgagaaccagctagccgatatctttaccaagcctctagatgagaagaccttttgcaggttgcgaagcggaatgaaagggaaaggtgaacttggaccatgcaagacttccactgcactccgatga

SEQ ID NO: 4866 - DNA, 4329 bp, Zea mays
  Peptide Sequence Number=SeqID_46645
atggcctcctcctccttcgcccccgacgaccagaccgacgccgacttcttcgacaagctcgtcgacgacgacgacccggccaccgacttgcctcgggccgtctccgccaccagcgtcgccgacgacccaccacccgtcctggagccgcaggttccggcgccggcgccttcggaggggtcaggcaagggcggcgccggcgtccacaccgcggtcaagcaggtgcagtgggcctccttcggaggtggcgtggacgacggccctgatccgttcgctgatctctcgggaggcgccggtgacgacgacggcttcctcgggaacacggcggggacccaggcggccttggatcacgccgccgaggtgacggatcaggacttcttcgctgggagcagctcctccgatcagcagaatgtccatggtcagcacgaccagggcagaggcagcgccgcggtggattccgcagatcccaaatctctggaggccatgtaccctgggtggaagtacgacgaggcctcacagcaatggtaccagcttgatggcagtgtaaattcaactgggaatgcagctcaggcgctggacgatagcgctcagaatgcacatcatcatcagcagcagctcgacgcggcttacctgcacaattcagcgcacgcggggcttgggacaattgccgaggagagcactaccgcagctggtgctgccaatagttggggccaaggggctgccccggagtacccacccagcatgctcttctatgcagagtatcctggttggtactttgacaccaacactcagcagtggcactcccttgagtcgtaccagcaggccgccgtgcaggctggaacatctagcacgggtcagactgttgttgcaagcgatgatgttgttgcgacttcctctctgacaggccataatgccgggcaaactgaggaccttgttgcccacaatcaggtgacacaacgcaactcatcctcgaatagtttcacccatcagaaccaatggcagaccaccgatgcacttggtaacaatgtacaatctgaaagcctggctagtagcttctatggttttgaacaacacatgaatgctgagactaccagttcctctacgagccaacagactggttttcacacagctgaaacaattacagatcactatggtggacgcaaagccttcgaatcatcaagtcttcagagtggttatagctcctctgacagtcaacaatccagtcacaaggcattcgaaccttccacgggttatcaggctggttacaacgggtttgaacctgcttcaggtcaccacacggcgtttgaacctgccatgcataaccagagtggatacaaggcatttgacccttctacgggtcaccatagtgcttcgtggggattcatgccttccacgggtcagcagactgatttcaagggttccagagcttccacagttcaccaggccggttatgaagagtttgaaatttctagaggttacaatacaaatttcaaggcatttgaatcatcttcatctcaaaatgctggttacaatggttcccagccttcttcaggtcaccaacctaactacatgggatttgacacctctgcaaaccaccatggttatactgatgtcaatggtgttgcgagtactcaaggctttgtcccaatgcaaaccacgtaccagggccagaaacaagcaaatgcaacctcacaagggcacctgtcaaatagctatttgggtactgacaactccatgaactttaatcagcaacaatttctgggtgcaaatgcctcaaatttgcaattcggtcactccccgcatgaaggtaggtcatcggctggacgaccaccacatgccctcgttgcttttgggtttggagggaagctcatagttatgaaagaaactacctccatgcctgcaagttttaacagtggaaatcagggtaactctagtagcacagtgtcggttcttaatctgttggaggtagtctttgataaagttgatccttcaagtgtcactaatggtagtgcacttagttatttccatgctctatgccgtcaacctgttcctggccctctggttggtggaagtgctgcatcaaaggatgtaaataagtggcttgatgaaatgattgcacggtacgagtcttcctctagtgaattccatagaggtgatactcgcaagttgcttatttcattgctgaagatactgtctcagcactatggaaaactgcgttcaccttttgcgtctgacccatcgcaagaggagacagatggtccagaaatggcagtaactaagctattttcatcgtgtaagagaagcactgttcatatgggagattatggatccctagttccctgcatgaaaagtattccttcagaaagtcagatgcaggctgttgcacaagaggtccaaagtcttctagtttctgggagaagaaaagaggcccttcactgtgcacaggcaggtcaactttggggacctgcaatcatactggcattgcagcttggtgataagttttatgtggatacagtgaagaaaatggcccacttccattttgtatctgggtcccctctgcgaacgctatgccttctcatcgctggacaacctgcagatgtttttaatgtagagaacaatgtcaacagtgactatggtgcatcccatcaacctgtggagcctggtcctaatatgttggatgattgggaggagaatttggctattattactgcaaacagaacagaaggtgacgttctagtaatcacccatcttggtgattgcctctggaaagaaaaaaatgaggttgcagctgcccattcatgctatttagttgctgaactaaacattgattcatactcggaaagtgcaaggttatgcctcattggtgcagaccatttgaagtgtcctcgaacatttgccagccctgaagccattcagccatataagctgatatatgcatacatgcttgtggaagtggggaaagtttctgattctttgaggtattgccaagcgtctataaaggtactgaaagcctctggtcgtgcccctgaattggaggtgtggaaacaattattttcttcgctggaggagaggatacgcactcaccagcagggtggatatggcacaaatcttgccccaggaaaaatagttgggaagatttttacctcgcttgataaatctatatcccgcatgatgggtacaccatctgcaccacttccaccgttgccacatggatcttttagtgataaagagagccactctatacctgcggcagcaaaatttgttaatagccaatcgtcaatgactgagatagcagaggatagtggtggcactggcaggaaaattgcacacaacagaagtgtttctgagccggactttggtagatcatccaaacagggtgctggtggatcagatggtacacagagcagtgcatcaggatccagcagttctcgatttggttggctagtgcagaagactatgggattagtgtcaaaatcccaccgccaggcaaaattaggggatcagaacaaattttactatgatgaaaaattgaagcggtgggtggaggaaggtgctgctgttcctgccgaagagcctcctcttcctccacctccaacaaaaccatctttccagaatggtatgctagacaataagttgaatggccccatgagcgtaagccatgctcccaatggagtcacagaatggaaatcctcaaattcttcagagcaaggtctgggtatgccgccaattccacctagccaaaaccagttttctgctcgtggacggatgggtgtccggtccagatatgttgacacattcaatagatcaggtgcatctggtgcaatgccatcatataacaaaccagctgctccatctatgacaccaccagctggtgccaagttcttcatgccaactgcagcacctgttgccgcggatcagatgataccacaccaagcagcagagatacacagtgaaaccatccatcaggatgagcggtcagcctcaccgccagcagaaacatcattttcttcaaccccaccacccacgcaatttccatcaccagtgcaatcaacaatttatcggcaatctagtatggagaacatctccaccccttaccagggttccggggtatcgtcattaagcaacgacagctcattctcaaaatctcgagccgcgtcctggagtgggacatactctgagcagtttaatgcttttgcgggcactatatcgcctgacagacagacgacgcattcaccactgatgcctggcaaaccaccacacagccgttccaacagcaactcatcagggcatctcaatggattggcagaggatcttcatgaggtcgagctgtaa

SEQ ID NO: 4867 - DNA, 1533 bp, Zea mays
  Peptide Sequence Number=SeqID_46646
atgacaacccctccccaagcaggtgacagaaaagaaggtgcccttaaaatgctgaccacggggatgccgcagctggaatgggcttggtgtgactttgcacgagattctggggcgcgctctaaaccaccgagagagaagggaaagggttgggtgggcctttgtttacaggtgggaagggaagagaagcagcatgcagatgcccttgtacagataatctgcccctacccagtttgtttaaaacgcaaacaacgccattttggttttagttccctggagaaggatagaggagaagtagtatggtgggtaactgtcgtcaaccggccctatctacttcagtttagtgaagcactaaaccgcaccttgagaaatccgatccgcggagatttgacccaaccagatcatatcacacacgtaatcccatcccattccgcccgcaacagcagcaccaccggtgggaagaagaagatgaagaaggccacttcgctctccgagctgggcttcgacgccggcgacgcgtcgtcgggcttcttccgccctgtgtccggcgactcgtcgacgccgacgtcgcagcaccaccggcggaggctgaccaaggtgtcggtcatcggcgcgggcaacgtggggatggccatcgcgcagaccatcctcacgcgcgacctggccgacgagatcgcgctggtggacgcggtcccggacaagctccgcggggagatgctggacctgcagcacgcggcggcgttcctgccgcgcacgcgcctcgtgtccggcaccgacatgtccgtgaccaggggctcggacctggtcatcgtgacggccggggcgcggcagatccagggcgagacgaggctcgacctgctccagcggaacgtggcgctgttccgcaagatcgtgccgccgctggcggagcagtcccacgacgcgctgctgctcgtcgtgtccaaccccgtggacgtgctcacctacgtcgcctggaagctttcgggcttcccggccagccgcgtcatcggatccggcaccaacctcgactcgtccaggttcaggttccttctcgccgagcacctcgacgtcaacgcccaggacgtacaggcgtacatggtcggcgagcacggcgacagctcggtggcggtgtggtcgagcgtgagcgtggcggggatgccggtgctcaagtcgctgcaggagagccaccgctgcttcgacgaggaggcgctggagggcatccgccgcgccgtcgtcgacagcgcctacgaggtcatcagcctcaagggctacacctcctgggccatcggctactccgtcgccagcctcgccgcgtcgctgctccgggaccagcgccgcatccacccggtctccgtcctcgccagggggttccacggcatccccgacgggaacgacgtcttcctcagcctgcccgccaggctcggccgcgccggcgtccagggcgtcgccgagatggagctcaccgaggaggaggccaaacgactgcgccgctccgccaagaccatctgggagaactgccagctcctcggcctctga

SEQ ID NO: 4868 - DNA, 189 bp, Zea mays
  Peptide Sequence Number=SeqID_46647
atgaaccactccaagaaccttaaggaaaaggatgcagatgaggaagtacccgaggaagagatgctggactacgaggatcaagagtccaagaccaacatgactctcagcaatgttaagggagatagtttgatcaaggccaaaggatttttaattataaaaatcaccggaccacctccaatggctagctaa

SEQ ID NO: 4869 - DNA, 234 bp, Zea mays
  Peptide Sequence Number=SeqID_46648
agtgtaaaactggtatacaaccccgtggcaaactggtatacaaccccgtggcaaactggtatacaaccccgtggcagtgatggtggcagcgacggaagcaagggcgacggtggtgacgacagcgacggcggcaagggcgacggcagcagtggcgacggtggtaagggtgacggcagcggcgacaagggcgacggcaacggcggcaaggccattggcataatgccactggtttaa

SEQ ID NO: 4870 - DNA, 363 bp, Zea mays
  Peptide Sequence Number=SeqID_46649
atgacccctaacacaacttttgttcctgagattcctagaggtaatcacattctcagttctagttcacttaagagctcttctaaccacttgttcattgtgataattcaaagcccattatcgaagagggtctcccctgaggtatccaaagatctgacaaagaggttgaactcgacgacaaaggctagggactcagccatccaggccaaggagttggccttgaccgaaaaggctaagtcgatgcaccaaaatgaagagctaaagaagagcttagtgaaattcaagaaaaagcttgaaaaggagagatccaccaactctatcttggctaacaagtttagatttgctcttaaggaagtagatggttga

SEQ ID NO: 4871 - DNA, 330 bp, Zea mays
  Peptide Sequence Number=SeqID_46650
atgcgccaccgcccgcccgccaagccacccgagcctcggccaccgcggctagctcactccagccactcccagtctgtgccggcagttcagctagcttcgccagattcccatgaagctcctcaagtcctcggacctggtagagcctcactggagaccccgaatcacccttgccggacttctttcgctcaccagcgaacgtggaccgggaaaataagaaagacaatagaaattaatgaacagtggatgaacatatttttcttagtccacttaagtaatgaagaacataggaaaaatacaaagaaccctagttcagagcaaatccaaggttaa

SEQ ID NO: 4872 - DNA, 384 bp, Zea mays
  Peptide Sequence Number=SeqID_46651
atggcgaaagcagaagggacaaacatagaaaccgatagcaagcagatagcttcagagatcactactgttggaaatatgaagagggggaggaaaagacaacacctttcccaccgactggccggaaaaactgttgaaaagctcttggagatactcttaggtgcttattttatgatgcgcggttctgccatggtggtggaggtggacaggcacaggatcgtcaggccaggggtcagcatcgtcgtgcgcgacaaggccagcgccgtcggcgaggtggacaagctcctgagatcgctccacttggacgcgcggctgaaggacgacgaaggcgtgatgtacgcagagaagcccgattggcggccggagctcgaagaagagccgttgtaa

SEQ ID NO: 4873 - DNA, 363 bp, Zea mays
  Peptide Sequence Number=SeqID_46652
atgccccctgcaccaccacagggcatcccgtctgctggaggagaccctgacggatacggagacaacgacgatggcagttcgagccacagcatggagctctcggaggagcaggagccggagggatggatcgttagacccatcactcgtgatgccactcgtgggtgtcacttccatgacgcttggttgtgttatgaagattttcatatacattttcttatgctgaaagactgcaagatgtctgagaacaggcgcagaggtggaaggtgtgctcaacaggagcagcaggcaccccaggaggagtcacctcagcagcagttgccatcaccaccctcgatgaccattgaacagatgttcctgatgtaa

SEQ ID NO: 4874 - DNA, 1029 bp, Zea mays
  Peptide Sequence Number=SeqID_46653
atggccgcctcaggctactcgggctccgcgcccattactgatcaggggttcgaaggctggcccccgaaggaaggacagcgccgcctgcaccactccgactgcagcgccactcgacagagtaagtctgacaggcagtcaggcctcgccaaaggcgccacggcgaactccgccccgcccgaccccagggctcggactcgggctaagacccggaagacggcgaactccgctccgcccgaccccagggctcggactcgggctaagacccggaagacggcgaactccgctccgcccgaccccagggctcggactcgggctaagacccggaagacggcgaactccgctccgcccgaccccagggctcggactcgggctaagacccagaagacggcgaactccgctccgcccgaccccagggctcggactcgggctaagacccggaagacggcgaactccgctccgcccgaccccagggctcggactcgggctaagacccggaagacggcgaactccgctccgcccgaccccagggctcggactcgggctaggacccggaagacggcgaactccgctccgcccgaccccagggctcggactcgggctaagacccggaagacggcgaactccgctccgcccgaccccagggctcgaactcgggctaagacccggaagacgacgaaactccgcctcgcccgaccccagggctcggactccgccctggcctcggccgaacgacttccgcctcgaccgaccccttggctcgggctcggccacggcaacagaaggcagactcaacctcggcttcggaggaaaccccacgtcgccctgcctagggcacagaccgccacgtcaacaggaggcgccatcatcatcccaccccgaatcgactcgggacaacgtcagcagggactcgaccgctccaacagctgtccctccatcaggctccgccgcacctccaacaaccacgacatcacgccagcagggtgcccagatctctccggctgccacattggcatgtacctagggcgctag

SEQ ID NO: 4875 - DNA, 1020 bp, Zea mays
  Peptide Sequence Number=SeqID_46654
atggctgggttctctctgaggggcggcggaggcgggaggggcggtgaccggggcggcgatcacccgatcggcgccgacagcctgttcctgtacgcgcgaggggcggccgccgcggctgccgacacggcggccagcggcggcggtgggggcggcgggatagggttccagctctggcacccgcaccagcaggcgacggcggcggcggtgccgcacacgtcgcagttcttctcctccggcgccgtcgccacgggcgtcgtgctcggcttctcctcgcatgacggggccggcgggatcggcggtgcgggtggcgccggcgctggcggcggcagggccgggaccagctgccaggactgcggcaacaacgccaagaaggactgcacccacatgcgctgccgcacctgctgccggagccgcggcttcagctgccccacgcacgtcaagagcacctgggtccccgccgccaagcgccgggagcgccagcagcagctcgccgcgctcttccgcggcgccgccaacagcaacagcgccgccgccgccgctgctgcggccgcgagcaagcgcccgcgggagctcgtccggtcacttggccgcttgccgtccgccaactccgccatggtcaccacgaccacctcctcaggcgacggcggcggcgggaggttcccgccggagctgagcgtggaggcggtgttccggtgcgtgcggatcgggccggtggacgagccagacgcggagctcgcgtaccagacggcggtgagcatcggcgggcacactttcaaggggatcctgcgtgaccacgggccggcggacgacgcggcggtgggccagctgccgccgtcctctgcggagtaccaccaccagctgacggcggggcaagcgagggaagggtcgtcgcccgcggggagcagcgaggcggcggccacggtggccacgtcggcggcggtgctgatggacccgtacccgacgccgatcggcgccttcgccgcaggcacccagttcttccctcataaccctagaacctag

SEQ ID NO: 4876 - DNA, 543 bp, Zea mays
  Peptide Sequence Number=SeqID_46655
atgggtgggttgctcacctcgagtggagactctggagcgcttgagcacgacaaggacgcagggaggcctcgggtcgatggcatcagggcttcggctgcatggggagaaaccgccggtgagcgcggaccaggtgaaccagaggggctgggggcaaactggaagatgtcccacattgctggcgaagaggcggagctcaccgaggcaacagacgtggcaggcgcttggagatggccacgaaacgacgacggagctccacgggcgcgtgtgcagagcgggagagagagcgagggagttcggctgggggcgcaactgggcgaggggagtgagtgggcgcgtgctccaataaagggctcgagtgcgagggtcatggccgggaaacgcgtggtcgtggaagcatccacgacagagagcgtaggagggaggttagggaaggtcgaccccaccgggcagcgagagggaaggagggaagtgcgagggcacgggctagcgctgataggtggggaccacctgtcagagggaggcgggcgcgcgcagggggcttag

SEQ ID NO: 4877 - DNA, 138 bp, Zea mays
  Peptide Sequence Number=SeqID_46656
atggagcaaggagcagagagcacgcagggaggtggagctgagctccctgctgcacgccgtgtggaagaagaagacagggagaaaaaaaaggagaaggtggcggctaggggagaacagagcgaattagagtttcgatga

SEQ ID NO: 4878 - DNA, 204 bp, Zea mays
  Peptide Sequence Number=SeqID_46657
atgggggagaagaagatgttcacttcctacgacaagaataaggactccgatgatacgatcatctttggagatgggaaccaaggcaagttatgccatatgggttataattgtttacatacaaatgttgatataactaccactagtaagaatgtgatcatcagtgacgattttctagtgacgctggtgacttcagtcacagattga

SEQ ID NO: 4879 - DNA, 468 bp, Zea mays
  Peptide Sequence Number=SeqID_46658
atggggcccatggggctttacaactcggtgaccggcgttgcttcctccgcgacggtgaggtcaccaaagatgaggcaaacgtggtcaccagggagtctggggtcgccgaggagggctagaacaggtcaaaaggatctggcaaactcacaggcagactaccggccacaagaacaggaccagaaacggaagaatgacgaagggaagagcggaattgggagaaatcgagcgtgggaacggacatctcacctcgggacggagctcggggtgacttggcatggcacgcggaggctccggttggccggacgtcaaatgatcgcgacagcggcgaactccggcctacgcaaggaagaggctgagcgcggaccgggtggtagagttgaggaaaggggaaaccactgcgggttcccggtgcgccaagctcaggcaaagctcaccgtggccaaagcgctggcaaaagttcagtggtga

SEQ ID NO: 4880 - DNA, 268 bp, Zea mays
  Peptide Sequence Number=SeqID_46659
gaatcgacagacaagcttcggcgaccaaatgatccagctcttcgagttctacgaagctgaagaccctgagcatctgtttggtgaaggcaagatctggggtgtagttcgcttcgccgtcgtgccgtcaatggggctcggtgtatgcggctcgctctgccaagatgatgatgaggaggatggttatgattatgcttatggtaatggtaaagaagaaggcgtcgaggtggatctacaggagttccaggacgtcgacgagttcgaggattag

SEQ ID NO: 4881 - DNA, 288 bp, Zea mays
  Peptide Sequence Number=SeqID_46660
atggaggacacccccaacgtcattgaatacactgaagctaacgtgtcccttaaggagcttttcccatacaaagcactgtgtcaaccactacggtatgggcaacccctcctaggggctctggggcacgaccgagccctcgacctcggcttcggctctcagcgggcaataagcaggctcaaagtcaacaacaaagtacaaaaggccatgatgtccacaggacacgaagacactcctcatggcagggaagcaacctccgtctacaaggccacgctccccttagacgtataa

SEQ ID NO: 4882 - DNA, 207 bp, Zea mays
  Peptide Sequence Number=SeqID_46661
atggcctccaggtcctccatcgtgcttgccatggagatactggttgcgctgtttggggttgtcggaaagggatccaagcctagccacctgatcctcactcccaacattgccaccatatccaacatggagaacaaagagcacagcaacaatgacttctcctttactcctaaggagggcccgaccggcacctggatgttcgatacctag

SEQ ID NO: 4883 - DNA, 501 bp, Zea mays
  Peptide Sequence Number=SeqID_46662
atggtcagcagcaaaaagggcaagaaagggcgccatcatgctgacgggaagtggaagcatcctccgggtcctccctcgaaggattacagggactcggagtactcagaggaggtctcctctgagtatgatcgctcgcctaccccagcgtctcctgtggcgtcgtccgaggactcggacgactccatggggctgtcgatcgcggcacgaggcgatccatcgagcacgcggggcttggtggaggagatcgaggactcctctgactccgaggaggggagcggcgacgagggcaacggtgtcgagggcaacagcagcagcgatgatgacagcggcaagggcagtggcgacaacatcagcgagggcagtggcgacggcgatggtgatagaagcgacggcagcggcgacgactgtgatggcaaaggtgatggccagggcgacggcgatgacgaaggaggcagcaacggcggcgacggcaaggccggtggcataatgctgtcgacttaa

SEQ ID NO: 4884 - DNA, 375 bp, Zea mays
  Peptide Sequence Number=SeqID_46663
atggctcaccggattgctctgcccacgagcggcggcgggcgagcgaagtccggtgagggtgaatttgcctctccgttgaggcaatgcctcggctcaagctcggagaagcttcatggcttcatggggaagcggtccaggggctggggcgaggctgagggtcaacagaaggggctagccacaacggccgtgctcgggcagagatggcgggcggtggtgcttgctttccacggcgaactccgacgcgcggggcaaggcgaccacgcgcggggcacgcgctgctgtggccagtctgcgctcggccggcctgacacggcgtcgagcacgtggctctttgcttctgcccgagttcaaacgctcataggttggagatcttag

SEQ ID NO: 4885 - DNA, 258 bp, Zea mays
  Peptide Sequence Number=SeqID_46664
atgggaacaaattctacatttgcgacaacactggccactacgacaaggattgccctcggaaccagtcgaggcctagaccaaatgcaactcaaaacaaatgttaagtcgaagaggaattcagactggaacaatgcactgaacaagattaggatcactgcacatcgccgccggcaggaatcagccctcgtggcaaggtcaatcgtgcagtgcatagttgataaccagaggagaagtggtgctgcgattgcggggttctag

SEQ ID NO: 4886 - DNA, 255 bp, Zea mays
  Peptide Sequence Number=SeqID_46665
atggcgagagtagtgtgtaccctctgtggcaagaggctggacggtggtgtatctgtgctctcggttggcgtgaacccgggcctgttcttgagcatggctctaagaaacaagagaaatgtcgagggcgcagctgtcaaaagggagatagttaaacttaggtccgaagtatccaagcttaggttcgactgcgaagagaaggagaaatcctttaagattctggaaaaagattttattgaaagtcggaccaaagtttag

SEQ ID NO: 4887 - DNA, 411 bp, Zea mays
  Peptide Sequence Number=SeqID_46666
atggtgttgtctgttgcagcgcgagcgtattgtcgatccatcgagcgtgccgggctcagtgggtcggatgactcagagaaggtctcctcagaggagatggaggactccgaggagtggagcgacgtcgagggcaacgacagtgagggcgactgtagcatcggcgacgacgacggcaagggcagcaacgacgacggtggtggcggcagcggcaacgacggcaaaggcaaaggtagctatggcaaaggcaacggtgagggcggcaacggcgacggcaaggtcgagggcaagggcgacggcaaaggcgacagcagtgacggcgatggcggcgatggcaaggccggcggcagatgttggcataaatattactatagtgtagcagtagtagtagtagttagttgtagaataatgtag

SEQ ID NO: 4888 - DNA, 480 bp, Zea mays
  Peptide Sequence Number=SeqID_46667
atgaacacgaatgtcgcgggattcccacctctctcatgccggtctccggccgcctcgcttccccccttcgcgctcggcctcgcgctcgacccatctgggctggggcacgcgacgacattcactcgtcggcctagggaccccccgcttcgccgcatcaccaggaaggcgtctctggaggtatctggcggaattcatcctaagggcggccccaattcctcgccgcacttcaaccccgccgcggaactgcattgctgcgtgggcagagaagtcaccgccccaattcaaggtaaaaccactcctatcgtgttctcttatgcctcctctacgcgtagggttatttgggaggggtattggaaccggtggtccttactgcggggctcgctggcgcttttccactgggcgcaggggcgccatcgccctcgcccgtgtccagagttagaagacaatcgcgggtcgttggatgtcccctgggcggtttag

SEQ ID NO: 4889 - DNA, 657 bp, Zea mays
  Peptide Sequence Number=SeqID_46668
atgaagaacagtcaaatggtgagagtgcaaaagcctcggaaagttggaagcacgccatcatatggtttcacattcaagtgtgatgagagatctgaaaaaagacgagaggagaagattcatgcaagagagttagaaataagcaatttgcaagccaagtcaaaggaaactgaagaagcagaactcaaaatgctgagaaagagtttgaatttcaaggcaacaccaatgccaagcttttataaggaaccaacccctgccaaggttgaattgaaaaagatccccccaaccagagctaaatcaccaaagcttggtcggtctaaaaacaagtccatatcagagactgaagaaaatactactacggaccaacctgcccgtctgagccttgacgaaaaggtttctcaaaacggtgtgaaaaaaccaaccccgtcgagttcagcaaagaagccccagagaaagtcactccccaggctgccatctgaagaaacttgtccgcttgatgccacctcaaggcagctgaagaacaacaaactggatgaagttaatgctcaggagacaggatcagctacagggcaggtacaaggaagtgagacggaaacagattctgttcagagcgcaactcaagctggagctaaccctgatgaacagagtgtcgctcagtga

SEQ ID NO: 4890 - DNA, 108 bp, Zea mays
  Peptide Sequence Number=SeqID_46669
atggcgggttttactgagtttgggcctcaaaactcggcggcgatggtttcagagggaatcagtggcggcacgtggcatcacaacgaagggtttagaagtcaccagtaa

SEQ ID NO: 4891 - DNA, 680 bp, Zea mays
  Peptide Sequence Number=SeqID_46670
gggtaaaactggacctcccattcggctattgccggttgctcagacctacaactggagtactggacgatgacacactattccttgtgacctcagctcgacctcaacagggaattaacagagctgagagcctgtgctctggtgaccaatcctgggttgtgcgtctcttgtcgaccaccaaagcccgctatctggaggcagcggcgtttgacgacctctgcctaaggcacgacgaggtcaagaagtccattatctatagaggtgtttcggcagacattcttatgctcgacagatcaggacatctgcagctggtggattttaggtttgcaaagaagttggaaggtcaaaggacatacacaatatgtgggatcgctgactctctggcaccagagattgttcttggtaggggtcatggatttcctgctgactggtgggcacttggagttttgatctatttcatgcttcagtcagacatgccattcgggtcctggagggagagcgagctggaacctattacaaaaattgccaaaggccaccttgttatgccagtgtctttcagtgcagaagttgttgaccttataaccaagctactcgtgatcgacgaaaacgcgcgccttgtaaccagtggtgctgaagctgtgaagaaacacccctgctttgatggcactgattgggagcgatag

SEQ ID NO: 4892 - DNA, 267 bp, Zea mays
  Peptide Sequence Number=SeqID_46671
atgaacgtgagtgtcttatttattttcaacacggtcgatattggttctataactaacatattatatttgcaaaagtcttggtttccagagcagggattcggggtcatgggccacaacacgccaccactggtgataccagcaccaggaggagcttatgcaggggaggaagctactcctggagagaatccaaaccagttacacgacttcgtcaacgaatttttcgcttctgaaggtagtggtcacaacttcaacgactccgatatgtga

SEQ ID NO: 4893 - DNA, 180 bp, Zea mays
  Peptide Sequence Number=SeqID_46672
atggcgcctgaggctggactcggctgctgtcagcctcaccctggcgggtggcacagcagtcggagcagggcaggcggcactgttttcctgtcagcttgtgctgatggtgattaccagccgagtttaggagtcttgggggtacccctgattatggtccccgaagtagcccccgagccttaa

SEQ ID NO: 4894 - DNA, 609 bp, Zea mays
  Peptide Sequence Number=SeqID_46673
atggacccagaagtcagtcccttgggtagggtctttgagcgagtcaaggcagcagtcgggggtgtggattttaaaatcaagttccttacagttggtggaaagaaactaaagttgacaatatgggatactgaattcatccttctcttctctcagtattgtaagtggtttgagaatcaagctggccaggagaggtttaggacaattactagttcttactacagaggtgctcagggaattattctagtatatgatgtcacaaagagagaaagtttctcaaatttggctgatgtttggactaaggaaatagaagcaaactcaacaaacaaagactgcataaaaatgcttgttggaaacaaagttgacaaggatgatgaaagaatggtcacaaaagaggaaggtcttgcttttgctgaagaatatggatgtctgtttcttgagagcagtgcaaaaacacgagaaaacgttgagaaatgttttgaggaacttgcattgaagattcttgaggtgcctagtctcctagaggaagggtcttcttcggttgtcaagaggaacatcctgaaacagaagcaggaaagtgatgcaaagaacggtagtggatgctgtcaatag

SEQ ID NO: 4895 - DNA, 729 bp, Zea mays
  Peptide Sequence Number=SeqID_46674
atgacgacccgcatagcgccaggcgtgggcgcgaacctactcgggcagcactcagcggagcgcaaccaggacgccaccacctacgtcggcaacctcgaccctcaggctattaagactttgaacatgatcaaactatatgggaagcccataagagtaaacaaggcttcccaggataagaagagcttggacgttggagcaaatctgtttattggcaatcttgatccggatgttgatgagaagctcctctatgataccttcagtgcatttggagtgattgtaactaatcctaagataatgcgagatcctgaaacaggaaattctagaggctttggctttgtgagctatgagtcctttgaatcatctgaccaagcaatagaggccatgaacaaccaacatttgtgcaaccgcccaatcactgtctcttatgcttacaagaaagacacgaaaggagaacgccatggcacaccagcagatgcacgggcaaccaacttggcccgctcaacattctatgccgcctcccatgccatcgcaactccagtacaggctcccaatgaggccaccaccaccaaatatgatgcctcctccggttggcatggtaaggccgccacctcctcccactggtatgtcagcaccacctatgtggatgccacccccacccccaccacatcaaggtggtggaatgcctccgcctcccatgtctatgccaccaccgcctccaccaccatctag

SEQ ID NO: 4896 - DNA, 4842 bp, Zea mays
  Peptide Sequence Number=SeqID_46675
atggcctcgtcgtcctcagcggcgagggcgcacgtggagcggatccggcgggaacggttctacatcggccgggaggagcggaacccgctagcggaggacatccaccaggcggtcagctacctctctgaggagctctactccaaggacgtccatttcctcatggagctcattcagaatgctgaggacaacgaatatccgttggatgtgtcgccagcactggagtttgtcataacagaaaaggatattactggtattggtttcaaaagtgtatttctagtttcaagtcaaccacacatattcagcaatggatatcagataaagttcagtgaaaagccttcagcagtttgtgatataggatatattgttcctgaatgggttgatgggaagccaaatattgatgacataagaacagtatatggcccttctaggagccttcctacaactgttattatcttacctttgaagactgataagattcttgctgtgaagaaagaactttctagcacgcatcctgaaattcttttgtttctttcaaagattaggcagctctctgtcaaggaaatgaacaatgatcccaaggccagtaagatcagccagatttcgatctccagtgaagtggactactggtccagcaaggacatagatgcagagtcttacacgcttcatttagctatgcaggaaaatagcaagggggaaacagaagagtgcacctattatatgtggaggcaaaagtttgctgtccaaccagactgcagaattcagaaaaggatggaagttgatcaatgggtagttacgttagcatttcctcatggacagagactaagcagaggagcaaaatcgcctggagtatatgcattccttcctacagagatggtcactaatttgccctttattattcaagcagattttcttctagcttcatcccgagagtccattttatttgacagccaatggaatcgtggtatccttgagtgtgtaccttctgcttttatcaatgcttttggagctctcttgaaatcgtcaagggatgccccacattttgcgctcccacccatttttaggtttctgccgattcaggaatcctcaatatcgctctttgatagtatcaggctgtccataaaaaccaaagttcaagctgaggatataatgccttgtgaaccatgcactgcacagaaggtcttctgcaagcccgctgaagtctctcgcctggatagtgcgttctgcagaattttgaatttggcccagaagcaagggattggtctgcagaatctatcttcgtatggtacttttgtactaagctcctaccttgacaaccttgagtatgatgatgtattagaatttttaggtgttggatatgccaatagagaatggtacaccttctatggggttgacataactgatttcaggtcagagcttaggctatttggagttgttgttgacttcaaaagaaattatcagctggtggttgataactttcggttctctatagatacaatcactcctggtgccacaatactaatgctcaattgtattcgatatgttgaggaatgtcatgattttgtagaaagactgaaagatctcagatgggtgaagactaatgttggcttcagagctcctcacgaaacattccttattgatgatgactggaaatgtcttttggaggtcattgacaagacaccattgcttgatctggaattctatggggatgaaatcaagctgtacaaagaagagttatgtaaaactggtataatcgctggcttcaaggaagcaagtaagaaaatagtgtgtcatgtcaagaaacttgtaaacactagtattacaaaagagctggcatttgcactactaaaatgctacagtgacctaaccaccaggcatgggaggttacctgttgctcttgcgaacttcatgcaacatgagagatggctgcatacaacatttggtttcaggtctccgaaggaagcaattctttttagctcagaatgggagtctattgctttagtctcttgcctaccattcgttgatgacagcgatgcacagtatggccttgggaaggagatttactgctacagtaatgaactgaaggccttgggtgccaaaactcgactagaacagggtgcagcatttgtcatttcggggctccgtattccaactgatccatcagctgtgactccacaagctgttatttcattgctaaaatgcatcagaatttggagacaaaacggatctgatctacctaaaagtttcatgagcgcaatcaacttgaagtgggttaagacaactgcaggttaccgccatccaaacggttgtgtcctctttggttcagtgtgctcttctcatgtttacagggatgatggccctttcgtagatgaagtgttttatggacaggagctagtttcatatgagagtgagctgcaaaaaataggagttaatgtggatcccagagctggttgtgcttgtgcactgatggcacagcatctcaaaggtctctctaatgctgatgcaatctcaaggatttactcgtacttggaggtataccgctggaagcctcgattcaccagtgatgactggatttggatacctcatgcagctaatcaaggacaatgggtcaaccctgccagttgtgttctttatgatactcacggtctttttggctctcagctctatgttctggtgaaatggtacagcagcaaattgcttcgatacttcaacacggcttttggtgtgaagcatcgtccaacagtcagtgattattgcaagctctggagtatgtggcagggctcaaactctacactgacacaaaaagaatgtgttgccttctgggaattctttggcaagaactggagcactgatatggggaaattcattgctgggtgtgtcgataaggttcctgttagttccggagaccagatcttgctacttgagaaacaagatgtctttattcccgatgatctactacttgaggatcttttcaagaagcaggctcagaaacctttgtttgtttggtatccttcaactagtttgccttgcttgtctcctgctagattaaatgatatctacagtagcattggtgttcagaagatatcaaaatctgttgtcagcaatcaatacgatcacttggaaattgaatctgtcacccttgttcataagggtaccgtaattaaacttggcttgctcaaaattgtcctggctttccttacggatcctatccttgacatttctgtcgagaagaggtatgaaatggtcacaagtctcacaaatgttgctgtctacgagacaagagggcctctcaatgtgagttatcaggttggactttcctcgggaagaagcttgcatgttacatgtgcaaggtttttccgttgggagagggagagctcgaggttatttgtgacggaggctgatgaaccaggatcaatgacctatgcaatgaagatggagtatgcatcatgttttgctgaggagatctcaaaaggattgttgtcggagaataaagaacagattccagctcttgctgaactcgtgaggactgggttcttgctggaatttgatgttcctgcagttcagattttgttgaatttgaagaacctacgactgtttgagcaggatgaacaatttcttttaaagctttcacaacattgtgacgatggactaggtgaacatgccaaaagggatatggtcaccgaagaaaaggccggatctttgggaaagaagatcgaagaaagaactccatcgaaggaggccggtgacaagcataataagcacaaggaggaatccgccgactccatcaagtcacataggaagggtggcaagaagaaaaagaagatgaagaaagtggtctactacgagaccgactcttcctcaccttcaaccttcggcgctgagtccacatcttcgaagcgccaagagcgtaagaagtatagtaacatgcctcttcgctatcctcgcatttctaaacgtgctcctttacttttcgttcccttagaaaaaccaccatattttgatggtgaagattattgtatgtggagtgataaaatgaggcatcttctaacctcactccacgaaagtatttgggatattattgagtttggagtgcaggcaccacatgtaggcgacgaggactacgactccgatgagtctgcccaaataaggcacttcaactcccaagccacctctatactccttgcttccttgtgtagggaggagtacaacaaggtgcaagggttgaagagtgcgaaagaaatttgggacgtcctcaagatggcgcatgacggggacgaggtgaccaaaatcaccaagcgcgaaacgatcgagggagaactcggtcgattcgtcctcaacaaaggagaagagccacaagcaatgtacaatcggctcaagacaatggtcaaccaagtccgcaacctcaggagcaacaagtgggaataccataaaatggtcaaggttattctaagatctcttgtctttcactccaaacacattgtcaacttggagcaaggcgccacctccatacccgaggtgcacctcgttgcattcaaagcaatggaagaaaagaaggaagagcctacaccaaacaggctcccaattgacgcctccaagcttgacaatgaggagatggctcttatcattaaaagcttccgacaaatcctcaaacaaagtaaggggaaggactacaaaccccactccaagagggtttgctacaggtgtggtaagtccagtcattttattgttaaatgtccatatacaagtgatagtgacagggacgatgacaagaaagagaagaagaagatggataagaaaagatactacaacaagaagaagggaggtgaggcacacataggacggtaa

SEQ ID NO: 4897 - DNA, 321 bp, Zea mays
  Peptide Sequence Number=SeqID_46676
atgggcttaacacgggtgatggttaggtcgcagcccatcagagtacgagtgactcgaggattgacaagtagtcataaaattatagtatctcagcaagaaccaagaagacagaaaaaagtcacttcccaaataatatacatagaggagctgtcatggtgtggagcacaggaacggtggtcgatggctgaggtgaaggtcatgcgggctcgtgctgatagaccgggagcggtgaagggcgagtgctgggtcttgactgacggatcagagcagccaggtgaccaaccgcagtggctgacacacctgggacacgcacttatgtga

SEQ ID NO: 4898 - DNA, 386 bp, Zea mays
  Peptide Sequence Number=SeqID_46677
agagccctattcccttctactgcgagtgctacacgatgcggatcaagaggggatctcggtcgagaccacataccggcgtttggaacagtgacgacgcgcagtccacggtgaggttgaatttgcggtacaacaagcgccccgtcgagaaattccggcgactccggagcaaaattccccaacccgagaggatgtatggatccccggaggttaagcgagtcccgccagactcgcacacggccaaggcgatgtggaggaggtcgtcggggatcgcattgtccgcgcagctcggcatcagttgcgcacggaccgaatccagcgctgaggtgggagaagaagctgccgacaagtggggcccgtggatcggcgaccgagtcgcgggggagtag

SEQ ID NO: 4899 - DNA, 180 bp, Zea mays
  Peptide Sequence Number=SeqID_46678
atggcgacacggtggaacaccgatgaggaattcccagcaacaaggcaacgacctatgaagaaaatagtggatgggcaagcatttgagaacaagtccccaacaattcctgataagtcaaaggataacggcctagaggaagaaagtacttcagtggatcaagatgttgatgttcccagatgg

SEQ ID NO: 4900 - DNA, 543 bp, Zea mays
  Peptide Sequence Number=SeqID_46679
atgaagttctccaagcttcggatggctagccgcgatgccaatcaatctcctagaatgacgacccgtttcgggagcctcgacttctccttcaacgaggaaggcaaagcagttaaggccgcggaagctcgacctcctccgcggaatctcgacatgacaacgagggccagcgacggccctcgcatcgaatatacccccggagcgaccatctgcttcggaagcctctattttgtcatcaacctggagggcgatatggtcagggaagcacctgtccgagagctctttgcgtcatatgatgtggaagcatcgtcctactacggtagctctagcagcggctctggtgccttccttcctcgactgcgccatgccccggtggtgatcgctgcccttgtggtctgcgatgtctccccacctccgacgacttggagttcgtggggatggccgacggcagcggggacctcatcttcaacacactttacatggactcgaactcggatcttagtccccctgagagcagcgacaaagaacttcccagtggcaagttga

SEQ ID NO: 4901 - DNA, 249 bp, Zea mays
  Peptide Sequence Number=SeqID_46680
atggccttggaggaggatctgggcgatcgaaccaaggaggaggagaaactcctggtctctctgcaagatcaaattcgattccgccgaggggaattcatcgaggtgcaaagctacctcgaggagctagagaaggagaggcatctcctatcggaggtggtgagggcaatgtgtgggcacttcggagcaccttcttcagctgggtctaaattgctcgtctcctgccttaagggcctcacttgctggttctaa

SEQ ID NO: 4902 - DNA, 375 bp, Zea mays
  Peptide Sequence Number=SeqID_46681
atggcgcaggcgcacgtggcggcgaggttcatgacggaggtggcgccgccgcaggtggtgtcggtcatgcggcagaggaggaagaaggtgccgaggagcctggacaccatcgccgaggacgacgacagggagcagcagctggcgtgcgggccaccgtcggaccacggcttcgcggcggcgtggtcgctgccgacgccgacgccgacgccgccgcagccacgggagcgcgcgggcgggttcgtggcgaggggcctcgtcggcaagtacttgtcggacgcccacgacggctgccaggccagtggctgggagggtgggcacatgctaggccaccggcgagccgtgcatgcgcaggagctgcacgaggtcggagcttga

SEQ ID NO: 4903 - DNA, 603 bp, Zea mays
  Peptide Sequence Number=SeqID_46682
atgacgccgcgtgtgctgggagcctccctgctcgtccttcttctctccgtgcccataaatagcgcctgccgggcggctcctccgcacagtaccccccagctcggcctcctggattcagcttccgcgcgcctcggggctcctccagcgcagctcgggtccgtttgcgccattgacggggatgtcgcgtcagcactgtccgccctgcccgtgggggcattaaccgccgtagagcccctgttcatgctcttccttgccgcccgcatctccggactgcctccaattgctcatcggaccttgagccccgccgtggttccactgcacgccgtgggcgaagggtaccttcggcgttctcagtccagctgctggtcgggggggaaccgcatgattgtttcgattctcgttgtggcgccttcggacggtgaaagccaccagctccaacagaatttctcatcggaagcgtcgctccgccgcgtaaccactcgcgtcgtggacagcttcactccaccgcccaaccctcgagggataggattagatcgcggtttcattaaatcatggtcatcgatctgtgatcccacggtcactgtcccgtaccccttcggctga

SEQ ID NO: 4904 - DNA, 357 bp, Zea mays
  Peptide Sequence Number=SeqID_46683
atgggcgcagatccaaggaggggcgaaacccttgaaccagggttcctcacaattggtatcaaagccttacatccttggagaaagaatgggagggaagatgacgagaacaggagtttgaaagaagcaaggaagggtgctcagattttttttatcacagcaccatcattcaagccatcggtacagcctcggttggtgatcgaggccttcaccatgaaggccaaggaaggtggaggccatggaagaggagaggacattgcttcacaaacaaatggtggaaacaggaactggagctcgctggttgcaagtggtctggttgaagcaaggcttgggagattggagaaatttgcccagacttag

SEQ ID NO: 4905 - DNA, 291 bp, Zea mays
  Peptide Sequence Number=SeqID_46684
atgactgcggtgggtccaggacagtgccgtcgaagcactcgacacagccagtcttgtgcacgttcaagacgccgggcactcgagctcagaattggggtccatggtggcgtgagggttgaggagcctgtagatcgtaaatcgggcgagcagagagaggacaagaagcataaggaccgccaccgcttggaccacggaagccacgagcgcaaggtcgtgctggaagctccaaccacggcggaggggacagtccggcaggcccatggctttttgaaagaaaatatggtggactag

SEQ ID NO: 4906 - DNA, 704 bp, Zea mays
  Peptide Sequence Number=SeqID_46685
cgtcatatactctaccgccgcgcgcgacccttctttcaccctgctcgcggcgtgcccatgccctcccgctcgccggcagcgcggtcccgcctgaccactgctcgcgcgacggcgccccccgcccttccccagccccggcgcggcgacgcccccgccctaccctgacccgcggcggcgcgcccccgccccctgcccgcgcggcggcgcgcggcccccgccccctgcctgcgcggcggccccctggccccgctccctgcttccccagcgtggcgcggccccccgcccggcccctgcgcgcggcggcgcggccccgcccggcctcccctcgcggcggcgcccgcggccccgcccggcctcccctcgcgtcggcgcccgcggccccgccctgctccccccgcggcgcgcgaccccgcccccgcccccgccccggcctccccgcggcagcgctcgcccccgtcccagccccgtgcgcggcggcgcggccccggcgcgcccccggcgtggcccggcgtggccccggcgcggtccggcccccggcgcggcccctggccggttcaaccgcccccccggttcaaccgcccagtgccccggctcggccgctcccgtcgtgccctggcccggtcgccccgcccccgtcccggcctcgcccgaccgtgtcctcgctcgcccgcgctcgcgatgattatttgttagtcgatagttaa

SEQ ID NO: 4907 - DNA, 567 bp, Zea mays
  Peptide Sequence Number=SeqID_46686
atggctggagcgtgcccaccgccggcgccgagcccttcaacacttgggcggagaggacgagtgttcgtgtaccccaaggaccaggactcggtgctgctggtggagccggcggactacaacgcctgcgacacgtcgtcgtacgtgaggaagttcgacgacggcgacaccgtggtcacgctcgaccgctccggcccgctcttcttcatcagcggcgtcgaggccaactgccgcgccaacgagaagctcatcgtcatgctccaccccgcccccgccgtcgtcgcccgctcccaagggcgcgtcgccgcccccggcctctgctcccacaacgacaccgggtacgccgccgccccctgctccgagcgcgtcgtcgcctgctccggcgtcgtcaaccccaccgccgccatctgccccgcaggcaccgccgccgccccctgcttcgagcgcgtcgtcgcctgctccggcattgacgaccccgccgccgccatctgccacggcgaatgccccgcaggcaccgccgccgccctcggcgagctctccgtctccgagcgcacatggagcaacggctag

SEQ ID NO: 4908 - DNA, 267 bp, Zea mays
  Peptide Sequence Number=SeqID_46687
atgcgccctagctccctttttgagccccgcccatgcccgcactcactcccccgcctcatttcgcacagccccgccctctctcgtgctctgcccacaccgtccgacctcgctgaagacccgcgctcgcctcctcggtcaaccagctcgtcggaggccacacctagcgaccccgagctccgccccaagacaacgagcagtttgaggttcccgagtgtgttgctggagacctcccagagcaacaacctggtgaaggcaagtgtccgctga

SEQ ID NO: 4909 - DNA, 474 bp, Zea mays
  Peptide Sequence Number=SeqID_46688
atgactctgggtacgtccgatacatggccgaggctcgggctacgctcccgaggtaccctaggacattttcgagaccagcaggagcgattttgtaatggagtcccatcagagggaggcatcgagccctcggaccctatcgaatgggaccgggtccagcaaatcacctgcagggtgaggctgacagcagttgagtccagcctcaggcgccacaggaagctccgcctcgcccgaccttgggccttggcctcaggagaagtctccgcctcacccgaccccagggctcggcctcaaacctcgacctcggaaggtggtcttcgcctcgcccgaccccagggcccagcctcaacctcgacctcggaaggaatcacgtcctcgcccgaccccggcctcggcctcaggaggagtctccgccttgcccgaccttgggctcgggccgaccacgccgcagggggtacatcattaccctacccctag

SEQ ID NO: 4910 - DNA, 2343 bp, Zea mays
  Peptide Sequence Number=SeqID_46689
atgggcctcccgcgaggtcatctccgtcccttctccgccgccacggccgcccgccttcaccggcctccctccggttccatttcttacgaggtcaaggacaagaaacaatggcagcaggagctggagcagcacatctcccgcgggcagctggcccttgcccgccaggtgttcgacagaatccccgccccggacgcgcgcgcttacaacgcgctcatccgcgcctactcctggctcggccccttccacgccgctatcgacctttaccgctctatgctccgcttccgcgtggcccccaacaagtacacctttcccttcgtcctcaaggcatgctcagcgctcgtggacctccgtgccggccgcaccatccacgcccacgccgccgccgcgggcctccataccgacctgtttgtctccaccgccctgatcgacctctacatcaggtgcgcccgattcggccccgctcgcaacgtcttcgccaaaatgcccatgagggacgttgttgcatggaacgccatgcttgcaggctatgctaaccatggcatgtaccatcatgccattgcccacctcctcgacatgcaggaccatggtggcctcaggccgaatgcctccacgcttgtttccctccttccgcttcttgcccaacatggggcactcttccaaggaacaagcatccatgcctactgccttcgtgcctgtctcgaacaaaacgaggaacaggtgcttattggaactgcactgctggatatgtatgccaagtgcaagcaattggtttatgcttgcagggtgtttcatggcatgcctgtcaggaatgatgtcacttggagtgcgcttattggaggctttgtgctgtgcgacagaatgacagaagcttttaatctgttcaaggacatgctggtagaaggactgtgctttctctctgcaacctctgttgcaagcgcccttagggtctgtgccagcctggctgatcttcatatgggtacacagctgcatgctttgattgctaaatctggaatccatgctgatctcactgcaagcaactcgcttctttcaatgtatgcgaaggctggcttgataaacgaagcaacaatgttctttgatgagattgctgtcaaggacacaatctcttatggtgcacttttgtcagggtgtgtgcagaatggcaaggcagaggaagcatttcttgtctttaagaagatgcaagcctgcaacatggagccggatatcgcgacgatggtgtctctgatcccagcttgttctcatctggctgctttgcagcatgggaagtgcagtcatggctctgtcataatccgtgggcttgcattagaaacctcgatatgtaattctttgatcgatatgtacgcaaaatgtggaaagattgatctgtccaggcaggtttttgacaagatgccagctcgagatgttgtatcatggaatacaatgattgcaggatatggaattcatggactggggaaggaagctactacattgttccttggtatgaagaatcaaggttttgcaccggatgatgtcacattcatctgtctaatagctgcgtgtagtcattctgggcttgtgactgaagggaagcactggtttgatacgatgacacacaagtatggtatacttccaaggatggagcactatatatgcatggttgatcttttggcaagaggtggtttgcttgatgaggcctatcagtttatccagagcatgccactgaaagctgatgttcgtgtatggggagccctgcttggagcttgtcggattcataagaacattgatttaggaaagcaagtgtcaaggataatccagaaactgggacctgaggggactggcaactttgttctgttgtccaacatatttagtgctgctggaagatttgatgaggcagcagaagttcgaataatacagaaggtcaagggctttaagaagagtcctggctacagttggatcgagataaatggctccttacatgcatttgttggtggagaccaatctcatccatgttcacgtgacatatatcatgaacttgataatatcatggtagacattaagaaactaggctaccaggccgacactagttttgttttgcaagatctggaggaagaggaaaaggaaaaggcacttctttatcatagtgaaaagctagcgatagcttttggtgtcctcagtcttaatgaggataagaccatctttgttacgaagaatctccgtgtatgtggagactgccatactgccatcaaatacatgaccttagttaggaacaggactatcattgttagagataccaatagatttcatcacttcaagaatgggcaatgcagttgtggaaatttctggtga

SEQ ID NO: 4911 - DNA, 144 bp, Zea mays
  Peptide Sequence Number=SeqID_46690
atggagaggatggcttctacctgcaagaatattttcatttggagcaaaagtgggatcttactgcaaagttggttaaggattaacgcgtatgtaggcgtgctgaccgaggaccctttaactggtcacatgcctcgtcatgggtaa

SEQ ID NO: 4912 - DNA, 183 bp, Zea mays
  Peptide Sequence Number=SeqID_46691
atggcgaactcaatggcggggaagaggccacgaatccacgagcagagaaggggaaacggcagtgagaaggtctcgggcgggctggagaaactccgaggatggttgaatgatagtgaggacattcattcgcacgagagcgtattagagtacaactacatgagaagacaccagtgggctagataa

SEQ ID NO: 4913 - DNA, 1245 bp, Zea mays
  Peptide Sequence Number=SeqID_46692
atgcaaaaggctaagatagctggaatctctgatatcgagtctttcaaaaggctcctcaaggcgctcacagagaaggtcagctggcaatctgatgctgcctcagcaattgctgctgctgtgatacaatgcagaactgctagtgggaagcggcgaaacatcgggacaaggggcgacatatggctcctgttcgttggtcctgaccaggcaggtaagaggaagatggcgaatgcgttgtctgagcagatggtaaatgctgaaccagtggttataaactttggtggcgactcccgctggggcaaggatggtaacggacggcctaatccaggtttctgggggaaaacctcgctggaccgggtcactgaggcagtccggcagaatccatgttcagtgatcgttctcgagggcatcgatcaggtggatgccgttgtgcgcggaaaaatcaaccgggcaatggatacgggccgcctgccggactcccggggccgtgaggtcagcctcggcaatgtcatcttcgttctcacaacggattggttgcctgaggaactcaggagaccgaagtttgacacaccgctccaagacgaaggaaagatgctcgaggcagcacactcggattggcagctagagctttctatcggggacaagcagcagctgaagcaccaagcggattggctgtgcaacgatgctcgcccagcgaaggtagctagagaactgtctggcgggcacggtctgtcgcttgacctcaatctagcggtaggggcgtcggacgacacagagggctcgcggaactccagtgacctctccgtggaacaagagcaggagaaagggcacgtcgcggtcaagtgttcgacgccagcccccgacagcgacctgttgaacctcgtcgacgatgccatcgtgttccggccagtcgacttcgcgccgttcaggaaggctgtcacagactgcgtatcagcgaaattcgactcggtcaccaggggcagcagctcgttcagagtcgacgaggacgccgtcgaccggatggctgccagcgtctggctcacggacgagaagctcgaggactgggccgaggaagtgctcacgcccagcatcgaacggctgtggcgcaacgtgaagcgttgcagcggccgtgctgttgtccgtctcgcagcagtcgcggtcacagcagacagggcgatgccgaggtggggtggggggcgagaaggacggctaccggggacggtgccgatcgccgttgacggcatgtag

SEQ ID NO: 4914 - DNA, 696 bp, Zea mays
  Peptide Sequence Number=SeqID_46693
atgacggaggccgggccggtgctgtccatgtgcctggcgttcgccaaggagccgttcagggtgaagtcgggcgcgtgcgggacggtggtgcgcaacgccgagctgaagatcgtggacccggacaccggcaggtccctcgcccgcaacctgcccggggagatctgcatcaggggccagcagatcatgaaaggttacctgaacaacccggaggcgacgaggaacagcatcgacgccggcgggtggctgcacacgggcgacgtcggcttcgtggacgacgacgacgagatcttcatcgtcgacaggctcaaggagatcatcaagtacaagggcctccaggtggcccccgccgagctggaggcgctgctcatcacccacccaggcatcgccgacgccgccgtcgtcgggaaacaagtggagccggagatcggggagatcccggtggccttcgtagccagggccaaagggaggagcgacgacgggctcaccgaggacgacgtgaagcagtttgtggccaaggagctttcttcccacgatcctcctctccgtttaaccgagagtgtgctacaggtggtctactacaagaaggtccgcgaggtggtcttcgtcgacaggatccccaaggccccgtcgggcaagatactgcgcaaggagctcaggaagcggcttcagcagcaccagcaccagcaagccgtgtga

SEQ ID NO: 4915 - DNA, 222 bp, Zea mays
  Peptide Sequence Number=SeqID_46694
atggcgccctggtggccgcgatgtgcccctgatccacccgccgcccaaccgaaatactcacccgtcgccaggaagctcggactccccttccatgaaggtcccacacgactgctgtccctgcaacctcggcgttatcaaaacagaaaccatggcgagctcctctacagcaaatcggactccgcccaacagatcaccatgtgccgcgcgttcctcgtaacttaa

SEQ ID NO: 4916 - DNA, 345 bp, Zea mays
  Peptide Sequence Number=SeqID_46695
atggcgccctggtggccgcgatgtgcccctgatccacccgccgcccaaccgaaatactcacccgtcgccaggaagctcggactccccttccatgaaggtcccacacgactgctgtccctgcaacctcggcgttatcaaaatagaaaccatggcgagctcctctacagcaaatcggactccgcccaacagatcaccatgtgccgcgcgttcctcgggagatggattgaggccatagatcttctaatggacggctctgatctgaagatggtgtatccgtggccgttgatccggtttgggcggccgggattgcattttgcgtaccgattcgctctacgggatctgtaa

SEQ ID NO: 4917 - DNA, 267 bp, Zea mays
  Peptide Sequence Number=SeqID_46696
atgggagagcggctgggcggcgcgggcaggcgtgtgccgctggctgggcggcgcgggcaagcgtgtgcgccctgcgctgacgatttggaaggccgggaggccgggaccgggaggggggcgacggcgacggtgaaggagaacattgcttatgcgagacttggtgtgcatatcttggagacaactagtcaagccaaggatggaggcaagaagagcttcgagggtgttgagctcatagatggtaatctggatcaagtcttggagacttag

SEQ ID NO: 4918 - DNA, 345 bp, Zea mays
  Peptide Sequence Number=SeqID_46697
atggccatgatgggttcaacattagaaaagatgtacctctgccaggtaccaaactttgtgtttgaaatgataaagctgaaaccggtgtctctgtctgagtcgattaaggaccgcctcgatgtgggcctgctgaccgaggaccctttaactggtcacatgcctcatcatggaaagaccaacatgcaatgggagtggagagatggcgagagtagcgtataccctccgtggcaagaggctgggcggtggtgtatctgtgctctcggttggcgtgaacccggtctggtcttaaggaccccggtggctagtttacatatgcaagggttagctgctccatatgtcgtgtga

SEQ ID NO: 4919 - DNA, 279 bp, Zea mays
  Peptide Sequence Number=SeqID_46698
atggctcctaagagagcaacttcgaaggctaccgcatccattgacgatgcagcgaagacaacactcctggcgaagaacaaaggcaaagccctcgcggacaccacccccaagagtttcgaagatgacgctgtccccaccccacccctgatgacattgatgaggaacagagagctcgggagcttgaacaagagatcacgctcatgcaaggcgaaggccaatacaacctacagcgcggacccctcgtgtaacacccctggtgttactgtcactaaaacttga

SEQ ID NO: 4920 - DNA, 372 bp, Zea mays
  Peptide Sequence Number=SeqID_46699
atggcatcggaaggaaaaatttttacgatcaccaaaacagaaacggtgtacttgatccatgagcttgggatgaaaatcgccgttctgaagtcgcagaacaacgagctccggaatcaatttgatgttttgtataagcacatggacggcgtgacgaatgacgtggagagatcaaacgaactggtggccatcctgcaagaggagctagaagccaaggagttagaggtgactagactgaaggaggagacgctttcccagaaggaaggcactcaagaagcaccggcaccggcaccagctccggtggaagagggagacggagctggaaacgatctgaagccggcttcagatccgctgcaagtgaagctggaaagttaa

SEQ ID NO: 4921 - DNA, 3798 bp, Zea mays
  Peptide Sequence Number=SeqID_46700
atggccgggaaaaaacggacccagactgatcgcgcggttctggaggcggtgcctgcctcggacgctatccggaatgaggctgcagctgcggaggcgccggcgaagaagaagctggccatggagcggaagaaggagcggaaggagatggataaggagcgccaccgccagtcggccgaatttgccaagccccagccgccggcagcggagtctgcggctcctgtgaatcccccggccgctccggtggctgtgggaccgggactgcacatgaacgtgttcagagacctggcatcaccagaggcatcggttagagaggctgcagccgaggcgctggtggtggagctccggcaagtgcagaaggcgtacgagaagagcgcgcggaatggggagagggatgctggtgatggggatacgcagatggaggctgagaaggacgacgggctggataactgcgccccatcagtgcgttacgccatccggcggcttattcgtggcatctcttcttctagagagtatgcaaggcaaggatttgctttgggtcttgccgctgtcctcgaatcgattcgggcaatcaaggtggaagcaattatgaagttgatccctaatttattggaacattcatcttctatgaagggaccggaagctaaggacaatcttttggggcgcctgtttggatttggagcaattgagaggtctggtcgtgtgtcacgacagtggtcacgtgacaaaagctcacccattgttaaggaatttgtgagtgtggttgtagaactcggtggcaagaaacgatatttgacggagcctgcagttgctgtgattctggatttagtcaggaagctgcctgatgaagccatactatctgaggttcttgaagttcctggtgttcaagattggtttaacaaagctgctgaggttggagatccagatgcactctttctagctttgaagttgcaagagagaactattgtccagaaggagatatttgggaagctcctgccttatccattcagctcggacaatttttttgccgaacaacatcttagatccattgctgcttgttttaaggaatcttccttttgtcttccacgtattcatagtttatggcttgtcatcacggagatgcttgttcgagaagcaacatctcagcatgatattagcaccagttctggcaagaagcacaaaaagaataagaaagccagctcctgtgaggataacagaaggaatctacgtaatttctgtgaggttataattgaaggatctttgctgctctcctctcatgacagaaaacatttagcatttagtatacttgttagcctcctcccaaaattgtctccttcagctatccaagtagtactgtccagcaaagttgttcagggtttgatggatattttgtcaaatgaatcttcatggttgtataatgccggcaaacattttctgaaagagttaatgagtgttgcaagtcatgacaatgatcggtgtgctgctgtcattatcaacttacagaaatacagtggtggaagatttgactccatgacaaaaacaaaaactgttaaagagctgcttctcaaattccataatgttgaagattgtttgtatcttgtgcaaaatttgatggccctattcgtggatgaagaatctgttacagacgaaccatctgatcaaagtcagacaactgatgataattcagaaaatggcccaactgaagagcaggacctttttagccaagggaatgctgatcttctgaagagctgggtggtgaatacaatttcttgtgttctaaaaaatttaaagcttacttctaaagggaattcagattctgaaatggctaggtgcattgaagaaaagtttcaagtgcaaacggaaatattaaaattccttgctgtccaaggtctgttctcagcatctttaggaactgaggttacatcatttgagttgcaagagaagttcaaatggccaaagaatcccatatccacatcgctacgtaaagaatgcatagaacgacttcaattcttgctggaagatgcacaaaaggatgcatctttacatgttcctaatgaggtcaaatccaatgacttaggctactaccttatgtgtttcattaacaccgtatgcaacatcccctcagtctccctcttcaggatcttgagtggccacgatgataacgcattcaagaaattgatggcagtagaatcaatgcttttccacgaggagagaaaaactggtcctggattggagtctactaagatgcatgcaatgcgttatctccttatacagttactgctacaagttcttctccatccggatgagtattgggaggctgcagttgatgtgactatatgttgcaagaaatcctttcctgtcattgctcaaggtgataactcgagtgcacaagaatccgctgaacacggttcacaggagtctgatgaggatggttttgaggaatctgacgaggatggttcagaggatcccaatgaggaagtttccctagagtttatggatgttcttgtccagactttcctctctattttgcctcatgcatctggacctgtttttcgtgtgttctgtgatgatattacagaaactggtctccttgatatgttgagggtcgtgaagatagatttgaaagaccgtcatcaaacagatagtgatgatgaagatgatggtcgtgttgatattgaagacgatgatgaaactgtaatggaagatgaagaggttggggaaattgataatgttacagatggtttggatgagaatacagatgatgattctactgatgaagatgatttggatcaagatgatttcaacaaaacagtcccgaatgagacaaaaggtggaggcaaaacagaaactactaaagatggggatgattcagatgattcagatggcatggatgatgatgctatgttccgtattgatccttacattgcaaggatattcaaggagcgcaatcttcctggtagtgatactaagcaatcccaacttatgcgattcaagcttcgtgtgctgacgttacttgatatatatcttcagaggaatccagggaaagttctggtgctggaggtgtattctttcttaatgcaagcttttgtaaaatcacatggtgctgatggtactgaacagttcaggcaacgtatttccggcatactgcagaggagggtattcaaagggaacgagtatccaaaaggcgatgccgtcgaatttggtaaactcgagagcttgttggagaaagctctgaggttgacatcgcgctcaagatacaacacggttgcttccgtagcacagaacgccacattttggatcctgaagatcatcaactcgaagcactgttctgagcaggagctcgcacgcgtggttgatctgttccgttcaatcttgagcgattacgacaggaagaaatcgcggctgaagcttggctttgtgaagcaggttgctaagaggaacccttggatagggcagaagctcttcggttttgtcctgcagagggccgaaaacacgaaggcgcagtatcggagaaaccagctgctggagttggcagagttcatactgaaatcatgggccgatggcacgtcagagatgttcttgaaccatctgtctcagctgtgcgggttgatacaagcagccctttcagccgttgccgaaaacaagtcgcgccgcaaggaagtgcgcaacttctgcactgggatcctgcagacggtgctgaagcttggtctcaaagaccagttccagaaagcgttgagtcctgaaacttattccctctgcgaggccaagctaggggctgcgtttaccgccttcaaaaagtga

SEQ ID NO: 4922 - DNA, 930 bp, Zea mays
  Peptide Sequence Number=SeqID_46701
atggcgctgctggcgctcaagcctaatccactgccgaacggcttccgcctctgccccaagcgcaccaacgcctctgcagccgccgccgccgcaaggtcccccagtgtccaccctctccccgacgagctccagctggtggcggacatccggtccccatacaaccacatccgcgtggccgacgtctccccgcgggccgcgggccacccgctggccggcgcccgcctcctgctcctggacggcccgggcaacatccactccctcaccttcccgcgccgcggcgaccggcccccgctcaccggcacctacctcgacgccttcgccaccctgccgccgctcctcccgcggccgtcgctcgcggtgctcggcttcggcgccggcgccgccgcccgcgcgctgctgcacttctacccggacatctccgtgcacggctgggagctggaccccgccgtggtcgccgtggcgcgcgacttcttcggcctcgcggacctggagaggcgccacgcggcgcgcctgtccgtgcacgtcggcgacgcgctggaggcccgcgcgccgcccggcggcttcggcggcgccgcggtcgacctgttcgcccgcggcagcgtgctgccggcgctccaggagccgggcacgtggcggcggctgggagcgctcgtggcgcccgggggcagggtgatggtgaactgcggcggcgcgggcgtggaggccgaggacgaggggcgggacggcgcggcggtcaaggacgccacgctgcgggccatggccgcggcgttcggggagggcgcggtgtcggtgctgcacgtggacgggagctgggtggcgatgacggggccgccggtgacggcggccgcgtggagggcgcggctgcctccagagctgcggcatttcgttgacgcgtggagaccgtacggcggcggcgcgagtggcgaatga

SEQ ID NO: 4923 - DNA, 789 bp, Zea mays
  Peptide Sequence Number=SeqID_46702
atggcgttgagggcgccggtcgtgcggtggacctgcaaaacagggtcgcggcggcggcaaagcggtcgtggcgcgcaagggtggacagcaggcggtgctggtgctggcctgttgcgtcatgccgcggttcggagcggcggcacacgcccatcgcagcactggactggatcattgcaatcgtgggctcacgctcgccaaaaggctattgttgaaagtggcgagcagctgttacgcaagtctgcatgggtagagatgaaggagttggtgagagaagccaaggctgttgtgaagatctcatcgttgcagatcattgtggctcagggtgtcacgggctcgtttccatggtctgccctggccttttgccccaatgtggctggagttgatggggtttacgcacaacagaactgggctcctgatgataacatttgcactggcaagctcacttggagggctgctagcccgatatttgctaagattgtacctgagaggtcaaggacaagcatctatgcattggactgttcttttgagtcagttctagcttcattcgctccaccagttgttgggtttctagccgagcatgtctatgggtacaatcccgtcccctacggagctgcagataacaatgttggcagggataaatcaaatgttggcgccctagccaaagctttgtacacgtcgatcgccatccctatgctgcttcatctactccctgttgtaccggacgtacccacgagacagggagagggcaaggatggactctctgatcgctccagagctccagcagattga

SEQ ID NO: 4924 - DNA, 1491 bp, Zea mays
  Peptide Sequence Number=SeqID_46703
atggtggcagtgaagggccccgcggcgacggaggaccagaaagcgtctgaaaagacgacgaagcgcgtgacgtcggcggagatggcgcggcactgcggcgagggagacgtgtgggtggccgtgcaggggaaggtctacgacgttacggcctggctgccgcaccacccgggcggggacctcccgctgctcagcctggccgggcaggacgtcaccgacgccttcgttgcctaccacccggcctcagcgtggcgggtgctcgaccgctaccgcgtcgccacgctctccgactacgccgtgtctgaggtctcccgcgactaccgccgcctcgtcgccgagttcgccaaggcgggcctctttgaccgcaagggccacggctgcgccgcctcgctctgcgccatggcagcactgctggctggtgccatttggctcgtactcgccaccacgaacgtggctgcgcacatggcggccgccatcatgctgggcttcctgtggatgcagtcaggcttcctcggccacgactcgggccactacgggtctgtttggttgtctggttggagcctggctctggagaaacggccaatttctacgtatctcgggagccaggcccaagaggaatttttgcatcccgcgagccagactgaagaggctaatcaggcaaccaaacagaagaaagttgtgtctcgtgagcctggccagaccatatacagacaaccaaacgcaccctacatggtgatgcggagcgggctcctgaaccgcgtcgtgcagctagtggcgggcaactgcgtcgctggcatcagcatcgggtggtggaaacgcaaccataacgcgcaccacatcgcgtgcaacagcctcgaccacgacccggacgtgcagcacatgccgctcttcgccgtgtcgccgcgcctcttcgcctccatcacctctgccttctaccgccgggccatgcgcttcgacgccgcggcgcgcttcctcgtcagctaccagcactggaccttctacccggtcatgtgcgtggcgcgcgtcaacctcttcgcgcagtcgctgttgctgctcctcgccgccgacacccggacgcgcgtgcctgggcggctcgcggagctcgcgggcgtcgccgtgttctgggtgtggtacccgtggctggtgtcccggctgcccggcggcgtccacgagcacgccgccttcgtgctgctcagcttcgccgtcacggggatccagcacgtgcagttctgcctcaaccacttctcggcggggacgtacacgtacgtggggcggccccgcggcgacgactggttccagaaacagacacggggcacgctggatgtggcgtgcccgccgtggatggactggttccacggcgggctgcagttccaggtggagcaccacctgttcccacggctgccgcggtgccacctccggcgcgtggcgcccctggtgcgcgacctctgccgcaagcacggactgccctacgagcgctgcggcttctggtgttag

SEQ ID NO: 4925 - DNA, 240 bp, Zea mays
  Peptide Sequence Number=SeqID_46704
atgcgcgctcacgccactggttggttcgctgcgcggtgggacctgtgggtcagcgcgttcttcacctccactcaaacggagcccgcaaatgccgcgtcaacctcgccgagaaccttgggtgggatcttggtttgcgctccggagtgggctcttgtgaggtgcagcaatggcgccgccgtctgtggctcgggcgccgtcggtgtctggccggagaagttgggcaagttgcgcagactgtag

SEQ ID NO: 4926 - DNA, 996 bp, Zea mays
  Peptide Sequence Number=SeqID_46705
atgagcctgggagctgaggtgatcgagctctccagcgacgaagacgaggagcctgtgcccagcactaccgctctcatccaccacgccccctcctcccctcccgacgtcaagccgcacctgctcgccgacgtcgatgtgaagccgctgcttcttctcccgccgccgctccaccccccgggctacggcgcgctcgtgcccgtgaagaccgaggagcccgtgcccgtggccaccgtctcgtcaccgcccagggcgctcccgccgccgcgcctctgccgccagttctggaagtccggcgactacgtcgtcgcgcgccgcaaccccgatgtggccggccccggtgggcggaaccggttgcggataaaccccaagtttctgcactccaatgcgacttcccacaagtgggcttttggcgccattgccgagctccttgacaatgcaatcgatgaggtgaacaatggggcaacatttgtccgtgttaataaatttaaaaacccacgagatgggaacccctcattgttggttcaagatggcaatggtttcaagactagtacgatgcggcttggagcagatgtgattgtttttacacaaaaccaaaataactgggtgccaactagaagtatcggccttctttcttacacatttttgatggaaacaggttgcgatgatgtgctggtgccaacggtagactatcagtatgatctaacaacaacttcatatgttcagatgttgcgtcatgatcagaagctcttctcttctaatttggcaatccttctcaaatggtcccctttttctactgaagctgagttgcttaaacaatttgatgatatgggagatcatggaacaaagataattgtattcaacctctggttcaatgatgatggggatatggagcttgatttcaactctgacaaaaagcctgcctcaacttgcgtaggattaaaaggctttgctgttatgctggcctctaatagagctatagtggttgcggcgagatga

SEQ ID NO: 4927 - DNA, 450 bp, Zea mays
  Peptide Sequence Number=SeqID_46706
atggatgtgactgcttgggaaaatctattcaaaattcttggctgtctccccaaatgggtgtgtccaagggacgtcttgtactcggaggaggagttctccgagtctgaggggttgccggtctatgcttcccctccggtgttgtctgatgactcggacgactcccaggggatagcagccgaggtgtggacgtacattcgggctgtcgagcgttccgggctcgagggctcggatgagtcggaggtctcctcggacgaggagaactcctctgactcgtccgaggagggtgacaggggcgacggcaacgacgagggcgacagtggcgacgggggtggcgacggcggtggcgacgacaacgatggcgacaagggcgacggaggcgacgacggcaagggcgacggcaggggcagcggcagtagcagcaaggccagtggcaaaacaccactggtttaa

SEQ ID NO: 4928 - DNA, 270 bp, Zea mays
  Peptide Sequence Number=SeqID_46707
atggtgccgtcggggtgttgggtgggcggaacgagcctaaaagggggagcagggccgatgacggtggcgtcggcaatgcatgcagcggcggcggaaggggtgagggtcggcgccgtcgccggtgacgcgagggcagggctgaggcggctggtggtggcgcagaggatgccggaggcgaggtggtgggtgacggctagggtaagaggcgctggggaggctggtcgcagggatttccccacggccgtcaagagaaaaggaatttccttttaa

SEQ ID NO: 4929 - DNA, 282 bp, Zea mays
  Peptide Sequence Number=SeqID_46708
atgttttcgatgaacttccacgacggcggcggccacacagcggcactcgtagcagctctgtccgaagttcctagtgccgatgtcgaggggatcctcgtcgacctagctgccttctactctaccgtgatgcccactgccaccaccgatgtctatgcccaagtgagggaaaacaccgcctctgtccacgatgaaaccattgttggtgcaggtgttgctactcagggtgtggaatacaatggtgttgtccaggttgatgacagtgaactcctagcatggtcttag

SEQ ID NO: 4930 - DNA, 444 bp, Zea mays
  Peptide Sequence Number=SeqID_46709
atggcctgtacatttgtatctgaacagttgatctctgcctactatcttaggatatcctcattactggggcccacaagaagaattatcctgcggggatgtgatgtggaaccacataatgtagttaatgatttgatgtatcgggagtgcgtgttgtataaaccacaaattgctggacttacagagtcatcggtaatcacaaccattgggtttgttaaaggtgcaccagatatagatgtacaagggtttaatgtatatcacaaaaaccgtctaatattgcccttctggaaagttgcaaacaactcatacgggaaaggacgaggagttgttggcattctggaggccaactttatcaaacctacccatgacaagcaggattttgagaagtcagtcctttatcaaagacttgagttccgcttgaaagaaatgacttacgaatactggtaa

SEQ ID NO: 4931 - DNA, 423 bp, Zea mays
  Peptide Sequence Number=SeqID_46710
atgacttctgaagtggtcaaggtatacggtaagctagtgctcggatccactgagctgtgggagagatccgacatcggctatgtccagcccaaaaacgaggcaaataccaccggcacacctgttgcagcgaggctgaagggtgttctgtctcctgtctgtcctctgtacccttcaacgccgccacacagtgcagactcgcccgcattcactttctacgtgattggatgcctgctgctcggcagccaggctctggattcggacctcacacgggacctcaatcgggtgtaccatgtcaggcaggcaccggtgtttggttctgggtctgtgccatctattccacagaggagtttcaactttcgggtgcagccgatggtccagcagagaggggctgttggggacttgttctcaaatgctatgagttaa

SEQ ID NO: 4932 - DNA, 510 bp, Zea mays
  Peptide Sequence Number=SeqID_46711
atgaactccaacggcgctgccatagggccgatcctcgctcgctgctctagcaagtcccccggtgagctctcttcttcctcggtttcccattcaccacttgcttgcaaagatgttgccatggctgcacctagcagccgtatccccgtagaccccggcgcgcggcgagctcagtgccgaagccccttcgctccgctcccagccttctccctggccatggtgatctgctcctcgcaggtcccctgcgcgctgccttgccgctcagttcgtgttcccggcaagccgctggcgctaacctgccccacgttcttccccagccccagctctggcgagccaactctagccgtgagccctgccccgcagatgcctctcctttcggctagccagctttctcgtgtaagcgagccccaacgcggctccccttccctcccatgcgcggccaagctcctcccatggttgttggccggcgccttgcagcccacggagctcccttacacgctgcgcaaggcgtag

SEQ ID NO: 4933 - DNA, 387 bp, Zea mays
  Peptide Sequence Number=SeqID_46712
atggcctccgtcggcggtggcagccaaacgaggagctgccggggccacgacatgaggtcaagcaggggcctcaatcgacgaagtatgaggggcatgtcccccggaagacgcctgatcgctaggaggggcgctgtagagtgccggggccagagcgggagcctcaatcgtcatggtgagctcctcgagaagaagctcgttccgcatgtcatggaaggtgggaaagggcatgatcctcttgatcagaaccttaaggtgcccgtagtgggggctgaggccatgcaggaggttcagcaccaaggtgcagtcagccatcggctcaccgaggtcgcggagggacctctaggcccttcatctagcggcagtacccccatagagaggcccccgtga

SEQ ID NO: 4934 - DNA, 1362 bp, Zea mays
  Peptide Sequence Number=SeqID_46713
atggcactgtggcagttttgggtcagtgctctgcatgattttgggtccagtggattcgggtttagggacccaaattttattgggtttggtttccacccgcggatgtataatggagatttggaggaaggcagcaatgttgaacctgcacaggatgaagcaatcaataaaaaggatgctgataggaggatttcacctgcttcaacgttggagtcgtcatttgaggctctcaatgtaaagaaatttgatgttgctttcacggtggatcctctataccatcaaactaccgctcagtttgatgaaggtggggcaaagggccttttgttgtataaccttggagtttatggtagctgccgtgtgctgttcgattcatttgaagctccagacaaatgcatcttaagtgatatgcaaactgagcaggctgagacaattgacctttcatttgctaaagagcaaattgaggaaatggtcactcaaatgcgtctatgtaatgatatttctccaaccctgagggatattgttgctcaatttgatgaagaaaaccaaaggccatcacataggttatctcctggtcaaatgccagtaatggaagatcagatggatgatggtaatgaagcagacgataacgatagcatgctacctgattctggaacttgggattttggtgattgtcatgaccatgaggatacatatgatcaaaactgtaatccaatggattccatctcaacaaactttcaagaggaattcaatgaatacactgttgagattcctcagggtactattgtaaacgatagagttgacaaaattgcatctcttgtgttacttggcatggcctcatcaaaagcaaatgcttgggcaggacctgagcactggaaatatcggaaagctaaagatttggaggctgctccaacttcatcaggtgattcagaaataacaaataagataaagaaaagaaccaaggataaacctgacattggtttcacaaaagcattggacaatgagcttccaaatatcttcgcggctcccaaaaatccaaagacattactgtttcctgcaaacagggctatttgcagcaataaacttccagaagattgccattaccggcctgaaagccttgttaaattatttcttctcccagatgttttgtgtcttgctaagagaagaaaatcacttgatgctccagtggataataatgatgactttatcccatctgaaccttgggaagatgacaacttttgcaatgaccacattgatgaaggacatgtgtgtagtgatgtagaagagccagtaaatcttatcaataaaccgagacagttccgtggtgttttgtttttgcctatttttctgtatggtcagaggaaatag

SEQ ID NO: 4935 - DNA, 590 bp, Zea mays
  Peptide Sequence Number=SeqID_46714
atgtggctgcgcccgcggcagaaaagaaggggtatcgacggatccagtcgagaaagccatgacaacgacgaatccagccatgaagacgacgatccagccaaagggaggacggatctagccgggaaggtcgcgacagaggggcctgcgccgggcctgacagggcggttggacgccgacaacgggagaagcttgaaggagccacacagggcgctgctgggcgggagggccgtccacagggaggggagcccgcctagggaaggtcagaggcgaggaggccgtagcggggaggggcacctccggcggcaatggcgcgccgttgagctagggtgcggcagcggcgtccgcgcacttgcgcacccgagtggcagtggtgttcatgcccgcgcgcccgccgctgcgatgcagcggctcgtgcctgcacgcctgctcgcggcggcggaggggagggagggggagcgcacgaccggtgcagggaggttcggcggcaccggcaaccgggatgggggtgccgctcccgagggcgatggagagcctctcggggacgacagggggcggtcggaactttgctgccgctggcgcagtcgtgggtt

SEQ ID NO: 4936 - DNA, 429 bp, Zea mays
  Peptide Sequence Number=SeqID_46715
atggcgcccgcgcccggctcggccgccctcgccgtgctcgtccccggcgagccccgcgcccggcccggccgccctcgccgtcgcccgtgttcgcccgaccgccccggcgtgccgccggcgtgccttgctcgtgtcgtgatggccccggcgcggcctcgagctcggcccagcgtgcctttggcgcgcggcctcgagctcggccagcgcgcggccccgacgcgtgcgagactcgttcgcggcacgttaagcgtggctttgcgcgtgcacgtgcccacgcagcgccttggtgtagctcatcgtgcccgcgacgcgacgcatagcgccctgtcgcatccgcgacacgatcgtctaccccccagacgccccgtctaccccccccccccccgtatcctatgcgcgctaatcacgttgtttatattaataagatag

SEQ ID NO: 4937 - DNA, 501 bp, Zea mays
  Peptide Sequence Number=SeqID_46716
atgggtcggcgcgaggccgagcgcgaaggggggaaaaggcagccggagacgggcgtgagagaggtggaaatcccgcggccttcgtgttcgtcccgcgcccaggtcagattgggcgttgtggacgctcctccgaggtcgaggtcgagtctgtcttccgtggccgaggtcgagtccgagcccctgggtcgggcgaggcggagaccgtcggctgaggccagggctgagtccgagccctggggtcgggcgaagcggagttcgtcgtcttccggggctgagcccgagtctgagccctggggtcgggcggatcggaggtcatcgtcttctggggctgtgcccgagtccgagccctggggtcgggcggatcggagctcgtcgtcttcaggggctgagcccgagtctgagcccagggtcgggcggagcggagttcgccgtcttccggggctgaacccgagtccgagccctgggtcgggtggagcggagttcgccgtcttccgggactaa

SEQ ID NO: 4938 - DNA, 942 bp, Zea mays
  Peptide Sequence Number=SeqID_46717
atggagcatgcggggcgccatcattacttgttttaccggggcgagccagatgggacgccggtcttgttccccgtagccagagtcgaggtcgagtccgagcccttgggtcgggcgagacggagaccgtcggctgaggccgaggtcgagtccgagccctgggtcgggcgaggcggagctcgtcgtcttccggggccgagcccgagtctgagccctgggtcgggcgaggcggagttcgtcgtcttccggggccgagcccgagtccgagccctgggtcgggcgaggcggagtttgtcgtcttccgggaccgagcccgagtccgagccctgggtcgggcgaggcggagttcgtcgtcttcaggggccgagcccgagtctgagccctgggtcaggcgaggcaaagttcgtcgtcttccggggccgagcccgagtccgagccctgggtcgggcgaggcggagtttgtcgtcttccggggccgagcccgagtccgagccctgggtcgggcgaggcggagttcgtcgtcttcaggggccgagcccgagtccgagccctgggtcgggtgaggcggagttcgtcgtcttccggggccgagctcgagtccgagccctgggtcgggcgaggcggagcttcctatggcgcctgaggctggacttggccgctgtcagcctcactctgtcgagtggcacagcagtcggagcgacgagggcggcgctgtctttttctcagactggtcagaggagcggcgaagccacatttgcattaaatgcttctgcgatacggtcggttggcatggcgatttggccaaggttgcttcttggtgaagactgggcctcgggcgagccgaagctttgtgctgatgggggttaccagctgagatttaggagtcttggggtcggtttccccttccgccgttatgccgaagctcttctacgcatagcttcgtga

SEQ ID NO: 4939 - DNA, 279 bp, Zea mays
  Peptide Sequence Number=SeqID_46718
atgcacagaacaggtgttagcgcctggtttcttgcctacgcctgccctccagtgttggaggtagttatgctgctacttgtgctcctcgaactggagctgttcatcagccaacaagcggagtcgccaaaaagtgtgttgacgccgatcttggggccaatcactgcgttgagaaccggcggtagtgctctctacacaggcgcggacgggggcggcgaaggtcgccggcggcgcctggatctcactctcgggagggaccccgtcggggaggagggatcctag

SEQ ID NO: 4940 - DNA, 426 bp, Zea mays
  Peptide Sequence Number=SeqID_46719
atggctgggcgttatccctgcttccactacgcgcgcgatgggctgggagagcaacgcagcgtgggccaggggagcagcgtgcataggggaatgggctgggggagcagcgcggcgtggcttgctgggtctgggcagctcgcgcgcagagctgggccacgagatggtcgcgaggctatgggggaaggtgagggcgcatgggtcggggtggccgagcggcccagaaggggggcgctggtcgagcgaagggggaagaagctccaagatagtgatatgttgatttcgagctttccaatctttctagaagtgttgaataggttcctcaagacttttgataaaatcttttcaaagttatttgcatatggcctaaggaacaagaatgaaattttaagagcatgtctaagatgtaaagattctccccccttttga

SEQ ID NO: 4941 - DNA, 225 bp, Zea mays
  Peptide Sequence Number=SeqID_46720
atggcgcccaccgtagagacccttaagggtgaactaagtaggacgttggaagaggtatctgggtgttctctgcctctctgctggaaagggaaggaaccattcaaatctgtgcttgatgtgataaaggagttcaaatctttggtgctgaactttgccagtggcaagaagacccttatggagatccctactaagaactacctcattgtaacagtaaatattgcataa

SEQ ID NO: 4942 - DNA, 402 bp, Zea mays
  Peptide Sequence Number=SeqID_46721
atggcccagttatggtcacgtgtcgctgatccgctaccccaaatgcgaaaggtcatagtcgctcgtgagactaagatcgaaaaggttcttaaaatatgcatttttttcatgtggatggacgattatgtcaagatgtttgaaggggcaggggtggtgtgtggctctagggagatgatggcgtctaatatgtgggatgaacgagcagtagcaaatagagcagatgtgactacgaactgggacaaatttgttgtcgaactgaagaagatgaatgacaacatggtcgagttgaagaagataaaggacaacatggttgagttgaagaagatgtttggagcattttatgcttctatgatttttattgtattccttttctttgtgatgaactataattgtaagcgctaa

SEQ ID NO: 4943 - DNA, 297 bp, Zea mays
  Peptide Sequence Number=SeqID_46722
atggagagtcatgatctccgggcagaatgggaatcacggcttgtgggtggttatgagattgatggttctggttatggttatggtattgatagattttcaccaccacaagcagagatcggccaatctacgaattctgggcacagcacaggaaagctagggaaggggcatggtctgggtcgcgtggttcgaagcagcctctcggcgttgtggggaactgggggaaagggattggttttgggtttatccccttctccagacccacagggaaatctccagggttacaaaaagcggcagtaa

SEQ ID NO: 4944 - DNA, 357 bp, Zea mays
  Peptide Sequence Number=SeqID_46723
atggtgaatggtccttgcaaattaacgagttcatcaaaactcggcaccccgagtatgacacgtaccaagactacccaacggaaggcaaccggaccacgaggcgtgccccgacaccagttagctcctcgacatgaggggagcagtagcggaagtaatgatcctataggggatctggagctgcacccgaacgtgccatcggaggtcgcagcaatgggagccgaaacatctggagcagctgacggaggagattatggggagttggatctttttggagcccctcctttcatgaacctcacagatgaatgttctcccgaagttggcagtggagtgggagcagccaaggatgaagataattag

SEQ ID NO: 4945 - DNA, 252 bp, Zea mays
  Peptide Sequence Number=SeqID_46724
atggacgaaggccttaagctgaagctcctgctcactagcgctcgcaagattttcaagctctctgagcttcggttaaaagacacgttttcaccatgtgtggagacgaagctgactgaagaggcgaagctgtttgaggagaaggaggctatagatccctatgttgttgggtttgttgagtcgatggcaaagacaaacacagagaagattactaaagggattgttggggacttgttctcaaatgctaagagttaa

SEQ ID NO: 4946 - DNA, 261 bp, Zea mays
  Peptide Sequence Number=SeqID_46725
atggcgagctcgtcagcgctcgccgtcccctccatccctctccctccctcgagcgcctataaaaggacccacccgagccccgccttcaccacaccagctccggccaactcctctgctttcccccgagcgaaacaagctagcgtcgccgtgcttcccccgtcgctccgggcactcctttccccttctattgcgcccgacaaccgcaccgacgacatcaccgccgtggacacccgccaccgcgccacggaccggccgccatag

SEQ ID NO: 4947 - DNA, 594 bp, Zea mays
  Peptide Sequence Number=SeqID_46726
atggtgttgagccccgcctttgccattgaggagtgggggtgggatgcggccgccttcgtcagggaggtggaagcggaggcagtgaaaattattggaaagtactcagcaaagacggagctaacgaggagttgggatatacggggtttgaatgtcaggctaaaccatgtttttgaatcgaatggccttaggtatggcccatatcctaaggagggttctaccgatggcggggatgaacgaggaaagaagaaggtgacggtccgggagaacgaaggctgctcgaaagggaaggctgtagttgcggcgaccagaaaaagaaaaattgaggtgaaaggaggagaaaggagacgtctgtccttgaagcgcccggcctcggacaaaccccgaggcatgaggccggggtcgggcatggcggagctggacagggggcagacgaatcaaagggaaaccaatcgagtggatccctcgcccagctcgagactgacccactcgacggacgaccccgcggccatgatcgccggcggcgatagcggagaccggcgccggggattcgattggcagcaaccacagccagctgccagcctgaccgagacgtaa

SEQ ID NO: 4948 - DNA, 300 bp, Zea mays
  Peptide Sequence Number=SeqID_46727
atgggcgtcaccgtgaacgccgccgcgctgaccactctgctgttgtacggccgcgtcgacgttggagagcccgcagccgagtcacgccccgccgtccccgcacgatccctggacagcgagctgctacgccatgccttggctgagccccgccaccggcgtgcttgccccagtcccatcctctgcgtgtgcgtcatgagaagtggagaagaagcaaaccggaccctcgcgagcatgtcagggagtcgcttcggcctcaaactggcagatgacatcgtgggctggttgggtggcacggaataa

SEQ ID NO: 4949 - DNA, 459 bp, Zea mays
  Peptide Sequence Number=SeqID_46728
atgagcttgtaccggccgtatcccgcaacgacaggtgctcccgtgcggcagacaccaaattggacccctcttaatcatttcccctcactcaagttcaccaatgaggctctacatcaactggtccacggagacagcgtgaacaagcggatgagtgaacgtgttcctggtgatctaagacctcctagcttaatcggatgggtcagcgagtatcagcagcaagttgatttgggggaaatcccaaattggggaactctagaggatgattcgaggcatgggttgctggatgaagggcttgactacttaacggagccatgggtatgcgcaatttatagcaggcttgagcggtggccagtgaatttgaggaagtcgcgcggcgggcggagaaagaggggttcactggcacgcgcgattggtggcaattaccgtggcaagcttcccggcaaccaccggatgggctaa

SEQ ID NO: 4950 - DNA, 450 bp, Zea mays
  Peptide Sequence Number=SeqID_46729
atggcgagaatggacttgatttgggctagccacggcgagcttgatttcacggcgacggaaaccgaattggggaatacccaaaattcgggcacactagtgatcgactgggggcaatgcttggtggctgggaggacgcgcgacggtcggaggagggacaggtcactggcgcaatggcttggtgtccaacgtcgtggcaatcgctccggtgatcaacggagagcgagagcaggatatggcgatgcggtggaaagggttagacacgcggcggacaatggtgacggcttaacaacgatgtatgagaacaggcgcagaggtgcgaggcgtgctcagccagagcaacaggcaccccaggaggaggcagctccgcagcagcatttgccaccaccacccccgatgaccattgagcagttgttcttgatgcaaacccaggcagttcaggcaattggttag

SEQ ID NO: 4951 - DNA, 168 bp, Zea mays
  Peptide Sequence Number=SeqID_46730
atggggttcgacagagcacgtgttatcgaagcattctttgcctgcgacaggaatgaggagctagcagcaaactatcttcttgagcaggctgcctttcgtcaacatctgagccacattgaccaagattggaagttccgagtggactactcagagttgatatggagctga

SEQ ID NO: 4952 - DNA, 315 bp, Zea mays
  Peptide Sequence Number=SeqID_46731
atggggcagggtactccactgctcgaatgcggccgcttgttgtggatagcatcaccgcagtcgtctttgcattcgaatctcgtagtaccgatgggattaaggaatagtggggtgtctcttgctcggccgtacttcggcgggagcgctgcatcagtcggtgcgtgtgaccggggaagaagacaacaccgggtcgttgatcttgggatcaacggcttcggttggatgaagggatggtatgcgcaggaccgttggatctacgtaggacggatgggattagatctgggagagagtcaccgtgggccgttggtcgactga

SEQ ID NO: 4953 - DNA, 726 bp, Zea mays
  Peptide Sequence Number=SeqID_46732
atggacagggttttgatctgttcacgagcagtagacagtgagacaagtactacttggctggggggccagccgaggcacgacgacgccggggcatcgctgcccagtgtgccgcggtggccgcggacggtgttcctggtgggggccatgtcgtgcctcgccatcagcgcggcggcgcacctgctggcgtgccactcgcggcgcgccagcgcggtgttctggcagctggactacgcgggcatctccgtgatgatcgtcgcctccttcgtgccgccggtgtactacgccttcctctgccacccgccggcgcgggcggcctacctgtgcgccatcgcggcgctgggcgcgctggtggtggccgcgctgctctccccgtcctgctcgtccccgcgctaccgccgcctccgcgcggcgctgttcctggccatgggcctgtcgggcgtcgtcccggcgctgcacgcgctctggctcaactggggccacgccgcctgctacctggcgctgggcatcgaggtcgtcatgggcctcacctacgccacgggcgcctggttctacgtcagccgcgtgccggagaagtggcgacccggggtgttcgacgtcgtcggccacagccaccagatcttccacgtcctcgtgctcgtcggcgccgtcacgcactacgtcgccgtcgccgtgctcatccactggcgggagaaggtggccgtcgcctgtggcgccgcgtcggcgtag

SEQ ID NO: 4954 - DNA, 624 bp, Zea mays
  Peptide Sequence Number=SeqID_46733
atgcctgcccctgcccccgcacctgtccctgcgatgcccgcggccatagtgccccctcccttcgacgcgctctgcggtctccagatgcgagtccggggctcgctatccgtggaaggcgaggagagacggtgcattggctctcgatccgcgctctacatggaaggtgaggcagatcagggggagtggctcagagcagtcgcctcgatgtcgtccaacgcgccgtccggtgaggtgtcgtccaagcacgacggcggctacgggatcgtgggtgggcccaacggcaacaccgtcgcgcccgccaccaagtccaccgtcgtcgagaccatcatcgagagggagtcgctctcgctggagaagttgtgcctcgtcatgggcctccacgacggatcaaccaagtgcttatatcctgttttggaatatagttccaagaagaacgctaaggggaacaaacctagaaaagaaagaaacataattttgaaggtttcagaacgcctagagaagctattgaagatttatcatggttacctaatagttcgttgccaatcaatcatcatggtcactaatgtagcaattagggcatgtcaattacctgaacttgtgctgaagaagaatatgccaatttga

SEQ ID NO: 4955 - DNA, 100 bp, Zea mays
  Peptide Sequence Number=SeqID_46734
atgaactccgagctgagagaaaccatgggagggagtgacggcatggccgatccggttgtgcgtgctgttggagctggtcctcaggtagagatggcaatgg

SEQ ID NO: 4956 - DNA, 483 bp, Zea mays
  Peptide Sequence Number=SeqID_46735
atgaggccttggatacatgggaggatgaatgtgctttacgtcaacgttttcccgatgccgctgtttgagggcaagcagcttcttaagatcgggggaatgtcaggagtccggagccagcggcgaagcaagacgcagctgctccacggacagagcaggagctgtcgaaggagcgcgggaaaaggtttgcacgtcgtgggccaaaagctggtagcgcaggcccaacggcacgtcggcatggcaatgctccatccatccaggccccagccgttgcgttgcggcggacgcgcagtagccatccaccgactcgagctgtttcacatgcagatcaccatactattagttagcatccgcgcagtgccccctctgcctctggtctctggggcttcgatctgcccggagcggacgtcggagcaggtgcgggacggacgggaggcgcaatcatgcaggcaaacaggcgttgcaggaggagctgtctcccagtaa

SEQ ID NO: 4957 - DNA, 252 bp, Zea mays
  Peptide Sequence Number=SeqID_46736
atggtcaccaatgaaaatcctgaagcctcgagaaggaagaacgaggaacatactccatcaaaggaggcctgcgacaaacacaaagaagaatccgtcggctccatcaagtcacagaggaagggtaacaagaagaaaaagaaaatgaagaaagtggtctactacgagaccgactcttcatcaccttccacatctggtgccgagaaccacaggtgggcgatgaggattatgactccgatgaggccgctcaaataa

SEQ ID NO: 4958 - DNA, 423 bp, Zea mays
  Peptide Sequence Number=SeqID_46737
atgggcaagaacaacaagcgcaagcgtgagccaactcctccatcggaggagtttggtgactcggagtactcagagaaggagttctcctctgagtctgaggggtctccggctcccgtccccctgcgtgagtcgtctgatgactcagacgactcccaggggctcgcggtggaggtctggacgtacatccgggccgtcgagcgctccgggctcaagggctcggatgagtcggagtactcctcggatgaggaggactcggacggcggcggcgaggacgacgacgacgacgacggcgacgacgacgacgatggcgacggtgacggtgacggcagcggcaggggcagcggcggcggcagcaacaaggacggtgacggcggcggcagcaggggcagcaaccggggcggcagcagcagggccagtggctag

SEQ ID NO: 4959 - DNA, 264 bp, Zea mays
  Peptide Sequence Number=SeqID_46738
atggcgacacctccaaagcgaacgagcggcggcggcgcacttcaggcccggtggcgacggtggttgcgcgaggcacgtatgttcctgaagacacctgaagatccgagacctcaccattcaggtccaaagataaagatattatcagcatccctagagaaggatcctgtcattaaacctctacgagatttagattctgaaaccctgcaggcaacaataccacatattccattatgggtgaagagcccagactacgagcgggtgtaa

SEQ ID NO: 4960 - DNA, 591 bp, Zea mays
  Peptide Sequence Number=SeqID_46739
atgacaatagcctgccccggagtcgtcgccctgatacttcataggatcacgccagtgctcgtggtgccctcactgcgctcacccgggggtcagggcggtcgaaatttttcactggaacaaccgcaaagccgctcacctatggagtcgcgtaatcctgcgctgccaccgcaggatccaacgtcacagaatttgggtggtaggatcaccagaaccatgctgctccagtcatggcgccatcggggcagtgggcgccatcgtagttgggtggctggtgttaaggatgggggcgttagtgttgtccgatttggggtggagggtggagatccgattcatgcgtaccccttcaacaatagaatcaggttcatcaattatgcatcacatggtgtagatttaattacgacgtggacatcgctcgagccacggatctatgatccaagggctcgaaaagcataccagtttaacagttttggggttttaatctggtgctttgtgcgcaaatcggatggctgtcatgcgtcgatacaccttcgcccaatggtttttttatcacgagtccctaatgttttgagaaaacaacccacagtctgctaa

SEQ ID NO: 4961 - DNA, 267 bp, Zea mays
  Peptide Sequence Number=SeqID_46740
atgtcgagagaacacgccaagagggagatggtcacggcgaaaagcgtgaaatcttgggaaggaagaacgatgaaacgaactccgtcaaaggaggtcggcgataagcacaaggaggaatctgcttcctccatcgagtcacataggaagggtgacaagaagaaaaagaaaatgaagaaggtggtctactatgagaccgactcttcatcaccctccacatatgcgcgccgagtctaccacttcgaagtgccaagagcgcaagaagtatag

SEQ ID NO: 4962 - DNA, 351 bp, Zea mays
  Peptide Sequence Number=SeqID_46741
atgtcagaacaatacacaatcctagtcaaaaagagggcatgggcaatcacaaccagcacagttcccagtcaacaggggcataacagagctccttcacaccaccagccccaagaggtagagggggacgaaacttcggaggaagattcaactctcaaccaagaagagtatgtgggcaatcaacagccattctcacaaccaacaatttcagtggcttcggcaagtcactctccagctgcatgggccttaccgcaaccacctgcacttgctccaacttcatcccacattcagcagcctaaagggcagcaccaagtccagcagcaacgcgaagcaagggaggagtctgaagcttga

SEQ ID NO: 4963 - DNA, 450 bp, Zea mays
  Peptide Sequence Number=SeqID_46742
atggacgtgttcttacctaaaatcgtggtgcaaaaccacaggccgacgacgggaatcagctccaccgtggacgaagacccacatcgaggaattgcgcgtgcgccaaaggttcccacggttggaagccctccccacgcatttcactgctccgagtgccacaccctgaccccctccgtgaagctccgtcagcagtatgcgcccaggtggatgccggcggtggaggcaagcctcccttcttccgccaacccccctccttcattgttgtgtcgtccgcaatcagatcagcttgatgtggacgagggagggttgtgccacgatctatatatggagcccggtgcctaccccaacgatccgcggcatgcgcacgattcagttgaaatccacacggttgagctagggcaccgtggggaagggaaggtcttccaagtggggcccacatgcgagtggtag

SEQ ID NO: 4964 - DNA, 450 bp, Zea mays
  Peptide Sequence Number=SeqID_46743
atggagacgaccaacgttgaaaggataactgatgatatcttggctggcttgtctgaagattcgagagacaacaaggattttgatgttgatagcggcgcagatgatgcagaagttgtgggacccagctgtcgaaatcatgctcctgccgtgcacgagggagtcgtctcctttccgctgacattgtgggccccggtctccatgtcgcgtgctcacccgagatcgtcggactcggtggcgcgcattgtcagccattggacctccggccccgctgccccaaacgacccccgtgcctcagccataaagctaggcccctacgacgtccccatccccttgaaccaagcctccctcacccctatgctcgggtcgtcggcggagggtgtgcgaagcctcgccttaggcggtgtcggtgggaaaatcctccggccaggtggcggaatgcacccgccctaa

SEQ ID NO: 4965 - DNA, 189 bp, Zea mays
  Peptide Sequence Number=SeqID_46744
atggcaccccccaagccgggcgccccgaaggcggcgctccctaccgcggcggagcccatgttggagtcctgcaattcgacgatcccggcgtccatgtttggtccaggacctccacttgtgcgaaccgaacccctagaatgggatctggacccctgtatggggttcgggcggcccacagtggggtcctag

SEQ ID NO: 4966 - DNA, 129 bp, Zea mays
  Peptide Sequence Number=SeqID_46745
atgaagggacgaaagagggctgcgacgccacagaggggtacatataccagagattggcgcgaaaggaggcgccaggccgaggagaaacgagaactccaggcgttccgccggagccaggctggggagggg

SEQ ID NO: 4967 - DNA, 822 bp, Zea mays
  Peptide Sequence Number=SeqID_46746
atggcggccgtggtggcggcggtggaggcaggggtggtggcggtggcaagcgggaggggatgcagcagccggctggtgcggggcctctactggcgcctgcgcgcggttctgcggcggctgcggtcggagcgagccaggcgcggcaggaggttcagcttccactacgacgcgctcagctacgcgctcaacttcgacgacggccgcgccgcccccgccccggcccccgccgcggccgacctcgtccttgcccccggcgacaacgacgcgctacggcacgatggctctgacactagtgaagcgtggtacgagtacggcccagcgtgggccttgggtgctgccaaaagcacgatagatggagagattggacgcagcggcagatgcaacacgcgcctgacctgtcagctgccactgccacccaccctcttcaatgacgccgtctcggtgtcactgtttggtcattacatactagcagtggacaggaggggcgccaccgccgcgcccggagattcttggatcgtctctagtcgcatcccggaacagaagaagagaaggaaaaaattggcccgccacgaatcagattcgctccatccgtccatcaccgtgaagtctgccgatcgtcagatcctggtgcaacgagtacgacagtacagcggaagagaagccagggttcccgccttcccggtgctccagggaaaaggcactcggcacgcaagccatgatgaatggaagtactcgcagccagtacaagcaatgcttccactgttccacaccggtcactcgaaccaatgtagtacaagcattaggtcttcaccggctacttga

SEQ ID NO: 4968 - DNA, 318 bp, Zea mays
  Peptide Sequence Number=SeqID_46747
atgcctcccctcgcagtctgcctaccccgcgtgtggctccccacctccgaccacctcgtcgtcgccgatggagccagttccgcggtccctctcgtcaagctcggaatcaaacccgacttggaagtggcggcgcaggcggcacgggctgcacaggctgcacaaggacgctctgctggccgccgcactggttcacgcatccgccatcacccgggagcgattctggcaaggtcagacgatgaagacgaagttgacggtccagctaagaacaaggctaccgacaagaacgaagagaaggtgaaggaagaggctgagatatag

SEQ ID NO: 4969 - DNA, 927 bp, Zea mays
  Peptide Sequence Number=SeqID_46748
atggccgaggacagtgttcaagtaattggggaggtgcaggaagtggtggaagtgcatgctggtactgatcagcgtggcaggggtgcaatgaggtggactagtgttatgtctgcctttgtgctccgccgtatgtgccagctgatctcaagtggtgttagaacagacaaagggtttaaggaggtccacctgaaccaggttgccaaggctctacaagagtttattggcagtgaggtgaccggtactcaggtgtacaaccacttacgtaaatggagacagaggtggatgagggtggcaaaattaagagagttgagtggtgccaattgggatgaagacttatgcatgataagtctggaggatgagcactacaatggccacattaaggcccaccctaaggatgctgagttcttaaacaagcctatagaaaactataaggagatgatgactatatttgggacaggattagcaactgggaagtatgctatgggttcaaatgaagctttaggatctccatgcgaggttgctactagctctgttaagactgattcccttgatgaagacaagagtggtaagtcagttaagactgattcccttggtgaggcaacaaaggatatgaaagaaggtagtagtggtgtaggcaataagaggaagaggggtgtgctcactgatgaggacactctgatgttgtctaaaatgacagatgctgtcaaggatgtggcagctgctattcgtgagaccaaagtggaggtgattaatcctgacctatatgttgcagtgatgtatatgcctggatttagtgaggaagctttaatttgtgctttctctcatctggtggacaacaaggcgcagggggatgcttttgtccacatgactgactcccatcgtgtcctgtggctaaggacatggctagccaagaactacttcctgtag

SEQ ID NO: 4970 - DNA, 591 bp, Zea mays
  Peptide Sequence Number=SeqID_46749
atggcgtcgagctcctgctacgccttcttaagcacgtccgcatgctggatcagctcggccaacgcccactccactgtgttggatgtcgtggagatcaagaaagcgacaccaaataaatcctccaatgcaccaccaccaccagtgtatggtagaaatgctaggtcatcatatggtagtgcctctagggaccacccttcagctgataactatgaatttttagatggtagattgctaaacttggctattcctattaaccattgtttcctctgtaacagagttctcgaagaaggttccttcgaatcaagaaagcggaaccaaataaatcctccaatccaccagaccaccaccgccaccaccaccaccaatgattcccccttccgtcggctgcattcctacgcgcgtgttctgtctgtttctctcggccccctctcgctctccgacgactggtgggccgctgccggcgccgccgccttaacccagcgtgagtacagtttccacaaacacaaggatctactccatgagcacaatggcacaactggtgccatggttgctaccctgcttcctgctgcttctactcttctgcttgtttag

SEQ ID NO: 4971 - DNA, 1047 bp, Zea mays
  Peptide Sequence Number=SeqID_46750
atgttgcggccgccgtctcccgtcctctacgtccaggaaaagaagaccgccgtcgccggaatcttcggcgaccgccacttcttcgacgccgcctccttctctgacatccgtgccgcccgtgtcgccgtcgcggtcccgaacccgcaggcccagccacccgcctcccgccgcgctctcctcctccgttaccatcgcctcctctcctccgcccgtaatgacacctgcgccttcgacgagacgttgtacatcacctggcacgacgccttccgcccccacctgaagcacacagccgcctccctccgcttggagaaggccgccatcgtgttcaacgtcggcgcggccgcctcgaggatcgcggcgaccgtgagccgcgccacggaggaaggggtaagggcggcgtgcggggagtttcagcgcgccgcgggggcgttccgtgcggttggggagatgatggaagaggaagaggcgacgacggtggatatgagttctcaggcctcggcgatgctggagaggctcatgctcgcgcaggcgcaggagtgctgtttcgagcgcgctctcgacgcagggaaatcacagacagtgtgctcgaaagtggctaggcaggctgccctgtactatgaagaagcttatgctgcacttgttgctcctccgctgcagaaccactttgaaagatcatggatatcccatatccaattgaaggctgctctgttcaatgccgaagcttgttacaggtacactattgaactccatgggaagacagaaattggtgaggagatatctcgattgcaggttggaattaaggcacttgtggatgcaaagcgaactgcaagaggagctcctggacccctgtatgattatgctttcagactagaacaagatatgaacaagaacatggagacagcgaaagaggagaattttcgtgtatacctttttcgcattccagctgccgaatcattggcctctctaccatcagcttcactcgtccgttctgcatccttgagtgagatcttaaatccaaagacagaaaataccactcaatctccataa

SEQ ID NO: 4972 - DNA, 420 bp, Zea mays
  Peptide Sequence Number=SeqID_46751
atggccgcggctgtcgcccaccccgccttgacctctttcttgctggcccatcggaccgatgtcgcggtggcggcagcgccagcgggcagtcgagattacgcagcccaccgctgcagctcgatgaacaggccctgggcaggggcagtgccgactgccgacccgatgcccgagcccagtgtccgctcgcgcgccagctctggaaatggtaacggccactaccgtggatgcagcgctcatcgtgccagtggcagagtggtttggtggtttctagaatggatattgtattggtacgactctcaacgaaagcagtttttaggcgcaattttgttttctatattccttgtacggttggtgattcctagaagggatcaggtttggtggtttctagaatggatattgtattggttcgactctcaatga

SEQ ID NO: 4973 - DNA, 528 bp, Zea mays
  Peptide Sequence Number=SeqID_46752
atggagtacgagcgcggtggcggaggcggccgcggccgcgggcggggccgtggaggcggcggaggaggagggcgcggaggtggcggcggatacgggcggcagcacggaggcggcggcgacgcccgcggaggccgagacgagtacggcggcggaggaggagggtacggatacgacgaaggagaaggctatggcgggggtcgtagaggcggcggcggagggtacgggtacgacgtagggggccgtagaggcggcggcggctaccaccaagggcctcgcggaggctatggcacgggcggcggcggctaccaccaagggcctcgcggaggctatggcacgggcggccgcggcggaaacgcgtgggcgccggctcctggcgcggggagaggtcgcggagttggcggtggcgcggccgagtacgcccccgtcagggggccagcgcccgcgcaggcgccggtggcgagtccgcttgcgcccaaggacaaggaggcgccgcgttcgtcgggatccgtcgtgagcagcgttctttga

SEQ ID NO: 4974 - DNA, 1956 bp, Zea mays
  Peptide Sequence Number=SeqID_46753
atggtgatgaacctggacgtagcgatggacggggagcactacatcgtccgcaaaaaccatacaccaagggatatctccttgtatgtaccttgtaatcttatctatcaccaaggcaaaaagattccaattaaacagtactctgaaaatttggatgcagctgcgtcctttgcggtggactgtggtggtagtagagcaatatcaggttcagataattctgtctatcaagctgataatgccaaccttagtgctgcatcgtactatgttgcgggtgcacctacatgggccgttagcagcgttgggttattcttggacgcagatgcacccaatgcaagttacatcatctacagttcacgccagttcgagaacaccctagactctgcactgttccaaacagcaaggatgtcgccatcatccctgagatactatggcattggacttgagaatggaaattacacggtcacacttcaatttgcagagggagagcgcaaggagcagaactttgacattagaaaggcagctggagggaaatctttcactgctgttaagaagcagtatgttgttccagtaaccaaaaacttccttgagattcatctcttctgggctggcaagggcacttgttgcattccttataagggatactatggtcctgcaatatcagccctgagtgcaactccaaatttcgttcctacagtccgtagttctgaagacagcaagagcagccataaaactggtgtgatcgctggggttgcagttggtgtttcagtttttgcattgatcgcactggccggaatcttcttgtggtgtcagaaaaggagaaagctattgttagagctagaagaattgtataccatagttggaaggccaaatgtcttcagttacagtgagcttaggtcagctacagagaacttttgttctagtaacctacttggtgaaggaggatatggatcagtttacaagggtaagttgagtgatggaaaagtggtggcagtgaagcagctctctcagtcctctaaccagggaaagatgcagtttgcggcagaaatcgaaaccatttcccgagtgcagcaccgtaacctcgtgaggttgtatggctgctgccttgagagcaaaacaccattgttggtctacgagtacctggagaatggaagcctcgatcatgctttgtttggaaaggggagcttgaatctagactggccaacacgattcgagatatgtttgggcgtagcaagaggtatagcttatctccacgaggagtcaaccatccgcattgtgcacagggacataaaggccagtaacgtgttgatcgacgccgatcttaacccgaagatctccgatttcggccttgccaagctctacgacgacaagaagactcacgtcatcacaaatgttgctggcacgtttggttatctcgcgcctgagtacgctatgagagggcatatgactgagaaggttgatgtgttcgcgtttggcgtggtcgcgctggagattgtcgctggtgaatcaaactatcagaatgctctggacgaaggcacgacctatatctttgaaagggtgtgggaactgtacgagaacgggcggccgctggagttcgtggacccgaagctgacggagtacgacgcgtacgaggtgctgcgggtgatccgcgtggcgctccactgcacccagggctcgccccacaagcggccgtccatgtcgagggtggtcgccatgctcaacggggacgccgacgcggccgaggacgttgcgaagccgagctacatcacggagtggcaggtgatggcggccgacgtcagcggcagcttcgcgagcagccacgtcgggtcgtcgtcgacgcagacgcagccaacgtcttcgtccggcggccacggcggcgcccaggcgagccctgagcccggggacctgacgcccgcggtcccgtcgccgctctacacctccatcatcgaggagggcaggtga

SEQ ID NO: 4975 - DNA, 774 bp, Zea mays
  Peptide Sequence Number=SeqID_46754
atgaggaagcccaggctgagtgtcggcggcggcggcggcctcctccatggctttccctcccccgtgctgctgttcttgctgctgctgctgctgagttcttggagggtggctgcccaggcgcagcaggcgcctcagactgatccggtggaagcggcggcggtgaacgcgatcctgagcaagctgaggctgagcgcgccgccgtcgtggaacatcagcgggaacccctgcagcggcgccgcgacggacgacacgtccatcgacgacaaccctgcgttcaacccggccatcaagtgcgactgttccgaccaaaacaacacgctctgccatgtcactagactgaagataaacacactggacgcagttggccccatacctgaggagctgcggaacctcactcacctcgttaaactgaccgtgggcatcaatgcactatctggacctgtcccaaaggagcttggaaatcttaccaatctcttatcactggcattgggctcaaataattttaacggcacacttcctgatgagctggggaaactgacaaaacttcgacaaatgtgggcatcagacaataatttcagtgggcagattcctgattatcttgggagtttgactaacttgacccaactgaggctccaagggaactcttttcaaggtcccattcccacaagtctttctaatcttgtcaacttaaaaaaattggacctgagtttcaacaatatcacaggacaaatacctcaatcaattttgaatcttacatctcttagttatttgtaa

SEQ ID NO: 4976 - DNA, 1998 bp, Zea mays
  Peptide Sequence Number=SeqID_46755
atgtcggccgccggtgccacacgtggtgcagtaggaagcgctggtgttgcgcacgaagggatagggggtgctgatgccatgcacggttcggctggcacaggagctgcgcagggcgcagcaggagtcggcggcaccgcacggggcagaaatctagaagggaccgtaggtgcgggcaggggcgtggtaggaggctcgaacccgagggctgcctctcttgctgtggactgtgggagcagtagatctatatctggctctgataagtccatgtatcaacgtgatgatgccaatcttggagctgcatcctattatgttacaggagcacagacatggggtgttagcaatgtgggcaagttcacggaggcagtatacgaaagttacataatctccagctcacgccaattctacaatactctagatccagaactattccagacagcaaggatgtcggcatcatctttgagatactatggtattggactccagaacggaaattataccgtcgcacttcaatttgcagattttgactttgaagattcacagacttggcagagtgttgggagaaggatttttgatatctatctccagggtgagcgtaaggagaagaactttgacataatgaaggcagcagggggaaaatcttacactgctgttgagaagcagtatattgttcctgtcactagaaacttccttgagattcatcttttctgggccggcaagggcacttgttgcattccctttcgaggctactatgggcctgcaatctcagctttcagtgtaacgccaaattttaaccctacagtgcagaccagtaggaaaacaggtataattgttggagtcgtggttggtgcagcagttttgggagtactagcacttgctggactctgtatgaggaggcagaaaaggagaaaattattattggagcaacaggaactttacagtattgttggaagacctaatgtattcacttatggtgaactaaggacgtctactgaaaattttagttccaataaccttctgggtgaaggaggatatgggtcagtttataagggtaaattagctgaaggaagggtggtggctgtaaaacagttatctgaaacatctcatcaaggaaaacaacaatttgctgccgaaataggaactatttctcgagtgcaacaccgtaatcttgtgaagttgtacggttgctgccttgagggaaataaaccactgttggtttatgagtatctggagaatggaagccttgataaagcattatttggtacaagctcatttcacttccacgcaacagtaactctaggagttcagatatgtttgggcattgcaagaggcatcgcttatctccatgaagagtctagcatccgtattgtgcatagggacataaaggctagcaatatcttgcttgacgcaaatttcaaccctaagatctcagattttgggctcgccaaactttatgacgacaagaagactcatgtcagcacaaaagttgcgggtacatttggttatcttgcacctgagtacgccatgagaggtcatatgaccgagaaagttgatgtgtttgcatttggcatggtcatattggagaccttagccggaagaccaaattttgacaatatgctagatgaaattaaggtttatatattagaatgggtctggcaactgtacgaagataagcaccctctggacatggtcgaccccaagctcgaagaattcaacagtggcgaggtgatccgtgccatccacgtggccctcctctgcacccagggctcgccacaccagcgtccttccatgtcacgagcggtgtcgatgctggcgggagacgtggaggtgggcgaggtggtgaacaaacccagttacatcacggagtggcagatcaagggtggcaacaccagcagcttcatgagcaacaatgtcagtggacagtcgagcatggcaccaaggtcgtcagcctcgcacacctcgtcgccgttcttgaactctgtcatcgaagaaggctggtga

SEQ ID NO: 4977 - DNA, 1056 bp, Zea mays
  Peptide Sequence Number=SeqID_46756
atggcgggggctgccgagggcgccggcgcggaggcggtggagagggcgcacgggctctaccgcggcggccgccaccgggaggcgctggagctctactccgccgcgctggctgcggcgcggggccccgcgcagcgcatcgcgctccacagcaaccgcgccgcctgctacctaaagctccacgacttccacaaggtcccactcccggctccctctgctctgggtgggtttgggttgctttcctgcacagattgcgtcgtcgcttttggtccccacctcgcctcggtggtgacttcggggaaggggcgttccttcggcgcttccaagtgtcagttttggtcgaaatacagctgtcctgttccgggttcagggttcaggggctcctgcgatttcggtctcgtagattgtgttttctgctcgtcatacaacaatatgcatgctcaatttgtactgggtatttgtgcgcatggactggcagcacaagagtgtacatctgtcctcgagttggatacggagcatgctggagctctgatgttacgtgcccagactctcgtcactctgaaggattatcagtcagctctgtttgatgtcaacaggctcgttgagataaacccgtcgtctgaagtgtatcggaacctgcaggcacgattgaagacacagctatcactggccccaattcctgagtgcgaagaggagtccctttgtcgtgaagaggaagacgaagaacttcctccacgagttcagaagaccgacacttcttctatcgctaagcctgaccaaccagcaaccaaactggtcctcgagaacaaaccttcagctggaccaattctccacagaaaacctgcaactgaacctctaaaggctgtggttccgtccacttcgccttcaaaaccccagggttgggaagccatcccaaaaccgaagagtcattcaggccttgactactcaaaatgggacaaaattgaagaggattcaagtgaagacgaggacgatgaggaagatgagctgccacagtacaagtttaaagtcagaagtgttggtgtgcggtctgtaaagtga

SEQ ID NO: 4978 - DNA, 435 bp, Zea mays
  Peptide Sequence Number=SeqID_46757
atgggcaagaacaacaagcgcaagcgtgagccgactcctccatcggaggagtttggtgactcggaatactcagaggaggagttctcctctgagtccgaggggtctccggctcccatccccctgcgtgagtcgtctgatgactcagacgactcccaggggcttgcggcggaggtttggacgtacatccgggccgtcgagcgctccgggctcgagggctcggatgagtctgagttctcctcagacgaggaggactcggacggcagcgagggcgaggatgacgacgacgacgacggcgacgacggtggcgacggcggcggtgatggcggcaacggcagcggaggcggcggcggtaagggcggcaccaagggcggcagcagcgtgggcagcaccggaggcggcggcagcgagggcagcggcagcagggccagtggctaa

SEQ ID NO: 4979 - DNA, 474 bp, Zea mays
  Peptide Sequence Number=SeqID_46758
atggcgcaccgaacagtgtctggtgtgcaccagacaatccgatgcaccaggccgagctccactcgaacagctcaatctcgggaatttccaaggagcgcacctgaaagggaaatagggtgccaaaggttcacaacaaaccaatacaagtcaaaagaaagggttcaaacaaagggagcaaaagacaaccgaagtgtgcctggtctggcgcaccggactgtccggtgcaccaggaaatcaaactccgaacttgccaccttcgggaattctggaagccgctccgctataattcaccggactgtcctgtgttgcaccgcactgtccggtgtgccagcggagcaacggctacttcgcgccaacggtcgtctgcaaaacgcattcaatgcgctacagtgcgcgccagagtcagagcaacgccagaaggcgcaccggacagtgtacagtgactgtccggtgcgtcaccggactgtccggtga

SEQ ID NO: 4980 - DNA, 438 bp, Zea mays
  Peptide Sequence Number=SeqID_46759
atgggtggagcaagaagccggacgcagcaatgggcaccaggagaaactcggcaggaagcgccgctgcgcgcaggaagcaatcgcgcagggggccgagcagagcacgacgcgtgcgctggaaacaacagagaaggcgcgcagggcgagttccatcggagaagcgagcagccgagtgagcagaggagctggggatcgcgacgctgggagcaggggcctcggctggggagggctcggcgagctccatggcaggcggctgagcaggagagagcacaacagggagacgcggcgctggaagccggcgagtacagggagatggatgccataggaggaaggagagcaagctgcagggaggaggaacagctggtctgggcgtgcagcagggacaagcacgcgcgcaggggatcttcgatcaggcgcgcaggagctggagcatcgtga

SEQ ID NO: 4981 - DNA, 909 bp, Zea mays
  Peptide Sequence Number=SeqID_46760
atgcggcctggatcgacctccagaccttctccgcgccggtgcctctatgtctatggctccgcctccgcgctcccgaagctgctgctgctgcttctagctgcatcatcatccgcgcaagcccagcaagcggcgaggatgaagaccgatccagtcgaagcggcggcggtgaacgcggtgttcgccaagctccgccagacagcgtcgtcggaatggaacatcagcggcgacccctgcaccggcatcgccacggacggcaccgtcatcgaagacaacggcaacttcaacccgggcatcaagtgcgagtgctccgaccagaacaacatcaccgtctgccacgtcaccaagctgaagatatacgcgctcaatgccgttggccccataccacaggaactgcagaatcttacgcgcttgatcaatctggatttaagcaagaattacttaacaggttctttgccatctttcctcgggaatttgactgctatgcagtacatgactttgggcaccaatgcattgtctggatctgttccaaaggagcttgggaaccttgtgaatcttgtatctctaggctttggctcgaactacttaaatggcccccttccttgggagttgggaaacctggcaaaactggagcaattagacaataatatgggtaaaggatgcttttgttttgaagccttttggtccaagttagagggattctatgatgctgtccaggaggtttgggaatctgtggcagctgtaaattgcccttttaagactttggacttgaagctaaaggctacagctaggaagttgcaatcttggattgggaagcatgtgggacatcgtaccattgcaagatcgagattgagaatttcatggcttaaagtgggggatgctaacaccaagctctttcatatgcattcttga

SEQ ID NO: 4982 - DNA, 396 bp, Zea mays
  Peptide Sequence Number=SeqID_46761
atgcggcatcagacgggcagaaacgggcgtaacgacggtgacgaggcggtccgagctacggagacaacgtggaggccgagggggagggcggaggaccgtagacacgacgctggtaaggaggtagaaggggagggcggcgaagatgacgctcggagggaaggcgaagaggacagtagatacgacattgttatagccaacgagagacataaggcaaagaaaactaggagaacgacatttcgagaagaatcaagaggtcatttttgtaagtcagttggaaatgctctaatagcttctacttgcagcaacatgtcgatggtgacagcgcagacaaacaaggcacgttcgaaccctccacaatatgggaacctggaatggatagaagaaactgagaattga

SEQ ID NO: 4983 - DNA, 414 bp, Zea mays
  Peptide Sequence Number=SeqID_46762
atggcgcctcccgttgacgtggctggtctgcgccctaggttgggtgatgtggaagctcctccgaagccgaggtcgagtctgtcttccgtggctgaggtcgagtccgaacccctgcccaagtctgagccctgggtcgggcggagcggagttcgccgtcttccggggcttagcccgagtccgagccctgggtcgggcggagcggagttcgccgtcttccggggcttagcccgagtccgagccctgggtcgggcggagcggagcttcctctggtgcctgcggtcgggcctgactgcctgtcagcctcactctgtcaagtggcaccgcagtcggagcggcgcaggcggcgctgtctttttgtcaggccggtcagtggagcggcgaagtgacggcggtcacttcggctctgtcggctga

SEQ ID NO: 4984 - DNA, 393 bp, Zea mays
  Peptide Sequence Number=SeqID_46763
atgcgggggaaggcgaattgctgctgcctggccagggtgcagcattccgtcctccgtccgggcgactgtggccggctacaccgggggtcgcacaacatgtcgtatgccgtgagggcggtggatgctgccgtcggtgctgaggtggtggcagccggggaaggtttctccgccgacgacaccgtcaacgccacccgcgctctggacctccagctctttggctttaatggctggttctcgtcccccgcgagggacgtgaacgagggccttccagcggtggagatccttccgcccgtgtcgccgtccaaggccgggccagatcccgccgaaggtggaaacaacgccgagggtgctgctgttccctctgtcgagggtgcaggaacagtttgtctgtag

SEQ ID NO: 4985 - DNA, 186 bp, Zea mays
  Peptide Sequence Number=SeqID_46764
atggcgggcctcgaggagatcaagaatgaggcaatcgatctggagaacatccccgtggaggaggtcttccagagtctcaaatgcagcaagctgggcctgtcctcggaggaggcggaggcgcgcctcgccgtctttgggcccaacaagctcgaggagaagaaggtggttgctccaccattcttttaa

SEQ ID NO: 4986 - DNA, 1434 bp, Zea mays
  Peptide Sequence Number=SeqID_46765
atggaggttgccggaaaccatgttcagagctgtcgcacggagctgccggagccgcagaagccgctggtggacgacgacgggcggccgctccgcacgggcacgctgtggacggccagcgcgcacatcatcacggcggtgatcggctccggcgtgctgtcgctcgcgtggggcgtggcccagcttgggtgggcgggcggccccgccgcgatggtgctcttcgccgccgtcatctactacacgtccacgctgctcgccgagtgctaccgctgcggcgaccccacgttcggcccgcgcaaccgcacctacatcgacgccgtccgcgccaccctcggcgactccaaggagaggctctgcggcgccatccagctctccaacctcttcggcatcggcatcggcgtctccattgccgcctccgtcagcatgcaggcgatccggagggccggctgcttccactaccgagggcacgaggacccgtgccacgcctccaccagcccatacatcgccgtcttcggcgtcatgcagatcgtcttctcgcagatccccgacctagacaaggtatggtggctgtccaccgtggccgccatcatgtccttctcctactccaccatcggcatcttgctcggtgttgttcagattgtagaacacggaggaccgagggggagcctcgccggcgtcatcggtgctggcgccagggtcaccatgatgcagaaggacacgataaagtccccgccgccgtcggaggctaaggtgatgaagaaggcgacggcagtgagcgtggcggtgaccacggtgatctacctgctgtgcggctgcgtcgggtacgcggcgttcgggggcgcggcgccggacaacctgctcacgggcttcggcttctacgagcccttctggctgctggacgtggccaacgcgtttgtggtggtgcacctggtgggcacctaccaggtcatgtcccagcccgtcttcgcctacgtcgagcgccgggcggccgccgcgtggcctggcagcgcgctggttcgcgacaggcacgtgagggtggggcgagccgtggccttctccgtcagcccggcgcggctcgcgtggcgcacggcgtacgtgtgcgtcaccacggcggtggcgatgctgctgcccttctttggctccgttgtcggtctcatcggcgccgcctccttctggccgctcaccgtctacttccccgtggagatgtacatcgcgcagcaccgagtggcgcggggcagcatgcggtggctgctcttgcaggggctcagcgccgggtgccttgttgtgtccgttgctgccgctgccgggtccatcgccggcgtcgtggaaagacctcaaggcgcacaatcccttctgctggtcgtgctgaccgaaccaactctgatgtatgagggatgcttctctgcgccgcactacttcgtaaaagaacattattaa

SEQ ID NO: 4987 - DNA, 402 bp, Zea mays
  Peptide Sequence Number=SeqID_46766
atggcgctcctcgccctggcgcacggccccgtcccggcgtgctccccggccctgacgcgctcaccccgccccgccccgtcccagcgtggtggccctggctcgctcgcccagcgcggcgcagcggccctggccagcccgcccctgcccgcgacggcctcccccggctcgcccgcccctccctgcgcgcgttcgcggcggcgcgaccccgctgctcgggcggcccggcgcgtccgtggcttgtcacggtcggccccggtgtggccccattgcctgctcgcagcgagtagcgcggcacgtggcaatgagaatgatggttttggcattgactatggtaatggtaaagaagaaggcgccgaggcagatctccgggagttccaggacttcggcgagttcgaggattag

SEQ ID NO: 4988 - DNA, 297 bp, Zea mays
  Peptide Sequence Number=SeqID_46767
atgccatcagggaaccaaactatgacctttgtagctgtccagctgcttatgattcttcaatttggaggatatactctagtaaggaactccaaagatctatttgaaagttttggcttcgaggatcagccaataataattggactgatcattttccagcacaccataatacccatccaacaccttctgagcttttgcctgaaccttgttagcagagcatttgaatttcaggctgatgcctttgccaagaaccttggatatgccctcagctccgagcggcccttgttaaactataggtaa

SEQ ID NO: 4989 - DNA, 381 bp, Zea mays
  Peptide Sequence Number=SeqID_46768
atgaagaataagcctgtggcgctcggcctcaatttcgacatgactgtatccctgcagcagcgccgtccggccatcagcagcatcgccgtgctggttgacgtggtcggccatgatagccagcatcgccacctgccgtccctcgccttcgtgctccccacgccgatgtccagtgcatcgtcgccggggttcgacttgcagcttgtgcgagctgctatcaagctctcccgaccatggcgctcacgccccagccgttctcctgctcctcggaccgtgattgctgagttcactggcaaccgcagtctcatcgtgccgcaaactgtgagctgggactccgccgttttcggctatcgactagctcgccaaggcgattttcaccagtga

SEQ ID NO: 4990 - DNA, 489 bp, Zea mays
  Peptide Sequence Number=SeqID_46769
atggtgaggcctcagtcatgcgcgcacatcccccagaacgatccccggcctccagacgatactccgagagacttgccaaggcacgagctcaacaatttcggtggacgccggcgagcacctcgctcggccgcgcggcgagaaggatgggtatggggctggctctgcgatagagaaattcggcgctgctttaacgagagctccggtgagaacggcgtctgttacgcgcactaccggtttgtgcggagatggacgtgcagcgttctattggagggggatcgatgcaaagaggacgcagagccccagggtaatcccgtgcggtcgcgcgagggtcagttgtcaaccgattccgaggatcgcgcaaggatggagctcgcccgggtcgcgcgggcgaaggaagggggcgagtctgacgccctgggtccacgcgcagagggagcagagaaggggcgcgccgagcggaggccgctggggaaggagctcgggcactag

SEQ ID NO: 4991 - DNA, 468 bp, Zea mays
  Peptide Sequence Number=SeqID_46770
atgtggggcccgcctccgccccggagcctccccgcctgcgtcgtcttcgtcctcatgctgctcgtgtggcctgcccgcggcggcccggcgcagcgtgcccggcgcggccggctcggcgcagacccctggcctacgcgcggtccatgccccggctccacgctcgcccgtccccgccccggcgcgcccatggcgcgcgacttggagctcggccggcgcatgcgcggtgcctcaggccccggcgtggcgtccctgcgcgtggcgcgacccctccctgctcgcggcgcgcagcgcgacgtgcgcgcggcttggcccccggcgtggctcgttcgcggcgcgtctgcgcggcctgcttgcgacgtgcatgtgtggtctgctcgcagcgcgtgcagcggcctgctcgcgacggccccgacgcggcctgcccatggtgcccctggccccggcgtgtgcggccttgcatgcgattag

SEQ ID NO: 4992 - DNA, 1626 bp, Zea mays
  Peptide Sequence Number=SeqID_46771
atgggcgtgcctgacttctgcgcgctggcgcgcattcaatgcgctgcagctggcgagttcctgaggccgctcttccctggagcaccgaacattgtccggtgtacaccggacagtccgggccaggccctctcgaactcacacgacgcgctcgccatggccggtgcccgggcctccgcacgtcgtcgcgtggcgctcgcggctgtcatcaccctgatcctcctcgcctccgtgtctttcctcctgtccgcgaccgccaccagctctgccgccgcagcctccccggcatcgcgcctggccatcgtgcaacgccacgccgaggaccacgcggccgtcctggcggcctacacggcccacgcgcgccacctcagcgcggcctcggcctcccagacggacgccttcctctccatctcctcgcgcctctccgccctcgccgcccgtctctcggtctccaccgtggcggccctggagaaggagatcaaggcccaggtgaagcgcgcgcgctccctcgcgggcggcgccaaggaggcgttcgacacgcagtccaagacccagaagctctccgacaccgtattcgccgtggggcagcagctcctccgcgcgcgccgcgcgggagtgctcaactcccgcatcgccgcgtggtccacgcccaagtcgctccactgcctcgccatgcgcctcctggaggcccgcctcgcgaacgcctccgccatccccgacgaggcccccgtcgcgccgccccagctcgcggacccgtcgctctaccactacgccgtcttctccgacaacgtgctcgccgtctccgtcgtggtggcctcggcggcgcgcgcggccgccgagccctcgcgccacgtcttccacgtggtcacggcgcccatgtacctcccggccttccgcgtctggttcgcgcgccgcccgccgccgctcggcgcgcacgtgcagctcctgtccgtctccgacttcccgttcctgaacgcgacctactcgccggtgctcaggcaggtcgaggacgggaacagggacgtggcgctgctggactacctccggttctacctcccggagatgttcccggcgctgcggagagtggtgctcctggaggacgacgtggtggtgcagagggacctggcggggctgtggcgcgtcgacatgggcgccaacgtgaacgccgcgctgcacacgtgcttcggagggttccggcggtacggcaagtacctcaacttctcggaacccgtcgtgcgggagagcttcagcgatcgcgcctgcgcctggtcctacggcgtcaacgtgttcgacctccaggcgtggcgccgggagcaatgcaccgagcagttccaccgattcatggaaatgaacgagaacggcacgctctgggatccgacgtccgtgcttccagtcgggctcatgacattctacggcaagacgaagccgctggacaagtcatggcacgtgatggggctcggctacaacccacacatcaggcccgaggacatccgtggagctgcggtgatacacttcaacgggaacatgaagccatggctggacgtcgccttcaaccagtacaagcatctctggaccaagtatgtcgacacagagatggaatttctgacgctctgcaacttcggcctctga

SEQ ID NO: 4993 - DNA, 996 bp, Zea mays
  Peptide Sequence Number=SeqID_46772
atgtcgaccaactcgagggccaactccagggccaacttcaacaacgagatccacgacatcggcacggcggtgcacaactccagcagcctgccccccgcgtactacgaccggtcgctagcggacatgttccctccccacctcctcaagaaggtggtctcggaggtggtgtccacgttcctgctggtgttcgtgacgtgcggggcggcggggatctacggcagcgacaaggaccgcatctcgcagctggggcagtcggtcgccggcggcctcatcgtcaccgtgatgatctacgccgtcggccacatctccggcgcgcacatgaaccccgccgtcacgctcgccttcgccgtgttccgccatttcccctggatccaggtcccgttctactgggcggcgcagttcaccggcgccatctgcgcgtcgttcgtgctcaaggccgtgctgcaccccatcgccgtgctgggcaccaccacgccggcggggccgcactggcactcgctcatcatcgaggtcatcgtcaccttcaacatgatgttcgtcaccctcgccgtcgccacggacacgagagcggtgggtgagttggccgggttggcggttggttctgcggtttgcatcacgtccatcttcgcaggggcggtgtcgggcggatcgatgaacccggcgaggacgctggggccggcgctggcgagcaacctctacaccggcctctggatctacttcctgggccccgtcctcggcacgctctccggcgcctggacctacaccttcatccgcttcgaggaggcgcccagcaaggacgcgtcgtcgtcgcactcgcagaagctctcctccttcaagctccgccgcctgcagagccagtccgtcgccgccgacgccgacgacgacgaggagctcgaccacatccaggtccatgtggctctaataatgagttcatcaagaaacatgggtccatcattaccagatatttatatgagaacttatggaagcaatctctaa

SEQ ID NO: 4994 - DNA, 672 bp, Zea mays
  Peptide Sequence Number=SeqID_46773
atggggcctccatatcggatttcgcactgggcccctaaaaagtcagaaacggccctggtcgtaagccagtttagtcaactggcaaaggttcttttaacatgtcttcctgtcatgttcacgggtgattcttgcatgaagaactggccctgccgtacttctgaatgctgcaggcacaagagcaagccgcggacaaagcgagaaggggttcagaactcagtgtctctgcatacgttcacaacaggggttcctgaaacgcggtcctctgcagagtcctttgtaacagcgagtgcgcagccggtctgcaaatgcaaagctaagcaaatctacgacttggctcatcatttgaatccggccattggccctgcaattaagaataatggcggcaacgcccttcgacggaccaatggtagatctcggaggtacggttggctcgctcgtgtcgtgtactcatcctacgaagcagaatatatgctaaatgccaacctatacaacaaagtccgatccggcgacgacgtccctgcaatagcattttctcgctcgggggagtcggggtcgagccgtcgtgacctccctattttagaatttgttcgtcaccactgctacatcgccgtcgtgacctcgacgtcgcgctttatcccgcggtatattaggctacctccagcaaggcgatga

SEQ ID NO: 4995 - DNA, 777 bp, Zea mays
  Peptide Sequence Number=SeqID_46774
atgtcgggagctcacgccaagaaggagatggtgaccggcgagaagcccgccacaagccacgggaaagctccatcgggggagtccggcaacaagaagagggaggaatcacctccccacgtcaagtcgcaccggagtcgcgacaagaagaagaaaatgaagaaagtggtctactacgagaccgattcttcgtcgccttccaccttcggctccgacacgtcgtccgtcacttctaagcgccatgagcgcaagaagtttagtaagattcccttacactaccctcgcatttccaaacacactcctctactttccgtcccactaggcaaaccaccggtttttgacggtgaagattattgtatgtggagtgataaaatgaagcaccatctaacctcactccacgctagcatttgggacattgttgagtttggagcgcaggaaccatctgtgggggatgaagactatgactcggacgaggtagcccaaatccggcacttcaactcccaagccactactatactcctcgcctctctaagtcgagaggagtataataaggtgcaagggttgaagagtgccaaagagatttgggacgtgctcaagaccgcgcacgaaggagatgaggtgaccaagatcaccaagcgggaaacgatcgcgagggagctcgatcgattcatgcttcaccaaggggaggagccacaagccatgtacaaccggctcaagaccttggtgaaccaagtacacaaccttgagagcacaaaatgggatgaccatgaaatggtcaag

SEQ ID NO: 4996 - DNA, 339 bp, Zea mays
  Peptide Sequence Number=SeqID_46775
atggtctccaccgccgcgtcttgcctcaccatcacgctcgaactcacctccccctcacctctcccgccgcgctgcactccctcgtgcactcctccttgtcctacgccgccgtcgcagcagcagcagcggtggttcgagtccaaggtggtccccgcggcgtggagcagcgggtacctacgtgtacgacgacgcctacccgtcctacaacgacaagatctcgtcggcgttggggcacctgttcggtggaagcctgggtgtgccatcaagaccagaacagttaagatcgactggcaaggacagatcaccattttgaccccaaactactctataagactctaa

SEQ ID NO: 4997 - DNA, 723 bp, Zea mays
  Peptide Sequence Number=SeqID_46776
atggcgtccacgccacggacgccggcgccggagcggtctccgccgcccgtgcccactcctcctccgcctctggaggacgagccgccgccgtatctggccgacggcaagaggagcggccagagcacgcccaagcgcgcggagacgaagctgccgctgtcgtcgccggccgtcgcggtgcacttcgacccagtcgaggaggccgtcacgtcgccgctgcgcctcggcaaggcgcgcctcgaccagcagcagcagcagcagcacgcggcgggggcggcggagagcggggcatccgtggtccccggtgtggcggcggccgtggccgcggtcgccgagcggagggagctgttgctggcgctgcgcctggccacggcggtgctcagcctcgcggccttctcggtgatcgccagtgcccggacgtccggatgggccggcgactactacgcccgccacctgcagtacaggtacgccgtcgcagtgaacgtgatcgtgttcgcctactcggtcgcgcagtcattgggcaaaatccgccacctggttctggcgtacctcctcatgtcggcgtcgtcggcggccgcgtcgcgcaacgacctgtgggtgtccaggttcggcacggacgccttcgtcaggaagatcaccggcgccctgtggctgtccttcgtcgcgttcctggtgctcgctctgaacgcggtcatctccacggctaatctcttcagcatggtctga

SEQ ID NO: 4998 - DNA, 906 bp, Zea mays
  Peptide Sequence Number=SeqID_46777
tacatggtgttcgcctgctccgactcccgcgtgtgcccgtcggtgaccctgggcctgcagcccggcgaggccttcaccgtgcgcaacatcgccgccatggtcccggcctacgacaagaccaagtacaccggcatcgggtccgccatcgagtacgccgtgtgcgccctcaaggtggaggtcctcgtggtcatcggccacagctgctgcggtggcatccgggcgctgctctccctccaggacggtgcacccgacaacttccacttcgtcgagaactgggtcaagatcggcttccctgccaaggtcaaggtgaagaaagagcacgcctccgtgcccttcgatgaccagtgctccatcctggagaaggaggccgtgaacgtgtccctggagaacctcaagacctaccccttcgtccaggaagggctggccaaggggaccctcaagctggtcggcgcccactacgacttcgtgtccgggaacttcctcccaacggaagaggcacaccaatattcgagtaaccgggccggattgggccgtatagttgggctgcgtcttgtaaaggattaccttttgcgtcggcctgcctataaaaagaagcggatgacttcacctccgggcatgatgaatgagaataacaaagttccaacccctacattcttcttctacctctgccatcctctctgtatttttcccagctcctatcttctcttcgtcgtagtgctgcccttcagcgaggtgctggactggagcaccttctcggtggtgctcgccgagagaagggcataccggcggacctcaagaacttcctgtggcacgccgcacgccacgcccatcaagtacgacttcttccacatgatcctgcactccatctggttgagtagagcgaaccaggtcgagctcgacggctga

SEQ ID NO: 4999 - DNA, 330 bp, Zea mays
  Peptide Sequence Number=SeqID_46778
atggcaagagcagggaaggggaggctggtcgtcgaccttgggcgcggtcagggaagggagaagaagagccagggagaggcgctggaaattttgggcgccatagttggagcagaggggcccgtgcctatggagcagggagggagctcgtccgcgccatggacgacagagggatggatgggtgttgtctctgctgccaagcctaaagggggcgcgcccatggggaaggaggacagggagcgccggccatggagaggctgctggcggccatggagctcctgcgcgctggggaagaaggctaggaggaagagagtggcagctaggaaaatttga

SEQ ID NO: 5000 - DNA, 192 bp, Zea mays
  Peptide Sequence Number=SeqID_46779
atggaggcggagtctgggagtcttaagatgcttagtgaatgcttggtattctgctacatgcgccgaagggtcccttttatagccccaaggcaggcgaccgttagccgcaagcgccattggctcaccgtacagtctggtgcaccaccggacagtccagtgaattttagccacggtgccttcggcttttcctga

SEQ ID NO: 5001 - DNA, 315 bp, Zea mays
  Peptide Sequence Number=SeqID_46780
atgagtgagcggccaccagggaagcttcacgagctggaggccaacgcaaggggctgggcgcgagcacaggagctcggcgtcgtggccatggccgagcaaagggagcagcgcgccatggatggaggagcagaggccgaactggagaacggcgcacgcagggaggagcacgcgactggactggagaagggagatgggcgcgcacatggagctcggctgcgagcaaagcccgagcacaggacccagatgcaccgtgtggcgcggcaggcaagcatggccagggcgccgaaggcgagaggcatgcaaggagaaggctag

SEQ ID NO: 5002 - DNA, 516 bp, Zea mays
  Peptide Sequence Number=SeqID_46781
atgactgatgagcaaatgatagcatttattgtacatcgtgtcagggcatcagctgtttttctgacagctttcccatcgctcctgaggaagtatgttaaggctctgttccatacctgggctagaggactaggtgcaatgcctcttgtttcttttatgttccttcgagacttgtgcattcaagtaggttcaaattgccttgatacttgcctcaagggtatctataaagcttatttggtgaactgcaaactgtccaaatctataagcggatcaaaacaacaacacattcaattccttggaaattgtgtcagagaattgtatagtctggatccacaaagtgcgtatcagcatgcttttattttcatccatcaactaggggttatcctaagaggagctcttactgaaagggggccaaagaaatcttaccaaaaaattatgattggcaacacatattctgccttgagctttggaccagtgttgtgtgcggatatagttccgaggaagaattctgacctctag

SEQ ID NO: 5003 - DNA, 418 bp, Zea mays
  Peptide Sequence Number=SeqID_46782
tccggcctcggcggtgctccgggtccgggcgccggcggggcgagcgtcgctgcggcctcgacggtgaatgatacagccacccagtcgggcgtcggtggtgctccggcttggctgcgctgtgccgatgcgtgctgcggcggcggccccaggctcatcaagaacgccgccgccctcttcgccgcagccgtcagccccctccactcttgtgaacagagcacaaacgcgcgcgcttgtagaatgcccgcctttcccgtccgcgcctccgcttcgtccagcgtcgtcggtagcctcaccggtacccgccgccccaggctcatcaagaacaccaccgtcatcttcgccaccgccccctccaccctcgtgggatgggacaataagtcggcacggacactcatgtatgaccttgctgggcgcgagg

SEQ ID NO: 5004 - DNA, 429 bp, Zea mays
  Peptide Sequence Number=SeqID_46783
atgtcggtcaccttgtggtgtgcaggtttggagcacaggtacggtggtcgacaagacgacaacgaagtgattaatctgaggaagggcggtcggtaccgcccaaggctttggttggttctcaatctcagtttgtgtcttgctgaagttttcgagtcattttattctcgtgttctttcctttcctctctttgtgatcgtgctaagaaccatcgagttcttgtgtgaagatttggtttggggattgatttgtgtgccccctgcttctctgcccttatgctgggcatgggaaagtcatctccaagcaaagaaagatggtgttggttccgggtggaggcagcgggacaccagcactatcggcgaaccttcaactaccggtgtcgaccgaagacgcgggggtcagggttcatggtttgcttcttctatcgtctga

SEQ ID NO: 5005 - DNA, 213 bp, Zea mays
  Peptide Sequence Number=SeqID_46784
atggcgccgaccaccctcaccaccgatgatctcctcaagcgggtcaagggtacggtggggaaggctgattacaccgtccctttcccaatgtgccccgagcggggcaacatatccctacctggagcgcaaagcgtatgcgctgatccaacccccgcgaaggctgtgaagggagctgaggcggtgaggcttgccctgggagggaagaccgggtaa

SEQ ID NO: 5006 - DNA, 402 bp, Zea mays
  Peptide Sequence Number=SeqID_46785
atgaggaaggcgtggctcagagaaggactccacggggctgcggactttggtgacaacagcgtgcaacgaggaagaggatgcatggcatggggttgggatgagcagcacactgcaatggcggagaacgcgagcgagggtggctatgcaacactcgatgcaaggcgaaggacgatgatgcagcacgacacaagacttcttaggggcatttcgtcggacacttggcgtgcgtcgcagcgaaaaatgtgcatcgatgacaagggcgcacaacacctagagacttctcttggcatcgatgatgaagcctccagccctatctgctccgcgagaagagggggctcgtcattgccagtcaacagcagacgaaggctcctcacccccacaacgcgcggagtcaagtcttag

SEQ ID NO: 5007 - DNA, 330 bp, Zea mays
  Peptide Sequence Number=SeqID_46786
atggctccaaagaaagtgaccactagggcaagctcttccttggacgaggccacaaaggtagccctagtcgataagaaaggcaaggcaacccctgcagaagagaccctacccaccacaactaaaaataagatagaggcagtcaacaacaagaacgctcggtccaaatacccccctaccccgaaaggcaacattcatacatgtatcttcggggacctccctcatgatgacccaccagcgggatttgctcccatagcacatctcactgcccaagagatcctacaagaaggcgaagacatgggaatcttagtggaagaccagatcaagctgtga

SEQ ID NO: 5008 - DNA, 207 bp, Zea mays
  Peptide Sequence Number=SeqID_46787
atgaaggccgcgggatttccacctctctctctcgctccggctgccttgtttccccccttcgcgctctgtctcacgccgacccatctgggctggggcacgcggcgacatttcactcgtcggtccagggacccctcggtctcgaagcgccgacaccagcagatagaatttgctgagcaggagctcattgaaggcaagttgtgcccttga

SEQ ID NO: 5009 - DNA, 114 bp, Zea mays
  Peptide Sequence Number=SeqID_46788
atgacgcaacacttgaggatctaccccactcaagcgtcgtgccagcaccgcgcttgcgaccccgatgcctcgcgagcctctgcacttcgcctatgcggctcaactgatccagag

SEQ ID NO: 5010 - DNA, 885 bp, Zea mays
  Peptide Sequence Number=SeqID_46789
atgtgtgtagactacaatggtctaaaccaagcatgtccaaaagttccctatcctctgcctcgcatcgatcaaatcgtggattccactgctgggtgcgaaaccctgtctttcctcgatgcctactcagggtatcaccaaatcaggatgaaagagtccgaccagctcgcgacttctttcatcacaccatttggcatgtactgctacgttactatgccatttggtttgaggaatgcgggtgcgacgtaccaaaggtgcatgaaccacgtgttcggcgaacacattggtcgaacggtcgaggcttacgtcgatgacatcatagtcaagacgaggaaagcctccgaccacctttctgaccttgaaacgacattccggtgtctcaaggtgaagggcgtaaaactcaacctcgagaagtgtgtcttcggagtcccccgaggcatgttcttggggttcatcatctccaagcggggcatcgaggccaacacggagaaaatcgcggccatcaccaacatggggcccatcaaggacttgaaaggcgtacagagggtcatgggatgccttgcggctttgagccgtttcatctcgcgcctcggcgaaagaggcctacctctgtaccgcctcttaagaaaggctgagtgcttcacttggacccccgaggccgaggaagccctcgggaacctgaaggcgctcctcatgaacatgcccatcctggtgccccccgccgccggagaagccctcttgatctacatcgccgctaccactcaggtggtcagcgttgcgatcgtggttgagagacgagaagaagggcatgcattgcccgtccagaggctggtctacttcattagtgaagtgctgtccgagactaagatcctctacccacaaatttag

SEQ ID NO: 5011 - DNA, 330 bp, Zea mays
  Peptide Sequence Number=SeqID_46790
atggaggaagccgaccgcctcttcctctccctggtagccgagccctctccccttcccctcttcccctataaaaggccaagccaagctccccctctcccctaccgaactggcccaggctctccctctcctctctccctcctcatgcaagagtgccgctcggaccatccgttggtgtccgcgccgagcccctactcaccggagtcgctcctgccagaccgtccacggccgagcctcgccgtcgagccaagtggagccgcgcctcgccatctgccctacacctgcacgtccatctccctccccctcgccgagctctcccctgtaacaccctag

SEQ ID NO: 5012 - DNA, 342 bp, Zea mays
  Peptide Sequence Number=SeqID_46791
atggattctaaaacggcatctaaaacactatccattcaccttttccttggagtcactgttgcagtactcaatggtttcggcagccgtattacagatggagggctcagcacctttggctgttctgctgtcttttctgatcctggctcttttaccggatccatactagcttcgattgacgtggaaggagctgttttcatggctgagggggcagcctcggcactttcaataagctttggcacctcggtcgtcctaataggcttcagcctacgtgtcaagaccttggccctcttcagcttcggcgcactagaagaggttgaagcagcaacttttgagagcacctag

SEQ ID NO: 5013 - DNA, 405 bp, Zea mays
  Peptide Sequence Number=SeqID_46792
atgccgccatgtggcctactgcccgtgactttcaacggtcgtcatgcgtcatatttttacaaaagacccctccctattcttcttccaatcaacccgtcgatcatctcacacgtctgcgtcaccgttttacaaaaacacccctccatccccgccgacccacgcgccattcccgccgaccccgcatccactatccctgccgaccccgcagccgccatccccgcagccgccatccccgtcgccaagcgccgaagccccgtccccaagcgccgacgaaccccgagcctcttccttccgccttctccccttcgagcggactcttccgctcgccagaatccggtggtcccgcaaccagatcggttcctgagtgagcttacgagcaccatgaagcaatattggagcggctaa

SEQ ID NO: 5014 - DNA, 369 bp, Zea mays
  Peptide Sequence Number=SeqID_46793
atgtcctcgacggaggcgaaggccgtggcggtcctagagtctgtgctgcgcttggagaagtgggcggcatataagaaggcccttgctgacaggaaaaaggcgcttgagagtcgtacgatcatattcactcactccaaacagtatgcccaggagtacgacacagaggagatggagcttgtgcagctcaagcatgaggctcggttaaagggtgggttctatatgatgaccctctcccttgctgcattaggatccttgatgtggcttaggaagaacaagcctaggactttggttccaataatttatgcatatgctctattgtcggcaacaatgccatctatcaccagttttttgccagttaatatcttctaa

SEQ ID NO: 5015 - DNA, 330 bp, Zea mays
  Peptide Sequence Number=SeqID_46794
atgggggcgacggtggccgcagatttggtagtggtagaggtgagagaggtgaagggagggagaggtggtaggacgcataggggcggccgtggtggtggcatgaatggtgggagcaaggctgttgtggtggtgcacaagcacgttggtgtcttcatctccaagtccaaggaggatgcgctctgcaccaagaacatggtctcgggagagtctgtgtacggagaaaagtgtgcttccgttcaggctcctggtactcgtgtgttgtatcttggtgctgcttctagcacaattgtgtctcatatgtctgatattcagaacccttccctttcatag

SEQ ID NO: 5016 - DNA, 498 bp, Zea mays
  Peptide Sequence Number=SeqID_46795
atggtggcgactggcgacgacaaatcgccatggcaaaattcgtgcactcaggctggccacgcgcacaacagatcttttgcacacgatcagggcctcctggctaatgtccctaaccaccctgcgacaacaattgaagacaacggcaatcactctctctatctctcacgcacctctggtgtttttcatggcgagaactggtggcggcttggggtgatgacgggcatccgacggttcacacccagctggcggggtttgttgcaatggatcgcagatatcgcggaaatcagttatgcgcccgggttggtttgcgcgaggaagatctacagtggccgcatgagacactatcaagcaggccctaactgccagcgcctgcttaccgtgcttgtgggcacgggtttacaacgactgagtttggagcttgagtgcggatcaaagttgagacacacaacctatggtggagcaagaaccgaagaaacgcatgtccatttggcgttttaa

SEQ ID NO: 5017 - DNA, 544 bp, Zea mays
  Peptide Sequence Number=SeqID_46796
atggaagcaacacgatgggaagggttgctggtctggcggaagcgacacgagcgaggaggagagggcggcgaggacgcgggagactggggaggggaggctgggggtgacacagccacagataagttatgtctgacgaccgctaggggacgttggcggctaaactatgtgatggccgtgatggcatccaatgggtcctacagcgttatgtccgatggcgccttcccgttgcggatatcgaagtcagagccgggcttgggcgaggcggaagtccgcccgaggtcacaaccgaacccgttctggattcaaagacgcgaggcggagtttgcgctcgagggcttgcctgtgctccggtcgtattcccttcgtggagtaggcgagcttgggcgaggcggagaccaccgttatggggtgagggcaccttgcccgaaaccaggattctcccgagaacacaccccgttcgaggcggagtttgtggagacccctgagaggggcctcggacgaagcgcgacttatgatccttcgtcttcgtggacgtaccttgatg

SEQ ID NO: 5018 - DNA, 378 bp, Zea mays
  Peptide Sequence Number=SeqID_46797
atggttgggattcctcgtcggagttacccgacccacccagagcacctcccttctccattctcccgcctctggtcccgttctcgcggccagagtcttgccaacgagttcgtcggaccttgttcacccgttccagcccttgccggtgatcctagggccccctcggaggccatctgccccgtctccggtggcctcgctgctgcgaagggagcagtgccggtcaccgagtcgcatccgtgccgagccctcacccgagccgtcgacttcgtttgcgcctcacccgagcccgctgactcgctggccccgcgcgtcagtgtctcgacccgccctgagccccgcctgttaggcactcgcgtccgcgcgatcgccccccagatctaa

SEQ ID NO: 5019 - DNA, 429 bp, Zea mays
  Peptide Sequence Number=SeqID_46798
atgggggagggcgccgcgccgggatggggccgaggctgggccgcgcgccggggacgggttgcgcgccaaggccggggagagggaggggcgggggaaggggcgagggcggctccgggacgggtggcagttttccgagcggcaggcaagttgggcgggggagacgagtcgcgggggagggagggcgttacacgttgtgagcactcagaggtttttattgactgggatgcactacaaattgttgagagccaagatgaggaaggtaggatagaaattgttgacgatgacaggatgtatgagttgatccggttgagagctaaggatgaagctgctgagaaggcgggtgaagctttcaagaggcaggaaaatgaacctagtagtggtggcaaagaaactgttgacgtagccatccatgtgatgatgaaattctag

SEQ ID NO: 5020 - DNA, 579 bp, Zea mays
  Peptide Sequence Number=SeqID_46799
atggcgcgggctggcgtggatctggggcagaagacgccaccggcgcatctaggcggatccaacgcggaagacgacagtggtgtggcctgtagcgtggatccggcgtggaagatgacagcggcgtgtcctgcagtgccggccacgacggcggagtccatgcctccgtggcactactgtttgcagaccctttggccaaatggtatattcttcaccaagttggatgaatataaagggaatgcaggcacaagtgaatttgacaagcagtcattagggagtcccacactggctgttggcaataaaaagggccgcacaagctcttttgaacttcatcttgaggcatccagaaatgccagtgaggtcaaaaaacttattttagatggaactccatcggccttggtcagcataattggatacaagcagtaccggcgcagcgcaagggacatgtactacttcctccaactcgcatatgcaatgctagagcaggtcctcgtgacagtcttcccagagcttcgccagctaatagaagacatacatgagaaaggccgcaaagagcaagcctcattcacataccaactctga

SEQ ID NO: 5021 - DNA, 315 bp, Zea mays
  Peptide Sequence Number=SeqID_46800
atggccgtgatgggttcaacatctaaaaagatgtacctccaccagcctgtcagcgtcattgcccgttccccctcgcacgcccgtgcctctacgccgcgggccccgctcgccagccacctcgcgcatgcagccgctgatgtcccgacctcgcttctcatccccgtcttcctcacaacagtcgctcgcctggcgcacatgaaagtcgaaagagatgacccattcgcggcgctcgagctcgacgatgatgcgtgctcgccgtgccgactgctgagagcttcacacgtcgcgctaatccctcttgagcgccgcctcgag

SEQ ID NO: 5022 - DNA, 2538 bp, Zea mays
  Peptide Sequence Number=SeqID_46801
atgcgcctcctcgccgccgcggcgagacaatccaatacaccgcagcgtattctcgtcaccctccaccacttcatatccacagcgacgacgaccacgtcctcctcggcatacgatccaaccgcgcagttcatccatcctgaccagcatcgtctcttgccactgccagcatctctccgccgtcacgccgtcctcgcactcgcggaccttctcaagacctccctgcaatgccaccttgcgctccacgctgtcagcccactctctggctccccctactccaccccgttcgcctcccgcttcgccgccgccgcccacctcgccacgtcggatcccgcgcttcgcccctttgcagcgatcctcatcgcagcgctcctcccggtcgcctcctcggacctccttttgtggtcgtccagtgacagtgccagcgggagcgcgcgcgcccactactgcgcgctccggctcgcgctccacgcattcctcgccgcgggcatggcagcagaggcactcgacgtgctcgcgcgcgtccgccgctctggtaacacgcccagcctctccgcgttgtctgcattgctgcgccttctattccgaagcggggaggtccgcgctgcctggaacgtgttcgaggaaatgaccgcagaaggaccacggccgagcctcgccaccttcaacgccatgctcctcgggttctgccacagggggatggtgcgagtcgcctccgggctgcttgggatcatggggaagtctggtatcgcccccgacgtgtgcagctataacattctcatcaaggggcactgtgtgtttgggtggtcccgggacgccttcaagatgtttgaaggaatgcacaggtcagggtgtgagccaacagttgtgacatataacatactagtggatgttctgtgccatgaggggaggatgccagaagcaaggaggttgttcgatgaaatggcccaggtggggatccaagtaaatacaatcacgttcaatgttttgattgatggatatgcaaagagtggacagatggatcaggccagtgcagcctatagggagatgcaagcgaggggattagtgccagactcctgcaccttcaacattattgctgctagagctcacaagttcgggtatgctgcccagttagtccatgaccatgacatgtttagttcacatatgtcggctgatgggttggatatgttggtctgtaggctttgttgggatcatcgattggatgatgcctgggagcttctgcttggtgctattgagcagggtgttccattgcgtgttactggatttaatgcattgatcgctgcttatagtaaggagggactccatgaagaagcttctgaactgtatagaattatgaacaagttaggactggcaccatcctcgtctacttttaattacttgataatggggctctgcaatcaaggaagacttgatgaggcacagcttcttttagagcacatggttagcaaaggatattgtctaagtacatcatttactatctgcttggatgcatacttcagagacggtaatgcagttggcgcactgaaatgctgggatgatatgggcaatattggtttgcagactgattttattgccttctcagcatatattaatggcctatgccgattagattgcgtgaatgaggcttatcaggcatttgctgagatgacaagcagaggaattgtaccaaacaatattacttacaactccatcatatctgcactttgtaaggcaggcaatatgactgaagccttgaagttagttcagaatatgaggcagagtggccttgttcctgacatttacacaagcaacattctaatcgacggtttgtgcagagaaggaaagctgaagatggtggacaaccttttattggatatgtgcagtaatggtctaaccccagacacagtgacatataatacaataatcaatgcatattgtagggctcaggatatgaacagtgccatgaatttcatgaataagatgcttgtagctggttgtgaaccagatattttcacatataatatttggatgcatagcctctgcaggaaccatatgttgaaccaagcagggaagctgctagatgagcttgttgctgtggattgttctccaaattctgttacgtacaacacattaatggatggcatttgcagtgatgttcttgatcgagctatgatacttactggcaggcttattaagatggcttttaaaccaaacactatcacactcaacgttttcctttctcatttctgcaagcaaggatttgggaatagagccctcatgtgggctgagaagctcagagaagattcttttgtttttgatggtgctacaagaaatataattgactgggcacgaagggaaatggaggatgaccccaaggctaacaacgaggacataggaagatgcatgtttcttgagttcttaatgttcatgacatatgaggctatgctcaacagcagatcctcaaaggctacacatatgcttacagaaaaaggttttgatcctgctagcagcagcatgattagaattttggatactggttga

SEQ ID NO: 5023 - DNA, 936 bp, Zea mays
  Peptide Sequence Number=SeqID_46802
atgtccaatggtacaccaggatgcgatcaagacacaaaaaggaacccccagatgcagtcagtggtacactcggctatgtctgccaagacaaacacaaatggctcattggttccgcccttcaggcctcagctgggcaccagtggctccagtggccgtggtgctcgtgaagtggaggatcctgaaaccaaggcacaattgaaggctatggcggcaaaagctttgtggaagcttgctcataaccatttgggtgtgtgcaagagcattacagagtcacgcgcgctgctgtgctttgctgtgctccttgagaagggtgatggcgatatgggcactgatgtgcagtacttctcagcaatggccatcatggagattgcccgtgttgctgaacacagcctcgtgctgcggcaatcagcattcaaacccagctccccagctgccaaggctgttgttgatcagctgcttggtgttgtctgcaggggtgaatacgatacattgcttctcccatgcatcactggccttggatgccttgcccgtaccttcacagcaagtgagaccaggatagtggcccctcttgtgcagcttctcgatgagcgcgagcctccagtcataaaggaggctgttgttgcgctcaccaagtttgcgtgcactgagaaccatctacatgtgaaccactgcaaagccattgttgatgatggtggtgcgcgccaccttgtccagcttgtctaccttggtgatgaggtgcagattgaggcgctcatactactctgttacattgcattgtatgtgcctgagagcgaggaactcgcgcaagctggtgtgctggccgtgctgctttgggcatcaaagcaggctcaaatggtgcaggacacacgtgttgaggcattgcttccagatgcgaaagggaggcttgagctgttccagtccagggcctccaggtga

SEQ ID NO: 5024 - DNA, 711 bp, Zea mays
  Peptide Sequence Number=SeqID_46803
atggaggtgtcacagtcaccgctgtggcgcatgctgagcgtcttggcaagcacaacagagtggagcgacttcatgtgctgctgtgctgtggcagcagcggctgcgctgttcttggagctgctggagccgacggagtaccggctgtgctcctggatagtcccggaagcgagcctgcacgcgcatgggcggctccttgagcgcggcagcgaaggaggagcaaaccccggcctgcacgagcttgtccacgttctcggcgtcacagccgaggaagcccagagcccgtgccgcggcctcctggctttcgtcggtgccgtccttgagcagcttgagcagcggcggcacgccgtcctcctcgatgatgagcttggcaaagtgctggttgtcgcgggcgagcgaggcgaggttggcggccgagtcagcgcgggcggcgggggaacccgtgtgcaggcgcgcgacgtggtccccagattaagaagaggatggggctcgttctgcgcgatgttgggggaggcccaggagcgagtcgttcgtcccctttcgccggtggcaccaggcgaggagaatgcggagcagcccacgcgacgtcctcgaagcgccgtgtcgagcgccgcccacggcccgggggaacccggcggcggggctgagcgtgaagaggctgcgcagcccgcgggtggccccgagcgcaccgggcggcgagggccgaggctctag

SEQ ID NO: 5025 - DNA, 516 bp, Zea mays
  Peptide Sequence Number=SeqID_46804
atggcctggtgggaggagacacggcaatacaaaggcgccaccgtgcgaatcgccaacagattcctctgctccctccatcaccactactacagcaaatggaggccgcagagcaacgttgccagtggcgccaccaataaccgagccgaagccaccagcgggacggccgcgtcgccggtggccatgttggcgagccaagagacgctgccttcgctgctgctgccgcccaggagcacgctgccttggcccccgccctcgatgcccaggccacccatcggcatcatcgcgctgtccggggtggcgtccgtgaacgtcgcgcccggtggcatcatggtccccgtcggcatagccggggtcgcgcccggcatcggcgttgcctccggcaccgtcgtcgtcattgtccccggcaccgtcgccggcgtcgcgcccggtgtggtcgtcgacttctggctgcgctcatgtcacgggtacatacaagagcagcgtatccatccggtcagaagttcacgtgctcagtag

SEQ ID NO: 5026 - DNA, 948 bp, Zea mays
  Peptide Sequence Number=SeqID_46805
atggggtggtggtggtggccgttggcgtcctgggtggaggtggctgggctggggaggggagacgaggggttgggcgtgggagacgaggagctgggtgtgggagacgaggagctgggggctggacgcggggtgggagacgaggggctcatcccgccttcccctgttctcgattatccgcagaagaaggatctacacacgcgtcaacaaaatcttgaggagcatgagccgctgtcttcagcttttgatggatcatctccaccatcttcaattgttgcagtagacacaaatctggatacttccacacctgacacatatcgagcaccacctgcacccttgccttatgatgttgttttggcagtcccaactacccctggtttggagaagctagacaacaagagcaaaactgatgaccaacaagagtccataaatgatcaggagtctttaaaggtggatgagtcatctcccaggcctgatgctattgtgttgtggccttgtgggaatggtggggagaggctgaaaatagtgcctaaatcaaagaaaaaatgcttcaattccattactgcactgttcgcagagtggagtttgaatatggatatggggatggaatacgatgaagaaaatccccgctctgtaactaagtgtgagcaccatttccatctttgctgcattcttgaatggatggagcgaaaagatacttgcccagtttgtgaccagttcaagtcactaagggtaggtacttttgcttttgcgcaaattattgcttcaagacatggtttcccttctttgctagtttcagacatctgctggttcttccaggaatccagtcagctttttacatggtatattaggtggttgcagtgttgtaaagtactagctcagataagatggcgtgtcaattcagtttaccagtcaggcttggctagttcgcctgaagttctcgtgggatga

SEQ ID NO: 5027 - DNA, 309 bp, Zea mays
  Peptide Sequence Number=SeqID_46806
atgccgccaccggtgaggcctgccatcgtagttgtgatgttgcagtttctaggtgctatgaaggctctaaggaatgctactgaggctacaaagtctacttttgagcagctacattatgttggcgccttcactagccaagtggcgtcaggtgccttcatcaaatccatcacttcacagctgcggtcgagaagagccgttctcttcaagaaagggactaaccgcccgaaggagatggatcctaaggggaagggaattgtgatcaacgacaaggagaaggagtccctcgtcaacgagccaggggatgactag

SEQ ID NO: 5028 - DNA, 144 bp, Zea mays
  Peptide Sequence Number=SeqID_46807
atgaagttccaagctgtaaaagatgggggctgcttcctgctatcatcctcatcgcggctggcgagggaaaggccgaaggaaaccatactgcttcaacagaagagccttagcagcaaagggaaaaacatctctggcctgagatga

SEQ ID NO: 5029 - DNA, 216 bp, Zea mays
  Peptide Sequence Number=SeqID_46808
atgaaccacggcaaggtactcacagtttcacaaccccaacgtgacctcctaattccactagagatcgtcgcgacgccgttttccccttttcagacaccgttgagcatgaattctccgtgctccgtggctagccgtctccagggtcccctgtgcaaatccggcaacgagggcgtgcgcgcgggcgtattctgcctgtcgtgggccggctcgggctaa

SEQ ID NO: 5030 - DNA, 159 bp, Zea mays
  Peptide Sequence Number=SeqID_46809
atgggtcaccactttggagccgagcgaggtggagaggatggccctacggtcggggtgctcgtgcgtccacagataaatcgttctcgcgcgttcgacgacgtggttccgtggctggtttgggcgctagggtggccctcggtcgccgttggagctaactag

SEQ ID NO: 5031 - DNA, 273 bp, Zea mays
  Peptide Sequence Number=SeqID_46810
atggggtctgagggagctgggggcgacggcagctaccgcgacagggagacgtcggtccgacgaaccctggggaggcggcggctatggagaaaatggagaaatggcggcgttccgaggaaccctagggaggctgtgcaggtctccgtgatggagaaatggctggcggcgggttctgtgagaggacagagagaaaacagaaggcgcgagacgggtcaggtcaaggacaggtaccgcaagataaggaacatgaaggatgtcgcgatgagttcgtga

SEQ ID NO: 5032 - DNA, 348 bp, Zea mays
  Peptide Sequence Number=SeqID_46811
atggctaccactgtgggtggggtatgggctgatctaccaaagaatttacagagatgggatggtagatcattccctttctacgatcatctgcatgagatttacaatggtaaaatagcagaagggaagaactgtaggcgatctttagaaaaagaatgcaaggttgccaacaaaactgaacaagaagattatgtgcagataagtacacctagtccaactattaatggtatgcagagttcattttttgacttattagaagatggtgctgatttgaacaatgaaaatgggttcaatatggacataaacactagtcaatatagagctttggaggaagaacaatttggtacatag

SEQ ID NO: 5033 - DNA, 426 bp, Zea mays
  Peptide Sequence Number=SeqID_46812
atgggcaagaacaagaagggcgaaacttcgtcgcaccacttcggcaacaagcggaagcgtgagccgagtcccccctctgaggacttcggtgactccgagtccgaggggtcgccagtctatgcctctcctccggtgtcgtctgatgactcgaacgattccccggggatcgctgccgaggtgtggatgtacatttgggccgtcgagcgctccgggctcgagggctcggatgagtcggagatctcctcggatgaggaggactcctccaactcatccgaggaggggagcggtggtgacgacgacgacgagggcgacaacggcgatggagtgatggcgacggtggaggcgatgggacgacaagggcgacagcggcagcagcagggccagtggcaaagcgccactggcttaaatgttagtatagataagtag

SEQ ID NO: 5034 - DNA, 180 bp, Zea mays
  Peptide Sequence Number=SeqID_46813
atgacagctgttcatgatgtgttccatgtgtccgagctacgaaaatgcgttcgcttacccgctgaagtgctacctgaaccagaaattgagatagaaccagacttgtcttatcgagagtaccccgtcaagagaggaaacattgcaaaaagaccccttaaaaaccccaaatccattccttag

SEQ ID NO: 5035 - DNA, 918 bp, Zea mays
  Peptide Sequence Number=SeqID_46814
atggagcgggacggccagcagacccgccgcgacaagctcatcatcgatacggatcccggcatcgatgatagcatggctatcctaatggcgttcagagcacatactctggaaatcattgggctcacgaccatattcggcaacgtcgacacagaaggcgcaacatgtaatgcactattgctgggaggaaagccccgtattgctgattttgttcatgggtcagatggcattgggaatctgtttcttcctgcaccctctgctaagaaggttgaggaaagtgctgctgatttcatggttaataaggtctctgagtttccaggagaggtctctgtgcttgctttgggacccctgacaaatgtagcattggccatcaaacgagacccttcctttgcaagcaaggtgaataaaatagttgtactgggtggagctttcttcgtggctggaaatgtcaaccctgctgctgaagcaaatattcttggagacccagaagcagctgacatagtttttacttcaggagcagatgtcattgtggttggcattaacataacaacacaagtctgtttgacagatgagggtctcttggagctaagaaactcaaaagggaagcatgcaccgttcttatctgagacgtgcaagttctacagagattggcatgtcaagtctgatggcttccatggaattttccttcatgatcctgtgagcttcactgccgtgcttcatcccgagtacttcacattcaagaagggtgtggtgagagtggagacccagggcatttgcactggccacactttgatggatcagggattgaaaaagtggaattcagagaacccttggtcagggtataaaccgatttcagttgcatggacggttgatgtgccaaaggttattggctttgtaaagaagctgctcatggcaccatga

SEQ ID NO: 5036 - DNA, 339 bp, Zea mays
  Peptide Sequence Number=SeqID_46815
atggctaggattagatctgagcgcgagcgcgcccacaggcgagcgctgacaggcgagccagaggagtcagcgactgggaaggggaagcgggctgaccagtcgggcccagcgccagggggtgcaggcgaccgacagatggggcctaagggcagggcgcgtgcccgaaacagtatccgagaatccagaccgcggaatcgagattggacggttgagatcaaacgccaggggtcgaaggctgcgggcggcgctgctcttgcccacagcgatgaagtcaccgaagatgcggcgggtgcaggctttagggggtttgaggtcgtcggagttggccattggcgatga

SEQ ID NO: 5037 - DNA, 1560 bp, Zea mays
  Peptide Sequence Number=SeqID_46816
atgacgagcgccgagaagctcgtcgtcgcgcgccagctggcccgcctcggcgtcgacgtcatcgaggcccgggtcggcaacccgccgccgggggacgacgggggcgcccacgtgcccgtcatctgcggcctctcgcgctgcaacaggagggacatcgacgccgcgtgggaggccgtcaggcacgcgcggaggcccaggatccacaccttcatcgccaccagcgagatccacatgcagcacaagctcaggaagacgcccgaccaggtcgtcgccgttgccagggagatggtggcgtacgcacgcagccttgggtgcgccgatgtcgagttcagccctgaggatgccggcaggtcaaatcgagaattcctgtaccatatactggaggaagtcataaaagctggggcaaccactcttaatatcccagatactgtcggatacactcttccttatgaatttgggaagttaatttctgacataaaggaaaacactcctggaattgaaaatgccattatttccactcattgccagaatgaccttggccttgcaactgccaacacattagcgggtgctcatgcaggagcacgacagttagaggtgactattaatggtattggtgaaagggctggaaatgcttcattggaagaggttgtcatggcaattaaatgtcgtggggagctcttagatggtctatatacgggaataaattcccaacatattactttgacaagcaaaatggtacaagagcacagtggacttcatgtacaaccacataaagctattgttggtgccaatgcctttgcccatgaaagtggaattcatcaggatgggatgcttaaatataaaggaacatatgaaataatatcgcctgatgatattggtttagcacgtgcaaatgaatttggtattgttcttgggaaactcagtggaaggcatgcagtgagatctaagctggtagagcttggatatgaaatcagtgacaaggaatttgaagatttctttaaacgctacaaagaggtcgcagagaagaaaaagttagttcaccatttgcagcgtgtaactgatgaggacatagaagctttattgtcagatgagatattccagcctaaggttatttggtcccttgctgatgtacaggcaacatgtggaacacttggcttatctacagcaactgtgaaactgatagggccagatggagaggagagaatagcatgttcagttggaacaggtccagttgatgcagcttacaaggctgttgaccaaataatccagattccaaccgtcctccgagaatacggcatgacttcagtcacagaaggcattgacgctattgcgacgactcgagtggttgtcaccggagacgtggccaacaactccaaacacgccttgactggccactctttcaaccgctccttcagcgggagcggggcggcaatggacatcgtcgtgtccagcgtcagagcttacctgagtgccctgaacaagatgtgcagcttcgctggcgctgcgagagccagcagcactgaggtgcctgggagcgcaagtgttcaacgcgcagaatga

SEQ ID NO: 5038 - DNA, 1110 bp, Zea mays
  Peptide Sequence Number=SeqID_46817
atggccgtgctcgcgggcgcggccgtcgttgcggtggcggcggcggcgatggtcgccgcgctcctgtcctccccggacgcgctgcgcgacgtcgcggtgctggagattggcggcggggaaggccgtgtcgagttggtccccgtggacgccggcgccgcggggcccgagagcctggcgttcgacccggccggcggcggcccgtacgcgggcgtgtcggacggccgcgtcctccggctggacagctgcaggggctcccaggacccggggcgcgagcacgagtgcgggcgcccgttgggcctcaagttcaaccccgacacgggggagctctacgtggccgacgcctaccacggcctgcgcatggtcgcgccgggcccgggcggcggcaaggcgtcgaggccggtggcgccggagtggtggcagggcgcgcgcgccttcagcttcgccaacggcgtcgaggtcgacccgggcaccggcgccgtctacttcaccgagacgagcacgaggttccagaggcgggagttcctgcgcatcgtcgtgtccggcgacacgacggggcggctgctgcggtacgacccgaggggcggcggtggggtggaggtgctggccgacggcctggcgttccccaacggcctcgcgatgagcagcgacggcacgcacctgctgctggcggagaccaccacggggaggatcctccggtactggctccgcccgacggctcccaaggcgccggcgctgctggaggaggtggcgcggctgccgtggttcccggacaacatcaggatgagcccccggggcggcttctgggtggggctccacgccaggaggggcaagctcgcccagtactgcatctcctacccctggctccggcgcctggtgctggcgctgccgccgcgccacgtccagcgcgcctcgtcgctgctcagccgcctcgggcggcaggtcatcgcgctgcggctgagcgaggaggacgggagggtggtggagatggccagcgtccacggggatcttcggagggtgttcaggtccgtcagcgaagtggcggagaggaacggcagcatctggattggctctgtcatgtcgccgtttctcggagtctacaagttgcagtag

SEQ ID NO: 5039 - DNA, 138 bp, Zea mays
  Peptide Sequence Number=SeqID_46818
atggggacccctttggcggattctttgctgagtgctgtcaggcagacactcagcaaaggctatgatcatgaactggactatccgccaccttacatgatgttcgctgcggctggattaaaactgttcgaactgctgtag

SEQ ID NO: 5040 - DNA, 306 bp, Zea mays
  Peptide Sequence Number=SeqID_46819
atggaggataatctaccagttaatgtccaggaatatcaagaacttgctaagaaattaattctgaaaaaagcaaggatcccgctgctggttttgcaggagcacgagcggaggctggagcggattaggaatgcgttcaaggggatcgaggggtcccacgtatggcccttccagttaattcatgcagtggaacagagccatagtaagggaattttgcatggtgacataaaatgtgaaaatgtgctcgttacttcttggaattggttatatcttgcggactttgcatcattcaagccaacggctacatag

SEQ ID NO: 5041 - DNA, 369 bp, Zea mays
  Peptide Sequence Number=SeqID_46820
atgcccgggtacgatctgctcaggaaggtcaaggactcgtcgtctctcagagacatcccggtcgtgatcatgtcgtccgagaacaatccttcgaggatcaacagaaccagatgcctggaggaaggagcggacgagtccttcctgaaaccggtgcggctgtcggacatgagcaatatcaagctccacatactgaaaagcaggtgccgggagcagcaccaccaccagagtgacagcgacggcgacaaccacggccacggctgcggtagcgccgcgaacaagagcggcggagatcacagtcgaaagcggaaggcggaggaggaggagaacgaagatgtcttgctccagaacaacaggccgaggcacagttag

SEQ ID NO: 5042 - DNA, 1944 bp, Zea mays
  Peptide Sequence Number=SeqID_46821
atggacgcgggcggtccgccgccgctgttcctcctgggcgccgtgctggccgcggcgctggggtggctgctcgtggtctggcgggcggcggcggggcggcggcggtccgcgtcggcgcggctgccgccggggagcacggggctgccgctcatcggggagacgctgcggctcatcgcggcgtacaagtcgccgaacccggagccgttcatcgacgagcgcgtggcgcggcacggcagcggggtgttcacgacgcacgtgttcggcgagcgcaccgtgttctccgccgacccggccttcaaccgcctgctgctggccgcggagggccgcgccgtgagctgcagctacccgtcgtccatcgccacgctgctgggcccgcggtcgctgctgctcacctcgggccccgcgcacaagcgcctccactcgctcacgctgacccgcctcggccgcccggcctcgccgccgctgctggcgcacatcgaccgcctcgtcctcgccaccatgaggggctgggaccgccccggcgccggcgccatgcgcctccctcgacgaggccaagaagatcaccttcaacctcaccgtgtggcagctcgtcagcatcgagcctgggccgtggaccgagagcgtccggcgcgagcgaggaagaaggtggccggagctcttcgggaggtggtaaggaagaggatggacgacaaggcggaggacgactgtggcgccagtaagaagaacggggagaagaaggacatggtggaggagctcctcgaagcggagggcgggagcttctccgtggaggagatggtggacttctgcctgtccctgctggtggctgggtacgagaccacctccgtgctcatgacgctcgccgtcaagttcctcaccgagacacccaccgcactggcgcagctcaaggaagagcacgacagcatcagaggggtaaaaggcaaaggccaagctctggaatggagcgattacaagtcgatgccgtttacacaatgcgtgataagcgaaacgctgcgcgtggccaacctgatcagcggggtgttcaggcgtgcgaacaccgacatccacttcaaaggctacgtgatcccaaagggctgcaagatcttcgcgtcgttccgagccgtgcaccttagcctggaccactacgagaacgcccggaccttcgacccttggagatggcagcagggcaagagcaagctgcagagcgcggaaggggccagtctgttcacgccgttcggcggcgggccgcggctgtgcccgggctacgagctcgcccgggtggtggtttccgtcttcctccaccacctcgtcacgcgctttagtggacctgtacggttctcttgcaaacaaccactcggtaattctctcaggaaccgtgggataaccaaacagccaccgggtaattatcacggtgagtacctgtcggggaccataattaggggtaccctcaaggcgcctaattctcagctgaaggacagcgccgcctgcgccactccgactgcagtgccactcgacagagtgagtctgacaggcaatcaggccttgccaaaggcgccacggcgaactccgctccgcccgaccccagggctcggactcgggctaagacccggaagacgacgaaactccgctccgcccgaccccagggctcggactcgggctaagacccggaagacggcgaactccgctccgcccgaccccagggctcggacacgggctaagacccggaagacggcgaactccgctccgcccgaccccagggctcggactcgggctaagacccggaagacggcgaactccgctccgcccgaccccagggctcggacacgggctaagacccggaagacggcgaactccgctccgcccgaccccagggctcggactcgggctaagacccggaagacgacgaaactccgctccgcccgaccccagggctcggactcgggctaa

SEQ ID NO: 5043 - DNA, 384 bp, Zea mays
  Peptide Sequence Number=SeqID_46822
atggccttactctatcctagagttgtgcactatatggaggttgatgaagactttgctgcaaagatcgatgatgaaatcacctctttgaatcaggatgttgtggctataaacaagtggaggtttatggagctaaaggaagacatgcaaggagatttcgttgctaaaaatgaagcatatgagatgcagacgttgaagcctgaagctgaagcaatttttcttcagaggaaggaaggacagacttgcttgtttcggggggcaaaggactgcgacacggcctctgaggacgggagcaagaggttcgtcgacgcctctgtcgcatccgcgaccacaggggccgagtcgttcaggaaggaggagaagctcgtcaagatcaaggaaagttaa

SEQ ID NO: 5044 - DNA, 129 bp, Zea mays
  Peptide Sequence Number=SeqID_46823
atggctctcgcggtggtttggggaggcgaggtgaatattgaaagaggaagcgactacatggtaaaaggcatcaaggttcaatttctggatatgaagtttatggtcacagtacagaagaaggcgctataa

SEQ ID NO: 5045 - DNA, 270 bp, Zea mays
  Peptide Sequence Number=SeqID_46824
atggcgtgcgcgtcgtctcctctcgtcagctatccacaggggcacctagaggaagaatgcattcctcgattgtgtcgcgctcgagtcgccacaggcttcggcggcggggcggtcggcgctgaagacgtcgccgcggaggcagaggtggacgggaatgaggccaccaagaaggatgcggatgcgcggaggtgggcacgggaggcagggcggcggcggcttgcacagagggggcgggaggcagggcaccgacggttgtggaaggaggagtga

SEQ ID NO: 5046 - DNA, 243 bp, Zea mays
  Peptide Sequence Number=SeqID_46825
atggcttggcaaacggatctaggctggcttcctctctttctgttcttctcctgctctgttctttgcttctttcttccccaccgaacagctcaaaccgatctgatctactatctactgagaggaacggggaaacacacctttattgttgttgctatcttcataccgtcgccctgcagagaagcagcaggcatcgggatccgagccgctgtaggttgtcgcgtttctaaacactccgacgtctag

SEQ ID NO: 5047 - DNA, 633 bp, Zea mays
  Peptide Sequence Number=SeqID_46826
atgacagaacagcaggaaggtgttagcaagagctcttcctcaagtattagcagcagcactcaggagagtgaggaggaactgaccatcggtacccttataaccgaagcaacaaacacaacaaacagtgccaagagtcttggaaagcgcctttcacacttagattcgatcccgcacactccacgtgttaatgggaaaattccagattttaataatgcgacaattgatcatgaatcattattagaaagattaggcacttatggcttagctgaatatcaaatagaaggagatgggaattgccagtttcgagctctggcagaccagatattccgcaatcctgactatcacaaacatgtgaggaaggcggtagtgaagcagctgaaggagttcaggaaacactatgaaggttatgtgccaatggaatataaggtttacttgaagaaaatgaaaaggtctggggaatggggtgatcatgtgaccttacaggcagctgcagacaggagttttgttaagtttctggaatccacatgcacaatacaagagctttggctaagtttctggtgtgaagtacactacaattcattgtatgcagttgaaggtgaggggtttattctcttattgcttgccgatatttga

SEQ ID NO: 5048 - DNA, 303 bp, Zea mays
  Peptide Sequence Number=SeqID_46827
atgaagctgggggttctcataccatatcttataaagtctgccatcgacttcgaggtgtgctcgagagcagacgtgtttgtcggcaacagcttctcaacattctccaacctcgtagtgctgtccaggacagaaaggctgtacaacctgggaaaggcgagctcgtgtggcgagaacatcgggctttcgtcgtatgcgtacaatgtcatgggcgacgatggtggaccacagagatggatgacagatatgtcggacacaagcctgcagaggttaagttacggaacaaataacgtctcatgccactga

SEQ ID NO: 5049 - DNA, 102 bp, Zea mays
  Peptide Sequence Number=SeqID_46828
atggtcccaggcatcatcattatggttactccaacccatggccttcgtaccctggggctcgacatagcccgtcgtgtagtgccctgcgggaggcatggttaa

SEQ ID NO: 5050 - DNA, 3351 bp, Zea mays
  Peptide Sequence Number=SeqID_46829
atgatgttgccgccgccgccaccaccgtcctccttgcgcgaccttctctcgcgggagcgcgtcgacgaggacgaggcgccgcatctgtcgccgcgacgcgcctccgggcggtcacccccgcgccgcggggcgtcgtcgaggtcgtccaggcacacgtcgtcgccgccgctggccacgaccacgacaacgaccagggaggcggagggggaggccgccgccgccgacgcggtggtcgccgtgctgtccgcgtacgccgggaggctgctcagggacgcggaattcaggcgggcgctccgcgacaagtgcgccgcgtgcctcgcgcccgccgcgggcgcgggcgaggacgacgacgcggcggcaggccgccccgtgctggccaacctcgagctgggcatcgagagcatagagcgcctggccgcggacggctccgccgcgcagccacaggcgccgcgcgacgccaagatccggtcgctccgcaactccatccgcctcctcagcgtcgtcgcgtcgctccactcgccaccgccgccgccgcgccccggcgccgccgcgggggacggcggcggccgcacctgcggggtgcccaactcgcacctcgcagcctgcgcgcagctctacctcgccgtggtgtacaagatggagcgcaacgaccgcgtcgcggcgcgccacctcatgcaggtgttcgccgacgcgccgggcctcgcgcgcagggagctgctgccggacctctgggaccacgtgttcctgccccacctgctccacctcaaggtctggttcgccagggaggccgacgacctcgtcgctggccgggacgccgacgaccggcgcacgaggatgaaggccctgcagaggctctacagcgaccacatggacagcggcacggctcagttcgctgtgtactacaaggagtggctccagtcaggcgccgccgcgccgcctcccgtcccctcggtgccgttgccttcgacgcccaggagtttcgacgggcgcgagaagagctcggcttcggtgcacagaacctccatcaacagagacctgtgggtgaaccgtgaaccttcccatcccacagactgcattgcaagagcacaggagtttctcagagtttatctgaattctgcttccaggtataatgcggttttcgggacagctctcgctctcgggcaggaagacgtcaaggatacaaagctggacgatgggactggactagctctggatttggatgtcgaattggatcacgatgctgcgggcttcaagacacagaagcttgctcatagtaaaatggggctccaggaaaagcactcccgctctcggaaagaaggcgccgctctagcagaaacagcacctgcgcagcggaaatcatactcctttcgactgttctcgtgccaaggcgatataagcaggaacgtgatcagccatcccaaagcagcgaagaaggaacccgtggtgtctgtcgagaaagagctggacagcagcgagctagctcctgctgtcgtgcctctgctggaacgagcggtttccgtggtatccagttcggacagcctgagtcagtgcgaggacgccgtgcacgaggtcgccagagcatgctcggcctgggacccgagcctcgtgaacctgctgtcgtgcgcctctttcatccaaggccttctcgaggtcacgctgacctccaaagacgacgccgtgctggagtcggccatgtcgatcatggggaagctggttctggggaacgaggtgatcagacagctcgtgctcaacgcggacccgcagctggaggttttcctgaggctcctgaggagcagcgagctgttcctcaaggcggccgtggtgctctacatgatgaagcctaaggccaagcagatgctgtccctggactgggtgccgctcgtgctgcacgtactggagtgcggcgacgaggtgcagtctctgttctccgtaagatgcgcccccaagatcgccgcgttctatttcctggaccagctgctcatggggttcgacgttgacagaaacgtcgagaacgcgaagcagatgatcgctctcggtgggctggacctcctgatcggcaggcttggcgctggcgacgctcgcgagagcaggcactgcatcgctctcctgaccacgtgcgttcaggccgatggcagctgcaggcactacttggctgatagtctcaagaaggagcctctcgttcagcttcttgctggaaatcagaggaaagccagtgccgcgtcccttaacctgatgagtgaactcgtctgccttaacagaacaagcaaaatcgtggagttcgtcaaggagctgaagaacagcgggtgcttgaacacgatgcacgttctgctggtctacctccagcaggctcctctcgtccagcacccgttagcagctaccatgctactccagctcgatctcctgggtgatccttcgcagtacagcgtgtacagggaggaggcgatcgaggccatcgtagccgctctggagcacagctcgcagagcaggaaggtccaggaacagtgcgcccgagctctcctaatcttggcagggcggttctcgtcttcaggagagcccgtagcagaagcgtggctgctaaagagagcgggcctagacgattccctctctgagtccttcaggagatcagaagtattcaaagataagagtgttcgagcggaggaagagaagctagtggaagaacggcagaagaacctcgccttgatgctactgaagagcgggggcagaaggttcctcacggcgctgtcgagctgcatatccgatggaaccccgagcctcagccggtcgtgcctcgtcagcgtggcatggatgagcagctccctctcgccgctgcgcggatgcaacgacttccagcccctggcatgctccgtcctcgcgtctaagcttttggacagcttgagctacgacagagtcctggaggagagggtgctcgcttcgctgtcgcttctgaacgtcgtgagacacccagatgagatgcaagaccagatcgtcctcagcgatgaagaactagacaccagcatcgccgcctgcgccgctccgactgctgtgccactcgacagagtgaggctgacagcagccaggcccggcctcaggcgccataggaaactccgcttcgcccgaacccagggctcggactcgggctcagccccggaagacgacgaactccgctttgcccgaccccagggctcggactcgggctcagccccggaagacgacgaactccgcttcgcccgaccccagggctcggactcgggctcagccccagaagacgacggactccgcttcgcccgaccccagggctcggactcgggctcagccccggaagacgacgaaccccgcttcgcccgaccctag

SEQ ID NO: 5051 - DNA, 399 bp, Zea mays
  Peptide Sequence Number=SeqID_46830
atggagaccgcaggtgtagagatgctgcacatgactagcatttctggagcaagacgtagatatggccccacctgcgggttcgccacctcacctgaggtgggcctagggacctctactggtaccttaaatatggggtacccactcttgctgggtcaaggcaagacccctatggctgcccatagccatgggactactcggtggctagcccgactcagggttgaggcccaccatatgtggtcgcgggcgatctgggctcgtttcctaggctggacaatggtcgtcacaagccccagagtaatcagcaacctcgactataggtctaagtctccgcgggtaggacctggaccttcgcatgggcccattagatccctagagagggggtttgaaagggctccatga

SEQ ID NO: 5052 - DNA, 2127 bp, Zea mays
  Peptide Sequence Number=SeqID_46831
atggcgcctagaaagcatccatctggtagtaagaaaaggaagagaaggaaagaagtagaggaatttatagaatcacaaagaggtgccatggataaatttgttcgcactaatacaagaacttcaagtaatgaaaatcaaccaaatttggctatagttgttgtggcggaacaaccaaataccaacgaagaagatcatgaccctacacttgaagaaaatgttgacatcaacacaaatggtaatgatgtgactggccatgatccaatatttgattcatctcatataggaaatgatagctttgatgaacagtcggttcctactgaggatatctatgacccaaggaattggggtaatcttgataacaagtcgagggatatattggttgagaagggacctataagagaagaaaatattgtatttcctttggatgctaatgaaaaatgcaagagttcattggggcatgatggatttggagattggaggcatactagtgagaggttaaaagaacatgaagctagtatggagcatattacaagtatgaactcatggaatgaattgagagtgaggcttcgcaagactgaaacaattgataaagaatttcaacatcaaattgcaaaggaaaaagagcgtatcaggcaagttttattacgaataattgctgttgtgaaatttcttggtaagcgtactttggctttcagaggatcaagtgagcgactctacaatgatcaaaatggtaatttcttagcctgtcttgagatgattgctgaatttgatgtggttatgcaagatcatctgagacgcattcaaaataatgatattcaatatcattatcttagtcataaaattcagaatgagttgatttctctattggcttctgacatcaccaaatctatcataaagattgttaaagaggctaaatatttttcagttatccttgattgtactccagatgtgagtcatcaagaacagatgagtttgttggttcgatgtgttaatatgtctagtggcaaagttgaggagtattttctgggtttcatgaaggtagatgacacatctggtgagggtctttttaattcattgcttgattctattaaatattttggtttaaatattgaagatgttagaggacaaggctatgataatggctctaacatgaaaggaaagcataagggggtacaaagacgattacttgatataaatccaagagctttatttatgccatgtgcttgtcatagtcttaatcttactctttgtgacatggctaagtcttgtgccaaagctatttcattttttgggattgtacaacggatatatgtattattttctagttctaccaaaagatgggatgttttgaagggccatgttgaaagtttaactgtgaagtcatggtgcaatactcgttgggagagtaggattaaaagtgtcagagcaattagatttgaagctccaaacataaggtcagctttgcttcagttaagtacagataaggatgttgaatcaaaggatagaagcgatgcaaaaaatttatttgatgttcttggtacatttgagttcatacttggtatggttatttggtatgaaattttatttactgtaaacaaagtgagcaagcagctgcagtcgccatccatgtgccttgatgctacattaaagaacatagaaggtgcaatgaagttttttgaatattatagaaatgaagggtttgcttctagcttgatcattgcaagagagattgcatcagaactaggtgtggagccatcatttccagtaaagcgccatgctaagaggaagaaacaatatgatgaaactgaattcgaggaagcaaaactcgaagctgagaaggcttttgaagttaattactttttggttatggttgatgttgcaattagttcattaaaaagtagatttgaagaactccaatcattcaaaagtatatttggatttttgatgagctcaacaaccctgaaggcactggatactactgaactaagagattcttgcatcaaatttgcaaacactttctctttggatggctcctctgatgttgatttaaatgatctattttcagagctcagtgttatgcggttcagtatatcagataaacctatgtctgccatgaagattttttag

SEQ ID NO: 5053 - DNA, 155 bp, Zea mays
  Peptide Sequence Number=SeqID_46832
atgtaccgcgcggccgctagcctcgcctccaaggcgcggcaagccgggaacagcctcgccacccgccaggtgagagcagactcattgatgtgcgtccaagttgtgacggggtctgatgaggacctcgctctcagatttggcaatgatgggttctg

SEQ ID NO: 5054 - DNA, 939 bp, Zea mays
  Peptide Sequence Number=SeqID_46833
atggaaacacctagtggtggcactcaacaagcctctgcaactggtcctcctaccatggtggtggagtcctcatcagagcaagaggacatacctgcttcatcaggatcaaagaggaagctcagatttgatgtgtggaaggattttgatcaggttgaagttgatggagtagggaaggctaaatgtaatcaacgtgcgctctccctcttgctcggcgctcgccgcgcggcgacaacgacaagccgttcacctgttccgtccgtcaccgtcgcaccaatccacacgcgcacgcgctgccgcggcgcctgcctgctgatcatcttccccagccgccgctactgcgccacaccgtgtccagttgcacgcagtagcaggcccaaggcagtgcgtgcccgcgcgccgaacagacttatgtcgtccgccgcgcgccgccctgacggaaggccggccggcgtcgtcgcgcgaatcgagactattgcaccacagcggccggaactgttgtcgagcaatgagcacgccgcccccatccatcaggcattcaggcgtctgccatcaggtagggttccggtgtttcactactcgctagccgcggtgagcgaagaagccggccgagggcgagcaaggttccgagctggtttggtgcggtgtggtgtggcccatggaggatcggcgacacaggcgcgagaaacaggggcacggacggctgacggtgagcagaaggcagctcagcaagtggccatggtgggctatcattggcgtgtacttgcacagtgccggcgcatccagatctactggagccaagccaccgctgtctcctccccgggcagagcgcgctccgtaccgtaccaccgctcccctttcgactcgccggacgacatgagagagagcagcagagcgaacaatgagcatgcttccgcaccttgcccaccactatctagctag

SEQ ID NO: 5055 - DNA, 210 bp, Zea mays
  Peptide Sequence Number=SeqID_46834
atggcctcacgaggtaactggtccaaggccccacgcgaggctttcttgccttctagtggactcaggggatatctgtcccccacaataaataccatagaggatagagttaagacaggacctgcaagtggaaaagaagagggtaccttcggacttggatcaagaccaaagtgtgaagaagtacaaggaatacgaaggatggtgcagagctga

SEQ ID NO: 5056 - DNA, 471 bp, Zea mays
  Peptide Sequence Number=SeqID_46835
atggagaagagcaggggctcgactacgcacggcggatggcgtagctccggcgatgacgaactctggcgaactccggcggtggttctaacggcgatgagagtgagagagatgggggcgagcttgggtagggggaaaatggagagaggctttgctgccttttatagggagcaggagggagaggagaggccgccggtggtcttcaatggccatcacatgcgtcagtttctaacgagagtaatggagagaaatgggagagggagtaacggaggatttgatgctccattaacggcgagaaatcgaacagatgcgcggggcagacgcgcggtcggctgggggctcaggtcggcctcggttgggtgcgcgtgggcgtcgcgcggctggccggatcttcacgtcggggcgggggcgtcgagccagcttggggcgtgcgcggtgcagggtgctcggcggctcggctgctgtgcggggtag

SEQ ID NO: 5057 - DNA, 435 bp, Zea mays
  Peptide Sequence Number=SeqID_46836
atgaaggaacagatagagacggtgctccatgaaagccctgaattggagagctttgtggagaggcttgtgccctggtatttctttgttgtcgataagattatccgctatactccaggaatccagccttacctcttagtggcacaagcgacaccgtctgtcagcctaaaaatgaaaagccaattactgaaagcggagatgaaatctcttatgaaggagcaaaggcaaaacatccaatatctttattattgggactacgaaggagatcaacgaatcgtttgcaacaaggtgtcaacagggtcgaatttgcctaatttgggcgccgcctgggtcggtctatggtctgcgcagacaccgactatcgcttcatcgagcacgccccatgcgttcttcaagagctacattcgctcgatctgttcagacaatgtcatgatttag

SEQ ID NO: 5058 - DNA, 451 bp, Zea mays
  Peptide Sequence Number=SeqID_46837
atggcgcgcggcgcagccagcgtggccggtgtggccagcgcgacaagcagccaacgcgtcccttggcatgggcgtgcagccccagcggcatgtggacgtggcccctggtggcccggcgcggccagctcgcccggcgtggcgcgccccctggtccagccatggcgccccggcacagcgcgcgctgcgcggcttgctcgccccggcctgcgcgacacggccagcctgcccgcggcgcgctcgcagcagcggcccgtggcgcggctcacggcctgcgagacagcctgcctagcatggcggctcgcagccccggagcgcagctcggcgtggccgtccgtggccctgcgcgccctagcgcagtgcctttgccccggcgtgctcccagcgggccctggccggcatccagccgtcgtggtcgaccgaaaggccaccctcgccgagctcctcccgtcgt

SEQ ID NO: 5059 - DNA, 792 bp, Zea mays
  Peptide Sequence Number=SeqID_46838
atgccccacaatctcagccagccctgctgtacccccgcctgcctgtgcaccctcccacgcgcgatggaagcagtccgacatgcccctcccaccacaaccgcgcagcaccgtcctgggcacggcgccccgcacggggcgctcctcggcccgcatctgcttgcggagattggcctcgacgaagaggggctcggcggaggccgcggaggggagcggcgagaaggagatgagaagcgcgtgggaggaggagaagaagatcgacgcggagatgaggagcaggagaagcagcaggcgaagacgagcaccacgagctcgctcccctccagcaacgagcgctcctccagctccgcttgcaacaacctcacgaaaggaggggcggagagcgacgaggagatacggcgggtgccggagatgggcggcgcgtcggcatcggcctcgtcgggcgccggcgcggacgagcttcccaagggggaggacgacaagcaggggcaggtggccgcgcccaacccgttgctggttatagatgttagtggtaaagaattcaaattcacctgggcatctgaacgaggcgaattgtgtgacatttatgaagaacgtcggagtggagaggatggaaatgggttgcttctggagtgtggctctgcttggcgcaaggtgaatgtgcaacgcattttggatgaatcaacaaagaaccttgtgaaaatgcgctcaaaggaggctgaacgtctctcaaaatctcgaaagtttgtctgctttccctgttctataatcctcttggtttctattgatttatga

SEQ ID NO: 5060 - DNA, 570 bp, Zea mays
  Peptide Sequence Number=SeqID_46839
atggggggaatggttgtggccagatttgttaatggtgttgcggatataagcgtcgtgtggcatctgtcgcgaccaagcattacgagacagtctcctctagcgctttgcactactcctatcaagtgctcaataacactaggacagtcaagtgagctggagaaattggttgtctcaagtccaaaggcttctaccaatcctttgaacataagcttgacgacggaaggtggaagcgtgtttcctatcaatgatccaataattaccattacggacactgtatctaatcccatggcatattgcttggctgctatgaagagcgaaggtgttaacttaataaggggttacagcgtgggcaactcaagaagcaaccttccagtgaactcaaatccttcttgtgttccccctagacctgccttgggaccgaacagctacactcgtgaagctaccaagggcgcctcgccgaatggcacccaagtcaatgtcttgcaaccttctgcaagtttttcgccgaagctgcattgcaacagaaacgtcctcgtcgccgctgctctgttgttcctcctaatcctttga

SEQ ID NO: 5061 - DNA, 252 bp, Zea mays
  Peptide Sequence Number=SeqID_46840
atggttaaaaattttggcagcaaaacaatgcaaatagcaatgaatgctgtggtaacttcacacctactcgtctgtttatatagtactgcagactgtaaccttgctgacggagagtacgtcctcgtgccggagcaaggagttgctcaggaggtagctccagatccagcaccagaggacctgcctgccactgctttggaaggcaagccccggtttatgcataacctgttatttatgctattttactatacttaa

SEQ ID NO: 5062 - DNA, 290 bp, Zea mays
  Peptide Sequence Number=SeqID_46841
atggccgtgatgggttcaacatcagaaaagatgtacctcttacaggcatcaaatactgagaagtacaggggccctggtgtaaagtggaccaagacccaggcgagctctgcggtggactgcggatcaaacggccaggagccgtcccctactctacacgacgcgaccgacggcagcactgttcctcgcgacaaggatctcaccggcgatcaccgccccgactattccgagcacctcacatctattactctagcgcaaaacaaagaggatgattgtacgaatacggaggtcgg

SEQ ID NO: 5063 - DNA, 2268 bp, Zea mays
  Peptide Sequence Number=SeqID_46842
atggcgcagaacattgccatctcgctgctcgtgctgaatgtgatcaagaagagacttattacatggaaggatcgggtgacaaaggctatagagaagataaaatctgccaggaataaatcatcgcaaggaagcatatatgttgcaaattttaaggcggttatgttgctgttttgcactttgcccgcatatgacttcacaagctcagacctcaagcactacaacatggttctccaatacaatcctgatgaatcaaacgtgctccgggttccacgcttaatgaatctggcctcaagtgcataccttcggttgaggggtaatgatactaatatgcggtttgtgtttgttaaagacatgcctagagatggtcatcctatgaaggctcctgacatgtcttttatagttgggaagatggtttttgtatggattataatgctccttttcccggtcatcctgagcagtttagtgtatgagaaacaacagaagctaagggcaatgatgaagatgcatggtttaggggatatggcatattggactatatcttattgctacttccttgtcatatcattactttatatgttcttgctggttgtatttggcgccgtcgttgatataaagttatttgcagtgaacagctacgtgctacaattcttactatattttatctacatgaacttgcaaatttcatttgcgttcctcatgacaacgtacttttctacttccgcaacagctaccgaaaagatggctgcaggaacattctatctacctcgtgcagtaacaggatacctctatgttattgggtctggcctcataggagaatatctgttcaggccttttgtcgaagacacctccgtctcaagaagcctgattacgctgatggagttcttcccaccaatgtctctgtaccgcataatctacgagctctctccacctccatcgccgtcggggcctttctcggacttctccggcgtacgcgtgggagacctgagcgaccctgagaacgggatcttggtcctcatggtcgtgatggttcttgagtggcctacgtttcttttcctgacattgtatctggatggatttggctggctccaaactagagttagaaagctgccgccggcggcggcggcatcttctcatcagacccttcagaagccgtccaccacacggcctcaagaacgacccgaagcttcgattgaaatagacgggacgacagatatcccgggagaggtagcgcgtgcatgcgcagagagagagatagtcgacaggttcttgcagcaaccggaccagagctacgcagtcatagtcgacaacgtcaggaaagtgtaccctccgagagacggaaacgcagaggtggtcgcagtgaacggcttctcgctctccatcaaacgcgggcagtgtttcggactccttggctcaaacggcgccggaaaaacctctctcattggcatggtatggtatggtatggtaatgctgactgggttcactaaacctacatccggcacggcttatattgatgggatggacatacgaacagacatgagcgagatctacacgagaataggcgtttgtccgcaattcaacttgctatgggaaacactgaccggccgtgagcatctgatgttctatggcagactaaagagactgaacggcgctgcattaactgaggctgcagaacaatctatgaaagtactgaagatattcgagggcggtgtcgccgacacgctggtttcacagtacagcggtggcatgaaacgccgcctcagcgtcgctatctctctgatcggggaccctaaggtggtgtacttggacgagccaagcacagggttggatccagcgtcaaggagcgccttgtgggacgctgtgaagcttgccaagaaggacaaagccatcattctcacaacgcattccatggaggaggctgaggctctgtgcgaccggatcggaataaccgcgcatggacgtctccgctgcaccggaacctccaaagagctgaaggccaagtacggcggcacgttcgtgttcacggtgacgacggcggcggcgggcgaggacgaggcggtggagcggctggtccgcggctccatctcgcctgacgccaagcggacgtaccacatcgccgggacgcagaagttcgagctgcccaagcagggggtcaggatcgccgaggtcttccgcgccatggagcaggcgaagcgctcgctgagcatcgccgcctggggccttgtcgacaccacgctcgaggacgtcttcatcaaggttgctgcttgctaa

SEQ ID NO: 5064 - DNA, 201 bp, Zea mays
  Peptide Sequence Number=SeqID_46843
atgaacagggtaaatccaactattatcaagttcctggagcttgctgcttgggtgtatcgcaatgtggacaaaccaagcgcgacaattagcgcccaggtgaagcacagaacagaggcggccaaggcaagagcaataaacattgaaaccccttcaagcccaatcgctctgctgacaactccacgtgtaaagggagaggattag

SEQ ID NO: 5065 - DNA, 942 bp, Zea mays
  Peptide Sequence Number=SeqID_46844
atgaacgacctcttctcgtcggcctcgttcaagaagtacgccgacctgaagcagcaggtggtgctggacgacatggaggccggcggcggcggcggcgaggcggagggcgcgggcctggacgggttcttcgaggacgtggagggagtgaaggaggacctgcgcgggatggaggcgctgtgccggcggctgcagtcggcgcacgaggagagcaagacggcgcacgacgcccgcgccgtcaaggccctccgcgcccgcatggacgccgacgtcgacgaggtgctccgccgcgccaaggccgtgaaggacaggctggaggcgctcgaccgcgccagcgccgccagccgcaaggtcgccggctgcgggccaggctcgtccaccgaccgcacccgcacctccgtcgtcaccggactcggcaagaagctcaaggacctcacggacgacttccagagcctgcggacgcgcatggcggcggagtacagggagacggtggcgcggcggtactacacggtgaccggcgaggaggcggcggacagcacggtcgaggcgctcatctcgtcggggcagagcgagacgttcctgcggaaggcgatccaggagcaggcagcagggcgcgggcaggtgctggacacggtgtcggagatccaggagcggcacggcgcggtggtggaggtcgagcgcagcctcagggagctgcaccaggtgttcctggacgtggcggcgctggtggaggcgcagggccaccagctgaacgacatcgagagccacgtggcgcgtgccagctccttcgtgctccgcggggctgtcgagctcgaggcggcgcgggagtaccagaggagcggccgcaagtgggcgtgcgtcgccgtcgtcgccggcgccgtgctcgtcgtcgtcatcgtgctccccgtcctcgtcaacttccacctcctgagcttgagacggtag

SEQ ID NO: 5066 - DNA, 414 bp, Zea mays
  Peptide Sequence Number=SeqID_46845
atgccgtcatggggatatggcgatatgcccacggtggccatttggtacaggcgtcggactcccaggaggatgaccggtggcaagaggttcggcggcgggcgggtgccgacggggaccccgtccctcgcgtggtcgtccgtcgtcatcgtcgcctccctcctcgttggcgcctccatcgtccacaacatctacaagcctgacatggtttgttccgacggccctcgcaccccccgccacactgcacactgcacaccacctgttcgacccaatgtctacaccggatcatctattcatttccccgctcttgcagaccattccacctgtggagggtgccgccggcggcggcggccaagaaagctgagctacgaatggctggacactgcatgcaagagaggaggctgggcatgggagtag

SEQ ID NO: 5067 - DNA, 273 bp, Zea mays
  Peptide Sequence Number=SeqID_46846
atggcagaagcacaaatagtggaggaggaaaggggccggtgggggaagagaagagggggcctggaaggagaagaggtggtggcagattcacctgatttgacggatgacggcggacgggcggagctcctcacggcggcggtggctcaaggatgcactgctcgctcgcacgagaaatgcaataaccttgacacatacagcacgacactaatagcactattcctagctagttgccactggcatcatgagggtcctatgatttttcgacgtccatga

SEQ ID NO: 5068 - DNA, 1293 bp, Zea mays
  Peptide Sequence Number=SeqID_46847
atgcacacatttgggacctttcctaagctgtgtcttcgagcaaccaaaaagctgataaagactacgttcattagttcaggtcttgctgatttactttgcagcaacatgcgtgaaacgccacgtttcgggcgttctacggcggcccagcctaattcaccaaacctggtcgcgctcacgtttagggcaccagaccgcgctcaagtccaccgttctctgcccccagaccgcgctcaagtccaccctctctgcccccaggccgctccaggccgtcgctcctccccgtgcagcctcctccaggccgccgcggctcctcccgtcctccgccgccgctccaggccgcagctcctccgccacagctccaggccgccgcttggccgcgccaggccgctgctcggccgcgccaggccgccgctcagccgccagcagctccaggccgcgctccaggccgctcccgctgtctgccggccactacagagacagccaaccctccagccctgcttcactggtgactggctggaagatgatgaagatgaagatgatgttgatgagggtgatgagaatgaagatgatgatgatgctgttgatgagggtgatgagaatgaagacgatgacaattttgtgcttgacgaccttgacatggatgatgaagaagaaacaaacaatagtggtggccgtggtgatgagcaagacaaggatgatgttggtttagatgatttggatgatgactgcccccgcctctacacccgccatccagcccgcacgtcgcaatcccgtcgcggccgccgcgaaccactcgcccgcacgccctacgcccatccgcccgcccgcacgctgcaaacccagccgcgaccatggcgaaccgcccgccctaccgcccggtcgggccaggcggcgtgtcaatctctgagatctacagggacgcacgacgctgccgatggcgaaacgaggaaaatccgcacctcggctccagatccgcccgtagccgccgttcggcttccgtggaacccaccggcgccggcagtccccacgatcattctgatctcgctcgctgcgctcctcatccgcatgctggtttccgtgggcccctactccggtcagggtgcggcgcccaagttcggcaactatgaggcgcagcggcactggatggagctcacactccacctcacgcccgccgactggtaccgcaacacctccgacaatgaccttgcctactggggcctggactacctgtccctctccgcctaccagagcctcgtccacgggcaggttgctgtcgaggccccgccatcctag

SEQ ID NO: 5069 - DNA, 417 bp, Zea mays
  Peptide Sequence Number=SeqID_46848
atggcacacagggctgttgatgctgtaatgggtctccggactgttcggcatgagattgttatctcagaagctgctgctgctgcccctcctgctccagtgatgaacgctaatgcttgcagcatccattctaaggctttccaagattgtcttaacaactatggcagtgagatcagcaagtgccagttctaccttgacatgttgaacgagtgccgccgtggtgttgtctgcctgagcttttgctccaattgggattattcatggattctcttttcactcccatactggaaagcggagttctcgtcaacacggttctttcaactagggatgaaagtggcagttgttgacatgagcgcatcgtcactgctgaatcgccatggtctgaaggcaacagataaggcatactgggccttgtggtag

SEQ ID NO: 5070 - DNA, 312 bp, Zea mays
  Peptide Sequence Number=SeqID_46849
atggacctggtaggcgttgaggtgccatcggtgctgcaaatcttctttcccatgctaccgccggagaaatcacaacaaacccgtcagatccaccgcgagctcaacatgggcagctcgccggcgcagcaaagaaatgattgtcgcctgcgagcgagtcgaggtagaggaggatatgacatcggcggcggattcgttacactcacctatgggggtggcgacgcgacagtgaggaaccggatgcttggacactggcgcttcgtccgggctgctaccggcatcgggcgtcgtgttgaagccatctacgacacctag

SEQ ID NO: 5071 - DNA, 489 bp, Zea mays
  Peptide Sequence Number=SeqID_46850
atggatgaaaggatcactgccaaagctgctgtcccaagccgtccatgtatagatgagcaaacgggtcgcacggcatcgcccggcccgggcccggcccaattaggcatggcacggcacgaccaggcccacgggtctatcgggccggacatggctcggactcgggctaagacccggaagacggcgaactccgctccgcccgaccccagggctcggactcgggctaagacccggaagacggcgaactccgctccgcccgaccccagggctcggactcgggctaagacccggaagacgacgaactccgcctcgcccgaccccagggctcggactcgggctcggccccggaagacgacgaactccgcctcgcccgaccccagggctcggactccgccctggcctctgccgaacgacttccgctccgcccgaccccagggctcggactcgggctcggcccctgaagacgacgaactccgcctcgcccgaccctag

SEQ ID NO: 5072 - DNA, 2613 bp, Zea mays
  Peptide Sequence Number=SeqID_46851
atgtctcttgctagccttaggattgaaaatgaaaaattgcttgctaaggctaaagattttgatgtttgcaatgctactatttctgaccttagaactaaaaatgatatattgcatgctaaggttgtagaattaaaatcttgcaaaccctctacatctaccgttgagcatgtgtctatttgtaatagatgtagagatgttgatatcaatgctattcatgatcacatggtcttaattaaacaaaaaaatgatcatatagcaaaattagatgcaaaaattgtcgagcataacttagagaatgaaaaatttaaatttgctagaagtatgctctatagtgggagacgcgctggcatcaaggatggcattggctaccaaaggggagacaatgtcaaacttagtgcccctccgaaaagattgtctaattttgttaagggcaaggctcccatgcctcaggataatgagggttacattttgtaccctgctggttatcccgagagcaaaattaggagaattcactctaggaagtctcactctggccctaatcatgcttttatgtgtaagggtgagacatctagctctaggcaaccaacccatgctaagttgcctaagaagaaaacacctagtgcatcaaatgatcataatatttcatttaaaacttttgatgcatcttatgttcttactaacaaatccggcaaggtttatgcatccggtggctcaagttggatcatcgatagcgggtgcacaaaccacatgacgggggagaagaagatgttctcctcctacgagaaaaaccaagatccccaacgagctatcacattcggggatggaaaccaaggtttggtcaaaggtgtcactgtctttagaagaagtgatgattcaatagcatttaagggagtgttagagggtcagctatacttggtagattttgataaagctgaactcgacacttgcttaatagctaagactaacatgggttggctctggcaccgccgactagcccatgttggaatgaagaatcttcataagcttctaaagggagagcatattttaggattaacaaatgttcattttgagaaagataggatttgtagcgcatgccaagccgggaagcaagttggtgttcatcatccacacaagaacatcatgactactgacaggacactggagctcctacacatggatctattcggtccgatcgcttacataagcatcgacgagagtaagtactgtctagttattgtggatgactattctcgcttcacttgggtattctttttgcaggaaaaatcacaaacccaagagaccctaaagggattcttgagacgggctcaaaatgagttcggcttgaggatcaagaaaattagaagcgacaacgggacggagttcaagaactcacaaatcaaaggctttcttgaggaggagggcatcaagcatgaattctcttctccctacacgccacaacaaaatggtgtagtggagaggaagaatagaactctattggacatggcaagaaccatgcttgatgagtacaagactttggatcggttttgggccgaggcggtcaacaccgcctgctacgccatcaaccggttatatctacaccgaatcctcaagaagacatcatacgaactcctaaccggtaaaaagcccaatatttcatattttagagtctttggtagcaaatgctttatacttgttaaaagaggtagaaaatctaaatttgctcctaagactgtagaaggctttttactaggatatgattcaaacacaagggcatatagagtctttaacaagtcctctggacaagttgaagtttcttgtgacgttgtgtttgatgagactaacggctctcaagtagagcaagttgatcttgatgagataggtgatgaagaggcttcgtgcatcgcgctaaggaacatgtccattggggatgtgtgccctaaggaatccgaagagcctccaaatgcacaagatcaaccatcctcctccacgcaagcatctccaccaactcaaaatgagaatgaagctcaaattgatgaaggagaagatcaagcaaatgagccacctcaagatgacggcaatgatcaagggggagatgcaaatgatcaagacaaggaggatgaagagcaaaggccgccacacccaagagtccaccaagcaatccaacgagatcaccccgtcgacaccatcctcggcgacattcataagggggtaaccactagatctcgtgttgcacatttttgtgaacattactcgtttgtttcctctattgagccacacaggatagaggaagcacttcaagattcagattgggtggtggcgatgcaagaggagctcaacaacttcactaggaatgaggtatggcatttagttccacgtcctaaccaaaatgttgtaagaaccaaatgggtgttccgcaacaagcaagatgagcatggtgtggtgacaaggaacaaagcccgacttgtggccaagggatactcccaagtcgaaggtttggatttcggtgaaacctatgtgtcggggaccataattaggggtaccctcaagactcctaattctcaggtggtaacccccatcagcataaagctgcaaaggcctgatgggtgcgattaa

SEQ ID NO: 5073 - DNA, 2253 bp, Zea mays
  Peptide Sequence Number=SeqID_46852
atgggatgtctcgcggccctaagccgcttcatctcacgcctcggtgagagaggtctgcctctgtaccgcctcttaaggaaggccgagtgtttcgcttggacccatgaggccgaggaagctctcgggaacctgaaggcgctcctcacaaaggtgcctatcttggtgcctccaactgatggagaatccctcttggtctacgtcgtcgcgaccactcaggtggttagcgccgcgattgtggtcgagaggcaagaagaggggcatgcattgcccgttcagaggccagtttacttcgtcagcgaggtactgtccgaaaccaagatccgctacccacaagttcagaaactgctgtatgcagtgatcctgacgaggcggaagttgcgacactacttcgagtctcatccggtaactgtggtgtcatccttccccttgggggagatcatccagtgccgagaggcctcgggcaggattgcaaagtgggcggtggaaatcatgggcgagacaatctcgttcgcccctcggaaggccatcaagtcccaggtattggcggacttcgtagccgaatgggtcgacacccagctaccgacggctccgatccaaccggagctctggaccatgtttttcgacgggtcgctgatgaagatgggagccggcgcgggcctactcttcatctcgcccctcgggaaacacctacgctatgtgctacgcctccatttcccggtgtccaacaatgtggctgagtacgaggctctggtcaacgggttgcgaatcgccatcgagctaggggtcaggcgcctcgacgcccgcggtgactcgcaactcgtcatcgaccaagtcatgaagaactcccactgccgcgacccgaagatggaggcctactgcgatgaggttcggcgcctggaagacaagttctacgggctcgagcttaaccacatcgctcggctctacaacgagactgcggacgagctggcaaaaatagcctcggggcgaacaacggttcccccggacgtcttctcccgggatctgcatcaaccctccgtcaagatcgacgacgcgcccgagcctgaggcgccctcggtccagcccgaggtaccctcggcacagcccgaggcaccctcagctcggcccgaggcgccctcggttcagcccgaggtaccctcggcctccgagggcgaggcattgcgcatcgaggaggagcggagcggggacacgcctgatcggaattggcagaccccgtacctgcaatatctccgccaaggagagctacccctcgaccgagccgaggctcggcgggtagcgcgatgcgccaagtcgttcgtcttgctgggcgatgagaaggagctctaccaccgcagcccctcgggcatcctccagcgatgcatctccatcgccgaagatcaggaactcctgcaagagatacactcgggggcttgcggtcatcacgcagcgcctcgagcccttgtcgggaatgctttccggcaaggcttctactggccaacggcggtggctgacgccactagaattgtccgcacctgcgaagggtgtcaattctatgcgaagcagacccacctgcccgctcaggctctgcagacgatacccatcacctggccctttgctgtgtggggtctggacctcgtcggccccttgcagaaggcgcccgggggctacacgcacctgctggtcgccatcgacaaattctccaagtgggtcgaggtccgacctctgaacagcatcaggtctgagcaggcggtgacgttcttcaccaacatcatccatcgcttcggggtcccgaactccatcatcaccgacaacggtacccagttcaccggcagaaaattcttggacttctgcgaggatcaccacatccgggtggactgggccgccgtggctcatcccatgtcgaatgggcaagtagagcgtgccaacggcatgattctacaagggctcaagcctcggatttacaacgacctcaacaagttcggcaagcgatggatgaaggaactcccctcggtggtctggagcctgaggacaacgccgagccgagccacgggtttcacgccgttcttcctggtctacggggccgaggccgtcttgcccactgacctggaatacgggtccccgaggatgagggcctacagcgatcaaagcaaccaagctagccgagaagactcgctggaccagctggaagaggctcgggacaaggccttactacactcggcgcggtaccagcagtccctgcgacgctaccacgtctga

SEQ ID NO: 5074 - DNA, 189 bp, Zea mays
  Peptide Sequence Number=SeqID_46853
atgactactggagctggtcattttgtttcagctgtttgcaaatttgcgtcacagaattctggccagtggaagtttaaaaaaggtcctgaatatgcaagtatgtactcagaatcaagggaagaagcccgtgattttgctagggttcgaaatgcgtgttttgagcagcttactccatctgtcccttgttaa

SEQ ID NO: 5075 - DNA, 294 bp, Zea mays
  Peptide Sequence Number=SeqID_46854
atggaggaggaggtgacggggagcggcgggggaattgggcggaagatggcagcgggggaggtggatcttaaggagaaatcggggacggcgtggagccactcgtacctcaaccagaagccgtggcacccgctctcgtacccgaaccagcgccgcaagtggatcgccgagcaggtccacgccaatcacgcgcgccgccaggaggaggtgcagcgggagttcgcacaggaacaggagttcttccggcagaccgcactcttctctaagaaggacaaggagaagtcacattcaatttag

SEQ ID NO: 5076 - DNA, 378 bp, Zea mays
  Peptide Sequence Number=SeqID_46855
atggatatgactacaccattacaaggatctgcactccttagagctctctcccaggtgggcacttttctcagcttcatagagctgtcctccattccccagactagaccacgctctgccaagcaatccatggtcgggaaccccggcgacgtccgcgcggtggtcctggacccggccgccggggccctcgcgggcctccgccgcggcggcgtgctggtggactgcacgagctcctccccgtccctcgcgcgcgaggtcgccgcggccgcggccgcggcgggctgccacgccgtcgacgcgccagtctccggcggcgtgctgcggactgcacgagctcctccccgtccctcgccattacagagctctctggtgcgtttctga

SEQ ID NO: 5077 - DNA, 1383 bp, Zea mays
  Peptide Sequence Number=SeqID_46856
atggccacgcctccggccgccgtctgtgccctcaccgctgccgcatccaccgggcgccacctccggcagatccacgcccacctcgtcacctccggacacctctcttccctcggacccaccctcctgcaccggctcatttcgctgcacccgccgcatctccaacttgcttacgctcaccgccttctcctctccatcccatccccgccgctcgacctcttcaacctcctactgccgccgctcgcctcctcgcccgatcccgccgccgcggccggactctacatccacctccgccgccggggccttggcccggatgcccacacgctcccgcacgtcctcaaggcgctcgcgcgcctcggtccaggatgcctcccgctcgtcgcctgcacccacgcggaggccgtcaagaccggccttgcgcgcgccgtggtgtacgtgccgaacgccctcatgtctgcgtactctgcctgcggccacctccatcgcgccatgcaggtgttcgacgaaatgccgcgttggaccgttgtgtcatggaacaccgtgctcactgcctgcgcggacaacggccgccacgaccggtgcgccgggatgttcgtgaacatgttagaggctgggtctgtgcccgatcagacgacgttcgtggtcatgctcaccgctgcggctgagctggggaacttggcgcttggcaagtgggcgcatgggcaggtccttacccgacgtactgacatgacgcttcagcttggcacggctgttgtgaatatgtacaccaagtgcggcgaggtgagttatgcatcgcgcttgtttgagaatatggcagcacggaacgtctggacatggagcgcgatgatcatggggtattcacagaacgggatggtacgagaagcactggagcttttcgacaggatgaaggatgcatcagttgcgcccaactatgtcacatttcttggactcctctgcggatgcagccatgctggtctggtcaacgagggccgcaaattcttccatgaaatggagcatgtctatggcatcaagccaatgatgacccactacagtgccatggttgatgtcctgggacgcaacggccgcctccaggaagcttttgagtttgtcgtggacatgcctgtcgaggctgacacggtcgtttggaggacgttgctgagcgcctgccaactgcacagctccaaggactgcattggcatcgctgataaggcgcagaagaggttgctggagttggagccccgcagaagtgggaaccatgtgatggtcgcgaacatctactctgacattgggttgtgggacaaggcagccatggcgaggagggtgatgagggaaggagggatgaagaagatggcgggggagagctgcgtcgagcctgcaaaagcttag

SEQ ID NO: 5078 - DNA, 825 bp, Zea mays
  Peptide Sequence Number=SeqID_46857
atgacctcgctcccgcaacggcctcccgaacgccccgtcgtcctccactacctaaacgacgcatcaaccgcgaaatccgtcccggacgtggcgcctcccacatcgtcgtccgcgtcggggcgcttcctgccaccggagagccccacgaccacgtggctgaagaagcggctcctcctaagtccctcgtggccgcgctccctccggatccgccggcgggcggcagcggctgttgcgccgcggccgtcgccgccgacggcatcacgcgacgctgggcgccgtggtgataccggcgttcggccacggcggcgagcacgcgccggcgctgctctggacgtgcccctcgtgctgcgcctcgtgcgcgggttcctcaaggagggcggcggcggcagcaaggccgcccgcgtggccaggctcgtggacgtgtacctggccgaggccgcgctggaggccggcctgcgccccgccgagttcgaggagctcgcgcgcgccgtgcccgcccacgcgcgccccgccgacgacgcgctgtaccgcgccgtcgacacctacctcaagcgcctcccgcacgaggtcgttgcgcttgtcgatctgatggcggcccatggcaaaggagcaggcggtgatggcagccacagcagaaagccgacgctcggcgtgattcccacccgtcgcgagccaagaggttcgaggtcatttttgagccaagaggttcgcggccacgggagcaaccctacagaaccatcaccaccaccgctctctcttcctctgctcttcaatgcctgcctgagctcaccgcacctcgcctcctcaccgcggatcctccgttaa

SEQ ID NO: 5079 - DNA, 402 bp, Zea mays
  Peptide Sequence Number=SeqID_46858
atgacggggaaggcgaagccgaagaagcacacggcgaaggagatcgccgcgaagatcgacgcggcgacgacgaaccggggcggcggcaaggccgggcaggcggaccggctggggcaggacaagggcgggcatgcgaagctggcgtgcccgctctgccgcaccccggcgcccgacatcaagtccatgcagatccaccacgaggcgcgccaccccaagctccccttcgagccggagaagctcctcaacctgcactcctccgcccccgctgctgccgccgccgccgccgctgccgccgccgctgccgaggccaccacctccaagcccaagcccggcgtccgcggcagcctcaagaatgctttcgtgatcaggattacttgtagtacattactatatgccagctag

SEQ ID NO: 5080 - DNA, 2496 bp, Zea mays
  Peptide Sequence Number=SeqID_46859
atgcacagttactactgggtattgggctactgctatcttccgggcgctgcagagacaccggacggctggagcacttggaggcctgaccgctggagcagagacgccggcaaggacagaggagaggagagagatgtcggcaaggacagaggagaggagaggattaggatggaggtaatgaaagctgtgagttttatgtacgtgcgcccaccgggatacaatgcagagagtgcaaaagctgctgaaattgaagatgagaagaagaggtcggatccaggtgacatgggtactgcatctgcaagtacctcttcaatacctgacaagggacctgaaaaggctaaatcaggcgcagataagaaaaataggccaaaagatgtttttggtcggccattggcaacagaacaagaatttgaagttctcaagaatgctccaaggttagacacaggtgctcctgcaagggtcaaaccatttggagttgaagttcgtaatgttagatgtttaaggtgtggaaactatggtcaccaaagtggtgaccgggaatgtcccttgaaggatgcaatcatgcctaacgaggagagtcggttgaaaagagacgatccacttacaactataatggcgcagacggattcaagtgagcctctgaagtgggaacttaagcagaaaccaggcatgagccctcctcgtggtggatttgacccagatgatcctaatcagcagattgtggcagaagacatctttgatgaatatggaggttttctgggcaactgtgatatcccagctctcatttccaatttttctgctaccaaatccaagaaacgttccaagaagaaaagcaagcacaagcaggctaagtctgctattcatgaggactctggtagacatgaaagcagttaccatctatcatcggactttgacaatgagaagagaaacataacatcaagaagcaagagaaagaaagcaaactgttctgattcatcatattctgattccgagatagatgctagaaaaggcaagagcaagtcaaagcataagcatacgaagaaataccagttaaagtcttctgattcagaatttgatgtccgtgaagatacaaggcggcgtctgaagagagaccacatgaaggagaaaagagatgagtcaccattgccgttctctaaggatcaaggagacacagaaggcaagaggcattcaaggtgttcaagggagaagcacaactacagttattcatcgagttcttctgagagaggcaggcggcgttcgagggagaaacgtcactacagttattcaccaagttcttctgagagaggcaggcattctctacggcacaaggagaaacaatattacagtgactcaagttctgatcggagccatcgacactcgagaagatcgagggagaagagacatgatagagactcaagttctcctgatgccatcaggcgctcaaggccactggcctctgggtcaccggcgtcatcacataccccgatagtgagattactcaacatctacagtctagggtcggaccccagtaggacggtcccggacccctgcgtgtgccatccggacctccaactaggggagcgcatccgcgcggtggacgccgcccagccgttcgactacgagtcccgcgcggcggggctgctggaggagcggcagcggctgaagatcgccatcgtcgggttcggcaacttcgggcagttcctggcgcgcacgttcgcgcggcaggggcacacgctgctggcgcactcgcggacggaccacacggcgctggcgacgacgctgggggccaccttcttcgcggacccgcacgacctgtgcgagtgccacccggacgtggtgctcctggccacctccatcctgtcggccgaggccgtgctgcgctcgctccccgtgcaccgcctccgccgcaacacgctcttcgtggacgtgctgtccgtgaaggagttccccaagaacctgctgctcagctccctgccccccgactttgacgtcatctgcacgcaccccatgttcgggccggagtcggcgcgcgacggctgggacggcctgcccttcgtgttcgaccgggtccgcgtcggggactgccccgcgcgccgcgcccgcgccgacgccttcctcaacatcttcgagcgcgagggctgccggatggtggagatgtcctgcgccgagcacgacgcgcacgccgccgagacccagttcctgacgcacaccgtggggcggatgctcgccatgctggagctgcgctccacgcccatcaacaccaagggctacgagacgctgctccgcctcgtggacaacacctgcagcgacagcttcgacctctacaacggcctcttcatgtacaacaagaactccaccgagctgctcaaccgcctcgagtgggccatggactccgtcaagaagaggctcttcgacggcctccacgacgtgcttcggaagcagctcttcgaggggtccccgcacgcccccgacgtctcctcctccaacgtccgcaagtag

SEQ ID NO: 5081 - DNA, 1212 bp, Zea mays
  Peptide Sequence Number=SeqID_46860
atggccgacgtgcagggagacaacgaagcagttctggaggacgacgctttccccgacgacgggcccttagatacggaggagggaggtggaggagaacccatcagcggaggcgacgaggaagaggaggaggacgtcgacggcctcgccagcttccttgagtcggagatcctctccggatccagcgacgaggatcctattgacgagcagcggcagcagaaggaggaaggtgatgctgcgaagaataagcggaagcagggttcaggatcggacggggatggctgcagcggcagcgagggggagcagacgaagagggcgaggagggaggagaagaggaggcaggcgaaagggaaagccgtggcgcctcagatcgacacgggcttgttcagcaacgtcccccctgagctgttcctgcagatcttcaagttcctctcctcggaggacctcatctcctgcgctctagtctgccgcttcatgaatgctgccgcgtccgacgagaccctctggcgccgcctgtactgcatgaggtggggactggcctccaatgccaaattcagggagtgcgcttggaagaacctctacatacagagagatagagaggatatggttgaatttgtgaggaatactcctacagagttcaaggagtactatattcagatgcaggctgcaaaaaggagtcaagctccccgtccgtcagaagtcaacgacgacaaggttatgcttgataagacagtagctgaccaggtatctagttggaaaaacagccgggggcttactgatgaagctgtcaaggggcactcttgttctggaaatacatgctcgtacacccagattggtgatgcttacatttgtgagaagactggtcgtgtccacgtttgtgatgacgcttgtcgtgaatttgtcttggaccaatctagtgggctgcttctttgtacgatatctggccactgctttgagaggtggctgtgtcctgatgatgaatgggatgctgatgataccctaacatttggtaagtttcaggatctgcaacaggctggtgtagtggatgaagcagagccattcatgggatctggacgttacgggcttggctatgcagacgccactggggggcttggcggtgatgccacaaccacaggccacacagctaccaccgcggggcttggctggggcgtcgcctccatgggctacgcagctgttatcgaggggcttggctag

SEQ ID NO: 5082 - DNA, 348 bp, Zea mays
  Peptide Sequence Number=SeqID_46861
atggcggaaggcattgcgtggtggagttacactgccgtcaccttcaacatgcacgacgtaggccggtccacagggcgggtgtcgctcacgcgcttcatcgagaacatcgagatggtcggcatgtacaagatatgcttaaggtatccattgcccttctatttaacttctggcattttaataatgttagcggcttctgattgtagaaattgtcattccgtgtactcaaatcacaccaagcattccatgtatttgaaggaaggggagctgactacctcttctagagagacaagcagtaggtggtggattgctaagttttctaagttcatgatgtcagagtatattccttaa

SEQ ID NO: 5083 - DNA, 588 bp, Zea mays
  Peptide Sequence Number=SeqID_46862
atgtccgaatgtccactgatccattactcggcatggctccatctccggcaggcgcacccaagcactgcgaaggaggagcgcaagtcgctggcacggctgatcgacgcgcgcaagctcacggtggaggccgcggcgcacgctgtgcagaacgagcgcatgccggtgcatgccgtggtgcaggtgctcttctcggagcacggcaagctcaaccgcctcgcggagctgagcgcctcctttagcggccagcgcagccccagccccagccccaacccagcgctggagctccccggccgctgcccctccaagcgcgaggtcctcgcgcagcaccaggaggtgcgccgcctccacgacgacgtcgccaggctccaggcccaggtggacaggctgggctccgagaggcgtcggcgcagcgggggcggcggtggcgggttcttcaagtggagcgcgttctggttcggcggcggcatgggcgccgacgtaggtcgacgactcggagagcggcatggagcgctggacgccgcccaaggggaagaagagcgccacggcgacgcccaatgccaagtggtgcaagtccacgtcctgagatga

SEQ ID NO: 5084 - DNA, 240 bp, Zea mays
  Peptide Sequence Number=SeqID_46863
atggcgatgctgctaaaagatgggtatcccatagtttgtttgcgctttcacaagtactgcttgacacatcacaatgagaagttgatagaggacaattcaacgctttcttcttatgacgttcagaataactctaaggtggccctaaagctacatgctttggatgtgtggggtttgctgcgttctcagtggcaattgagaagttctttgatcggcatacttgaaatggccatgtttgtttga

SEQ ID NO: 5085 - DNA, 111 bp, Zea mays
  Peptide Sequence Number=SeqID_46864
atggcaaaggagcagatcattaaaattaataagaacatggctgggaaagtaagtgatcaagggcacaacttgccttcaatgagctcctgctcagctacttctacctgctga

SEQ ID NO: 5086 - DNA, 453 bp, Zea mays
  Peptide Sequence Number=SeqID_46865
atgggtaagagtaacaaacgcaagtgcgagccgactcctccatcggaggacttcggcaactcggaatactcggaggaggagttctccttcgagtctgaggggtctccggctcccgtctctcccccggcgtcgtctgacgattcagacgactcccaggggcttgccgcggaggtctggacttatatccgggtcgtcgagcgctccgggctcgagggctcggatgagtcggagtactcctcggacgaggaggactcttcagacttgtccgaggagggcggcggcggcaatggtggggacgacgacgacgacggaggcgacggtgacgacgacgacgatggcagtgatggcggcagcaggggcggcaacggcggcggcaagggcgaccacggcggcggcagaaggggcagcaacggcggcggcagcagcaagggcagcaacaaggccagtggctag

SEQ ID NO: 5087 - DNA, 462 bp, Zea mays
  Peptide Sequence Number=SeqID_46866
atgaccgccacgcccgcacgcaaactcctggtgcgcaccaaaataacacaaaggaaaaagaaggctcaccagcgcagaggctcagacgaggccggacgaagacgacgcaaagctttcgccacacgacgcgagcttcaccaggactacgtcgtagaccagccaatacgtccgtcccggccgaacgcagatgggttccgcccgaagatcgccacccaggagcaagcgatggcacagagctatggtcgaaacgatgggaaccgagcgtggcagttctttttattgccccgacggcgaagaaagaccgcaagagtcggcacggcctccagaatcctcgcgctcgaggttgttggtcagcccatgcgcgtgacaatggcggaggagctggcgccggtggggtccgcctgtaattcatggaaaaggctgcatttgggcgtggtttgggctgacgactggggctcatga

SEQ ID NO: 5088 - DNA, 828 bp, Zea mays
  Peptide Sequence Number=SeqID_46867
atgggaccaatcaaagatttaaaaggagtacaaagggtcattggatgccttgcggctctgagccgcttcatctcgcgcctcggtgaaaaaggattgcccttgtaccgcctcttaagaaaggccgagcgcttcacttggacccccgaggccgaagaagcgctcgggaacctgaaggcgctccttacgaacgcacccatcctggtgcctcccactgccggagaagccctcttgatctacgttgccgctaccactcaggtggtcagcgccgcgatcgtggttgagagacgagaagaagggcatgcattgcccgtccagaggccggtctacttcatcagtgaggtactgtccgagaccaagatccgctacccacaaattcagaagctgatgtacgcggtgattctgacgcggcggaagttgcgacactacttcgagtctcatccggtgactgtggtgtcatccttccccctggggaagatcatccggtgccgagaggcctcgggtaggattgcaaagtgggcggtggaaatcatgggcgagacaatcttgttcgcccctcggaaggccattaagtcccaagtctttgcggactttgtggctgaatgggtcgacaccgagctcccggcagctccgatccggccggagctctggaccatgtttttcgacgggtcgctgatgaaaacaggggcgggcgcgggcctgctcttcatctcgcccctcgggaagcacctccgctacgtgctgcgcctccatttcccggcgtccaacaacgtggctgagtacgaggctctggtcaacgggttgcgcatcgccatcgagctaggggtctaa

SEQ ID NO: 5089 - DNA, 459 bp, Zea mays
  Peptide Sequence Number=SeqID_46868
atgaagaaggtgttctactacgagaccgactcttcatcacctttcacatctggcgtcgagtctaccacttcgaagcgccaagagcgcaagaagtatagtaagatgcctctacgctatcctcacattcctaaacgtgctcctttactttccatacccctagtcaaacaaccatattttgatggtgaggattattgtatgtggagtgataaaatgaggcaccatctaacctcactccacaaaagcatatgggataatgttgagtttggagcgcaggcaccacaggtgtgcgacgaggactacgactccgatgaggccacccaaataaggcattttaatttccaagcaacttctatactcctcgcctccttatgtcaagaggagtataataaggtgcaagggttgaaaatgccaaagaaatttgggatgtcctcaagacggcgcatgaaggggacgaggtga

SEQ ID NO: 5090 - DNA, 330 bp, Zea mays
  Peptide Sequence Number=SeqID_46869
atggccaataagcacgaggcccgcgagtccagcataaagctcgctattagggcccgatttgagcccgacacgacccggttctatgcgggtccagggagtcctcgccggcgacaaacggcgtcggcgactccggcggtccttggaggccgtgcggtggtggacaaaggcggtagtgctgctgtgctgagcagtagcacggtagagggaagaagagtggggcgagcagggaaggtggggaacggactcatggaagcgtggatcgcattttatagggccgagaaggaaaccggagtgccgggatggggagaggagaggtaccagcgccattaa

SEQ ID NO: 5091 - DNA, 2754 bp, Zea mays
  Peptide Sequence Number=SeqID_46870
atgaggctctcgtcgtcgtccggcagcgtcctgccggctcagccgggctcgccggaagctgtggaggagcacaagtgcctgaactcggagttgtggcatgcttgtgccggcccgcttgtttccttgcccgcggtgggtagccgagttgtgtacttccctcagggccacagcgagcaggtagcagcatcaacaaacaaggaaatagagtctcagatccccaactatcctaatctgccgccacagcttatatgccaacttcataatgtgacgatgcatgctgatgcagagacagatgaggtatatgcacagatgacactacaaccactcaacccgcaagaactgaaggacccatatttacctgcagaattaggttcggccaataaacagccaacaaactatttctgcaaaacattaacagcaagtgataccagtacccatggtgggttctccgttccccgtcgagcagctgagaaagtgtttcctccactggatttcacccagcaacccccatgccaggagttgatggcaaaagatcttcatggcaatgagtggaaattccgtcacatctttcgtggccagccaaagcggcatcttctaactacaggttggagtgtctttgtaagtgcaaagagactcgttgctggcgactctgtcctttttatctggaatgacaataaccagcttctgctgggaattcgtcgtgcaaatcggccacaaactgtcatgccatcttcagtcttatcaagcgatagcatgcatatcggtcttcttgctgcagctgctcatgctgcttcgacaaatagccgatttacaattttttacaacccaagttgcttttgcagggcaagcccttcagagtttgtcataccactcgtaaagtatgttaaggctgtgtatcatacccgcatatctgtggggatgcgattcaggatgctttttgagacagaagagtctagcgttaggagatacatggggacaattaccggaatctgtgatcttgattctgttcggtggccaaattcacactggcgttctgttaaggttggctgggatgagtcaactgctggtgagcgacaaccaagggtgtcactatgggagattgaacccctgacaactttcccaatgtatccatctccttttccgctcaggctcaagcgtccatggccaacaggcttgccttctctgcatggtgggaaggatgatgacctggctaactctctcatgtggcttcgagataccgcaaatcctggttttcagtcgttaaattttggtggacttggtatgagcccttggatgcagccaaggctggatgctaccttacttggtctgcaacctgacatgtatcaggcgatggccacagctgcttttcaggatgcaacaaagcaggcatcgcccacaatgctgcagttccagcagccccagaacatagctggccgggcttccccgcttctttcaagtcagattttgcagcaagcacatcatcaatttcagcagcaaccgtaccttcaaaacatctctgagagcacaatccaagcacagggtcagtctgagttcctcaagcagcagatccaacgcagccagtcattcaatgagcagaagccccagatgcaacaccagcaagaatcacagcagcagcagcaaccacagtgtctgccagtcccccaacatcagcaaatgcaacaacagaatatgaccaactaccagtctatatctaatgcattatcaccgttttctcagctgtcgccagtttctcagtcttcacctatggcgctgcagactatattaccgttctcgcaggcacagagcttcacagacacgaatgtaggttcattgtctccatccaatggtaacaccatgcaaaacacactgaggccgttctcatcagaagcagtttctcacctcagtatgccgaggcccactgcgatacctgtcgcagacccatggtcgtcgaagcgtgtcgcggtggagtctctgcttccttctcggcctcaggtttcatcccagatggaacaattggaccctgcaccagctagtatacctcatagctctgcgttggcaccacttcccggaagagggtgcttggttgaccaagatgtgaactctgatcctcaaaatcatctcttgttcggtgttagtatagactcgcagtcactgctaatgcaagggggcattcctggtctccaaaacgggaatgattcagctgctataccttattccacttccaatttcctcagcccttctcagaatgactttcctctggaccatacactaaattcttcaggctgcttagatgattctgggtacgtcccgccatgttcagataattctgacaaagtgaaccgaccaccagcgaccttcgtgaaggtttacaaatctggaacctacgggaggtcgcttgatatcactaggtttagcagctatcacgagctccgtagggaactggggcgcctatttggccttgagggccagttggaagacccattgagatcaggctggcagcttgtattcgtcgaccgtgaggaggacgtccttctcgtgggcgacgacccttggcaggaattcgtgagcacggtgtcctgcataaagatcctctccccgcaggaggtgcagcagatggggaagcagggcctggagctcctgagctcggcccccgcgcggaggctcggtagcagctgtgacgactacgtcagcaggcaggagtcgagaagcctgagcaccgggatcgcgtccgtcggttcggtcgagttgggatga

SEQ ID NO: 5092 - DNA, 288 bp, Zea mays
  Peptide Sequence Number=SeqID_46871
atgaagccggagcttgaaacttgcagccgctcgcaccatgatcagtggcggaggggaatcattgccatccgcccagccgtgcagtggactgtggtgaccgcgcgcagtgtgatggtgaagatgccggtgttggcgcctggccgcgacctgtgctccgcgtcggtcagccctacctccatcggcggcgcgcgagcactggccattgctcgtcgttgccactgcgccgccgtggaaggaaacagcgttgccgtgtacggtccgcggtatggaatggtgggagaaagatga

SEQ ID NO: 5093 - DNA, 669 bp, Zea mays
  Peptide Sequence Number=SeqID_46872
atggcaatcgaggagcagtccaagctcctgcgcgtgatctgtgaccagctctcggcacaggatgcacgctgggcttcgctcgagttcgccgccaccgagtgcgatgatgtcgtggaggctgctgtgacaacttgcgtcggtgcgctgaagtcgtgttgcccgcgcgtcgaactgcgctatgaggagcccgtcaccgctgacaactggggtggactcttcgagggcaatgatgtattcatcaacttgcccaccaagtgctcgacagaacgcctggtcaacatctcgcccacaagcgaggaccgcgcgctgcagcggaggctcctcgagttcctcgccacgcggcccgagtggcagtccccgatgttgctttacttccaaggcgccctctacagcaaggatgggattgagcaagcaacacaagctgacgccaccagcttcttcgccatgtccacgctttcacgcgccgatatcaagcaggtatgggcgatcgtggatgccaagcgacaagggtacctcggattcgctgagttcgtcacagaaacgagctcggtctatggcccaagtagggaacaagatcacgaggacagcctaaaacgtgaagacctgagcacctcggatcctcccggatggaagggttgtgagatactggctagatccaagggggtgtga

SEQ ID NO: 5094 - DNA, 1365 bp, Zea mays
  Peptide Sequence Number=SeqID_46873
atgagcccactgcctcttctacccatcgtctacgagccgtaccgcgaggcaagccatccgcctcccgtccacgacgacgttgcgggggtggtgtccacgggctcggatgacgacctcgacctgcagcaaatcgccaaggagccatccgtgtcctcgccgccgcgtcacagctcgagagacgccgtccgaggtccttgccctcgtccactgcatcaccgcctaactatccccgtcgcggccaacctggaccaaatctgccgcctatccgggccctgcgatgtggccgaccggggtctcctctgtgacctgctctggtccgacccttcttccatggaggacagagagtgggcgaacaacaaggatcaatacgtgtcctgcaccttcggcgccgacgtcgcgacggactgccgccgcgcgcaggacctggacatcatttgcagagcgcaccaggtggtggaggacgaatacgagttctctgtcgactgccagttcgtcaccttcttctctgcccccaactaccgcaagctcggctgctccttcaccatcatcaagccgaaggcgaacagaaacaacagctcgcccctcggatgttcaaccaaatgtcccagccaggcactgcaccccattgtcaagcccaatctagtagccgtgctgaatattgcaggtgctgggggcaagttatgtggaggatttgatatcaaagttttcacaagggttcatcagactggggatgtatcgcttatgccgaacgtatccactgagcttgtgtcaaacatgatggaagagggcaaacaaccttctgttgcagccattccaggtcttgcattgggtggtggcctagagttgactatgagttgtcaggctcaaatacctactcatgttgctcacaccatctgctcacttgttaacaacgttatggcatcacaggctcatgtcgtcggacaagggatcgtagaccgcatcgcgttcagtggcgatcaccaatggatcgtccaaggtactaccaatggtcatgggctctcctccaaggttgctgctaagaatggtcaccctgagctcaatggaaaaacaccaatggtgtatctcaatattgttgctgatgaatgtgtggctaatatcgctgcaaagctcgagtacatgggaccctaccgaagtgccaaggataggattggattaagaaaaattaatgatgctaaagagaaggacttactagtgtctctggacaagaccaatttgggagaaccaataactggaaacattggtgtagacattgtttttgtggctgcagcaaaaggatacaagttgttagcaaccatgccttcatcattagatgttgagagacattcttctgaaaggagcttttga

SEQ ID NO: 5095 - DNA, 1527 bp, Zea mays
  Peptide Sequence Number=SeqID_46874
atgtccgccgcataccctcgtctcctcctctgtctcctgaccctagccctggctctcgcaggggtcgccgcgggcaagatctcggccccccgcaccccgatctcgcgcgacatctaccactccagtgactctcttctgcgtgaaatcaaggctttggttgctcggcattccagcaaattgagtatggacactatcaaaacaagcaacaaaggctattctgcagagctgtttgtagttacatttaatcatgtgaaggagcgcatggataatggctcaaaagttcatatccttctgagctttgggcagcatggcagagaacttatcacctccgaagttgcattacgtcttctctatgttttaacggagaagcccaagatcgctggtgtggatatttcatcctttgagaaactgctggagaaccttgtgatcaaagttgtgccgatggaaaatatgaatggtcgcaaacgtgtcgaagaaggggagctttgtgataggagaaatggaagaggagttgatctcaacagaaattggagtgttgactggggaaagaaagaaaaagactacgacccatacgaggagaatcctggtattgctccttttagcgaacctgaggcccagatcatgagggaattatcaaggtcgtttaaacctcatatttgggtgaacgtgcattctggaatggaggccttatttatgccatatgatcacaagaataccacaccaaatggagcatctgcacattcgatgcggtcagtcttagagaatttgaaccgtcgccatttccaagatagctgcctagttgggtcaggtggtggatctgttggatatcttgcacatggtacaacaactgattacatgtatgacattgcaaaggtgccaatgccgttcacctttgagatatatggagatgagaaagcatcttccgatgactgcttcaaaatgttcaatcctgttgacaagaaaacattcgacagagttgttaacaagtggtgcatggcatttctcattctcttcgaggaaggcctgcgaaacctgcgagacgcgcagatagtgtcgcaaggcacgctggaaaactgggtcccaattggaggagacatcgtcgagataaatgtggagcggaagagcagcatccgtgagaggaggaagctggaaggcctcgaccttggaatgcaggagctaaggacatatttccggctattcttgctgtcaacattcctgttgatgttcatgttctgcgcgcggatatcaaagaacagaaaccgagactcagaccgtacggtaggatgggattcgtctagaacccagaaatcactctggaaatttactatttcgaatcgttcagacaccgttttgagcgatgtttgtttctatagctctctagggacgtggaaaacttcaatcaaggcgtcggattcatgtggggatctcgagctcatacatgttgatgatggccatggactgacaatagtttatagttctaagagatgggtgaaaatttgggacttgctggcggtgtttcacatctag

SEQ ID NO: 5096 - DNA, 1143 bp, Zea mays
  Peptide Sequence Number=SeqID_46875
atgaagcccggcggcggcggcggcggcggcaacggcgtgaccgcgacgacgacggcgatcccgccggacgacctccgctcgcggcgccgcctggccgcgctgctggcgccactcctgctcttcctggcggccgcgctctccttcccctccacgctccacctggccgccgtcccgctcccaacgccgccgatgacgacggtgccgcgccggaccacgcccccgcgggtcgccgtctgcctcgtgggcggcgcgcggcggttcgagctcacggggccctccatcgcgcgccacgtcctgcgcggcggcgcgttcgcggtccccgcggaccgccgcgacgccggccaggcggccgccaccacctcggtggacgtggacgtgttcctgcacgctccgctggacgccgacgcgtacaagctgcccctcctcctggcgcctgcagcgggggcgggcggcggcagcggcaccaccagcaggaatagcaacaacgtcgtcagcctcgccgccgtgcgcgtgttccggccggtgtacctcgatgagacgacgccggcggcgcgcgcgcaggtgctcaccgccgacaactcgcccaacggcatccagggcctgctgcagtacttccgtctggtggaagggtgcctggacatgatccgcgaccgcgagtcgcgaggcaacttcacctacgccgccgtgctgcgcacccgcctggacggcttctggacggcgccgttccgcctcgacgacgacgaccaactcctgtccgggtccgcctacgtcgtcccggagggctcgcgcttcggcgggctcaacgaccggctgggctacggcgggcggcgcgccacggaggcggcgctggcccggctgtcggcgctcccgcggctggccgccgccggccacgcggggctgaactcggaggcggcgttcgcggcgcagctggagctgtcgggcgtggcggcccgcgagcggcgcctcccgttctgcgtcctcagcgaccgcgcctacgcgttcccgccggcgcccgggtacggcgtgcccgtggcggcgctgggcagcgccggcccgctcagcggcgccaagtgccggccgtgccgccccgcctgcgccggcgcgtgcgctctgccctgctttgcgaggctggggaccacgtga

SEQ ID NO: 5097 - DNA, 606 bp, Zea mays
  Peptide Sequence Number=SeqID_46876
atgtggtacccctcctctgtcgtcgacgtgctgcctaggtcgcatagagtcatcgaggcgaacctcttccacctcccctccgtcaacgccgacgacgggggcgtggggatgcaggaggaggcaccaaatcccttgccggtggtctgtcgggatcagacgaattggtcgaggcgaccttccacattcccctcccccaccactgccttcctccttcttgccctcctcttcgtcgcatcagggacctcactccctaccctaggaggtttcaatcggggaggagcgacccagcctcgtagcaacagaatagggggttattgcgtggatggcaggaggaaaggggatagagccctaaagcagagtgcttacaacttcacatataacaaatccactttccttgcagagatgactgaggttcacctttcggagaaagtaggtactgataaagttcagttgtccacattcttttcaaataccctcggcatgtattcagatgaagtagatatagttgtcatacttacacatatgattgcaaaaagaaaggatagtgcttggttgtataattcaaaggatgtagttgatggaactggcaggaaggcaaagcagtaa

SEQ ID NO: 5098 - DNA, 288 bp, Zea mays
  Peptide Sequence Number=SeqID_46877
atggggctgatggacacattcggttggcgaagcaaatcatattctatgtttactggtgtgatcaattcgacggagttgaggtcttatggcgactctttgtcgcaagtgggttgtgggatccagggttatgggccacaactcgccaccgccggtgataccagcaccaggaagagcttctggaggggagggatctactacaggagagactccaaccagatatacgacttcgtaaacaacttcttcacttctgaaggtagtggttacaactcaaatgacccctatatgtga

SEQ ID NO: 5099 - DNA, 189 bp, Zea mays
  Peptide Sequence Number=SeqID_46878
atgccgagaaatatggtaaatcgaaactcagctagtgcttttggcaaccaaaccccacagccaaacagctgcatgtctagaggttctctggaggagatggttgctggggtaacttggccgtccaccttgccaccaggttgggctgttgagtgggaccctgcctcggctgaggaggagcatgaggagtga

SEQ ID NO: 5100 - DNA, 312 bp, Zea mays
  Peptide Sequence Number=SeqID_46879
atggcatcagctctgaaatttcctttgtcagagtcaacagaaggaagagttctcagtatattggcagataaactccgcacaaggcaacagaacattgctgagataactgaaatgattcatgtcgcaagccttctgcatgatgatgttcttgatgatgctgatactaggcgtggtgtcagttcattgaatctcatcatggggaacaagggggcagggacgaccttcaaggatgagctgcacgccggcgctggtggacggtggagagccctggaggctggagcagccgccgccggcagaggacagaaagtttag

SEQ ID NO: 5101 - DNA, 339 bp, Zea mays
  Peptide Sequence Number=SeqID_46880
atggatgctcttgtgaacgttcataatggggaggctcgtcttcgtgtggagtattcggttgtgattccagaccacactgtgaagcctactaggacacaggtctgcacacgacatcatctctcaaatgctccaccatcttctgatgtgctcaatccttctgatgttgcagcttctcctgatggatcatcttctactgaatcatctcctgttgggccatcctcacctagtatctcttcacctgagcggctgagccgctacttcatcaaagtcattgatctcgtcaacctatcgatttgtatggttttggaccagttacttggcaaggttttggtggtttag

SEQ ID NO: 5102 - DNA, 351 bp, Zea mays
  Peptide Sequence Number=SeqID_46881
atggagactcgtctaccacaacctacaatttcttctgtgggtgattctattcatgcttttccatcctatgatggtatagacgctgaaaaatatattgagtgggaaactaagatagattgtctttttgaaaattattttatgtgtgaactgaaaaagatcaaaaaggcaactagtgttttgacccattctgctttatcttggaaccttggagaggaccaacaagtacttgagaaaggccaatatatcaaggaggataagctaggacgttcacaacaagagaaagtcaagtccgacccaacttcgtctccacctcggagttcaggaccagtctgcactaaaccgaacgcctag

SEQ ID NO: 5103 - DNA, 270 bp, Zea mays
  Peptide Sequence Number=SeqID_46882
atggagctcctcaccttggcgatgtacgaagcagggaacgacggaggtggcggtggccagaggtggcatggtggagagttgtcggtggtggcggtggtggcgacggtggtggtggcagcgggatgcggggacgcgctggtgggggtggggatgcgcaacgacctgggaggcaaaaacccctcccgcattaaagtatattgtttttcaagtgggaggccaacatcctccagcggcttcactgctgaggtttctctttgggcaccaccttag

SEQ ID NO: 5104 - DNA, 674 bp, Zea mays
  Peptide Sequence Number=SeqID_46883
cctcggccccgtccgcctcagctcacggccatggcgcgcggccacgacgcgcggcccgcggcctcggccccgtcctggcgcggcaccctcccctgcggcagctcggccccgactccccctccctcagccccgtcccggcgcggccggccatggcgcgtgcgcccaccccggccccaccctgcgcgcggtggcgctcggtccggcgcgaccccggcggccccctccctcccccggccatggcgcccgcccgacgcggcccggccatggcgctcgcccatcccgacgcgctcggccccgccccggtgctcggccccgtcccggcgtgtgcccctgccccggcgcgctcgccccgcccagccccggctcgcccgcccctccccgcgcacgtccgcggcggcgtggccctactgctcgcgcggtcctgcgcgtccgcggcttggcgcggtcggcccccggcgcagccccgctgcctgctcgcggcgcgcagcgcgtcgcgtgcgcggctcggccccgacgtgagtccgaagaactcacaggagaagcccctgagcaacagctatttggtggaggcaagtgacaatgagaatgatggttttggtattgactctggtaatggagaagatgaagccgtggaaggagacttccaggagttccaagattacgacgagttctag

SEQ ID NO: 5105 - DNA, 990 bp, Zea mays
  Peptide Sequence Number=SeqID_46884
atggcagaccagttagggtcttacactattagatcccatggaatgatattggcaaggttgcacatgtatgactggataatacttctcctccttgctgtcatagacgggctgttgaatataattgaaccatttcaccgttttgttgggaaagacatgatgactgacttgagatatcctatgaagggcaatacagtgccattttgggctgttccactgattggaattatactgccttgggccatctttgttgggatttacttcaaaaagaagaatttttatgatttgcaccatggcatactggtgattactgatgcaattaaggatggtgttggacggcctcgtccagattttttctggcgctgtttccctaatggaaatgatgtttatgataacattactactggtgttatatgcaatggagtgaagagcgtaatcaaggaaggccacaagagctttcccagtggacacagttcatggtcttttgctggtctaggcttccttgcatggtacttagctgggaaactcacagcctttgaccgcaaagggcatattgcgaagctatgcattgtgttcctgcctctccttactgccgcacttgtggctgtttctcgagtggacgactactggcatcattggcaagatgtatttgcagggggtcttataggtcttacagttgcttcgttttgctacctacagtttttcccatatcctttcgatggcgatggtacatactattcactttttttactaactattgagttctcaggttatgttcaacatgtcacagaatattgcacaatctacttttcagctttgtggcctcacgcatacgcggtccggttagccgaggaggggaacagcagaaatgcgaactcatacagcgtgagaccaaccgaaatcgaaacagtcgatattcctgggcacggtgggatcatcaccctaagagatactctaaacgatgtggagtctggcagtgccaggagattgtga

SEQ ID NO: 5106 - DNA, 519 bp, Zea mays
  Peptide Sequence Number=SeqID_46885
atgagaatgggaagtgagagcgagtgtgaaaatccaaatcaagagcacaagagaatgcaacactctagaacaaacggttaccattctagcccgtcaggcggtagctctaagttagcaagttaccattgctgctgtcatcagactgtccggtgcacaccggacagtctggttcctaggggtgtaagcaggggcggacccacaggggggtccaggtgggccctggcacaccctaagccaggcccaccgaagaccccatcccggtatcccgagcgatcgttcagcttctttacatcagacggcgggcggcagctaagattacttttcgtctttctgcgatctgcgcccgcggcggcgcccctgcccctgcctccgtccggccaacgcggtgcgatctgctactgctaccgaagaccgaagtgcccagttggccagttgcctgcgcggtgcacggcggcgccctgccagcctgcctccgtctgctcgtctagttggctgttggcttttggagtcttcgtctag

SEQ ID NO: 5107 - DNA, 717 bp, Zea mays
  Peptide Sequence Number=SeqID_46886
atgaaggtggtgtctccggagcgagcgtggtggagtcctcgttcctcggagttgaggtgggcaaccagacctgcggcggcggagtctgctgaggaggaggggagcgcactggccccagaggacaggcacgaagagcggggcgcgcacgacgcgtgggtagtccgccatggtcgtcgatggaagggcacggtgggggaggatttcggcgtggcgcagcggcgacgaagatgcaaggaggatgcgcggcgcttcggtagcgacatcatcgttggaagggcgcggttagggcgacgaagaccggggcgtgcgcggcgtggtggtggtgggcgaggttttcggcgcggcgcggtggaggatttcggggcgggcaagcctggggcggcagccggaatcgagggaggagaggggaggtcaggggcgacggtttccaggcgaggcgagagggtttcggggcgcgatctaggagcgggaccgagcccattgtcacctctaatcacggggggcggccagatgtggggtgacgacaatgacgtggatggtggctggtgcagtggtgtggctgtcggtgagcgtggcgacatggctagcgacgagggcatggagcctacgcccatcggacgtgacgccggcgtgtacggtagtagcagcatgccgtacgccgcgcagctccaactgtacggtgccgtcgcaggcatcgtcgcctcgaatattcaataa

SEQ ID NO: 5108 - DNA, 393 bp, Zea mays
  Peptide Sequence Number=SeqID_46887
atggctgcccctcgagaggaaggcgccaccgagctcaaccaggagagccgatggccggtgtggtcttctctgctcctgtaccggcagatcctcgacgagatcgaggccaacgactacgacaacttcacccggagggcctacattcctaagacgaagaagctgatggcgctgcccaaggcgtacctgagatcactggtgcctgtgtgggagaagctctccaagttctctggccatgctgctggcggctcctccatagagtccttgatgaagatgtcggagccggctgtgctttcacacttcaagcccgcggactatgtcagcatactggctcagatacacaaggagctagagtgtcgccctcctgacgacaaggcctccttgtacctcctatag

SEQ ID NO: 5109 - DNA, 789 bp, Zea mays
  Peptide Sequence Number=SeqID_46888
atgagtgaaaggctgcttgtggagtttcatctgatgcaaggaacaaaggggacacctgcaatacatgtcatgcctgcagtaggtagaaagtgcagagactcacttgagggtggcaccacagcacagaacagcacagctacatctacattccattccatccctctttcaactgcagccatgattccagcgacgcctgctgctcccaagacccgtttcagtaaaggtggcacgtgtggcgatgaattgcagcttatcattaaaaacggcgcgggagcgaagcggatcgctcaagacttcaacgtggcggacacctccctaagtcctgttgggccctttagccctccagtggatgatgggccagtttttgggccatccctttctcagagtcggctcgttccttttggcgcgctctgggccctgatggcctgcgtggtccctctgacccactcccattcggctccacccgttcgggtctacaccagaaaacggcttcgctggaagccggcaatggactccttgctcctagcgactgacgcccccatggctggggatggtgaaccttctgcggccgtggcagttgcgttggcgactccggcagaggaagggtctccccctgcttcgctggttggggaaggtgaaccttcctcggccgtggcagttgcattggcgactccggttgaggaagattctccccctgcttcgctggatggggaaggtgaatcttccgtggctgtggcagttgcgttggcgacttcggttgaggaaggttctccccctgcttcgccatag

SEQ ID NO: 5110 - DNA, 192 bp, Zea mays
  Peptide Sequence Number=SeqID_46889
atgccgccagttctgcacttctgcttctccaaccaaatgaatgtctcccggattagatggagcttgtgttctccaatttacaagagcttaattaatgcccaagatgatgtggaagcacaaatcctgcttgaaaaggctaggcggtgctacagtgaggctcttgcaacagttgcacctgcacttccggcgtga

SEQ ID NO: 5111 - DNA, 171 bp, Zea mays
  Peptide Sequence Number=SeqID_46890
atggcggcgttcgtggcggtccggcggttgcggcggaggttgatgaccaaagatgccagactcgatgataggtgggctctggcgacagtgaaacggcgcgagaccgtagcagctcgcgtgtggggccagtggtacagtggcgaatgcacacaaaataaaatcccagcatga

SEQ ID NO: 5112 - DNA, 321 bp, Zea mays
  Peptide Sequence Number=SeqID_46891
atgaaggcgaggtgcctggttgttctggcgctggtactgattccctccttgctggttgctctaacggtactgctgctgctgctgctgagggaactgcctctgatattgctgctagtgctgacgctgatgctggtgatggtttcagggtcagtatggatggcgagccaattgcttggactgtctgggtttgcatcaggaacatctgctcaatggtcatggggggtggcggcggcaactgctgctgagctacctcctcttgggtgcctgctgctcctgttgagcacgccttccacctctacgcctattctcagacatctgtag

SEQ ID NO: 5113 - DNA, 492 bp, Zea mays
  Peptide Sequence Number=SeqID_46892
atgactcctaagaaagcaactaccagtgccacctcctctctggacgaagccgtcatggcaggcctagcagacaagaaaggcaagacggtcctcgtggacagcaccctgccagccacagttggaattggcccagcaaatagcgtacatcctcgcaacgaggaccgccccacacctgaggacaacatccacacatacaccgaagacctccaaatagtgacaaggattagagtccatgctattaggtatggcaagttggtaatcagtgagttacggagaggcggagcagatgatgtcgaggccgcagagggcacggagaagaacgacgcatggcggcagaagacgacgaggttgagcgtcgccgcaggtcgtccgatccccacgccgggtttacaggccacatgtgtatgttacgtagagctgctcgaggcggctatgctagcgcatgtgctgctcgcagatgcacgccatgacaagcttggcggtacaaactga

SEQ ID NO: 5114 - DNA, 912 bp, Zea mays
  Peptide Sequence Number=SeqID_46893
atgactaggccacgagccattgagcagatcgtggacacatcgtcagacatctggaacctaataagtgaatcgaaagtgaacggatcaacaggcgttgaagatttcacctcttggttacacacagaaagaggcatcatcactcaactccaagtgttgttcgtggtatcggttctcctgtacgcggttcaggtcgtcttgggctggtggcggcggtgctctacaaatgcatacctgaagcactcgttgtggatggcctacatcatcaacacccctcttgtgatctatgttcttgggctcgcacggtcgtctccgtcgtctgtcgcgaggcagttgcttcaggcgtgtgcttttccattcgtcatggccctggggagcaccaactccatgacagcctacagtgttgacgacaacaagcagtacatgaggcacttcatgcagcagcttcttcgtgtgctcagcctcttcgccatgtggagagctaacgaaacaattcttagaagctccagtttccttgtgcccctcttgtatctattcttgactgccttgttgctctctgtgaacgggaacaggattttcgcgagcatgactgcgagcagtttcctggacaaacaaagcagagacactacgctgcatgcaaaatacgcaaggatgaaatattacagggagcagccgtcagatcgcgagcgaactttgattaaagggatccggcttggaaggaagcttcaagtgatgggagatggcatgcgctggaaggtactagcagatttctggactgagatgatactgttcgtagctccctcacacaatgcgaaagctcatatcgagcgcctcgcaagtggaggggagtttctgacccatctttgggccttgcttttccacgctggcattcttgaaagaaataaaaagggttga

SEQ ID NO: 5115 - DNA, 309 bp, Zea mays
  Peptide Sequence Number=SeqID_46894
atgatgatgttgatgctagaggtggaagatcctaccctggggatgatgctaatgatgatgatttggactcgaaacgcagatgttgccatggctagaccttctgacattaggacagtgctggcatcctatcaaggtcatgatgttgctgctaagtttattgagcgttcaaaggaacaccagcgggttaagaacgtgggtacccacgttcttaacgttaagaacgtgggtaccgtcgaacttaatggacagccctcgccgacccacgtaggacccataagttcgacggccatgtggccccgtcgaacttaa

SEQ ID NO: 5116 - DNA, 699 bp, Zea mays
  Peptide Sequence Number=SeqID_46895
atggcgcggcggaggcgcgacccggtcgcggtggcggcgcggcccgggcagtttttggatgagatcacggcatcacgcacgcagcgcctcatatcgaacgcaagcactgcattcgcaataatgtcgccgtcccgggcgaagcgcaaggtggcacagatcagggagcaagccctctcggcggcggtcggcgacgtggtcgcgcggaccatgtccgcggtggcgggcaggtacgacgcgcacgcgagcgtggacgaccagctggagcgcctcgccacgctgctcgtcatggtgcacagcgccgtggacgaggccgagcgcgtgcacgtcgccaactggtggctccgccgctggctgtggaggctccgctacgccgcgctggacggcgacgaggtgctgctgtccatgaggcagcagcgagcggccgaggcggcggaggcgaccgcgatgacccagagtgcgggcggcaggctctggaacgccgcgacgcgcgtcgtcgtccggtccgcgaagagcctgctcgtgtcgtccaggagcggaggcaggggcggagggcccaatatggctcagtattgcttgagcaataccttgggctggcccactaagagagtaggtcatccgtctcagcctccaccgccgcagcttgtcccgcccggcgcggcggcgcccaggctgaggctgctcgcgcgacattcctgctag

SEQ ID NO: 5117 - DNA, 615 bp, Zea mays
  Peptide Sequence Number=SeqID_46896
atggcgcgccgcacgcagagatgtgcccacgtcctcaatctgcctccacgacggcgcgccgcaccacgacttcaatctcccccccccccccacgacctcaaccgctctgccagagtcaacaccgtccagctccggtcaccggttcatggaggcggcggcggtactccttcggcaggcaaaggagcaaagttggaggcgacgagggtccagatccggtcgccggcgtccatccggggtttggaagcgccgcggccagctggagatgtcgccagccaactctcgggcttcctctcctccatccccgagatcgtcgctcgtggagatctcgccagccaatgcccgggtgagaaacagatcgactgtgtcgagcgcttcgacgacaccaagtccgtcccgtcgtcccccaatggcaattccaccaacggcgtcgcgtccaaggacttcgctacaggcatctcctcccgactctacctacccgcgagagtggatcccgagaagaagctccccattgttgtgttcttccacgacggtgcattcatggtccacaacgcctccttcccgctgtaccacatctacatcgcatctgtcgatgtcgcggtgcccgctagccgctga

SEQ ID NO: 5118 - DNA, 456 bp, Zea mays
  Peptide Sequence Number=SeqID_46897
atggcgcgaggtggcgcgtgggccgcggtggcggcggcggccgtgtggtggatggcggcgggggccggggcggtatggctggagattgcgccgtcagggactaagtgtgtgtcggaggagatccaatccaacgttgttgtcatcggcgactactccgtcctctatgatcaccaccacgcccagcctaccatctccgtcaaggttacgtccccttttggagacattgttcataagaaagagaaggtttcgatggggcaatttgcatttaccacagcagaagcagggaactaccttgcctgcttctcaattgatggtgaggacagagggttagtggtgaagctaaaccttgactggaaaattgggctggctagtagagactgggattctgttgccaaaaaggaaaagatcgagctgtggcatctacaacagtacttccgaaagatgaagctcatctga

SEQ ID NO: 5119 - DNA, 1065 bp, Zea mays
  Peptide Sequence Number=SeqID_46898
atggactcgtcgatcgcctcgtcggagatggtgaaggcagaagtgcggaggctccgagggcgccacgcagaacttggagggaccaccactgtaatggagagagagaaggcttccattcaagagttgatgaatgttgtcaatgaaatgatgtggaacacagaatttggtattaggtcatatctgatgttgaggccaagattcacccgtccaagtgctggagttgcaaatggcggttcttcaaatccttctgctggtgctccacccaatcagccagtggtagatttctacagtggagtcccaaagcgtccttccatttttatgcagcgcactgtcaacaagtttgagtgctatcttgcggagtgttgcaagtggatcggggagctagagcagcttgttcaaatggagacaaataaaagatcatcagattctctagaatctcttccaaaagttatgtcaaatgtgcatgattacttcatctatgttgcttctaaggtggaaaatcttcatcaacatgtcgaatcaatgaaaactgaatatctcaatgaacaacgccgcaccggcaacgggagcgatccatttctggaggcaaacagacgagaagcagctaaacaagaagcagctgccagaagggtccatccaacactgcatctgcctacccctgcgcagcccacggcacagatcgctgcaccagctacaagccaaccgcagcaaccttcctttccgtccgctgcgacttcctcaagcgccttctcaacctttagcactccggcttccgctccatcctcgtctagtctgtttgcaactccaacaactccagctccatcgggcaacctttttggtgcgccaggatcggctcagttgaccacaccatttgggacaccttccactcctacgttagcatcgacgccagctcctggatttgggactagcgctacatctaatttgggtgggacatctctattttctacaccgtttggaggtggagctacagcttcaggttccagctttggtgaaaggaaggtcgaagccccggggacgacgctagatgtaaatggaccaacgtga

SEQ ID NO: 5120 - DNA, 972 bp, Zea mays
  Peptide Sequence Number=SeqID_46899
atggcctctgctgcagggtctgaggaggcgtgcagggagatccgccgcacgtgcggcgcgccgcggcgcctgggcctcctgctggctccgcggagccccgccgagaggcagcagatcagggcggcgtaccgtgccaggttcggcgaggacctcgccgcgacgctgcacggcaccctggcggcccccaacaccaaccaggtggacgaggtaaaacccacagaccagagtcaggctcacggcgagcggtttaacttgaattccctccttccactcctccagctctccaagctgctctacctgtgggcgctggagccggcggaacgggacgcggtcgtggcgcgggaggcggtcgagggcggcgtgaccgcggccggctaccgcgccctcgtcgaggtgttcacgcgccggaagcaggaccagctcttcttcaccaagcaggcctacgcggtcaggtcgcaccacgacgacctcagccagcacgtggcgaaatgcgacgcgaggaggctgcacgacaccaagaacagcggcgctggtgctggttctggttccgtcgtcgacgaggctgtgatcctcgagatgttcagcaagaggagcatcccgcagctcaggctggccttctgcagctacaagcacatatatgggcatgactacaccaaggcaagtggactcgcactgaagataaacgggtctggcgaattcgaaggacccctcagagtcgttgtcaagtgcatctacaacccttccaagtactactccaagttactgcacagaagtatgctacccgcagcgactgatacgaggatggtaacgagggctatcttgggcagcgatgatgtcggtatagacgagatcagatcagcgttccagagtagttacgggaagagcctcgcagaatacatccaagaaaacttgcctgggagtgactacagggatttcctcgtggctgtggcgagtgcgtcagtggcacaatga

SEQ ID NO: 5121 - DNA, 402 bp, Zea mays
  Peptide Sequence Number=SeqID_46900
atgacctcaagctcggtcgtcatcattagcgtcgaggtagtgtgtgtcggcgccaataattttagcgtgcatacgtcagacggagtgatgtcgtggaaccgacgtggcacgtacctcagcgccgtagatcttggcgccgaggaaaacttggcggcgggcgcgtggggaggcgagcgtggtggagagcttcgcggcgacgtcctcagggataaaaaacgggaggatggtgacccggtcggtataaaggggatcggcgccaagatctatgacgccgacccccctgacaggaatccgcgccggcggcagggggtccgcgccaagatctatggcgccgacccccgccacctcactagccacgtcacctcctccggcgccactgatattggcgccatcacagtatag

SEQ ID NO: 5122 - DNA, 387 bp, Zea mays
  Peptide Sequence Number=SeqID_46901
atggcgccgccgccactgcagcagcgcgcgtcgtcgttcgcgctgaccttcctgctggcgccggcctcgtcgcagggcgcccgccgtctcgtcgacgacgacgccttcgactacgccgacctcctagccacgcgccgcggcgtcgtgctggtgtggctcgccccgcgcacccctgccgagaaggcctgccacctgttcggcgtgtgcaaccccgtcagcggccaccgccacgtcctcccacctctcgagtggaacctcgccggtggcggactgaacggctacgcgatcatcacgaccgttgacatgcgatcgtcacgtgttataactaactattacctctatagcattcaaacacaccttaagactttgtcgagtaaaaaaggttga

SEQ ID NO: 5123 - DNA, 231 bp, Zea mays
  Peptide Sequence Number=SeqID_46902
atggactgcctttcatatattcaacgcaacaagataatattagtgaagctctggctttttgtggcatatgtcgtttcttttgtctgtttagctggatccgtgggtttattggtgcaagatgcactgacgaacaagggcccttctgtctggactggtgttgctggcgttctgcaatgtgttcttgtgttgataagcggcctggtgtattggacatgccactcagaagattaa

SEQ ID NO: 5124 - DNA, 459 bp, Zea mays
  Peptide Sequence Number=SeqID_46903
atgggagtgggagccgtgcatccatggaggccggcgttggggaaaaagaccggctgggagctcggccatggcaagaacagagaaaggggatggggatgtgctgttgttgggcgccggcaaggggaagctgcagggggtggtggtcgctatgcagagggggggcagccatgggcgacgatgagctccttgctcgagctaggggtcggtccggccagggaagagcaggggcgagagaagttcacctgcgccctggacagcagagggagcggcctggaattttctgggtgcctgctggctggaggggctggagcagagagggcgaccgcggcgctagaagttgggtgcaatccgagctgggcgaccagggaagacgctcggctgggaagcagagagatgggcgccgaactgggcagaaccgagctgtggaagagccgcggcaagagagctcggcagggctga

SEQ ID NO: 5125 - DNA, 255 bp, Zea mays
  Peptide Sequence Number=SeqID_46904
atgaaggacagaaatgagaagttattttacaagctcctgattgacaatgtcgaagaactacttcctattgtgtatacaccaacattttatgttgatgcacatggagacgtttgtaaagatcataataaaaagctcaaggatgccaaccttttcgtgtcacaaggagggctcatcattctagtcaaaactgttgtggcagcctcttcctctcaaggcttccttttggcctgtatgaacaatgctctcggcctttag

SEQ ID NO: 5126 - DNA, 543 bp, Zea mays
  Peptide Sequence Number=SeqID_46905
atgcgcagctcctgcgcgttcgagaaaaaaatcgtggggcgcgctgtgaaggtcaacgtcccttacatcgaaagtaagcgggatatgaaaccacttcgtttggaccactgttccagtgagagcgacgtgcggttgctggggaaaagcatggttgaaattctgctggtgttgggggtgggcctctgcctcttgttgcgccgccagtgtgaccttgttgtggagggtagtcctggcgccgaggggggcttcgcctggttgctattggttagcgatattatggacatggagctgttggccacgctcttggtgagggtggtcttgttgtggacccctggtccatgttctgctggactgtggagtctcttttgtctttcgttgcgccttgaccttcctgtggtggagctcttcagatcgggtgtatttttcgaagagttggtatcgttcctagaggaggaggaatttcttgtagtagtcgcgaaggctttcttgttcctgttgcctgcagagggacaattcgccaatacatctgtctcaggcctatag

SEQ ID NO: 5127 - DNA, 336 bp, Zea mays
  Peptide Sequence Number=SeqID_46906
atgaatccaagagcgggaggagaggtggcgacggggagagggaagaggcgccgaggatggggcgggcgcgtgatgaggacgcgagggcggcagtcacggtggggaggcgggcgcgagtatgacaacgagggcattgcgagtaggggtggggagcgggggcatggtgtcacctggggcgcccacactggagtcatctgcccacgccgatctaggatccccgccaggtatggaatgggggactcgccggtgttgcctgcgcgggatggaggcccgtcttctatgctgatatcgcgtatgggtcctcggccaccttccgcagatggaggcgggcgttga

SEQ ID NO: 5128 - DNA, 306 bp, Zea mays
  Peptide Sequence Number=SeqID_46907
atggcgctcacgtcccagcgtcgtgcttcggatgatgtctccatcgcccttgtggctcactctattggagcgaaggctggactcgacctcgatcgaggcccgcaacacccgaagacctcgtctagaatcgatgacgagacttcgcctggaatcgacaacaaagcctccgaccacaacgccctacgagaagatggggaatcattggccactggtgcgaagtcggctacgggtgatgactcagcacccccacggcgtacggggcccaaggccctggcgaagacaccctcgacggtcgccgaggggtga

SEQ ID NO: 5129 - DNA, 576 bp, Zea mays
  Peptide Sequence Number=SeqID_46908
atgaggcgttgggtgcgcgaggtgggtggcggcgaggagacgacaacaggcttgcgaggggagagacggagggaatggaccgggatcctcctgggatcccagtctaccaaaggaggcctgaaggtggagctgagccacgagcgggtcagtcgggtcatgccagagcaccatggggatggtgcgtggcccggttctgactgtcggtgcgggcgggacgccgtacacgccgcccacagtgtcagaggaggtggccccgccgtcgtgggccgcaggcgaggcaaggtgctgttccgccgcggcaatctaagcagcgatagcgtcggcggcatcgcgctcacgctcccacatgagggctgcttcccgcagccgcgcctgtcgcgccgcgtgctccgcgcaggcagcggtaagggcggcgacggtgtatccctggtgggcgaccggtggaggaggtggctgatcgacgacaggaagggacggtggcgggggagggtcctccggatctgcaacccccgcgggaactgcagttgccacagcagtaagggcagaggcggtgctcgcaccggcgctagggcctga

SEQ ID NO: 5130 - DNA, 225 bp, Zea mays
  Peptide Sequence Number=SeqID_46909
atgacttcacttttcatgctacgaagttcactttggcttcagttcaagccccatcatattgctgctggagctgcattccttgctgcaaagttcctccactatgacatcacattccatccaaatttctggcatgaattcaagacaagtccatatattgttcaaggtttgacagcaccatctgttgcacttgcagatgttgtccagcagttgaaggagctactttag

SEQ ID NO: 5131 - DNA, 273 bp, Zea mays
  Peptide Sequence Number=SeqID_46910
atgaacatgggcactggcctgcaggaccccgagagcaccccaccccccccacccccccacggcgacctcccgcgcatcacctcccagtccttcgactccgacgactttggcgatgccacagccgacggcgccactccaccggccccacctcctcaaggggagctcagcaccgtgatgcgctcgctcgacctgcgcacacaagtggagggaccttggagccgctacctgaagacgcattgtgctgctgttgtctccctcgtcgttgcctcatag

SEQ ID NO: 5132 - DNA, 1011 bp, Zea mays
  Peptide Sequence Number=SeqID_46911
atgtcttcccagtcttctgcaggaggtccggcgatccatcatccccactccaactaccacccgtacatctttcagcatgaccctccgctccactctaattcccgccgtcgccgccgtaaccatgatgacccatatcaaccctatctgcctctaccccacgctcactcccacggagccactgccgtcgttaccggcaccgttcgttgccatgtcccccgggatccacttgtgctctcacacctccaggagcgcctctttccgactctccctcaacatcacccgatcgcgggtccacccccgacgaagcgggcccgccgcgcgccagatactccgtgggatccgccgccgccaacgctgcagccggcacttgtcccggtggcgctagagaggcctccggatgtaggacattctgccggggcgttgctttcgcgtgacgagatcgagaggcggtctccatcaagaagggacgggatcgattccgcgcttgaggccaggctgcgtgcgtcctactgcgcctacctgcattgcctcggcaaccggctcgggttccctccggcatcggtgctcggtctccttgccctcgctgcgacaccctcccccactcgtgttgcccctactcccggccaccaagcctgcgacggcgccactgtccatgacagcgcccccgcggctagcagcgacgcagctctagacgccaacacggcaagcgtcggcgcggccccacacgccagcgcgcccgccaccagcggcggcgtggccctcctccccaggagatgtgcgacccttctacccttcactgacacggtcgcgccctcctgcagtggcgcggtccttcctggtgcgggcgctggcgtggactggcacatgcgcacggatgcccctcccctccccggcctgggtgcttcctgcgtggctcttctcgatgcgagttcgggtgcggacgccgccctaagcgccctccttggcgtgggcgtcggcgtgaatgcaactattaaaacgataaaacattga

SEQ ID NO: 5133 - DNA, 459 bp, Zea mays
  Peptide Sequence Number=SeqID_46912
atgggagtgggagccgtgcatccatggaggccggcgttggggaaaaagaccggctgggagctcggccatggcaagaacagagaaaggggatggggatgtgctgctgttgggcgccggcaaggggaagctgcagggggtggcggtcgttgtgcagagggggggcagccatgggcgacgatgagctccttgctcgagctaggggtcggtccggccagggaagagcaggggcgagagaagttcacctgcgccctggacagcagagggagcggcctggaattttctgggcgcctgctggctggaggggctggagcagagagggcgaccgcggcgctggaagttgggtgcaatccgagctgggcgaccagggaagacgctcggctgggaagcagagagatgggcgccgaactgggcagaaccgagctgtggaagagccgcggcaagagagctcggcagggctga

SEQ ID NO: 5134 - DNA, 264 bp, Zea mays
  Peptide Sequence Number=SeqID_46913
atggtgagggaggagccccaagacatcgagaatgaggacgatctgtgcctccccaccccatgccccactaagaggaggaaagtgattggcctagatgatctcctactagattacttgctattttgtaaaaaggacaagctcaaagttaaggctgctaaatctaagcatggtcctaaaggaggatatggttcaggtgaggaaaacgatagggctactacacaacaagatattatagtctgcaaaatatttgaggaagttcagtag

SEQ ID NO: 5135 - DNA, 270 bp, Zea mays
  Peptide Sequence Number=SeqID_46914
atgtcatccattggtggaagtacgatgtcatccgagcccgaggaagttgaactattcgtcggggttaatttaaccggtgacacgatggaactggtagggtcgggtacaagaacaacgcaaataggttctaggaacgaagaatacgacagtctgctcgactcagggtccatgggcaaagggggctcgatcaacaacagagacgttgggtcaaaggggtcaaaggccctcaagagcacgctctcctccctcgctctagagcggccaacctag

SEQ ID NO: 5136 - DNA, 315 bp, Zea mays
  Peptide Sequence Number=SeqID_46915
atgggctcgggaaggactctatcaagggagttcggcgacaagtacaaggaggaatcctcttcctccatcaagtcacataagaagggtgacaagaagaaaaagaaaatgaagaagttggtctactacgagaccgactcttcatcaccttccacatccggtgccgaatctacaacttcgacgtgccacgagcgtaagaagtatagcaaaccaccatattttgatggtgaagattattgcatgtggagtgataaaatgaggcaccatctaacctcactccacgaaagcatatgggatgttattgagtttggagcgtag

SEQ ID NO: 5137 - DNA, 1671 bp, Zea mays
  Peptide Sequence Number=SeqID_46916
atgaaaaaaggcgaaaatgctgtgttcaccatcccaccagagcttgcatatggtgaagatggctcaccaccagtcatccctccaaatgccacactgcaatttgatgttgagcttctgtcatgggtgtgtatcaaggacatttccaaggatggaggcatcttaaaaaaggtagtagccaagggcgataagtgggagaaccccagagatcctgatgaagttgttgttaagtatgaagcaaggcttgaggatggaacagttgtatcgaaatctgatggtgttgagttcactgtgagagatggcgtattctgccctgccatatcaaaggctgtcaagactatgaagaaaaacgagaaggcccacctcactgtcatgccacaatatggctttggtgtgaaaggtagacaggcatctggagaagaagcttctgtgcctcctaacgcgacattgcacattgatcttcaagtggtgtcctggaggacagtcactgagttaggcagtgacaaaaagatccttaagaagatccttaaggagggcgaaggctatgattgtcccaatgattgtgcagttgtccgagtgaaacttattgggaagttggaggatggtaccttgtttgtcaagaaaggtcatgatggtgaggagccatttgagttcaagactgatgaggatcaagtgattgaagggcttgacaaagcagtactcagcatgaagaaaggagaagtatccttggtcactattcctccacatcatgcctttggaactaatgaaacaactaaagatctggctacagttccaccaaactcatatgtttactacgaaatggagcttgtctcatttgataaggagaaagattcatgggacttgaagaacgttgctgagaagattgaagcagctgctaagaagaaagaagaagggaatgtgtggtttaaaattggcaagtatgccagggcttctaagagatatgaaaaggctttgagctttgtcgagtacgatagctccttcactgaagaagagaagcagctatcgaaaccacttcagataagctgcaagctcaacaatgccgcatgtaaactaagacttaatgattacaaggaagcaaaggaactgtgtaccgaggtcctggaatctgacaacacaaacgtgaaggccttgtacagaagggcacaggcacacatgcatcttgttgatcttgatttggcagaggcagatatcaagaaagctctagaaatagatcctgacaacagggatgtgaagatggggtacaagaggctaaaggagaaggtcaaggagtacaaaagaagggatgccaaattatatggcaacatgatttccaagttgagcaagcttgaagacacggaagataatggccaaatgagtcaggcagtaaacaagaagcgtgagctcttatggccactggcggaaatgcttaggagattcttcactgccgatggtagcaagggttccacgctgtggcttgtgctgaggctattgatcccggtaatagtattggttgcagtttgtgtgggttacttcatgcacagcagtgttgaagagatagactgcatcaactgtgagtgtttatcgttgtatagatctgatgagtactacacgtatttgttggttgtgtgggttgaggacttgagggcgaagtattcacgtgtactgtactgttaa

SEQ ID NO: 5138 - DNA, 333 bp, Zea mays
  Peptide Sequence Number=SeqID_46917
atggacatgctctgcactggccgtggtggcgagtgcatgacacacactgttgactaccgcgccacacacgattggttgttaggtcctacgactgaaggagtgaaaacgggacggatacaggcttacagggtcaccccgtatcgtaccctaatgtatttatctcagatacgagaccgattacgagtagttcaaattcaggacagatacaggacgggaccgagtaataattcgggcggcttggtagagtcgatcaagaaggcaatggctggtgtggccgagactgggagatgccagacgcgaaggagttacgcctcatgcctgcctaattcctaa

SEQ ID NO: 5139 - DNA, 177 bp, Zea mays
  Peptide Sequence Number=SeqID_46918
atggttactattgggtattgggctactgcctactgggagataccagatgactgctatcttccgggcgttgcagagctgacagacgccggagcactggacgccgctggacggctggagcacttggaggctggaacagagacgtcgacagaaaccagagaggacagaggagaggagtag

SEQ ID NO: 5140 - DNA, 201 bp, Zea mays
  Peptide Sequence Number=SeqID_46919
atgagctcctggtgctcgccacttgaagaggactgtgtcatagcccttgatggcgacaatggagtcatcaccaaacggaacaatcccgtggacatcggtgtcgagctaggagaaggccatgcgctcccccgtcatgtggttcatcatgccggtgtcgaggatttagcatgtgctcccaccacccccttttccccaagctag

SEQ ID NO: 5141 - DNA, 1653 bp, Zea mays
  Peptide Sequence Number=SeqID_46920
atgtcttccccgaggctttcgtccaaagaggaggagttgctccgctccgtggagagggcgatagagaggagctacgcggccaagcaagccaccaatgtaccgctgtggaggcggctgctcgggaatgcgtccaagaagagcaagaatgactccgctgccttgacgaccgctcccccgtcgcctggagttctggtaggcacgcagcgagaagagcaggagcgcgctaaggagggtgccgacgtcgcgagttccgcgcccaggcatccgtcggaagcaggtgccgagggagacgacgtgcagcccgcggctcaggacaggtctgtccatgcggcgaccatgatgaagtccgcgttggcgagaatccagggaggccagaacagcggggcgtttgttgatatggagcttgctatgaagggcctcatggatgtctccttcaaagggagggagagagtccccgtgttgcctgccgagttcaggtccaaatggcctcatggtaatatatcacaactggagagagatattattgctgatccgctcatcctgacgtctggacataccattgacagattctcctaccagtggtcctctctgggggctgcaaaacgtttcctcacggttccaaatcacctcctccgtgacatcataacagcgtggtgccttgaccacgaaattcctcttccatcctctacgtctacttcagttgccagtgaagaggctcctccgcctacagaggaagagatgcagctgctccttgagaagctctccatgcattcggcagcgcagaaggaggctctgcacaggatccagcttctatcaacatcctccaagggcgtccatccctgccttgaccggtggcaggatctgcttcctaagctgatgtgtctacacaaggagtggaggtcaacatgggccaggcaatgggaggaggagaggctaacagtaatgctgaacctgtccctccacagggtgaaccgggacatccttgctaggcaagagcgactcccacacgcgttgaaagaaaccagtgcaagggcagggaggcacggatacccgttaacagtaatgctcaaggtatcttctctagtcaccatcctgtcagagtcagagtacagcactttcaggagaaagtttgttgagatagatggaatcgaggagcttcatgtgctgctctgcaacagggattgtctggtaaggaatgaggccagcgctgcaatcctcgcgctctgcagagatgatgctgcagcactgacgcgtgttcccgatgcctcattggtggagtgcctttcagatggcatggtgaccgatgagtgcttgcttctgcttgagtgtacttcggatcgtgaatctgttcgagatcggatagcctttagtgtcgagcttctgatggaagccatcatggccactgagaatggacaggggtatcttagctccaggggcactcgaactgcacttgccctgatttacaattgcattaaggaggctgatggcaggggcaggctgaggacgacagtgatattgcagggttttgttgaggctttgagaatcttggagaggaaagaaacgccactaaggacagtctttcagattgaggagattcacagcatagtctcacaagcccttgcggaattaactcagtggaacattaggagctag

SEQ ID NO: 5142 - DNA, 822 bp, Zea mays
  Peptide Sequence Number=SeqID_46921
atggaggtcttcggcgaagacaaggcttccactccactccatcgaattattcatccttcatcgtcactccgcacctgtcggtattttgggtccgaccgcgcacccagggttgcccctcaagccgacccatcctcgctcagttccgatataatccaatcgaaggtcttcatttcaagtcttcttcagaaatcacttttatcttccacccgtgcttcttcagacgtcagccttgcgttagttttgccatatgctttagagggatcagcattacgtcatcaatgttatgcttcagaggaggtgagtggttgccttcttcttctatcaatagtgttcttgcttctccggcattttcacatctcttaccgctgctcgctgtttactttcttctctttctctctactccaccatgggcatgagccgactcctccctcggaggacttcggtgactcggaatactcggaggaggagttctccttcgagtctgagggttcaccggctcctggctctcccccggcgtcgtctgatgactcagacgactctcaggggatcgccgcagaggtatggacctacatccgggtcgtcgagcgtgccgggctcgagggctcggatgagtcggagtactcctcgaatgaggagaactcctcggactcgtccgaggagggcggcggcggcgatggcgatgacggcgacgacgacggaggcgatggtgatggcggcggcggcgacggcaagagcggtgacggtggcggtaaatgtggcagcggcgacggcggtggcggcagcaagggcagcagcaggggcagcaacaaggccagtggttag

SEQ ID NO: 5143 - DNA, 636 bp, Zea mays
  Peptide Sequence Number=SeqID_46922
attgataccattttcgttggagaatcaggttcgcaaatgcgcgactctgcactgagtttaacaaaatgcttagcacaaacagcacaaaagactttcagtgattttgaagaagctgttgaaaaggatgcaacaaagaatattcatactgatggaacagttcatcctttaacaagctatgtgatcaactatgttaagtttttgtttgagtatgttcttataccaagtaatgctaggaagaaagtaacaatagtatcagaagccaaagatttgttgggtgatgactggattcaaaggcaccgaaggattgtacaacaaaatgccaatcagtatagaaggattgcttgggcgaaggtgttgcaatgcctctctggtcaaggtttgacttcatcaggtggtagtggtcatgtaggaagtgatggtggcaatagcagtggagcttcaagaacagctgtgaaggagaggtctttcaatgtgttgttcgaagagatctaccacaagcaatgtggctggtccgttccagacactgagctgcgcgagtcactaagactcgcggtcgctgaaatcctgttgcctgcctaccgatcattcataaaacgttttgggtacgctgctctgactcctcgttacttgttgtaa

SEQ ID NO: 5144 - DNA, 531 bp, Zea mays
  Peptide Sequence Number=SeqID_46923
atggaggcggcacgcaagcatgaggacgatcattggacgcacatgaccgagtgcatcgaccttgtcttcgatatcgctcgcattcaggagcatatagtgactcaagatctgggagtcaaggcgatggatcaacccctcctcgtggccgtccccggcggcgtggccccctgcgcgtgcggcggctggcccccgacgggccctcccccgcccgcgtgctggcgtggcctcggcccccagcgcggtgctcccccggcacggcccccgaccccggtgcggtcccgccccggcgcggccccgacacagcctcggcacagcccctgcctcggcgcgcgaccttggcatggtgaaaggaagaagaagagaagaagaaagttggctgtgaacagccaacaggctgcttcggtctggggcaccggactgtccggtggtgcaccggacagtgtccggtggtgcaccggacagtgtccggtgtgccaggctgcctcggccgaagaggccgctctcgggaatttgctggaggcgtacggctaa

SEQ ID NO: 5145 - DNA, 402 bp, Zea mays
  Peptide Sequence Number=SeqID_46924
atgaaggccataagtcttaccaacgcaaggcgaagaccgaggataagcaaaagcaaaagctcaagcaaaagccaacaatcaaaatctccaacacctacatcaacaaggtggacaaaaaaggccgctacaccatatttgattaaaacgaagaagaatggaaaggtgatagcaatcaaggccaacaagcaagccaacaagagaaagatggctaaacgcatctgggtgtcaaaggagattatctcaaccatgaagggcaccaacaagctctacggggctctgggaaaactagtcaaggcacgggatcgagtggagatggacggaagtggtctagccacggtggccgagtgctcgggtggcttggcgggcgacgcagagctcgccggagctaagttctgggtctga

SEQ ID NO: 5146 - DNA, 369 bp, Zea mays
  Peptide Sequence Number=SeqID_46925
atggcccaagggcacatttcccttttagctacgccatgttcatggctatccccaactacacttacctcaagcagaagatgcccagccccacaaaggatcatcactacaagatctccttcaaggcggcctaaggttgcgagcgtgccaactacgagcttgcaacatcattggcgacaaccaagtagatggcccaactctagatggattgcccttggtgccccagatgcccccaaggtcagctctggcgccttcaagtctgctgaggctagggaggaggtcctggtcgatccaaccgacttggccaagagggtccacgtcggggtagcactcactagcaaactaaaaggtacactcttcgacttcctctag

SEQ ID NO: 5147 - DNA, 1260 bp, Zea mays
  Peptide Sequence Number=SeqID_46926
atggccgcgagagaccgcagccgaggggcgtgcgctgccgctgggatcttttccaacgagacaccaattgaccaagccacacattggtacagcgccgtgccgatgacaccgctgcagccggcgccgatgcataccgtgaccacgatgccgccgcagtctgcgccgatgccgaccgtgaccatgattccgccacagtttttcacgccaatgccaaccgtgcccatgacagcgctgcagccggcgccgatgctgcccatgatgccgccgcagtttttcacgacgatgcctaccgtgcccattacaccgctgcagccggcgcagttgtccacgccgatgccaatcgtgcccacgacaccgctgcagccggcgccgatgtataccgtgaccacgatgccgtctcagtcggcgccgatgccgaccgtgcccatgatgccgccgcagtttttcacgccgatgccaaccgtgcccgtgatgccgccgcagcctgcgccgttccccgtccctgtacacgaagtctgggctgacaacttccacgaggtagaggccgccgtcggctacttcgcggcgcacgcacgcttcgtcgcggtgggcttgcactaccctggcgttgtccacggcgccgaccaccgtggcctcgttgcatccaccgcggagcagcggtacgccacggtaaaggcaaatgtggacgccctcaagccgctacagctcgggctcgcggtcatcaccgaagccagagagatcgcagcgtgggagtttaatctatccgactttgacccaaccgttgacccccacgccgtgagatctatcgcgtacctcagaaggcgcggcctcaggtgcgacgagctccgcctgcgcggcatccccgtggcgaagcttaccagggtactccgtttgatatgccggcccggggtgtcgtgggtcacgcacaccggagcctaccacgtcgcgtacctgatgaaggtcatcaacggcggcaacaaacttcccggcgatatggccggattcctggctgccgtgcgcctgtctcttggcgaggacgtctacgatgtggccacgatggcctcggactgccaggacatgccggcggggctggaaggcatcgcaagcaggctcggggtggcaccgcccctgtcgatgcacccgctcgctggcgccggcagcgtgctcgctctccaagcgttcatggaactccgatttcacgtcttccgcggtaacgtcaccagatacagaggcgtcctgcaaggactccaggttacctga

SEQ ID NO: 5148 - DNA, 1722 bp, Zea mays
  Peptide Sequence Number=SeqID_46927
atggctatcttaacactcaaccgccaagatgtgaccagcttcagtccaacactgctagctcaacctggatcaagagcaaaattcggcacaccaaagtcgccttcgccaggtaccatccgccaccgcgccctaggcatcgagcgaggccagatgctctccctgggcgccctccgcaagctctgcgcagcctttgacgccgtcgcgctcaccgtcatcgctgcggggctctcgcgcccgccctcgggccgccaccctttctcctccgcgcacgcgcactcctcgcaccccgctgacttccccaccatcgccgcctgccgcgccgcgatatccgcctccaagggtgaccgccgccgccgacccggcgtcggccagccctcctcctccccttccccctctctcgcagccgctgcagccaaggaggagcaggagcagccggtgctggtaaggatcaagcacgagcgggacccggagcggctgtaccagctgttcagggccaatgcgcacaaccgcctcctggtggagaaccgcttcgcgttcgaggacgcggtggcgcgcctggcgggtgctcgtcggaatgacctcgtcgaggagatcctcgagcagcacaaggcgctgccccaggggaggcgggaagggttcgtggtcaggatcatcggcctgtacgggaaggccgggatgccaggccacgcgctacggactttccaggagatggggatgtacgggtgcccgcgcaccgcaaagtcgctcaatgccaccatgaaggtcctgctgcgggcacggatgtttgatgaggctctgtcgctgtttgaggaggggccagagaagtacgacgtcgaggtggatgacatctcgtgtaacacggtggtgaagatgttctgcgacatgggggacttgcgtgcggcgtaccaggtcatgcaggggatggagagggctggtgtgcggccggatgtcatcacgtacacgacgctcatggctgctttctataagtgtggccgacgcgaggttggggatggtttgtggaatctcatgaggctgaggggttgtgtgccgacacttgctacctacaatgtgaggatccagttcctggttaacaggggaagggggtggcaggcaaatgagttggcacggaaaatgtatgtggcggggatcaaaccagatgagatcacatacaatctaattatcaagggtttcttcatgatgggtgagcatgagatggccaagacggtctttggcgcgatgcacgggaggggatgcaagccaaacagtaaggtttaccagacaatggtccattacctctgtgagagaagggactttgatttggcattcaggttgtgcaaggatagcatggagaaaaattggtttccgagtgtcgatactattaaccaactgttgaaaggcctcatggctatctcaaaggataggaatgggaaagagataatgaagttggttactgggagaaaaccttcgtattcagatgcaagtctggctcggaacttcctgagatactttgagccaccgctgtttggagggctgcggtggcttggcgtcggcaagaatgtggctcaacgtcgtggctgcagcccgacagtcgcggacgttctggagcgaaaaccaggattaaccatctgctgcaacgccaacgcctgggacatgggctgcaggaacaagtgccatccagacattcgctttcctttcctcagtaagtggacattcagaaagtag

SEQ ID NO: 5149 - DNA, 309 bp, Zea mays
  Peptide Sequence Number=SeqID_46928
atgaggacgtttcacatcatgcgtgcaccatcgttttcgtcgtcgtcggacgttcgtctatccgacttcaccatgttcttcctccccaacctgctgccccccgcccaaagtcgcaaccgcgagctgatcgacgctcctcaacgtgggtacggggttatcctagcgatgaggagtccaggtgtgagatattggacaactaaggtatgcccgcctcttcccttccctcctgctctacgaaaccttggaagtgggggaggcgagggatgtgggtctctgatttgctacctatggtacccgtgcattcattag

SEQ ID NO: 5150 - DNA, 1989 bp, Zea mays
  Peptide Sequence Number=SeqID_46929
atggctcgggcgctgcacagtccctgtttcgtggctccgctgctgtggctgacgttgttactggttgccgtgtcaccggggggtgcgttctacttgcctggcagctacatgcacacatactcccaaggcgaggtgatacacgccaaggtgaactctctcacgtccatcgagacggagatgcctttcaactactacagcctaccatactgccgcccccagggcggcatcaagaagagtgccgagaatctgggtgagcttctgatgggtgaccagattgacaactccccctaccggttccatgtgaatgttaacgagtctgtcttcctctgcaccacaaaagggctcaatgagaatgacgccaagctccttaagcagcgcacccgtgatctttaccaggtcaacatgatgctagacaatctgcctgtcatgcgtttcactaagcagaacgatgtcacggtacagtggactggttttcctgttggttactctccacccggtgcctcggatgattatatcatcaaccacttgaagtttaaggtcttggtccatgagtatgagggtagaaatgtggaaatcattggcaccggagaagaaggatctgctgtcatctcagagacggacaagaatgggatgtctgggtatcagattgttggatttcaggttgtgccttgcagcgtgaagcgtaacgccgatgatttttctaagcttaatatgtacgacaacattgatccggtggactgccccgtggagcttaagaagtctcaagtgatcaggcaacaggagaggatcacgttcacttatgatgttgagtttgtcaagagcgacatcaggtggccatctaggtgggatgtctatctgaagatggaggctggcgccaaggtccactggttctctataatgaactccctcttggtgatcttgttcttggctggaattgtctttgttatattcctcagaactgttaggagggacctgactaggtatgaagagcttgacaaggaagcgcaagctcagatgaatgaggaactatctggttggaagctcgtcgtcggtgatgtattcagagagccatcttgctccaagctgttatgcataatgattggtgatggggttcagattttgggcatggcagtcgtaacaatcgtttttgccacacttgggttcatgtctccagcctcaagaggaatgctccttactgggatgattgttctatatcttttccttggtattgcaagtgggtatgtcagtgttcggttctggaggactattaagggcacatccgaaggatggagatcagtgtcctggttgactgcttgctttttccctggtgtcatgtttacggtccttactgtcctaaactttgtgttgtggaaaagtgagagcactggggctttacctatctcactatttttcaccctcctggctctatggttctgcatttctgtgccattgacgcttgttggtggttttcttggtacaagagcggagaaaatagaattcccggttcggaccaatcagatccccagagagatcccagcaaggaagtatccatcgtggcttcttgtccttggtgcaggaacactgccatttggtaccctgtttattgagctcttcttcattctatcgagcatatggcttggaaggttctactatgtgtttggtttcctgctgattgtcctgctgctgcttgttgctgtctgtgccgaggtgtccgttgtactaacatacatgaacctctgtgtggaggactggaggtggtggtggaaggctttcttcgcctctggttctgtcgctgtctacgtgtttctctactccatcaactacttggtctttgacctcagaagcctgagcgggcctgtctctgcaatgctttatgtttgctactcattcctcatggcatttgcaatcatgctgacaaccggaaccattggctttttgacatcattcgcctttgtgcactacctcttctcatccgtaaagattgattga

SEQ ID NO: 5151 - DNA, 321 bp, Zea mays
  Peptide Sequence Number=SeqID_46930
atgagggtgccgccggatctagggctcgttttcccgcgccggatctcgtcggttgttggcgatgaggcgacgcggggcggagagaggcagggcaagccggaagcggacgaggaaagcaaagctaggtgggtgtggtgtggccgtgggattgagatcctctacagacgctgccaggtgagcccggcgggtacccggacccacatgcagtcacaaatgccctctgcagtggctgcagaggcctccactccactacaggcccacgtggatctggcagtaaagagcagaggtgccagtcctacagttcatgtagacgaagcttaa

SEQ ID NO: 5152 - DNA, 1731 bp, Zea mays
  Peptide Sequence Number=SeqID_46931
atggcggggagcgacctcgagccgctgcgcgcgagcgcggcggcgctgccgtcctcgtcggacccggactcgcccgccgtgaccccgcgccggagccgcgtgcgggacctgctgcgcaacctggaccgccggctctccaaccgaagccgcggcggcgcggacgcggggcacggcggcggcgaggccggggcgtcaccgaggaggcccgaggaggatagcgacgagctcggcgacggcgcgccgcccgagtgggcgctgctgctcgtaggatgccttcttgggctcgccaccggcatctgcgtcgctgtgttcaatcgcgggatagcgtttgctaatactgaattgattaggtggttggatgttttattttccccaaaatgcttaaaaacaatgtatgatgcacacacaaacacactcacagacacagaatttaaggtacatgtcatacatgaatgggcatgggcaggcactcccactgagggtgctgcttggcttcgtctgcagaggcttgctgatacctggcataggatattgttaattccagtgactggtggagtagttgtgggcatgatgcatggattattggagatttttgagcagataaagcaatccttatcatctcaaagggagggtattgatttcatggctgcgatttttcccacaatcaaagctatccaagccgcaattactttagggacagggtgttcactggggccagaaggacccagtgttgatattggtaaatcatgcgcaaatgggtgtgcggaaatgatggagaacaatagggaacgaagaattgctcttgttgctgccggatcagctgctggaatcgcctcaggtttcaatgctgcagttgctgggtgcttttttgctatcgaaacagtattacggccacttcgagcagaaaattctccaccatttactactgctatgattatattagcatcagttatatcatcaactgtttccaatgttctgctaggggaaaaggcagcatttattgtgccgacgtatgaactaaaatctgctgctggctctagtgcccaatcaaactttatctggctctttaatcttcctctaggcttatggcagttggttgtttggttcactaagacttttgacttgataaagaagaagtttggccttcctgctgtagtatgtcctgctctaggtggtcttggagcaggcttaatagctctaaggtatcctggaatattatattggggtttcaccaatgtggatgagattctacatacgggcaaaagtgcttcagcccctggaatctggctcttggctcaattagctgctgcgaaagttgtagcaacggcactttgcaaaggttctggtcttgttggtggcctttatgctccaagtttgatgattggcgctgctgttggtgctgtttttggaggctcagcagcagaattaataaactctgcgattccgggtaacactgctgttgcacatcctcaagcttatgcactgggagctgttggtttagcaatatgggtcccatctgttgtaaatcaatctggtagcaaagatacattcgaggcaacatcaccccgtcatggctattcgtcattgttacctcccacagataggaatgagacagattggaggcgacaagatggagacgatgtggaactcacaattctagacgttgatccctaccactatggtagtaacaatgaggagatgcttcttgatgacttgaaggttgataattga

SEQ ID NO: 5153 - DNA, 2223 bp, Zea mays
  Peptide Sequence Number=SeqID_46932
atgtcgcagcgcgacggcgacctcgccgccggagctcatccggaagaaggagaccgccacgccgttcgaatggatggctccgacgatgagctggaccaacctacgagtaaagcgactgagcacatcacggctatggacgtgaggaaggggaaggatatgcaagggatcccctggaacgtgatgccgactacaagggacaagtacaggcagtcacggctgcaggggtacgccaactttgagaacgaatgcatgcctgcagagaaaggccaactctactacgagtttcagcacagcacgaggtcggtgaaaccgaccatccgtcatttccaggcgagccatgcaatgacttataagaagcaagaagtcattaatcttcaaggacatgtgacaccgtgcgagaagcaccatcggaatcactacgagggtttttatcagactccagtcagtactttggcggtgaagcataacttgcttgttactggtgggtttcatggggagataatatgcaagcatacatcgttgagcccagatggtaaacttgctgctattgtgggggacagtcctgatggacttctgattgacgctaattcaggaaagacggttcacaaactccatggccatttggattactcctttgcgtcggcatggaatccagacggccgaacattcgccacggggaaccaagacaagacgtgcagggtctgggacgtccgcaatctctccagatcagttgttgtattgggtggcaacatcggagccgtcaggtcgattcgctacacgccagacgggaagttcatggcgatgactgaacccgcggacttcatccacatcttcgatgttgagagtgggtacagcaggaagcaggagctggacttctttggtgagatcgcaggcatatcgttcagtcctgacactgaagctctctttgtcggtgtgcatgatcgcttcttcaactgctgcctcctccagttcagtcggcgacggttctactcgtaccttgattcaacactcctccttgccgccggctcgggcggcgccacgcgcgaccaactgctggctacgctcggcggaggcgatgggccggacgcggccgacagcctgcacgctctcgccgagcaggtggcgcggatcgccttcgcggacgccgtcttcgccgacgcgtcgctgaagctgaggccggccttcgaggaggtcgccgtggggaagtacggcgccgagatccactccgtcgagttccagaaaaaggtccgtctgatcaccacgcttcgctcgcaaacatctgacctggacgtagcgaaatctagatctgccactggacgcagcgctgctccgcttcctggcttcatgctggtctccgtgctgttccgcttcggcgcttcctcctcttctccacttcggcagttcctgcttgtctccacttcggcgttgctgagctgctccgcttcggcgcttcttgctcgtctccacttcggtgctgctgagctgctccgctggcggactggacgcgactacgcgacgccccgacgcaggcacgcggctggaggctgtaggcggagacacggcttgtactgggcctattcgcttgtactaggccgcgaccggggctgcagcccgggcagccccggtcgtagatccgcccctggtcgtcaggatgcagaagctgctgctcgagtgaacgcatgggcagagagaaagccaagctcccgtacgagcaaggcggtgacaagcactcaagcagaggcagttctccatgtacatcctcctcccggaagcacgagactgcctccgggccttggcccggccgagaagctgagcgccgagcctgggttcctggacaagcacatcccaacgaggaaggtcccagttggggagaccaaggtccccaggttcaaggtgtccttcgtgttcgaagcgtccgagctgctcaataaggctctggggctctggctgccgtttagcgccgaagaagcagggctcgtcgtcggtgatccacccatgttgtatgtctcctccgttttccacaggtcggttgtggaggttcacgaggaagggaccgaggctgctgcggcatcggctgtcctgatgatggtggtgggtgcttcacttgggagcagcacggattgcagtttcatggcggatcaccctttcgtcttcctgatccgagaagacacaccaccggaggaagactttgggcagtcgcgtagacgctccccaaaaacctaa

SEQ ID NO: 5154 - DNA, 285 bp, Zea mays
  Peptide Sequence Number=SeqID_46933
atgagaaacggctcggggcacggcatcgtcggcgggacaagactggccgacaggcccttaccactcgcctgtcagcccgtgccgtttgaacaacgcacgacagcacaggagctgcagccagaccaagctcgccaccgtgcttctccccagctcagctcctgccgcgggggctggttcatcctcctcggagggctgacgaagtgggtggtcgcgacgaggtcaaaatggcggctccgctccggctgctggcagcttcgcacgtcagcttcacagtttgttggttaa

SEQ ID NO: 5155 - DNA, 465 bp, Zea mays
  Peptide Sequence Number=SeqID_46934
atggctgttttcaatgagttaaaagatggctggaatggtgacacctacgctggagagtactttgctgataggatgcacggctttggaatctacagctttgccaatggccatagatatgagggagcatggcatgagggtagaaggcagggtttaggcatgtatagtttcaggaatggagagacacaagctgggcactggcaaaatggagttcttgatactttaagcacccagaacttcatccctggatcacctattgctgtgaaccattccaaggtcctcaatgcagtgcaggaagcgagaagagctgcagagaaggcctatgacatcccaagagttgatgataaggtgaacagggcggttgcagcagctaataaagcagccaatgcagccagggtggctgccgtgaaggctgcacaaaagcgcatccccagtaatggtgacgatctaccactgtcagtagtgtga

SEQ ID NO: 5156 - DNA, 195 bp, Zea mays
  Peptide Sequence Number=SeqID_46935
atggaccggaagcgcatcaaggacgcgctcgagaagcacctggagaggtcgtcgccgtctacttccaggggcgtcgtgtccaaggagagggagcgcctcgctgccgggaagctgccgtcatcgcttggcaaggcggagatttcgcggcttccatttttatggccccttcaaatgagaaactctttacttgcctga

SEQ ID NO: 5157 - DNA, 3642 bp, Zea mays
  Peptide Sequence Number=SeqID_46936
atgcaggcgagagcgggacgatatcgcccgctctcgccaggcggtggcagtaacgcccgccgagtcgctctcgcccacctccagccccgctctcgcctcctgctgggcgctatcgccctcactataggctgcattggtagcagccttagggggaaaaatttaagggaaacgcctacggacagcctcaacacacaggactgtgctgctcgccgattttccccacttggtttccctcctctttctgcctgtgcttctgtctctcttctgcccttctccaagaaaccggataatccatccatccatccgcgatccgccccgcccacccaaggaaggaaccgatcccgactcgccgcgggctcgaccccccgcgccgacggctacgcgtggcaggcacagcaagcgcgccgcttcgccgacgtccacgccgcctgctctggctgtgggcggaatgcgtcagctgtagaggacggccacggcacctttcagccttttcctcgtctgctcctcctctcggccgggctcagtcggtcggtaacgactcctgctgtgctgtgctccagcctccggcagcgcctgctccgcaaacagttgcctctcctgtgctcacccaaggcgctcgggcactgctgctggttccccttcgcccaattcggtctgacgcaggctctgtggactaaatgtgacctgcaagagctaaaagtggcagcgattgactttcagatgagtccatttgtgctggccgtggtgagcgttgcattcctcagcttgcggtttttgcaggctcatggaagcgggttgcttctgagctgtggctcgaacagcactgtcgatgctgatgggcggagatggatcggcgacataacccctgaggggaattttaccttgagcagccctgggcttgcggcgtcactggtcgggaagagcagttctgatgagatattcggaccgctttacagctctgcccgtttcttcaacgcggcaacttggtataccattagtgtgctgcctggaagttactgtgtcaggttgcatttcttcccttcgaccttcgggaatttgagcgcgaacaactccgtgtttgatgtcacggcaaatgatttcaagcttgtttcaaaattcaatgcgtcagaggagattgcttggagagcctctgtgagcaattcggtcaccagcgcagttgtcaaggagtactttcttgtagtcggtgctcgtggcctgagtattgagtttgatccaagacctgggtcgtttgcctttgtgaatgcgattgaggtcatgctgaccccagataatttgttcaatgatacagtgagcaaagttggcagtccagtcacgcagcttcctcttggtttgaggggcagaggtgttgagacaatgtaccggctgaacattggaggtcctgcacttaaatcgcccagtgatcagtatctccacaggccatggtacactgacgaagcgttcatgttttctacaaatgctgctcagactgtgtctaatgcttcaagcatagtgtatgtatcaagcaacgagtcgacaattgcgccgattgatgtttacgagaccgcaagaatcatgggcaataacatggttgtggacaagcggttcaacgtgtcgtggcggttctatgtccacccaaactttgattacttagtacgccttcatttctgtgagcttgtctatgacaagcccagccagaggatcttcaagatctacatcaataacaagactgctgctgagagctacgatgtgtatgctagggctgggggaattaacaaagcatatcatgaggacttctttgacaactcgacgcagcaggcagacacactttggcttcagctaggccctgactccatggccagcgcttcaggtgctgatgcacttctgaatggtgtggagatattcaagctcagcaaggattccgacctttcttatgtgcttggtcatattgacacgggcaaccagatggattcttcaaaaggggggaagattaaaggcctatgggaagaacttggtattggctcagcatcttttgttgcggttacaagcgttgttctgttctcatggtgttacataagaaagaaacgaaaagctgtcaacaaggaggcccctcccggctggcatccgttggttctccacgaggctatgaaaagcaccacagacgcccgtgcagccagtaaatcgtcatcggctcggaatgcctctcccattggtcataggatgggaagaaggttcggcattgcggagattagggctgccacgaagaacttcgatgagtccttagtcattggaacgggagggtttggaaaggtctacaaaggtgagattgacgagggcgctacagtggccatcaagcgcgctaacacattgtgtggccagggcctgaaagaattcgagacggagatcgagatgctttccaagcttcggcaccggcaccttgtggcgatgatcggctactgcgaagagcagaaggagatgattctggtctacgaatacatggcgaaggggacactgagaagccatctgtacgggagcagccttcctcctctgacatggaagcaacggatcgacgcgtgcattggcgcggcccgcggcctccactacctccacacaggagcggaccgaggcataatccaccgggacgtgaagaccaccaacattctgctggacgacagtttcgtcgccaagatagccgacttcgggctgtcaagaaccggaccaacgctggaccaaacccatgtcagcaccgcggtgaggggaagcttcggatacctagaccccgagtacttccggaggcagcagctgacgcagaagtccgacgtgtactcgttcggagtggtgctcttcgaagttgcctgcgcgaggccagtgatagaccccacgttgcccaaggaccagatcaacctggcggagtgggcgatgaggtggcagcggcagcggtcgctggaggcgatcctggaccctcgcctggacggcgacttctcgcccgagtccctgaagaagttcggcgagatcgcggagaaatgcctcgccgacgacggcaggagcaggccgtccatgggcgaggtcctgtggcacctcgagtacgtgctgcagctccacgaagcttacaggcggaatgtggtggagtccgaatcgttcgggagcggcgagctggggttcgctgatataccatccttcttcagccttccccacgtcatcagggagggggaggaggaacaccaccaccgatcgaagaagccgtcaacaaacgggattgagaaaggtggtatggtagtgcagctcgagaatgtgtggtactctgttttgcgcgcgctacggaacgccaacagacgtgcacagtaccgtgttctgccgcgaccgtcctgtcctcccacccgcccgcaatcagcgctccgtcgacaccgcgccgccacaatcaacgcgatccgcgggccctcctccccaccgccacgcaacagatccgcgggcgttcctcccaccgccgccatccgcaacctcaaatcctcccagatctccttccgctatgggaccgtggcgttggggcacgtgagccacaagctctcggtgccgccgcgccgtccacgcggcagaggaaccctgccagggtttgtgcgaaccgctggcggtggagcgggtccgtga

SEQ ID NO: 5158 - DNA, 543 bp, Zea mays
  Peptide Sequence Number=SeqID_46937
atggagtgtgtgcaaaagttcatgcatgcagattgggtttgggctcttgctctgcgtggaaatactattgccagtactactggcataaatgcatatgtatgggatatcagggacgacaatttaacaagcttaatttccaatgcccatgttggtagcacatattctatagcttggacacacctggcagatgtgttgtttactggtggagaggatggcgctattcgcttgttcaatgtttctgatgtctctgatgatgaggaggatattaaaccagtggcaacttgggtaccacattcagcctcgagtggtggcaggattgcactcattgatttgaggaagcttccgacccccaaaagatcatcaaaggataggattgtatctgcgggcgaggatggctctgttagaatctggaacttctcagaagcattggatattgagaggagggcacaggccctaaggagtttgaggcaggagaaccgcatgaggcggaggaaggcgcagtgtgtattgatcaagtcaaagatacgtccatcaaatctttga

SEQ ID NO: 5159 - DNA, 228 bp, Zea mays
  Peptide Sequence Number=SeqID_46938
atgcacggcgtcggcggcgtcggcgtcgtcctcgtctccgccggtcagagcggtggcttgtcccgtgaatctcggcatctcgccctgtgcagagcgatgaacggcttcaatgagagcgaggcgagcacggcccgcagatcagtctcgatcgacacgggcagcgtacagtacgtggctccaccacgcacagacaacgagctctgcccccacaggccagcaggcagatag

SEQ ID NO: 5160 - DNA, 477 bp, Zea mays
  Peptide Sequence Number=SeqID_46939
atgcatgatcaagaccaagacgacgacgacaaagatgctagctcgttggaagggctcctggctgaactttgtcaagcacgacatcgcctgcaaccgacgcacctcatcggcgacgcaaagtcactcttccacgaggttgtcatgcttgactccctccacaccaccattcatggtgtccccgtcgtatgctccaccggcaactccggtccctacaacgacactgttgtcaacgctacgtcatgggtcaccaccttcgccgccaccaccgtcaccgtcaacagggacttccctggtatcctcaccttcaacaacagagtgcgcatcaagagacgagcctcgagttcaccacactgcaccttttgtagaacgctctacccgattgtcgacgtcgctcgcgccacctccaactcgtacgctgccgctagctgcgcgttcgacaccttcgatcctgtgaggggatcacgggtgaaagcgtga

SEQ ID NO: 5161 - DNA, 240 bp, Zea mays
  Peptide Sequence Number=SeqID_46940
atggcgcaccgaacagtgaacagtccactgtccggtgcacaccggacagtccggtgcgatgtccggtgtgccactaaaattcatttcccaaagactgcgctctcgggtttctgcgactgggaaaactctgccgtggaccagcctggccccacatggcagagggtgcaccggacagtccggtgcacaccggaaacatccggtgcccctaagccagaaacactaaatcttgttttcagctga

SEQ ID NO: 5162 - DNA, 699 bp, Zea mays
  Peptide Sequence Number=SeqID_46941
atgttggagttggacgatggtttgcagatggacgagaagtacaaccagtgcttggacgagatccagagcacgacggccaggttcaacaccctgatgcactcgcccccgggcggcggcggcggcggcggcggcatctgcgcgccgttcgcgcaccgcgccgtgtcgacgatgtaccgtgggctgaggcggcggctcgccggcgagatcatggctgcggcgagcagggccagctgctggggcgagtcgtcgtcgtcggtgacggtggccgcgggcggcgacgtggagcggagctgggagtcggccttcatacagaagcactggtcggcgcagcagctgcggcgcaccgagcagcagtgctggcggccccagcgcggcctgccggagaagtccgtcgccgtgctcaaggcgtggatgttcgagaacttcctgcacccgtatcccaaggaccatgagaaggacgtgctggcggcaaggagcggcctcaccaggaaccaggcaattatcaaaatcccaccagactcggtgtcgaattggttcataaacgcgcgggttcgtctatggaagccgatgatcgaggagatgtaccaggacctcaagaggagctcgggtgcaggaggaggagggcacggcccggcgatggagccacagcagcacttgagcaagcgtcgaatttgcgagctggaagatggtggccagtga

SEQ ID NO: 5163 - DNA, 405 bp, Zea mays
  Peptide Sequence Number=SeqID_46942
atgcaacaccagctgccatccctgcccgccatctgcgcgcgtctggcgtctccctcgctcccgctctcttctctgctacccacgccgtctgtgccggtctcccagccacccgcgagcagagcccccgcccccggatcccacgcccattcgctttgctttggatctgttgccatcggttttttgggtgtggaggcaatagacaaggtggacgagaggcttagcaaggccatggtggtggtggcgcgatcgagcgtctcagtgcggcagcgaaggatgaacggccaccggcagggcgctgcgcggaagagcgtcaccatcagcccagcgctgacgcagagccgaaaccgcgtccacctccgtagcatcttcagcaaggacctcctcacgcacaagcaggccatctag

SEQ ID NO: 5164 - DNA, 459 bp, Zea mays
  Peptide Sequence Number=SeqID_46943
atggattcttatctgacattcttctcaatggacatgatggtggagttgctggaacacattaaagataaagttccgaggacacagagttctgttatgcataggtggctgacaattcagacacaagtgaacaagttttgttcttgctatgatgcgattttgcgcaggaatcaaagtgggtcaactatccatgacaagattgcagaagcaaccaagatgttccagagcttagacaacgaaaacaaggcatttactcttatacattgttggaacattttgaaggatgaagacaagtggaaagccaagaggcttgaacttgtcgagctggaaaaacaaccaaacaagaaaaaacaaaagtccaccaagatgtctaggccaagggatgatgaagccaccaacaatgaagaagttccagaggatgttgctccacaaaccgaattaaaaaaaggccacaggggataa

SEQ ID NO: 5165 - DNA, 228 bp, Zea mays
  Peptide Sequence Number=SeqID_46944
atggcccaagggcacatttccctttcagcagttggcgcaccagacagtctacaggacctgtccggtgcaccaccggacagcccagaggccccacaagtcagaactccaacggtcgaaccccaacggtctgctaacgtggctggtgaaagggaaatgtgcccttgggccattctaagtattttggtgattgagtgtcgacgcgggtcagaattagaaatcttgctctga

SEQ ID NO: 5166 - DNA, 1185 bp, Zea mays
  Peptide Sequence Number=SeqID_46945
atggctgggtatatgtcaagagggccccaaaatggttctgtgtatgtctgcaatctacctcctggaactgacgagaatatgttggctgaatattttggcaccatagggttgctaaagaaggacaaaaggaatgggcgcccaaaaatttggatctatagggacaaagtttccaatgaaccaaagggtgatgctacagtcacttatgaggatccacatgctgcttcagctgctgtggaatggttcaataacaaggatttccacgggagcactattcaggttcacatagctgagtcaaaaagcaaagatgctttcgataaccccacaaatttgaacaccattgctggtgtcagtgaacaagatgaagtggataacggagcaggcataggtagagggcgtggtgatggtcccggcaaggcttggcagcaagatggggactggatgtgtccaaatacaagctgcacgccctgccggtgctggttgaaactggtggtggaggtggcggtaggggtagaggccgtggtaactctgatgcaagaggaagcagtcgtgcgggtgctggtgctgctactggtggtggtccacctggattattttggcccaaatgattggccatgtccaatgtgcggcaacatcaactgggctaagcgtaccaaatgtaatatatgtaacacctccaagcctggtaccaatgaaggtgaaactggctcaaaggaggtgcagtgccactttggcccattgccaattgttgtttgcattgccatttttcttcattttaggggtggccgtggtggtgggtacaaagagctcgatgaagaagaactagaggaagttaaaaaacgccggaaagaggctgaggaggatgatggagagatctatgatgaatttggcaacctgaaaaagaaatttcgctctaaagctctgcatactggaagtgcgcagacacttcctgggtctggacgtgctggatgggaagttgagcatcgtggttctagtgaaagggaaggcagggagaggagcagggatcgtggtagggacgactatgatgaaaacgaaaccaggagcatagatagaggtgatcatggaagggaccagcgccggagccaagaccgcgaaagggaaaaggggagggagagaagagaccatgagtatgagagaagtagggagcgtgaccggcgccacaggtga

SEQ ID NO: 5167 - DNA, 402 bp, Zea mays
  Peptide Sequence Number=SeqID_46946
ctttatgctgatgggggttaccagctgagaattaggcgtcttgaggtctcgtatggcacccgcctaccaagagagcatcaccctcgtgtcctcgcccgggtcgatcgactttctcctctgctcgcgtcgtgccacggccatcgcatcgccctttacatcacatatattttctgcatctccaaacgcttcttcagacctcgctatacctcgccggagcttggttctgatccgtggacaaaggggaaggcagtgaataagggaaagatagcgaaggagaagctcacgggcggcgatgcccacgacgagaagctagcttacgtgatgtgcgggttagacgggttcagacttcagaccaccgatagccacaaccttgctgagcatgtgagttcaccgggtcgctaa

SEQ ID NO: 5168 - DNA, 696 bp, Zea mays
  Peptide Sequence Number=SeqID_46947
atgacggaagcgatagtaccaagctcgggtagtctacttgaggccgtagagggactggttgaggttgtagaccatgtcggggttttatcagaaggacatggagttagttacttggactctgaggaggaattgtctctccctgagactgggtttcaactgttccagaagtatgctgagcagattcagaaatggggctggatcatcagcggcgggagcaattcatctgaatcattcaaaaagaacatgaacattctgaagagacaagtccgtcttgtcactcttgttgctgttccatgtattttcggtgtcaaattgactgggaaagatctcatggagtttatttggcagcttgacgagactgatggatcgtcagatatgcccccagcagttctccgtattctgaacttcaaagcatgcagaggagcgatcatgtttggcgaccccttgctaccatctgagtgctgtctgattattgaagaactgaaagcaacatctctatgcttccagtgtgctcatggtcgcccaaccactgtccccatcttgaacatcgcatccctccacgatgagctggcgaggctccaaatgctgagtggaaggaaggcagagacctggcacggcttggggcaccatgagcccagccttgagcgtgctcacatgcgcctcgaacgactgagaaagctacgccgaggcctgtag

SEQ ID NO: 5169 - DNA, 2778 bp, Zea mays
  Peptide Sequence Number=SeqID_46948
atggcatcatgtggttcaactgtgctaatgggatctaaatgcttacatctggggatagatgacaagagggaagttgtcggcaccactggtgaatgttctattttctccttgaaacagagtagtgcctgtatattcgtaatagtacatagtgttagatgtgagaaaagagaactacatcatgtgaagaagtgtgtccttcaaattgcgcttattcatccacagatttcactcagactgcttgataatgacagcgaagatgagctgctatacacagaaatttcttcatcccctttgcctcttatatcaaaaacttttggggatgatatctccagatgtctccatgagataactgcctctgaccagatgtgttttgtacgaagggggtatgcagaaattgatgttcagagcaggaagaggcagaaggctgatatctaccctgcttttatactaaacttttactgccctagatccacctacgatctacattttgagcctacaaaaaccattgtggaattcaaggattggcgaactgtcttgcttttctttgagcaatctgtcacaaactactggaagaagcatcaactgcaatcaccaaaagtgaaattgaataagggcctcctgaaggatcataatgtgcagaacgaaaaagagtatgctcacttcgaaagcactcagcagacgaatgcagtcaaagacaccaacagtgatatgagttccacaagagcaacaagaaattcacactgcttttcttttgttatggagccatccattcagaatgtctgtttctctggaaggatcactaattcatgccgcccggatgacaatgttgccagtattgattacaagttagggtataagcaaatgcattatcctgaaaatggcagttataagtggttagacgatggcccttcccatttaaatgatgatatctcaagtgttaacccaacttgttggaaaaggcaaaggactgaaggtatattccatgagtatgcatattctggtaatcttgtaatgctggaagatgtgccaactgaaggttattttgctcacgaacaagagactgagctgattggtccagaagttgaaataccagaatcttgcttcagggctctcaataagccaaatggaatgacgcccgattttgtgcaaaataaaaccaacttgaaggcacaaacctcaggctgggatggattatatgacaagtttgaaaagttaaatggggattgcttactcgataatggattttatcatgatggtggtagcacttccaagggcacctgtcgagttttgagaaagtccagcaccagtaagaagttggggactgcagctggatgtgttgaagggctagaggctgatgctattaaccagatgaatttccctgatattcatgctctatggaacagtgacttgatagataggtcgtccttcaaggatactttaaatcatttttctcacccatccttgttggctgatacaccttgcagtcatccaaggaccttgcacacccttaacaggacatcagataaatgctttcgttcttggaactatgaaaacattgacagcaatgttagatttagcaatgattcatctattatatttgaaggaactaaaaattttgataactttaacaatgaaatacagtcgcttaattacttcaatgataagtgtggttcaaccgaccagcttggttttgaagaagacctgacaacttggaaatcaaaatttgacatgaggttgtcagtcaatatttctcctgagacagcaggtgataatggttgtcatttgaatgttccttctttgaatattgcaaatgacaacctgtttactcaagatctgttgaatcaacacaactctggactaaatcagagactcaggacttcgaagtgtagtagatttagaagtcattctgctccaccattttatagagggaaactgaaattctctagattaaatgtgccactgagcaaaccaagcacagatagcgataaagatatctgcgtcaataacccggaagacaatgcacctggacctgtggatatcccatgtattagttcaacccagcctattcctgagactgatagcagtgaatttccagacctaaattttagctcgctaattcctgaatgtgttgacaagaactgctttgaggaggcaagggttttgttgcagctggacaagaaatttattcccgtcatatctggggaaactatcctccttgtcgatcaggttcaagttttctcatttagcaagggaccaggtgaacaagactgcccacaatacgtcgatagtgagatgaatcctctagaggtgccccatcagtcgaacgaagttgcaagggaatatccatcggtgtcacagcgtcgaaactctagccacgaaggtgttgagactggaccgaaactcctcaaacaccatcatagggaggcccttggtgaatacgtctgcgaactgagaagtagtcgtgacatgaagaactctcacatctccaatggcgacacgctcgcggacgaagtggaggtcaagctcgacatgtttcgtgcgctggtgctggacggggttggtggagaggtacacgacgctgatgttgtcgcaatagacaagagtgcgttgtgtcagcatactgtggagctcctgaagcagctgacgaagccacgccgcctcggctacgccgttagccacaacgcggtacttggcctcgacgctggagtggtaaacgacctgctgccgcttcgaggaccacgagacaaggctgtcgccgaggaacacagtgtagcctga

SEQ ID NO: 5170 - DNA, 591 bp, Zea mays
  Peptide Sequence Number=SeqID_46949
atgcccaccgccattgcctttaaaagtcgccccactttccgtccttttcctctccactcgcacgttaacgctacacactcccgtttacgtgcacacctccaaaccctcatcacgatccggctccaaggtctcgagatgaagtcgagggcgaggtccggcggtggcgactccaggctctcggtgaggaagaccaaggttgagaaggacccaaacaagcccaagaggcctccgaccgcgttcttcgtcttcatggaggagttcaggaaggactacaaggagaagcaccccaatgtgaaacaagtctcagtgattggcaaggctggtggtgacatgtggaagtccttgtctgatgccgagaaggctccctacgtatctaaggccgagaagctgaaggttgagtacacaaagaagatggacgcctataacaacaagcagtctggaggaggacccacattgtctggtgattctgacaagtccaagtccgaggtcaacgacggggacgaggaggttgctctacgcccagcctgggccgttatcgagatttttgaagctgttgccgatcagaatgttctgcagggagtgcaggcatga

SEQ ID NO: 5171 - DNA, 231 bp, Zea mays
  Peptide Sequence Number=SeqID_46950
atgaatggcatcagacggaccctccacttgccggtccatggaatggtggcggagtttacgctacacaacattggggctcttggtgatgggtgccccaagcagcatgagggtgtggacgagatggtcggcacggaggaagctgagctcgacccaatgccatgttactggccaggaagtgatcgacagggaagggatcgcttgattgaaggaaggtgggtcgaaatgctttga

SEQ ID NO: 5172 - DNA, 204 bp, Zea mays
  Peptide Sequence Number=SeqID_46951
atgaggtgtcctctccagggacatcgccatggacgcctcgtggctgtctcccagcagcatcctctgcgtttccaggaagctgcccctccttttctgcatccacggaggagtgctgaggaagagaggaagtctggtcatggaagagaagagctgagcctatgcgggacaaaggagacggacgacgacagcgtcgatgaaggatga

SEQ ID NO: 5173 - DNA, 261 bp, Zea mays
  Peptide Sequence Number=SeqID_46952
atgtcctccaaagatttctcggacggccttgcttacacccatctgaaggcacaacaagcagctgaaaaagttgcaaacattagaaagaatcctcaaggcaagaaagctgaagtaaaacatattgaatccaaagctgaggatgctgctattgaagccgaagcggtagctgccagggctgcaaagaatgccacatattatgttgttcttaaaatctgtgagcagatctatgatgagatgatgcagggtcacaaagaaaattga

SEQ ID NO: 5174 - DNA, 725 bp, Zea mays
  Peptide Sequence Number=SeqID_46953
acatggtcgaggagcaatctgtcctagaggtgctcttggctactatcgtggatccttccgaggatagtggatatattgatattgaggaagacaacaccatcattcacccaacaaagtcgagtcatgtggactttggcaaatcaaagaccaaagatgggcacattgaggtacttaaacggtttggctacattgaccgggttctactaggatgcaaagatttggtgtcagagccgaaggaggatgaagttgttgtctttggaagctttctaaaagatgattcgaagaagaggaagaggaaggtaaccacgatgtggagcaagatttcaaagataaaacctgggtcaacacctcaagcttcggaggaaattccggttgtgcccgaagctgagacgccgaccatgattgaggaaatcccttctttggaaacccaagggacaaagatcaaggatgccatcgctctgatagcccaaaactttaatcctctaaaacctctctcaaaaagcgaagaagaagaggaagaggaagaacgaatagcttcagtaatgagctcgttcttcgacattgacgaagaggggttagaggaaaaagatactaccggcacaattctagcatcaaagggtgttacgccgcctgctgcagatgtggcgatatcaaggagtccgaaagttgaactaacacatgcagttgttgaaagggaattaggcttacacctagttcctaaataa

SEQ ID NO: 5175 - DNA, 432 bp, Zea mays
  Peptide Sequence Number=SeqID_46954
atggttccgaacggagcaggggaatgcggcggcggctgccggcgagggaaagcagcgcacgccggtgtcggcgctgtggctggtttcttcttatgtctcttgatggtctgggcagttggtgggtctgaaagatcaggttgtggccgggtggctgagcaccacggggtgaaagaatgtatggtaaattctggaatggtccatgatgggaatcaagtcaatggtgcgtcttttatcccagatattcgttgcattcgagataggatatatgatggaaaacagaattggttgaaggatgcaattcttcaagaatcttgcacagcacaagataaatatggcctaaatagtcatgcacctgcagtattggaagataagttattgcaaaatgttatacaagaagacattaattctaccacgcagtgcaatgcttggtga

SEQ ID NO: 5176 - DNA, 414 bp, Zea mays
  Peptide Sequence Number=SeqID_46955
atgggggaggatggcggcaaaagaaagcaggagacgacgacagcatccaaggtgcagcgggaggctgcggcggccaacatctccatgcgcaagtggctacagcatgtcaaggcatccttcctcagcctacgagatagttcggtcaccttagaggccagtgtcacgaacgcagccgatgatccttctacagtggagccaatgatgacggcagcagctatgaatatcattaaagatgtttccctggataagcttcttaacgatcttgctctctacacggcatcccttggtgatattgaaatctcaatgggtgtcacactacagtttgatctgttgagcctgtctgcacttgtaccagttaaccttgcaacttctgagaatcttcttgttggtcacttgttttcaactactgtatga

SEQ ID NO: 5177 - DNA, 186 bp, Zea mays
  Peptide Sequence Number=SeqID_46956
atggggtccaggcacagtgcttgctctgccgaggctgggtgccgaggtgatgatgatgatgataatgctggtttctattgtgattatgattatggttttctggtattctttccgtttggaaagggtaaagaaggtgtcgaggcggatctccaggagttccaggacttcgacgagtccgaggattag

SEQ ID NO: 5178 - DNA, 963 bp, Zea mays
  Peptide Sequence Number=SeqID_46957
atgcagaaaacatttgaggacttcacagcaaggacaacatttgaaaggccattgatgagtggtgtcgcctatgcattgaaggtattacacaatgaaagacaacagtttgaggaacaacatggatggaagattaagaagatggaagatggagatcagtcccttgttcatgactacaaccttgaaaagcttgaaccatcaccagttcaagatgagtatgcgcctgttattttctctcaggaaactgtgaagcacattatatctgtagatatgatgtctgggaaggtagtaggatattcgaagatcatgacaatatattacgttcctggtcaacagatatgctcagtgctttctctttcaaacttctctttcagatttaaacatgaaccttcactgccatggtctgcaataataatatcaacagctgtagctataattgttttgcttgttggacatattatttatgcaactctgaactcccttgaaaaggctgaacatgattatagagtaatgagagaacttaaaggacaagctgaagctgcagatatagcaaaatctcagtttctagcaactgtttcccatgagattcggactccaatgaatggtgttttaggtatgctgcagatgctaatggacactgaacttgatacaactcagcaggattttgtagtcaccgctcaagaaagtggaaaggtattaataaacttaataaatgaagtccttgatctggctaagatagagtcaggaaggattgagctggaagcagtgccttttgatgtccgtgatattcttgacaatgtgatatctcttttctacgataaatcacaagctaaaggcatagagttggccgtgcttgtatctgaccaagttcctgatgtcctaattggggatccatggcggttccggcagatcattacgaaccttgtggggaattctatgaaggaaagctgcacatctttatattaa

SEQ ID NO: 5179 - DNA, 192 bp, Zea mays
  Peptide Sequence Number=SeqID_46958
atgggtaactcgcaactctcaaattgggttgaaagaaaggtgaggcttttaaaggataagttcaagagtttaggcaaggctcgcaaagtgacaaaatggagaaaaccatccagggataagataagtgaggttccaacagaagagtttgaagtaaaaaattcattattcgaaggaagttacaagaaaccatga

SEQ ID NO: 5180 - DNA, 273 bp, Zea mays
  Peptide Sequence Number=SeqID_46959
atggcgcagtcgaccgttggcagcctgagagccgttggcgcactggacatgtccggtttgacccaatatgccgcattaactacatctggtgccaagccacagaggcctaggcctgagcgtgcaggccgcctacaggccacgcaacatgacgagccgagccttggcccaggctacgatggccaagggtcggcacaaaacagggataacagtgatggtgtcagggctcttcaccgcccacgtcgcccgcctaaagaggacgatgtccctggatga

SEQ ID NO: 5181 - DNA, 450 bp, Zea mays
  Peptide Sequence Number=SeqID_46960
atgcgggctagccggccggcggtgcaccctgtggaagcggcccctccgccgccggccgcggcggcggaggggccggaggcccaggtggagggtgccgcgcacccgcgcggggtgcggatgaaggatccgcctggggcaccagggacacctgcggggcttggtctacgccttgcgcaggccttcttcgcagccgctgcgctcgccgtcatggcgtccaccaacgacttcccgtccgtctctgccttcagctcctgctcaatgcagctcctgctcaatgcgctgatgcacgacatggctgccgagtctgactccttctccgacgacatggaggtagcctcctctgagtcctcgtcctccgcctcctattgcgggctctcctgtcctggtgctcaagctccgccactccatatgcaagcgccgccactccatatgcaagcgctccccgaataa

SEQ ID NO: 5182 - DNA, 282 bp, Zea mays
  Peptide Sequence Number=SeqID_46961
atggctgtcgcacatgaaactcaagcgcatcggcgtactaagcttgttgattttggacctggagcttcgccatcgatcaaggaatatgggcgtggcaacatcggccaagaactcggcctatacaggccggaattcgtcgtcggtgcttgcctccaccgcagatccgctatcctccatggcggtaatcgggggcagaatcccgatttgggctgcttcggcggggacactgccgttctggtgctggtgtcgctgtggctgcgtctggtggagggtgaaacctag

SEQ ID NO: 5183 - DNA, 243 bp, Zea mays
  Peptide Sequence Number=SeqID_46962
atgacgcgctggccccggtgtcaggcacctttttcccttatttttgtggtttttttcggcggcttgtttaaagctgccaccgtttcaattgcggcgccgccgccacgctgggctggagccagcctcgacaaagccgctagagccaccggcaccctcccggcgcccaccgacgctcgctccgcccccaccgcctcgttggctcccacgcccgacatcggccacgccaatctcgccatcggctaa

SEQ ID NO: 5184 - DNA, 2184 bp, Zea mays
  Peptide Sequence Number=SeqID_46963
atgggcgtggacgaggacgaagagcggcggatggacgagcggcccatgcaccagggctgcatggcggggttcctccacctgttcgaccgaccccagatcctctccggccgccgcctccacagctcgcagcgccgactcacgtcggtttccagtggctccgcgactccgtccgagcggtcgatgccgctggaccgggcgccgtcgtcgccggacacgacgccgccggccgcgccgcggccgtcgctgcagctttcgccgctggacctcaaggagggaggcgttggcggtggattcggagcaccgcaggcgtggaggctgccgcggctgtcgctggacagccgcgcggtggtcgacgccaggggcaagctgcggccgcgcgagatccggacgtcggccgccgcaggcgcgccgccgtccccgtccgcggggtgcgcggacgagcgcaggtccccgagcgtcgtcgcgcggctcatgggcctcgacgcgctgccgcacggtctgggccaggcgtccgccgagtccgggcagcacggcggcggcggcgccagcccggccgcgctccggcggtccgcgtccgagcgcgtgccaagggacccggcgcagttccgcttcgtcgacccgtccttcttcgagaggccggcgtcgccgctgccgtcgccgccggtggccgaggaggtggcggtgcggcgggcgccggatccggcggccgtcccgcgcgcgctgcagaggcgcagccgcttcgacgcgcactatgaggtgttcccggagccggcgaagcgcgcggacccggcgtccggcgccgccgcccacggcgagatcgcgctgtacggcgagatcgagcgtcgcctccgcaagcgcggcatcgcggagcctgccagggacctcgagacgctgaagcagatacttgaggcgctgcagctcaagggcctcctccaccacaccgctccggtgcccgcgcaggcgcgcaccacgccgccacccatcgtcgtcatgcgcccgtccagtcgcgcgcagccgcagatgccaccgccggcgcgcctgacgcccgcgcggcggctccgcgtggacgtcgaccgcgcgcgccgcccccggtcgccggacccgtcgccatcccccgcccgtagcccggcgtcccccgctcggcgtggctcgctgtccccccagcgccgtgtctcgccttcgcagtcaccgaagcagcagcagcagtctagtttcaggaagacgagcggtttcgactccgccggcgcccgcacccgcattgcgcgccgcgcggcgtacaacggcattgccttgtcccccgacgacgaggcctcgaccactttctccgacggcggcagcagcagctccgcctcctcccgctgggacttcgacacgcagctggaccccaggacagaccgcggcctgctagagcggtgcgggaagctgctgagcagcatccacgcgttcacccgcggcgacgcgtcgggtgcggaccagcagccaagccccgtgtccgtgctcgacgcggcggccttcctcgcggacgaggactcgccgtcggcgttgtcggcgtcgaagcgagcgatcgacttccgcagcagcagcgtcggacacccaaagccggcgtccgcggtgtccgacccagagcatgacgagtacgtggacccggaggcgagcggctgcccggacccggactacgcgtacgtggccgagctggtccggcacctcggcggcgctcgtgcccgtgcccgtgacccggccgccgcgtaccgcgccgcggagcagcgcaggcgcgagcgcggcggcgaccccgacacgtggcaccttcggcggctgctgtgcggcgcggtgacggaggcgctggagcggcagcggtcggcgtgcccctgggagcccgcggcgtggctccgcggcgccgagctcgtgggccacgtgtgggccgaggtccggcgcgccggcgagcccgtggcgcctgccgcggacgccgacctgaacgacgtcacctgccgcgcgatccggcgcgacctcgccgcggacggcggcagcccgtgggggtccctgcggcagcgtccgcggcacggcgcggatgtcgccgacgcggtcctgcagatcgagcggctgctgttcgtggacctcgtcgcggacaccatccgcgagctcgccgacgccgaccggcccctgccccgccgcaagctggtgttctga

SEQ ID NO: 5185 - DNA, 513 bp, Zea mays
  Peptide Sequence Number=SeqID_46964
atggccggcgaaggtccggcgcaggtggccggcgaagatggccggcgaaggtggccggcggcggcggcgtcgggtcctggcggcggcggcgtggagtgtagaacgaaggagcagccagggatagagaggatcgaggaccatttgtccgtgtggttttgtgctgtgcctgtatctgtggctgtggcggcacttatgagaggaacagacggtctgatgaggatgatgacgatgaggactgagatacggaaggaggtgaccgtggaggagcaggcgtttgttgcagtgccagaggtcaccgtggatccgcgggtgccacagagttggctctcgctggacgcggcggccctgcccggcgcgtggacagccgtggaggtgcggtcaccacagatgagaagtccgcgcgcgtccgccgggctcggcgagagaagagccgagagaacgcagaggaaccaggagacagagacgaacgaagaaacccagggagagacaggggcaattttgactcttagatga

SEQ ID NO: 5186 - DNA, 465 bp, Zea mays
  Peptide Sequence Number=SeqID_46965
atgacggtaggaaggtcagcctcaggagccgcctggccgaggtggtgggccgtgggcgcaaaggccggtggagaggtgttgcacggggctcgagctcagcgtggagaatgggaagaacagggacaccgcccaatgtttcttcccggggccaaaaagctttggggagcggcgaatggggacttcaagaagcgaagcgggatctggtggatttcatcctcgaggacgctagcgccgacggagcggctctccttgcgagcggattggaggccgcagaacacctctgctcctcgaggacaatgtcggcggtggagcggctctccattccctcacgaggcggatacgcgcctccatcttggcgtccctagactccgcctcgagcgcatggaaggcaacgtcgagcgccgagcgggagtgcttcctgaccgcggcggtgtcggtgacgcggtgctccgcctcctccggtga

SEQ ID NO: 5187 - DNA, 366 bp, Zea mays
  Peptide Sequence Number=SeqID_46966
atggcccaaacagagaagcgcgcagggcacgactgggtgcagaggcgaggaacagggacggcgcgggtccgggcgagcgcacggacggcagaggaagctgccttgggcgagctgaaggccgggcacagggaggcgcgcgttggagcagcgatgcaggcgaccgagcgagcaccagagaagggcgatggtggccagcatccatggcgagcagaggcggttggagagggcgtcgaccatggaagatggggggagaaagaggaggacgaccagagagatggagaggaggccgagctgagggggagagaggagggagtggctagggaaggggctgggcgttggccaacagggtacctgaaagtcgcctag

SEQ ID NO: 5188 - DNA, 180 bp, Zea mays
  Peptide Sequence Number=SeqID_46967
atggcaaggttgtgcctgacggtggcggagcatggtcggggacggtggccgggctctaccggcggcggattcaggcgcagaaggcctggcaacggggaagctccggcgagcttgaagaatgggtgcgcgcagctcggggttttaaattcaaattcaaaccaagtttcaaattcaaactaa

SEQ ID NO: 5189 - DNA, 1173 bp, Zea mays
  Peptide Sequence Number=SeqID_46968
atggctcccctcttcgccgcggcgtcccacgcgtccctcctccccctctcctccctcgaccgccccgccgccggccacctagtccgtggcaccctcaggccccacacctcgagcctccgcctgcgccgccccccgggggcaaccgggcgcggccgcgggcgtggccgagggggcatcccagacgagtggggcgagcgctcgccgccggacaaccccgagccccccgcgcagcccgatcctcccatcgacgaagacgagtggggccgcgacgactctgccgagggcaactcacgccctatcgtcgtcgacgagtggggcgagcccggggtgcctgagcccgagccgccctccgccgcggacccgcctagcccctccgcagacgacgactggggaaaggagccggaggcgccggcgccggcccctgctccggcggcggaggaggacgagcaggaggtgaagagggaggagctcaagcggtgcctggtggacacggtgtacggctccgacctcggcttccgggcgtccacggaggtcagaggtgaggtcgtcgagctagtcacccagctcgaggcggttaaccctactactgctcccgtcgagtcgccggatctcctcgacggcaactggatcctcatatatacagcatattctgagcttctgcctattctagctgctggggcaacacctttggtcaaagtaaagcagatatcccaagaaattgactccaaaatcatgacgatagtcaatgcttcgacccttacgactccattcgcttcattttcattcagcgcaaccgcctctttcgaggttcaaagcccatcaaggatagaggtccaatttaaggaggggagctttcagcctccgacaatatcatcatccgtggatctacctcaacaagttgatatatttgggcagaagatcagcctggggccagtccagcaggcactgaatccattgcagcaagcatttgctagcattgctgggtccatttctgggcagccacccctcaagcttctactcaccgaggtggcagaaacactccagatcgcgggaaatgaagactgcaagggagactgtgctgctaacaatgccgcgtttacagtttatgttgcaacaaaaactttaaaccaatgtagctccaaaattgcagacttttcagtttatgttgcatga

SEQ ID NO: 5190 - DNA, 375 bp, Zea mays
  Peptide Sequence Number=SeqID_46969
atgggcaagagcaagaaaggtggaagttcctcacaccattccagcgataagcggaagcgcgagccgactcctccctcggaggacttcggcgattccgagtactcggaggaggagttctcctccgagtccaaggaggtgtggacctacatccgggctatcgagcgtgccgggctcgagggctcggatgagtcggaggtctccttggacgaggcgaactcctcggactcgtccgaggagggtggcagtgacggtgatggcgacgacgacaacggaggcgacggcgatggcgacggcgacggcggcgaaggtgacggcaagggcagcaaaggtgacggcaaggacgacagcaagggcagcaacaaggccagtggctag

SEQ ID NO: 5191 - DNA, 1155 bp, Zea mays
  Peptide Sequence Number=SeqID_46970
atggcggcagggttcattaaagaggtattccatcccgaatggcttgccaaccctgtgcttgtgagaaagaaaggagggaaatggcggatgtgtgtagactacactggtctaaacaaagcatgtccaaaggttccctaccctctgcctcgcatcgatcaaatcgtggattccactgctgggtgcgaaaccctttctctcctcgatgcctactcagggtatcaccaaatcaggatgaaagagtccgaccagctcacgacttctttcatcacacccttcggcatgtactgctatgttaccatgccgttcggtttgaggaatgcgggtgcgacataccaaaggtgcatgaaccacgtgttcggcgaacacattggtcgaacggtcgaggcctacgtcgatgacatcgtagtcaagacgaggaaagcctccgacctcctttccgaccttgaaacgacattccggtgtctcaaggcgaaaggcgtaaagctcaatcccgagaagtgcatttttggggtcccccgaggcatgctcttggggttcatcgtcttcgagcggggcatcgaggccaacccggagaaaatcgcggccatcaccaacatggggcccatcaaggacttgaaaggcgtacagagggtcacgggatgccttgcggctctgagtcgtttcatcttgcgcctcgacgaaagaggcctgcctctgtaccgcctcttaagaaaggccgagtgcttcacttggacccctgaggccgaggaagccctcgggaacctgaaggcgctcctcatgaatgcgcccatcttggtggtcagtgccgcgatcgtggttgagaggcgagaagaggggcatgtattgcccatccagaggccagtctacttcatcagtgaggtactgtctgagaccaagatccgctacccacaaattcagaagctgctgtacgcggtgatcctgacgcggcggaagttgcgacactacttcgagtctcatccggtaactatggtgtcatccttccccctgggggagatcatccagtgccgagaagcctcgggtaggattgcaaagtgggtagtggaaatcatgggcgagacaatctcgttcgcccctcggaaggccatcaagtcccaagtcttggcggactttgtggctgaatgggtcgatacctag

SEQ ID NO: 5192 - DNA, 180 bp, Zea mays
  Peptide Sequence Number=SeqID_46971
atgaaggagaaggtcatgcaagttcatgctgatgatccagaagtggtgaagggggactttaccgaggggccggagaagcaagggttaggattagaaataagtaataacgacatcggagtccagaagatagttcttcttacaatgagttgcacaatcaatgcggataactttgggagctaa

SEQ ID NO: 5193 - DNA, 267 bp, Zea mays
  Peptide Sequence Number=SeqID_46972
atgacgacgggcacaggtgagaacagaggaggaggaggagggaggggaccggttcggcaggggtcgttcgcgctgtcgtcgccgctgtcccggaagacggtagaggaggtctcggccgagatcagccagggcccagtggacttccaggccagcgcggcgtcgcagcccgtgcgggatgcgaggcgagaaagagcacctaaggtcacagagatcacattgtcaagccagcaactcctaagattaatgctcagggtaaaaacaaattaa

SEQ ID NO: 5194 - DNA, 309 bp, Zea mays
  Peptide Sequence Number=SeqID_46973
atgacgacgggcacaggtgagaacggaggaggaggaggagggaggggaccggttcggcaggggtcgttcgcgctgtcgtcgccgctgtcccggaagacggtagaggaggtctcggccgagatcagccagggcccagtggacttccaggccagcgcggcgtcgcagcccgtgcgggatgcgaggcgaggtgtgggtggcccattgactcacgcatctgcaaggtggagacgggtgtcttgtggggctagcatgtcagttagagataggcgaggacatggccgcgccagggcgcccacgctccactcttaa

SEQ ID NO: 5195 - DNA, 540 bp, Zea mays
  Peptide Sequence Number=SeqID_46974
atggagtttcccaagcgagggcgagcttttctccaaggttccctgcgaaggagccccaaggcgacgatacctggagccgccacgggggccgacgagaacgcaagctctaagcatctcgtgccggtgggggccgcgtcgccgaagaggaagaaggtgctcggggagaggaacgacagcggcgtcgggggcatggagggcgccgcgtcggcaccagtgcagcagccaaagctcgcgttgagccccccgacgcccgcgagccgcggcgcggggccgtacgacccgaagacgaactacaccacgccgcggccggcgttcctgcgctacgaccccgaacggcgccgcgagatcctcctccgggtgtcgcgtgcggcagaggtgatgtacgacgactgctccagcaccacatccggcactgcggcctcggaggaggacggtggctcgtccttggcctcggacgcggcggcagactcccttatctcgtcgccgccgctacggggggggggggggggcgtgcgcgggtttcgcggcgtgggctggtga

SEQ ID NO: 5196 - DNA, 624 bp, Zea mays
  Peptide Sequence Number=SeqID_46975
atggacccgtacccgtacccaccggtcgtagctcggggacgggcggtcgccggtcgggcctcgggctcggagacgccgcaggagcgcaggcgcgccgcgcgcagcttggccgcttggggcgcctgggagtttggcacgccgcttggccgctcggggcgcagcttggccgctcgggccgctcggggctcctggcggaggcggacagcgcactggcggctgggtggggctgggctctggccgcctgggagcctaggagtggcggctgggggcgtgccggcgtggggtgctgctgcgctgggtgggagcctgggtcctggcctcctgggagtggcggctggagtgggcggccgggacgggaactcgggaagggaagggaagcgcgcatttaatgcgttgcagtcgaccatcgcgcgcgaagtagtcattgctccgctgtcacaccggacagtccgatgtgcaccggacgctgtccgcggagctcctctgaaaattcccgaaggtgaagagttgggcgtcgagttccctggtgcaccggacactgtccggtggcacaccggacagtccggagaagaacaggtggtcgaagaggagccgcctaactccgaggctttcgacttcatctag

SEQ ID NO: 5197 - DNA, 360 bp, Zea mays
  Peptide Sequence Number=SeqID_46976
atggcagcagacgtactggtgactggtggtgctggagcaatgcagtatgcagggccggatcggaggaaagaagaaagatccgtcaggggaagaaacgaacaacagttagacgacaagaagcctcctgtatttccgccggtggccacggaacagaattgcagttccctgctgcgcctcagtaatgaagatgatgaagagacaagagcgacaccggcaacaatcatcgagaagaacacgatcaatcacgtgaagatgctccctaaaaaccttattcaccctcctcaagtacaggatcttgaagacgatgggttccgaaaacctaccctctcgattgcagatgcacgtcaacgctcggggtga

SEQ ID NO: 5198 - DNA, 180 bp, Zea mays
  Peptide Sequence Number=SeqID_46977
atgaaggatgccaagcccatcaatactcctatggggataaatgggcatctcgacctcgacacgagagagcaccagaccgtctggtggttcatcgaaccgtctgacatggttcaacgatcacctgcaatggtcagaacggtaaccttccagggcactattcatggtccagtggcgcactag

SEQ ID NO: 5199 - DNA, 741 bp, Zea mays
  Peptide Sequence Number=SeqID_46978
atgttgaagcagaagttaaacctgaagaacctgaaaacccgaaagaggtgccagctgaaggtgaagaagccggtgaagaaggcaacgagcaacaagattagactgtccctgcccacattcgtacccacctgggccgcggatcggcccatcgcgcagctatcgtcgcgcccgcccacggatgacgtcgatagcacggaccccattcatcagtcctacgcgcgccacgcgcgcctctaccggtgggaccttgatgtgcccgtcgaccttggtgtcccggaatccttcgagactgtgggtagcagagaggtatcgagcattcgcaaggaaaaggcggtgtgggagatcgtggcaggcttggagcaaattgatcactggagtagggaggccgtcgcggatcgtgtttccccgtgggctggtgccggcatcacgtgcataaagttcacattcacatataaggaaaatgacccttggggcaattcaagaaacgcgcccaacgaactggccgctctcgggaaaacgaagcgctcctcggctaaaattcaccggactgtccgactgtccagtgtgccatcggactatccagtgcaccacaaggacatgcaaagtcaacagtcaactgctccaaaccccaacagtcagctgacgtggcgtgcaccagacaatgaacagtgcagtgtccggtgcgccaccggactgttcgatgtgctcgtcgacagagaactcagccaacggctagaatag

SEQ ID NO: 5200 - DNA, 300 bp, Zea mays
  Peptide Sequence Number=SeqID_46979
atgaccgacgttcacccggtgggggtttccccgattggaggtggaagcagaacgatgggggcggttattatcgatgtttgtgcagatcggagcatggtccacgggggggaggctgaccgcggcggccacaacactccgatatatatacccgcgtgtacccaataccctacgggtacgggcatgggtacaatgttttacctacgggtacagttgcgggcgggtatggctaatactcgtgggtacggttgcgggcgggtatctattatacccgacccgaatccgacccgttgccatccctag

SEQ ID NO: 5201 - DNA, 597 bp, Zea mays
  Peptide Sequence Number=SeqID_46980
atggcgccaaactaccttgaacacgccctggcgatgtttgagaaaatttctcaaatgtttgacacgatcttggcgcagattttcctcggaacttggtcgtgtgacactggagatttggcaacgcgacaactccctgtccatagcccaaaaccgcacaacgtccacacacaaacgacagagctcagtcgggggaacaaatcctacacggcgatcttgcccaaattcgcaaagatctgcgccctattggcattagaacaggagcagaagaaaccatgccacgtgctcgaccgcgctgacatgcccactgcacgccagcccgcgcacacgcaccaagacatgcacgcccgcgcgcctgctttggtccacaccacccgtacaccgcgccgcgcctttaaaggcccactccggacgcgcaacacttcactccgcgcttgccctcactgtcccagcctagtccttagcttcggcaagctctgcgccgcccgccaagccacccgagcgctcggccgccgtggccagcgcttcccaacgacccccagcctcgtcctagcccctggacggcttccccgagaggcggagaagctttccaaagcttga

SEQ ID NO: 5202 - DNA, 672 bp, Zea mays
  Peptide Sequence Number=SeqID_46981
atggcgaagccgactacacctctagttcctctgattaatcaactaagggcatccattccaccctcatggttgtactgttttcccgggtggtcatccaacgaacaggtccttacggggagtaaaaccgaaggggtatcgggtttcctcggccgttggatctcagatcaacgaccgagattagaagtgggggtgagtgtgcgggcgcgcaggtgcctgacgggcagggcccatgggccagcggctcgggcggggcagggggtgagcgacaaaacgtcagagcgcaggtgcctaacgagtggggccacagcagggcggggcccgcttgtcagcggcacggggcaagtgcaggcgtgggcgcgcactgacgggcggggcccgccaggcggcgacccagcacggaagggagagggtcatcgtggtgctgatgcgtgggacccgaggtccactagtcagtggccacgcaaggggagaagagaggggttgcggctgggagactgtaggtgggtcccccttatcagggttgtcgtctacctcggccgcgcgctcggcgtgagcgccatgtccagagtcggcgaccttacacaggcaaaggagggcacggggcgttggaggtttgctaggggacctcggcacgacggcgtggtgtcggtgccggtgatcaccgacggctaa

SEQ ID NO: 5203 - DNA, 927 bp, Zea mays
  Peptide Sequence Number=SeqID_46982
atggccgccgccgcaggctgtgcaagcgccgccgcgtcgggttctcaggtcgagaaggatagcgtggtcgttgatcatggagcggacgctccagatttgagggagacactcctggtgattgttcacgcctgggtcttggtgcccctaaaacccgggtgtgacagttcgaaggctggcccctcggaagggttcgacagccgcctcagagcactcgggctccacgcccactactggtcagaggttcgaaggctagcccctcggaagggttcaacagccgcctcaggccactcgggctccgcgcccactactgatcaggggttcgaaggctggccccccaaagggttcgatagccgcctcagaatacgcagagcgagggatgactctgggtacgtccgatacatggccgaggctcaggctacgctcccgagtcgacagggccgaagtgaccgcaatcatttcgcccctccactgactgacctgacaggaaaacagcgccgcctgccctgctccgactgctgtgccacccgccaggggctcggcctccgcctcgacctcagaagacggtttccgcctcgcccgaccctagggctcggactcaacctcgaccccgaaagacggtctccgcctcgcccgaccccagggctcggactcaacctcgaccccggaagacgatctccgtctcgcccgaccctagggctcggactcaacctcgacctcggaagacggtctccgccttgcccgaccccagggctcggactcagcctcgacctcggaggagtcaccgcctcgcccgaccttgggctcggaccgaccacgttagaggggccccctacggaagcaaggatacgtcagcaaggacccgacagccccgacagctgtacttctacagggtttaagcgctcctccgacggccacgacatcacatga

SEQ ID NO: 5204 - DNA, 513 bp, Zea mays
  Peptide Sequence Number=SeqID_46983
atggggtcgtcgatacgtagccttctcaccggcgaggttgggccggagtccacccagcgttgtgccttggaacgcccggctgggagggacggctcagcagcagcgaacgacgaagaaatagggccaagcgcgcagggagaagaggaggaggccgccgggaagggagcggcggcccgggaaggtattcgccgagcccaaggtgggtgtcgacgagaggctttggggagggcaaggggcgacgccggcaaaggagggggtggaagacgaagaaatagggccaggcgcgcaggaagaagaggaggaggccgccgggaagggagcggcggccgggaagaaaaaggaaatggtattgggtgggggaactaccggagcaagaaaaaagcagttattcccaatataacagttttatggggacaaggggggtattggggtactgctggcaggggcagacctagttggtggtccatatgggccacgacacaccctaagaacacaaaagagcagttagcttag

SEQ ID NO: 5205 - DNA, 213 bp, Zea mays
  Peptide Sequence Number=SeqID_46984
atgggcggagaggccacgaatgccggcggcgggggtatccgcgcgcggatggagcactacctttacagtggcgagaagaagcacgtcgtcgccggcatcgccatcttcgctgccgtcttcggcgtcccatggtacttcatgacgcgaggtgcgcttcggctaaggtcctattcgacacttctgtgtgacgctgcgcgggttcatgggaactag

SEQ ID NO: 5206 - DNA, 885 bp, Zea mays
  Peptide Sequence Number=SeqID_46985
atgcgcccccctcccccagatccgtttgtctcatttgatttctcccgcgcagtaacctccctctccctcttccacctgtctctctctccccgtggtgccctagggtttggagtcgagatcgccggagtttggatccccggaggtgagtttttcccctccccttcccttttctctctctcccccctcccattcttcttccccgcgcgaccctcctgcccgcacgccctgcgccgccccggtccccgcgccacccgcggccgcgccctccccgaccccgcgctcccctttccgtcccgcgccccgacaccggcggctcggccgcgccctcccctccccgtccagcgcccggcgagccctcgcggccgcgccgcgccattcctgtgccctccctgccccggcgagccgcgccgcggcagcctccccgcgccacccctcgaccgcgccctgctccccgccccagcgagcccccctccccggcgagccgcgcccccggtggcctccccacgcgcccagcgagcctctccccgcgccgcccctcggccgcgccctgctccccaccccggcgagccctccttccccggcgagccccctcccccggccccgcgcccacggcaccctgcgcgcccgcgcccgacgccggcggctcggccctgcgccctcgcgcgcccttgccccgtcgagcccgccctcgccccgcccagcccgccctcgccgcgagcccctgctccccggtcgtgccctggtcgctcgccctcggccgcgtccctgcccgcacccgtgccccggcgactcgcgtcccgcgcgcctgcccttaaccccgtgttagttgacgtgctgcgtcgcgcgcttcgtcgcacgacgattctttttatttatatttattaa

SEQ ID NO: 5207 - DNA, 393 bp, Zea mays
  Peptide Sequence Number=SeqID_46986
atggcgttgataatgggcggatttggttccatcaaagcttattggtgttgttttagcagaccaactgggaaaagagaagtgattccctcatggttgtgtccttcacaaaggaaggatgtgaagccacactattatcaagcaacaaaaccagagttgtgtgacacaattataacaaaggaatcatcacccattagcacactaaaattggcgcacatagagaacgcacctgcaaagtggtatcatttgaacatagttcagcaaagggccgacacacttgagtcactcctcaagctctatgcaaagcttctggaggagaggctcgatgagctcgccgacgtttttcgaccatttggtgagagagccgtgtcatccagagagatgagcatacaatga

SEQ ID NO: 5208 - DNA, 2517 bp, Zea mays
  Peptide Sequence Number=SeqID_46987
atgggggctattggaggcaatgagtcggtgcagtgggataaagtggctggagctgatgctgttaatggcggcggaacaagtgtgggcaggatggacaggatacaggtgctggtcaggctgaggccactgagcgagaaggaggttgcgaggggagagcctgcagaatgggagtgcatcaatgacaccactgtcatgttccggagcacgttccctgatcgacccaccgctccgacggcatacacatttgatcgggtttttcattctgactgtagtactaaagaagtctacgaggaaggggttagggaagttgccctctctgtagttagtggcattaactcaagtgtttttgcatatggacaaacgagtagtggaaagacttataccatgaatggagtaacagaatatacagtagcagacatatatgattacattaataagcatgaagagagagcatttgttctgaaattctcagcaattgaaatatacaatgaagctgtaagggatcttctgagtgcagaaaacactcctcttagactctgggacgatgcagagaagggcacctatgtggagaaccttacagaggttgtgttaagggactggaaccacctcaaggggcttatttctacaattgaaagttctgcacgggagttcctagggaaggacaagtcaactacacttgtcgctagtgctaactttgttgatctagcaggaagtgagcgtgcatctcaggcgttgtctgctggcacgaggctaaaagaaggctgccatattaacagaagtttgcttgcccttggcactgtcattaggaaactaagcatggggagtaatgcacacataccatacagagattcaaagctcacacgcatattacaaccatctttaggaggtaatgcaagaacggctattatctgtacactgagccctgccactagccatattgagcattcaagaaatactttattatttggaagttgtgcaaaggaagtagttacaaatgctcaggaagttgctaggttggagagtgagttgcggcaaccagcttcaaattccagtcttgaagcattagtaaaggaaaaggataaccaaattagaaagatggagaaagaaattaaagaactcaagtcacagcgtgatttggctcagtctagattgcagaatttgctggagactgttggggaccaagtgaagcactcgggctcagggaagcgttcagcccgcagtcctccatcaattggaatatccccaggcatcagcagggatgatagttctcagatctctcacgatgattcagatcttttcaaggacgtgcgatgcattgggaccagtggaacaggaggaaatgaacagttggacctgtcagctggtgaaagcagtagccttcaaggtttaaacatgaattctagtttgcatggaagcggttcaaatgcatcagtgaattctaggcgctcaaggctccttagtgaatctcctatcacattggagcagcatttggagaatatcaaaaggccttttgttagtcttggcagagatctaggatcgtcgacacataactcatcaggctccagaatacttggtagaagcaggagctgtagatcacttatgggttctaccatgtttgatggcatggagatggatgatggcacccctctgcatagaagtttggttggtttccctggaaggcctgaagggaatcatagaaggggatcaacaccgaaccatgacgcagaaagtgaaactctttcaagagcaggatccgtagtttcaaccaagacaaatgctgcatgcgatgcagagtttactggtataggtgaatttgttgctgaactgaaagagatggctcaggttcattaccagaaacagttaggcaatcagattacaaatggagaatttgtagacataaagaacattggtttggacccgattgctgatgcttcgcaatcaccttctcgctggccattagaattcgagaagaaacagcaagagatcatcgggctttggcacgcgtgctgtatttccttagtccacaggacctactttttcttgctattcaagggagaacaagctgattcaatctacatggaagtggagctccggaggctatcattcctcagagatacctactctcggggaaacacccctagcaatgcggtggtaggcagcttgaactcttcccccgctgcgagcgccaagaagctgcagcgtgaacgggagatgcttgcgaggcagatgcagaagcggctcacggcagaggaaagggagcgcctgtacaccaaatggggcatttcgctggactccaagaagaggaagctccaggtcgctcgccggctctggaccgaggccgaggacctagaacatgtcagggagagtgcctcccttgtcgccaagctgatcgggctccaggagccagggcaagtcctcagggagatgttcgggctcagctttgcgccgcagcagcagccgccccctcgccggcgatcctccaatggctggagatacgggatcccttcgttcggctga

SEQ ID NO: 5209 - DNA, 1890 bp, Zea mays
  Peptide Sequence Number=SeqID_46988
atggccgacgaggcgaaggcgaagggtaacgcggcgttctcggccggccgcttcgaggaggcggcgcggcacttcacggacgccatcgcgcttgccccagacaaccacgtcctctactccaaccggtcggcggcgctcgcctcgctccaccgctactccgatgctctcgccgacgcgcagaagaccgtcgacctcaagcccgactgggccaagggctactcccgcctcggcgcggcgcacctcggcctcggcgacgcggccagcgccgtcgccgcctacgagaagggcctcgagctcgaccccagcaacgagggcctcaaagcggggctccaggacgccaagaaagccgccgccgcccctccgcgccgcgggtcgtccggccccgacgccatcggccagatgttccagggccccgagctgtggagcaagatcgcgtccgacccctccacgcgcgcctaccttaacgagcccgattttatgcatatgatgcgcgaagtgcagaggaaccccagcagcatcagtatgtatctctccgatccccgcatgatgcaggtgctcagcctcatgcttaatgtcaagatccagagacccgaggcctccgagccgtcgcagtctaccccgccgccgccgaagcagcagcagcagcagcagacgccgccttctgagacgaaggctagggatgtggagcccgagcccgaggcagagccgatggatttgactgatgaggaaaaggaccgcaagcagacgaaagctgctgctcagaaagagaaggagttaggtaacgcagcttacaagaagaaggacttcgaggtggcaatccagcattacaccaaagccttggaacttgacgacgaggatatttcctatctgactaaccgagcagcagtctacattgagatgggaaagtacgatgaatgcatcaaggactgtgataaggctgtggagaggggaagagaacttcgtgctgatttcaagatgatttcaagggcactgacaagaaaaggaacagctctggtcaaacttgctaagacctctaaggattttgatattgctatcgagaccttccagaaggctctgactgagcatcggaacccagacactcttaaaaagttaaatgaggctgagaaagcaaagaaagagttagagcaacaagagtattatgatccaaaattggcagatgaggagagagagaaaggcaatgagttcttcaaggagcaaaaatacccagaagcaataaaacactacacagaggctctcaagagaaacccgaaggatcctaggttggtcattgcttatgggcctggttggatgcttcccccgatagccttgctgggcaaggcaatcttgccagtggaggtttatagcaatagggccgcctgctacaccaagttaggagccatgcctgaaggtcttaaagacgcagaaaagtgtcttgaacttgaccccaccttcaccaaagggtatacgaggaaaggtgcaattcagttcttcatgaaagaatatgacaaggccgtggaaacctaccaggctggcttgaagcatgacccgaacaaccaggaactgcttgatggtgttaagaggtgtgttgaacagatcaacaaggccaacagaggtgaaataagccaggacgaattgcaagaaagacagaacaaagctatgcaagacccagagatccagaacattcttaccgaccctatcatgcgacaggttctaatagatttccaggagaacccaagtgcggcccaggagcacctgaagaaccccggggttatgcagaagattcagaagcttgaggaagatgatggtgatatcgagtttgtggagttccctaagggggtggaggttgaaggaatatgtgctagccttttggttttggtggcatgcttttag

SEQ ID NO: 5210 - DNA, 887 bp, Zea mays
  Peptide Sequence Number=SeqID_46989
cagctagcactgttgtgtctaagctcaagcacagtctcaaggctccaactatgcacctgctcatcagcggcctcgtcgcggccgcactcttcctccacgtcgacgccgcgcggggcacgttcgtgtacgcagggtgctcgccgtccaggtacgcgcccaacacggccttcgagagcaacctcaactccctcctgtcctccatggctcccaccgcgtcctccggcgccacctacagcaccttcaccgcccctggcgccggcctggcggaggccgagtcccccgccgcctacggcctgtaccagtgccgcggcggcctgcgccccggcgagtgcgtggcgtgcgtgcgcgacacggtggcgcggatcggcgcggtgtgcgccggcgcggccgcggcgtcgctgcagtcggacgggtgctacgtgcgctacggcggcgcctccgcggcgtaccacagctgcggcgccggcaccagcggggacccctggttcctgaggtcccgcgacgccgtcctgtcggagctgcagggcgtggacgccaccgcggcctcgggctcgggctcgggcgggtacaaggtgagcgcctcgggccccgtgcggggcgccgcgcagtgcctcggcggcatcgcggcgggcgactgcgccgcgtgcctggcgcaggcggcggcgcagctccgcggcacgtgcggcgccgcgctcgccgccgacgtgtacctggtgcagtgctccgtgaggtactggaccgacggcgccaaccagctccggtcgtcgcaagataatccggaggatgacgctgggaggacactggcaatagcaattggtatctcggccggggtagcagcactcgtagtgttcatctctttcctcagaaaagcatgtgaggcacactag

SEQ ID NO: 5211 - DNA, 272 bp, Zea mays
  Peptide Sequence Number=SeqID_46990
ccgtccagggcaccacgcccacgctccagtactccacggaccacggctccaactcggcagctcgcaagacagaccaagtcccgccgccggccgcccgcgtccaggcagccgccagcccgctagccgcccgcgtccaaggctccaggcaaccgccactccaccagccgtctcccaggtacgccgccgctgcagatgtcttcgtcggcaggggacgtatcatcctctccggagacgaccaactcagacaccgcaaggtgagctgtgagcactga

SEQ ID NO: 5212 - DNA, 231 bp, Zea mays
  Peptide Sequence Number=SeqID_46991
atggatcctaagggaaaggggatggttgtcaacgacgaggagaaggagttcctcttcaacgagctaagagatgacaagcccactaactcaggctcgagtcacaaaaagagtgacgggaagaagaagaggcgcatcaagaagatcatctactacaacagcgatgtgtcttcctcttcaccaaggggcgacgacgatgactcctcgtccaagaaaaagacgggacgaatataa

SEQ ID NO: 5213 - DNA, 408 bp, Zea mays
  Peptide Sequence Number=SeqID_46992
atggtcaggcagcaaaccgcaccaaaagttgtgaggcattatctatcaaaattgtcactcttcccatatgaactttttgtgaagctctacagcaaggttgagttgcacccttttggtcttcataaccttggtaacagttgctatgcaaatgctgtttttagtgttttatgtttacttgaccactcacaacatatcttttggaagggcttcacgcaaacaactgtaattctccactactataaatgctccaaaaagctggagcagctcatacttatacagaatgttttgccattaagtgaccaattattatggatctatgtgtggatggaagaaaaaacaattgtatattatatgtgttgggatgttttacatgtggatgagctttttttgcccttatggcttatttag

SEQ ID NO: 5214 - DNA, 1569 bp, Zea mays
  Peptide Sequence Number=SeqID_46993
atggcgagtgacgccgcgcatggtagctcgctggacggggtgacgccgtcgagcaagttcgacctgccggtggactcggagcacaaggccaagaccatccgcctgctctccttcgcgaacccgcacatgcgtaccttccacctctcctggatgtccttcttcacctgcgtcgtctccaccttcgcggcggcgccgctgatccccatcatccgggagaacctgggcctgaccaaggccgacatcggcaacgccggggtggcctccgtctcgggcgccatcttctcgcgcctcgccatgggcgccgtctgcgacctgctgggcccgcgctacggctgcgccttcgtcgtcatgctggcggcgcccgcggtgttctgcatggccgtcatcgacagcgccgcgggctacgtcgcgtgccgcttcctcatcggcttctccctcgccaccttcgtctcctgccagtactggaccagcaccatgttcaacatcaagatcatcggcaccgtcaacgcgctggcgtcggggtggggcgacatgggcggcggcgccacgcagctcatcatgcccttcgtctacgaggccatcctccgctgcggcgccacgccgttcgccgcgtggcgcatcgcctacttcgtgccggggatcatgcacatcgccgtgggcatccttgtgctaaccgcggggcaggacctccccgacggcaacctccgcagcctccggaagcagcagcagcagcagcagcagggtgacggcggcgatgccagctgctgccgcagggacagcttctccagggtgctctggcacgccgtcgccaactaccgcacctgggtcttcgtcttcgtgtacggctacagcatgggcgtgcagctcaccaccaacaacatcatcgccgagttctactacgaccagttcgagctcgacatccgcgtggccggcatcatcgccgcctgcttcggcatggccaacctcgtgtcgcggcccctgggcggcgtgctctccgacctcggcgcgcggtactggggcatgcgcgcgcgcctctggaacatctggatcctccagaccgccggcggcgcgttctgcttctggctcggccgcgccagcgagctcccggcctccgtcaccgccatggtgctcttctccttctgcgcgcaggccgcctgcggcgccaccttcggcgtcatccccttcgtctcccgccgctcgctgggcgtcatctccgggctcacgggcgccggcggcaacgtgggcgccgggctcacgcagctgctcttcttcaccacgtccagctactccacgaggaagggcatcgagaacatgggcatcatggccatggcgtgcacgctgccgctcgtcctcgtgcacttcccgcagtggggttccatgctcctgccgcccagcgccgacgccgacgaggagcggtactatgcctccgagtggagcgaggacgagaagagcgtaggccgtcacagcgcaagcctaaagttcgccgagaacagccggtccgagcgtggcaagcgcaacgccgtcgccgtcctcgccacggccgcggccacgccggagcacgtcgtgtaa

SEQ ID NO: 5215 - DNA, 510 bp, Zea mays
  Peptide Sequence Number=SeqID_46994
atggagcgcaggaaggccatcgtcgccaggatgcgggacctgctcgcccgggccgcctccgcgcaggcagcgcactgcaggctccgccgatcaaccgccgccaccaccgccaggaaatggaagagggcggtaggccgaatccagaagaggggggcctgcaacggcgaggacggccatgcgcgggaagaggaagaccacggcgcgctactggcctcggcgtcgtcgtcgtccatctccagctgcaacggcagcggcttcagctgcagggacgccaccgctgccgccgatgcggaggcatgctgctcgtccactgcggtcagctgtccgtggccggcgacgctgcggctgtcttcatgtggcagcggctcgtggtcgtcggacgagaacgacgacgacgacgtcaggatggctcactgggtcaccaccgattctgactgtaagtatatacaatcctgttccctggtcacaaattcaaaaccaaaattttcagttgtggtgttggagctctag

SEQ ID NO: 5216 - DNA, 6627 bp, Zea mays
  Peptide Sequence Number=SeqID_46995
atgcagcccagcgggggggcctccggcagctcccggggctcgccggcgtcgtcgccgcacccggaccaccagcagccgccgaccccggcgtccgcgcagcagcaagcgcagcaactagggtttaggggccagggaatgatgcatcaccatgaacagcagcaagccttccactctggtgcgccgcatggcatgatgggaccaggcggcgtgaacttccctcagtcctccggtccagtgtcgtccttccagggtcagaggaatctgccgctgtccagtggtggaccgcagggcatggttggaggtcagatgcacaaccaggttgcgatgcagcaacagttcctgaagcttgcgatgcagcagcagcagcagcagcagaaggcggcccaggggatgctcctccagcagcaggccaagatgaatatggcgggttcatcatcaagagaccaggacatgcttaacaaccctgccaagatgcaggagcttatggctcttcatcaggcccagatgtataagcggcagtgtgagcagaaagagcaggggcagtcaagtggtagtgagcaaagaagcggtgatatgaggccacctatgcctcctcaaggagtccctggacagcagttgccatcaatgggtatgatcaggcccatgcagccaatacaaggccaggtaggaatgggcagcgctggtgggaacccgataacaccaacacagtttcaagccatccaagcctgggcaaaagagcacaactttgatctgtccaatcctgcaaacataagtgcaatttctcaactcctgcccatctggcagtccaacaggatggcagccatgcagaagcagaacgaggcaaacatggctgcgcagcagcagcaagcattgccctctcaggtgaacagtgataccccagggcatgtcaatgctcccagccagggtgccctactgaagccccggcaaccccttgcccccagctcaatttctggcggggaagaggctaaggtagtgaattcgagcaacttgcagttgcaacaacagttccctgtgcataacagggatggttcaaatgaaagggctgtgaggtcacttatgacagggggcaatggtgcgcaaacgacgcatatcccccaaagttctggacatgtaaataagattcccgagcaacccaatccaaaaaatgtgcttgcaaattccgaagcaatgcagatgcagcatgtgagacagatgcaacagcttaaccaggctgctgcccccacatctaccccaattgaagcaggaggatcacaggtcccaactagtgctcagccacaaacagggcaaacgggtttcaccaaaaatcaacttcatgtactcaaagctcagatattagctttccggcgtttaaagcgtggtgaccgactcccgcctgaagttcttgaattaattgtatctggtcggccacctgattcacaaggacagcagcaagtttcgggaccccaggtaacacataaccgtgaaagacctactgtaagcaatgctgatgaacatggaaagcagatggagagtggtggtaaagctcctgaaaaacctgcattgttgaaaggaccctgtttaccaaaggtggaggtttctacttcagaagacaaagctagtcctgccagtggtcctggtcccgcgcaagtgatgaaagcttcaccaaaagagcctcttaaaattggaccagtgtctgtaccagaacattgtaacactactgtgattaaatctgagcaggatctggaacggaacatccagagaacacctgggcgaagtgattacaatgctgagaggggtaaatctgtaccagcagaaagtggttcagtggatgttgagcaggcaaaaaggactggctccacaagcagtgcccctgttccaagagatgttcccagaaaataccatggcccattattcgatttcccatccttcactaggagacacgattccatgggatctgcaaattacaacagcaatctgtcactaggttatgatgtgaaagatttattagctcaggaggggatgatagttcttggtaggaaacgtgaggataacttaaaaaagataagtggtttgcttgcaatcaatctagagaggaaaagaatccgacctgatcttgtcttgaggctacagatcgaagaaaagaagctcaaactcctagagcatcaggctcgtctaagggatgaagttgagcatgaacaacaagaaatcatggcaatgccagataggatatacagaaagtttgtcagacaatgtgaacgccaacgtgttgagcttgtaaggcaagttcagcagatgcagagagcttcaagagagaaacagctgaaatccattttccagtggcgcaagaagcttttggaggcacattgggccattcgtgatgctcgaataactcgtaatcgtggggtggccaagtaccatgaaaggatgttgagagaattctcaaagaagaaagatgatgaccggaacaaaagaatggaggcattgaaaaacaacgatgtggaaagataccgtcaaatattgttggaacagcagactagtgttcctggtgatgcagctcaaagatacaatgttctatcttctttcttgacccagactgaagagtatctttataaactaggaggaaaaataactgctaccaagagtcagcaacaagtagaagaggcagcaaatgctgctgcagcagctgcacgggcacagggcctgtctgaggaagaagtgaaggctgctgcacaatgtgctggtcaggaggttatgataaggaacacattctctgagatgaatgcaccaagggataatacatctgttaacaagtactatactttagcccatgctgtgagtgagagagttactaagcagccatcactgttgcgagcaggaactttaagggactaccaattggtgggcctacagtggatgctttctttgtacaataataagttgaatggcattttggctgatgagatgggtcttggcaagactgtacaggtcatggcattggttgcgtacctgatggaatttaaagggaattatggccctcatctcataatagtgccaaatgctgtcttagtcaattggaagagcgaactgttaaattggttaccatctgcatcttgtatcttttatgttggtgcaaaggaccaaaggcagaagttgttctctcaagaggttatggccatgaaatttaatgttcttgtaacaacatatgaatttgttatgtttgatcgttccaagctttcaagggttgattggaagtacattataattgatgaggcacagaggatgaaggacagagactccgtcttggcgcgtgatcttgatcgctatcgctgccagcggcgcctccttctcaccggtactcctctacagaatgatctcaaggagctttggtccctcttgaatttgttgcttccagaagtatttgacagtagcaaggcattttcagattggttctctaagccttttcagagggatggtcctacacataatgaagaagaagacgattggcttgagacagagaagaaagtaataataattcacaggctgcatcagattttggaacctttcatgctacgtaggcgtgtggaagatgttgaaggatcacttccacggaaggattccattgttttgagatgcagaatgtctgccgttcaaggagctatatatgattggatcaagtctactggtaccattagagttgatcctgaagatgagaaaaggcgtgcacaacggaatcccatgtaccaggtcaagacatacaagaatctcaataacaagtgcatggagctgaggaaagtttgtaatcatcctctgctgtcatatccattcttaaatcatgggaaagattttatgatcagatcttgtgggaagttgtggaatcttgatagaattttaattaagcttcacaagtcaggccatcgtgtacttctttttagcaccatgacaaagcttcttgacatcatggaggactatttgcagtggagacgacttgtttataggcgaattgatggaacaacaagcctggaagatcgagagtcagcaattgttgacttcaacaggcctggttctgattgttttatattcttgcttagtattcgtgctgctgggaggggtctgaatcttcagagtgcagacactgtcgtaatatatgaccctgatccaaatccacaaaatgaggagcaagcagttgctagggcccatcgtatagggcagacaagggaggtaaaggttatttacatggaggctgttgttgataacatatcaagttatcagaaagaggatgaattgagaaatggagggagtggagatttggaggatgatcttgctggaaaagatagatacatgggatcaattgaaagtctcatccgcaacaatatccaacaatacaaaattgatatggcagatgaggtcattaatgctggtcgttttgatcaaagaacaacccatgaggaaagacgaatgactctggagacactcctgcatgatgaagagagatatcaagactctgttcatgatgttccttcattgcaggaagtgaaccgtatgattgctaggactgaaagtgaagtcgagctttttgatcagatggatgaagactttgattggacaggtgatatgacgaagcatcatcaggttccaaagtggcttcgtgttaactccaatgaagtagatgctgtggtggctagtctgtccaaaaagccgtcaagaaatatgtcatctgggggcattgctttagacactaacgaaacacttgagaaaagaagggggcggccaaggggtacgggcaagtactccatctacagggagatcgatgatgaagatcttgaagaatctgatgaagattctgaggagaggaatactgcatccctacctgaagaaggggaagtaggggaattcgaagatgaagaagacaatgatgactcagtacctgataacaaggatgaatcagaggaagaagagcctatgaatgatgatgtatatgaatttactgaaggattaagaggcagaaaagctaataggatggaagaagctggttcaacaggctcttcttctggaagcaggagattaccaccacctgtaccttcctcatcttcaaaaaaattgcggtctctatctgcattagatgcccgcccaggcactttgtcaaagagaactccggatgacctagaggaaggtgagattgcaatgtctggggactcacatatggacctccagcagtcagggagctggaaccatgaacgtgatgacggtgaggatgaacaagtactacaaccgaaaataaaacgcaaacgaagtattcgtcttcgtccaaaacctaatgcagaaaagcaggaagatagatctggagaaggggccttccctcagcgtggtactcatcttgcatttcaaggagatggtcattatgattcacagtttaagtctgacctagatgcccgtgcttttccagctgccaggcagcaagacgcggttcatcctatagtgaaacagaagcgcaacatgtcatctaggaaggtttcaccggcttctaggtctgggaaattgagtcacttgtctgggtctggtgaggggtctgctgaactctccaaggaaaattggagcagtaaggccattgattccactgcccctgagttcggtggcacaaagatgtctgacagtatgcaaagaaagtgcaaaaatgtgataagcaagctttggaggaggattgacaaagaaggtcatcaaatgatacctaacatatcttcttggtggcggaggaatgagaattcgtcgttcagaggtccggctggtagcacacttgacctacaaaaaatcgagcagcgagtcgatgggttggagtacggcgctgtaaccgagttcatagcggacatgcagcagatgttgaaaagcgtggtccagcacttcagctataggcatgaggtccggatagaggccgagaccctccacaacttgtttttcaacataatgaagatcgccttcccagactcggacttcatggaagctaagaacgccatgtcgttttcgaatcctggaagcggtgccgccgctgccccatcatcgtcaaagcacgccgcaccatcccttaagcgcagcagagccagtgccagtgccagtgccagtgaagcagagcagcagcatggctcgggacacagcagcaggcacaatcagcctagcgaggcggtcccgcccagccggtcccacagctccaggtcagagagagaccccagacatggcggcagcagggatcagcacctccaggacggcgccgctgggttgctgcaccctagcgacatgttcatcgtgaagaagaagaggcaagagcgcgcgaggagcggcatcgggtccccttccagctcgggccgaggcgccggacctctgtcgccggccaaccctgggcgtccgggccctgccccctcgcccagaggtgccaggacgccgttccagagggatccaccgccacacccgtctcagcagtcgatgcattcagctgggtctggatggggcagcggcggtgcgcattcggatcatcaagcgggggcaagctcgtcagcacccggcatcggagacatccagtgggcgaagcctgccaagaggctgaggaccgacagagcaggcagaggcggccgagcctaa

SEQ ID NO: 5217 - DNA, 450 bp, Zea mays
  Peptide Sequence Number=SeqID_46996
atgggcaaaaacaacaagcgcaagcgcgagccaactcctccatcggaggagtttggtgactcggagtactcagaggaggagttctcctctgagtctgaggggtctccggctcctatccccctgcgtgagtcgtctgacgactcagacgactcccaggggctcgcggcggaggtctggacgtacatccgggccgtcgagcgctccgggctcgagggctcggatgagtcggagtactcctcagatgaggaggactcggacggcgggggcgaggacgaggacgacgacgacgacgacgacggcggtggcggcggtgacggtgacgacaacggcaagggcggcagcagcggcagcaaggacggtgacggcggcggtagcaggggcggcggtggcagcggccgaggcagcaccaggggtggcagcggcggtggcagcaacagggccagtggctag

SEQ ID NO: 5218 - DNA, 225 bp, Zea mays
  Peptide Sequence Number=SeqID_46997
atggcggcggcgagggcgaaggtcgcggcgcgggagagacagagtggctcctcgagcagcctcccccacggcgagctcctgggcagatgtggtggcaggacgggagcaggcgacggcggcgcagagcgaaggatttctttagatgcgaggctggatacgagaccatggtggatgtggtggctaccacgagctatgattccttattggtgcgtcgcacatccttag

SEQ ID NO: 5219 - DNA, 168 bp, Zea mays
  Peptide Sequence Number=SeqID_46998
atggagagtcatgatctctgggcagaacaagaatcacgacttgtgggtaaagtgtgcaacctctacagggtgttagaaactggttgtccccacagtactcagtgctcaggaggagatgctggcaacatggaggactttgcggagtttcaggactacgatgagttctag

SEQ ID NO: 5220 - DNA, 351 bp, Zea mays
  Peptide Sequence Number=SeqID_46999
atgacgagaatactggaattggaggctggtggtccgggcagaggagcgcacggcctaggaagtttcgacggcacggacagcgagcaggcgattcggcggcgagcagagagcttcgcgcgtgcaggaagctcggaccacgacgcagggagctcgacggagaggagcgcgcagggggagatgggcgacgaggcagggatggacgccgagctggagaagcaagagagtggcgtcggcaaaggagcgctggaagccgcggcgctggagagcgagctgaggggcgcggcgtgctgggagatgctccacggagggggaagcagggaggcagggacacgcgcggcaccaggaagatga

SEQ ID NO: 5221 - DNA, 342 bp, Zea mays
  Peptide Sequence Number=SeqID_47000
atgtcgaagatagatggtcgtctgaaggttgttgaagtgagttcaccggaggtgggcgccaatgttggtcactcgttctcagatgctatagatcaagaacaaggcaacacaattgttaatggcatgggacacagcccagataaaattatattcgtgcccttgatgtttactcgtgattacaatacaatttatcacgagctaagtggtcttttcccctttaaatcggtgtcgtccttggtcttcgtcaccacatcaagccgaagctctctggcgatagcttcggtgcttactcctatcaccttcgggctgcttctttattccgcgtatactttcgccatttag

SEQ ID NO: 5222 - DNA, 2292 bp, Zea mays
  Peptide Sequence Number=SeqID_47001
atggtcccggcttctaattcatctgaccggtctgacagatctgacaaacctatggaccagaaggcatatgtgcaacagctagagagcagtaagctaaaacttgcaagcctggagcaagaactccagaaagctcgacagcagggaatcttcatttctagttctggagatcaaactcatactatgagtggaaatggagctatgaccttcgatttagaatattctcgatggcaagaggaacaaaataagcagataaatgagctgaggactgcagtaaatgctcatgcaagtgatagtgacctccgtcttatagtcgatgggataatggcacattatgacgagatattcaggctgaagggcattgctgcaaaggctgatgtgttccatatactttcaggcatgtggaaaacatctgctgaaaggtgcttcttgtggcttgggggtttccgttcgtctgagcttctaaagctccttgtgaatcagcttgagcctctaactgagcagcaattgatggggctgtccaatctgcagcaatcttctcagcaggctgaggatgcattgtcacaaggaatggaagcattgcagcagtccttggcagaaacgctggctgggtcccttggtccatcaggatcttctggaaacgtggcaaactatatgggtcaaatggctatggccatgggaaaacttggcacactcgagaatttccttcgccagtattggtcgaggcgatctgacggagggagcagccaagtcagcaagtaccgcagcaccaagcagtcgaacagcgccgaagatgccagggctcgccgcgtcggcgtccgcagctccggcgccgttctcgttggcgacctcgcgcttaaccccgattctggaggtgaaatggccaacacaagctctgatactttggatagttcaactgttcaggaaaaaccagtggttccgggacacatcatctctgaaatcagttctcatgttcaaaaggaagagtctgctgtgtccaaaagacgctctaacaatgaaccatctctttgcattgctgtaattggagctactggtgagctggcaagaactaaagtttttccagcattatttgctctgtattacagtggttttcttcctcggaatgttggtatatttgggtattctaggaagaaattgacagatgagggcttaagatctataattgaagccaatttgacctgccgggtggatcaccatgaaaattgtgatgacaagctaattgagttcctcaaaaagacgtattatgtagatgccggacatgacaaccaagaagggatggttagattaaattctaggatgtcacaaatagagggcattggtgctgcaaacagaatattctaccttgctgttccacaagaggcactccttgatgtagcattgccactggctgacggtgcccaaactaagcaaggctggaatagaataattatcgagaaaccatttggctttactggtttgtcctcactgcgggtaacacaatctatgctgtcaaggtttgaggagaagcaaatttacaggtactttggaaattatgggataatccgtgacatagttcacagccacattcttcaaacaatagctctatttgctatggaaccacctgtaagtcttgatggagaggatatccgagatgaaaaggtgaaggttctcagatcaattcggaaagtgaaccttgatgatgttgttcttggtcaacttaaagatatgtctggcatgggacttatgacgaatagagcagaaattcgaattcagtttcgccatgtccctggtaatatctaccgtgaacgctttggccatgacatagatctcgacacaaacgagctggttctacgcgatcaacctgaagaagcaatcctgttgaaagtcaacaacaaggtcccagggcttgggctccagctggatgcttcagaactgaacctgctttaccgggataggtacaacaccgaggtaccagattcgtatgaacatcttctactggacgtgctagatggagatagtcatttattcatgcgcagcgacgaactggctgccgcatggaatgtgctcactccgataatccatgagatagatcagaacagagtagttcctgagctctacgaggctggggacagagggcctatcaatgcttaccatctcgctgctaaacatggggtgcgatgggatgacgactgtcagatgtacaatatgccttctgtaatcggcctgatcaaggactttcaaggagacatgcctttcaaggagatatgcaaacatggtttctttcctgtcctgtag

SEQ ID NO: 5223 - DNA, 180 bp, Zea mays
  Peptide Sequence Number=SeqID_47002
atggagaataagtatttcaccccaatcaaagggagggcatattgtggcggctacgaggaaccgatgttcctgtgtggcggtgacaacgacaccgtggagccaaggcaatgtcagcaagctgatttttcagattggaatctatggttctttttaaagatcgaatatgttctagcatcttaa

SEQ ID NO: 5224 - DNA, 276 bp, Zea mays
  Peptide Sequence Number=SeqID_47003
atgggcatgtggttcacctccctactggtgctggacaaatatcaggctggcattgacgtttgttcaaccaagtcagcttccacaccggtcagtgtcttggactttctctgccactcccagaccttggtatcttttttatgggtgctcattctgtcattcaccacacctatcttgtgctcaccgctcctactaccacaggtccaaagcaagaaagaaggaatgaagaacgataatggctctggtcgggttctccatcttccatttaccaacttttga

SEQ ID NO: 5225 - DNA, 207 bp, Zea mays
  Peptide Sequence Number=SeqID_47004
atggcccgcgcccgcgcctataaagcacccaggaacttcgaccgtacccctccgcacgcgctcgacctcaccggagcccaataccaccggcgtttgcccgtgcacggcgtgcccgcggccgcccgatcccccgccaccgtagaccggccaactgagcccttcccagccacgcccgacccttggaagagactgtgcacgcctcggtga

SEQ ID NO: 5226 - DNA, 339 bp, Zea mays
  Peptide Sequence Number=SeqID_47005
atggggctctgcgcgtcttgctgcaagggcatcggacagagggagctgctgtggggaggagggcttcctgctgccgtgcctgaagggggcgccatgggagggagctcggctgctcgagcttcgccggtgccatgggagccacaggggaatagggcgccgactggggaagaagccagagagagctcgcggcgagcagtagcaaggggaatggagggaggtgagctcggccatgggaatggcgcccacgccttggctggagatgaagctgtcgtgggaaaaccagagaggaagaaagcgtgggggagaaggaggctgctggtggcggctggaattttttga

SEQ ID NO: 5227 - DNA, 699 bp, Zea mays
  Peptide Sequence Number=SeqID_47006
atgggaccgagagcgggcggacgacggagaagagatttcgggcggatcggtgagcactccggtgagcaatccgcgtcacagtgggggacaatctggtgcaccgaggccggcatgagcttcggtgagggggtaggggtgttctatgcgtgggtttgggcacgagggagagctgtactggccaggcgcgtgaaggtgtggcggctcaatgaggggcagctccgacgagccgaaattccccacggtgagatgaaattaacgcagaagaagggtggggaggttccttaccctaagaaggcgctcagggcagcttggcacaacgcggggaggctttggttggctggacgacgaggaatcggcggcggtgaacttcggtctgtgcagggagaggttaggcgtggaccgggcagaggggtcgatgaaaggggaatccaaggcaggttctcggtgcacagagctcaggcgaagctcaccatggccgaggcgagggcaaaagcccgacggggacggtggaacggtggagcaacgacggtggtggcgctacgagccagttttggcaagaatcgaaggtggcacatggcgtcattaccaagggaagggtggccagatccatccacaaggttggtgttgggggcctacttcttcgccgaaggaactccaagcaaaaacacctttggcagtgtgatatgcaaactgacgtag

SEQ ID NO: 5228 - DNA, 327 bp, Zea mays
  Peptide Sequence Number=SeqID_47007
atggggaatcctcggggtggctctgcgtgtgctcaaggtgttgcaggggctcatacagcggctgggtcaacgcagcgcaacatccatggtaacgagcttaccttcgtattcttcgtcttctccacatcatgtggctatatcgaattggggaatactcttcagggcagacggattggaatcgccggccatggcaccaccgtggccctgaccgcgccacctgtgctgaccgggaaggaagaaggcgataaacgcttacgattagatcctgagtatccctcgcttgagtcgatctggtccattgatatcaggatgagcggatgctgttag

SEQ ID NO: 5229 - DNA, 1110 bp, Zea mays
  Peptide Sequence Number=SeqID_47008
atgtgcctagagctgcttaatagccatggaatgcgtttccatttcaaaaaaaaaagggaggtggactatttcaccgccgcaaccaacaaaacatatcgaaagctcgccacccacccgcctcggtggtgccgccataacatatgcccgtcgctccccctccccttcgtttctctttccctccgcttccgctcccgtccttcctcccctcaccgggacccccagacagcgcgcgccggcgcaatgcggtgggacgcgtcggaagcagaggtagcccttgagcggatctgggaactccatgaccgcctcagcgacgccatcctcgccgcctcccgcgcgcacctcttcctgctcgctccccagcctcctcccgtgccgtccgcgccacccgtcaaaggggcccaccgagtcagcggcggtaggaacggctgcgtcttcgtcaagggcggaggagaggcgctggccgccgccgcggagtccgtgtccgaggtcaggagcctgcacgccatccgctctgcgctcgaggacgtcgaggaccacctcgagtttttacacactgttcaatcacgacatcaggcagagcgagattctgcaattgctagactggagcaaagccgtctagtccttgctacgaggttagcagaacatcaagggaagaagcatagaatcatcgatgaggtcttggcatttgttggtgaagtgagtgacaagagtcaatttatctcatttgaagatgtttgtgctacccatagccgatcagaggatgatgcagaggacaacaggggcaacggttcaaggattatgtcaaacatgttatctagcagtttgtctttagccaagaattcatttcgactggacaagattggtggtgctctcggtaacgctgcaatgtttgcagtaagtgtgcttgctttcttccagctgcatcaaattacatttggaagtaaaactccagccatggaatacaggaagagaatcgagtacagtattcaaccaaggagctcacaatcgaatgggaaaggaaaacttctggagggcgctgatcattctttacaatggactggaccctgttccaggcaattagggaacttactgtctgattcttataaatag

SEQ ID NO: 5230 - DNA, 219 bp, Zea mays
  Peptide Sequence Number=SeqID_47009
atgggcgttgcagcttgcaggatgtcattgcaactttcaacttgcaagatagatgttgttggcccttggccgttgcagactaagcagagcaagatgctaattgccaagtcaccaagatgccagcagcagcggtgcagccttcgcgggacgccgcacgctggtccggtgtgggaggatgggaggagtgggagcgtcagccgtcaggcgtcagcggagtag

SEQ ID NO: 5231 - DNA, 699 bp, Zea mays
  Peptide Sequence Number=SeqID_47010
atggccgccgcctccacctcccttccccttggcttctcctctcaccaccgcccaactcccagaatccggccgcagccccagtcccagtcgcaaccactgaaggcaaaaccccttaacccccttcgcttcagcctagccctcaccccggcgaccgcgaagccccgcctcgctgcgatgcccgacgatgtcgctgtcgccaacttcgtggagaaggactggtcgttcctcgagtccgcgggcgcaaacctccagcgcgctctcgcgtcgggggcgctctcgccggcgtcgcgggtgttggcattgacgcccacggcgtccttcgtgaggtcgctcctcgcgtcctcgccctgcgagctactggtggccgcgcatgagtcgatgtacgtgctggcaggggtcaaggaggcgcacgacgaggtgaggtgcttccacctcgagggtgggggcggcggcagaggcggcggcgtggtggaggccgtgccagagaggttcgacgacttcgatgttgtgttcgtgtgctacttccctggaatgggagtctccgcgggggcgctcctcaaatcgctggccaagaggtgctcaaaagacttccagtggactgagcctgaggtggttagaaggatgcggcttattacgctgtgcattgcgtttgctaaatcacaactaaatcatttgagatggcaaattggtggggtttag

SEQ ID NO: 5232 - DNA, 543 bp, Zea mays
  Peptide Sequence Number=SeqID_47011
atggagaggcttatcagcccccaccgctctagatcatcctgtagcattagcggcatctgcctcgtgccttgggtgggtgttcaagacacctttgggcatattagaacacaaaaattggttctagccttagtcatcttcgctgttctcaagtattctgttattcgctatatttccgtcaaggctgtacattcagttgccgactacggttcctgtggcgtcggcaccgagaccaacggggaagacaccgctgaaggggaggaggcagagggaagcccgtggaacaaagccccccgcctcgacgacgctgctcggactacgcttcctgtggcgtcggcaccgagaccgacggggaagacgccgctgaaggggaggaggcggagggaagcccgcagaacaaagctccccgcctcgacgacgacgctgctcggactgccgcaatggccgagatcccccgcccccacgcctcctcgaatcagcctcgatctgccgccatggatgacgacgacgtgttgctcgacgtctccccatcactggcccacttag

SEQ ID NO: 5233 - DNA, 600 bp, Zea mays
  Peptide Sequence Number=SeqID_47012
atggcgtggcgacctgtggcaaatggcggcatgaagaagaagctgattcgaggagtcgtcgctggactgggagaattaacaagccctagatatgcatattcacacctctataaaccatttgctgttgcagaatttgagtgccttgacaaatcaccattcagatactttcttggggaactatatggtggcaattcactgggaagcacaattgcagtgggcaatgagaagaagcggcagcgggtgtacaacactatgtttcatgtcccatggagatgtgaacgggatgcttttgtatctgcaacaaaaactgcaaagtccctggatgggtttgccttaaaaacagggcagcaggaggagggtcctgaagaggctgatgctactgaaaaagcaatggaagcggttgacaatgttgtgaagtccctggatgaagaggtagaatcaaaggagatgcaaaagcagcaaccgcatgattatagtagcatgagcctcaggaatcttaaagccacgcacaagaaatatctcattgctgcaaaggaagaggtcaccgaagggaagaggcttcctctcgaggtggatgagaacgcctgcatcagccactga

SEQ ID NO: 5234 - DNA, 399 bp, Zea mays
  Peptide Sequence Number=SeqID_47013
atgccgagaaatatggtaatcggtacttccttggatgattggttcctgaaaaagaagattggtggattgatttcccaatttgggtcgtgcacgtttacgttgaggactgggaagactttggccaaagttgttgagattgtgtcgtgtgccaagaacaagtggggtaattggtgggatttctggttttatgtggcaccggagggcatcgaaggggtgcctgggctacccccgtctatcttgtgttcgcactgttatgtggcgtttccacattttaaagtgaagaaaggagataagagcgaacaggcccttcagcacgcaacccggttgagcagcaaccgagatttggtgaagaattcgttgcctatggtgtatggccgctggcacatgggtggaatctag

SEQ ID NO: 5235 - DNA, 441 bp, Zea mays
  Peptide Sequence Number=SeqID_47014
atggccttgtgcccacatgtcatagagataaaggggtttcttcttccctggacaactggacgtttgggggcttcgtgcacggcgtgctcgggaagagggggaactaaggagccgctcggcctactgcgccaaggggaggagatccggcgagctcagccatggtgggaagaggagcttgggctgggcgtcgtgggaagggaggaacagggagcgtcagcctgttgtcttgccgcacggaggtgggagctcggctggagcttgagggaggcggccatggaagagaggaggtgccatgggtggctgcatcaggtgggggaggaagaaggccggctgtatcaggcaataacgtggaggggaagggagagggcaggggctgccatttgtagagcagaagctctagatatgtcagccagcttcaacaggtggcaggtgctacggtga

SEQ ID NO: 5236 - DNA, 678 bp, Zea mays
  Peptide Sequence Number=SeqID_47015
atgggtcggcgcgagacggagcacgaaggggggaagaaacaggcaaaggggaaacccgcggccttcgtgttgtcctgctcccagcccgaggtcgggcaaggcggaggctcctccgaggtcgaggtcgagtctgggcctgagggtcaggcgaggcggagaccgtcgtccgtggtcgaggctgagtccgagccctggggtcgggcgaggcggagaccgttgtccgaggtcgaggctgagtccgagccctggggtcgggcgaggcggagtccgtcttccgaggtcgaggctgagtccgagccctggggtcgggcgaggcggagtccgtcttccgaggtcgaggctgagtcagagccttggggtcgggcgaggcggagtccgtcgtccggtgtcgagtttgagcccgagccctggggtcgggcgaggcggagcttcctatggcgcccgaggctggactttgctgctgtcagcctcactctgtcgagtggcacaacagtcggagcggtgcaggcggcgctgttttcctgtcagtcggttggcgtggcgatctggccaaggttgcttctccgcgaagcctgcccgagctgggcctcgggcgagtcgaagctttgtgctgatgggggttaccagctgagatttaggagtcttgggggtacccctaattatggtccccgacagtag

SEQ ID NO: 5237 - DNA, 570 bp, Zea mays
  Peptide Sequence Number=SeqID_47016
atgggcaaactggagagtgtcgtgccccctgcgcgccgatgtggccgagcaggagaggggcttcgagctggtggtcggccatgggaggaaaatagcaggggagtgaaggacgccatggctgggggcgcgtggagcagggagcctgctggtggccttgctgccgtgaagcagggaagaagaaaggcaaaggaagaagaagggggaggggatgaggagccggactgctctcctgtagggagcgagcgccagggagggcgccatgggaggaagcttgctggcttccagcctacgcgcaggggagaaattggagggggcgaagggtgttgtccctgctgcagccatggggagccagggaggaagaagggcagaggacgccatggacaggagctcgacgaccatgggaggagaggaggagccgagctccctgcgcgctgccatggggaagaagagctccctgccctggcgtgcgtgaagaagtctggcggctgggaaaatggcagaggaggaagaaggttgtggcggctgggaaaaattgaggggtgggagtgcaaaaatgcctccacttgctag

SEQ ID NO: 5238 - DNA, 1623 bp, Zea mays
  Peptide Sequence Number=SeqID_47017
atggcgcctgagagggtgccttcgccacctcgtgctgttgaagcggcggtttcagagactagagggattggccaggagttgtctgttgacgactacctggtaggaggcgtcaccatgtttgacgcccagacgggttgccgccttccggaagttgggtgtttgtttgtggattgtgaatgtgtagggactgaaactgggcggctggtggtggcaccggcgaggccgttcgctgacacaggggcttcggcgaagggtgtggttgtggcctcactggacccatgggtgcatttttgtgccgctcctgatggcggcggagaaatcgtcggcgcgtttgcggctgaaggcgtggcagcggctgtcgcgcgacaactgtgttatgctactgcctttgccgatcaagttgcgttcggggcgctgctcaatgacgagaaggatgtcgccgctgaggcgaggacgaaggccgaaagtgtccacacggaggccaatgctgcccgcaagcgtgctgccgagattgagctcgaggtgaagagcatgcgcgcctaccgcgagaggacggagtccgccacacgtgctggtgtggaccgggcgcacacaatttttgtggatgcgtaccgcgacctaggtgcgcaaactgctcccttcgataagtcaggaggggaggaggatctagagtctctctcgtccatcgtgacaagcctgatgtcctacgcatcgctcgtgtcctacaaaggggctgcgaatgccttggcccgtgagggctgcaggcacttcgaggcctttgaccggagcatcgaggacttcgatgttggtgtattccaggttgaagatgacgtgttgaagcgcttggctagggcgctttatgataggatgtggagtcctcacggctacgacgttgttcgagagaggcccgactggacgttggcacatgcgatgagggatgaagaagttgaggacctcgcaggcctggagagctccgtggcccgaaatgatgctgaagttgaggagggagttgaagagcagtcttcgctcacaaaaggcggcgttgaagaccctgcggcggcagagacttctgctcaggcagattttggtgacaatggaaatggcatatcgttgatgtgcaaaagtttgatagtgcttagtagtggggattttgatgttgacctatggtcatcggaaagtgaggagtttctgagcccgtttgctaggatggacgatgagttttcgaaagatgacttagattattttatggcgttagatttgtcagtgaaggagtcttcgcctagggttgccccgactgcggtggagtctttgtctaaggttgccccaactgcggcgaggggcaagagaaggatcagagtgccgaaacagagtgtgggaatgttgggcgagtcttcgcaaggcatcggagtccccctgaaggcgtcacctatgggaatggtgaggcctcgtccatgggaaagaatgcggtcgaaggaagggactcaccagatcatccttgcaccgacaactgggcaacatttcgaagagggagatttgcgggctctatttgatggcgaggaacttagactgatgttgtttaattttcgggagcctggcctgatcctgaaggcagagcctatgtaa

SEQ ID NO: 5239 - DNA, 417 bp, Zea mays
  Peptide Sequence Number=SeqID_47018
atggacgcgccgggagcgctggccgcgcgccagggccgcgccggggggcgactgcgcgccatggtcgcgagccaggccgtaggggaccacgccgggctaggggcgctagggtgtgcgccaggggcgcgctatgccgtcgccagcagcgccgggcaggggccgcgccgggtgccgccgcgagcagccgcgccgggggccgagctgcatgccatggacgcgccaggcagcagggagccacgtcgggcatggagctacgccgcacggggccgccgcgagcagcagcacaggcgcgccgagagtaggccgcgcagagccgctgcgagcagccgcgccgggggtgccgcgagcagccgcgtagggcgcgcgccgtgggccgagcgacacgccaggccacgcgtgaccacgcagaggaggtga

SEQ ID NO: 5240 - DNA, 439 bp, Zea mays
  Peptide Sequence Number=SeqID_47019
tgataccctgctgggtcacctcagtagtgatcaatggagagtcatgatctccgggcagaaagggaatcacgacttatgggtaaaagatgttcggattacgggtggagatgagaatgatggttttggaattgactatggtaatggagaatatgaagccgtggaggaagacttccaggagttccaagacggggtagctgacggcctcgacctgaagtactatcctcgtcgttcgaccagcagtgctggaggtgtgattgtctcgcccattggtgagggcaatcccaggttgagctgcatggttaagctggtcgccatgctcaacaccgagctggaccatgcccttgacgagttgggcaagcacccttatcgctcgtcgcccggtggtcgctttgattatggcacccctgaatgcaggacccagatagatttggagccatag

SEQ ID NO: 5241 - DNA, 495 bp, Zea mays
  Peptide Sequence Number=SeqID_47020
atggctcccaaggttgtgctcttccttgccctcggcctcctcttcgctgccgctgcgcatggctgcgaaccctactatcctgtcccagtcgtcccaacgccgtcagtcgtgctgacgccgtcgtcgcacagtcacgggcgttacccgattgacacactcaagctcaaggtgtgcgccaacgtgtcgggcctcatcaaggtcggcctgccccagcacgagcaatgctgcccactgctggaggcgctggtggacctcaacaccgcactgtgcctgtgcaccaccatcaaggccaacatccttggcatccacctcaacgtgccccttagcctcaacctcatcctcaacacaactgcagcaagatttgccgagaggacttcacttgccccaactaaacttgggatcccttgcacagacgagcagcttcttcccttgaacctcgacgagcagcgcagcaggcgtcaaggtcgggccatcgccccgcccccggcacggtag

SEQ ID NO: 5242 - DNA, 324 bp, Zea mays
  Peptide Sequence Number=SeqID_47021
atgcccgtcacgaagaccccctccccctcgcgtccctcgcacttgcaaacacagcacgtcgcctacgcccgcctcggccccgatgacaccgacgccatccccatcctcgagcgacaccatccattgtgccctccatcatcatgccgagggaggcgcctgcccctactgccgaggaggcaacccttccccttctcgtcgacttccattctccaccgtgttccctcctttgactcctcgagtcctcccgtttgtggcccaagcccgattgaattgccgtcactgttactcgccttagagaagagaaggaggcggtcgctgcactga

SEQ ID NO: 5243 - DNA, 2049 bp, Zea mays
  Peptide Sequence Number=SeqID_47022
atgccggagccatcaaccaccgaagggcggcgtatccagggagagctcaagaatctcctggaggatgccgcggtccgacaggccgaaagctctgcctcccgaaggcagggctacccctcggagcatcgcgccgcgacttctcgattcatgcgggaagcctcggtccacaccgagcgcacgcgcaacacagcgcctgcggccccgggtcgcctcggcaacgagcaccatcaccgcaactgtcgaacccacctcgacgagagggtgcgccgaggctaccaccccagacatgggggacgctacgacagcggggaggatcggagtccctcgcccgaaccacccggtccgcaggccttcagccgggccatacgacgggcgtcgttcccgacccggttccgaaccccgactaccatcaccaagtactcgagggagacaaggccgaaactgtggctcgcggactaccggctggcctgccacctgggtggaacggacgatgacaacctcatcatccgcaacctccccctgttcctctccgacaccgctcgagcctggctggagcatctgcttctggggcagatctccaactgggacgagctggtccaagccttcgccggcaacttccagggcacgtacgtgcgccctaggaactcctgggctctccgaagctgccgccagcagccgggagagtctctccgggactacatttggcgattctcgaagcagcgcaccgagctgcccaacgtcaccgactcggatgtcatcggcgcgttcctcgccggcaccacctgccgcgacctggtgagcaagctgggtcgcaagacccccaccagggcgagcgagctgatggacatcgccaccaagttcgcctctggccaggaggcggttgaggccatcttctggaaggacaagcagccccagggccgccagccggaagatgtccccaaggcgtccactcagcgcggcaccaagaagaagggcaagaagaagtcgcaagcgaaacacgacgccgctaacgcggaccttgtcaccgccgctgagtacaagaaccctcggaaacctcccagaggcgccaatctcttcgacaagatgctcaaggagccgtgcccctatcatcaggggcccgtcaagcacacccttaaggagtgtgccatgcttcggcgccactttcacaaggtcgggccacctgcggaaggtggcagggcccacaacgacgataagaaggaagatcacaaggcaggggagttccccgaggtccacgactgcttcatgatctacggtgggcaagtggcgaacgcctcagctcggcaccgcaagcaagagcatcgggaggtctgctcggtaaaggtggcagcgccagtctacctagactggtccgacaagcccatcaccttcgaccagggcgaccatcccgaccgcgtgccgagcctggggaaatatccgctcgttgtcgaccccgtcataggcaacgtcaggcgcaccaaggtcctcatggacggaggtagcagcctcaacatcatctacgccgagacccttggactcctgcggatcgatctatccttggtccgggcaggcgcgacgccttttcataggatcatccccgggaaacgcgtccagcccctcggacaactcgatctacccgtctgctttggtactccctccaactttcgaagggaaaccctcacgttcgaggtggtcgggttccgaggaacctaccacgcagtgctagggaggccatgctacgccaagttcatggctgtccccaactacacctacctcaagctcaagatgtcgggccccaacggggtcatcaccgtcggccccacgtatcgacacgcgtacgaatgcgacgtggagtgcgtggagtatgccgaggccctcgccgaatccgaggccctcatcgccgacctggagagcctcaccaaggaggcgccagacgtgaagcgccatgccggcaacttcgagccagcagagacggttaagtccgtccctctcgaccccaacaacgacacctccaagcagatctggatcggctccgagctcgaccccaaatag

SEQ ID NO: 5244 - DNA, 354 bp, Zea mays
  Peptide Sequence Number=SeqID_47023
atggcttggagtcagtttggtgaactatggacaaaggcaaggaagaacttcgaaggactgagcaagggagaaggtcaagaggaccttggtaccaaagctaaggttaagaagagtttacttggaagggtcaaagccattggagtaactcatatgcaattggatggttcaagtcataaggctcaagttatcctagctcaagtaatggttatggtcacaagatcatgtttagtatcaaaccaaaagctagaatctaagaaagaactagactatgggtcatttcagcatttggaaaagttcttagtgccattggaatatattggaactcaaagatatggtgaaatagattggttatga

SEQ ID NO: 5245 - DNA, 333 bp, Zea mays
  Peptide Sequence Number=SeqID_47024
atggctcccaaggttgcgctcttccttgccctcagcctcctgttcgctgccgccgcgcatggctgcggaccctattgctccggcccagtcgtaccaaccccaccagtcgtgccgtcgcacagccacgggcgctgccccgatcgacgcgctgaaaactcaagaaagatgacaaaatatgtgcaccattactattttagaacaatcatgttctttgtctccctgacgagttttccgagaggccacgttcgtgcaaaaggttggcctcagccaggcccatgggatacacacgaagactgcattctttgtgagcctgctgtgcttgtcacccgttag

SEQ ID NO: 5246 - DNA, 324 bp, Zea mays
  Peptide Sequence Number=SeqID_47025
atggcgcacggcggaggtgctttgacggcgaggaattctggccacgccccggatcctcgcgctcgggctcttgcttgtgcggaatcgcgaacccagagactaccccccgatcacgggttgacgttggggcaacgcgtgtggacgccgattgacgacggcggggacctggcgaggttcttccgctgcgcgcacgaattccacggtgatggtggctctcaagggaagaggcttgggtttaccagggcaaaggtactcgaggtcgagtacataccccggttatatcccctcgcaacagaatgccggattccatgcgagatgttttaa

SEQ ID NO: 5247 - DNA, 351 bp, Zea mays
  Peptide Sequence Number=SeqID_47026
atgacgaaggtcaatgcttgccgaagggaggtgggcgccaatgttggtccttgttctcggatgttatacatcaagaataaagcaacacaattgttaacgattagagattcgtcctttgaagcattatctcccagggatataatatcttcacacgaaggggaagaggcttgggtttaccaggggcaaaggtacctgaggtcgggtacataccccggttatatcccccgcaaccgaatgccggattccatgcgaggtgtgcggcatgcacggggagagttcggtggcaaggatcgatctgacctgggtggcccacctatctgcgattggaatggctgtgattatattgggtag

SEQ ID NO: 5248 - DNA, 195 bp, Zea mays
  Peptide Sequence Number=SeqID_47027
atgggagaggaggagatggggagagctataggtggaggagagcgtggctgtgagggagagcgcagggccaagctcggccagaaggagctcggcatggggagggatgaaggagggacggccatacaactggagtctgctgggcgaataatagatatgggagttgccaagcagaatcagatgcaccttcttgggtaa

SEQ ID NO: 5249 - DNA, 333 bp, Zea mays
  Peptide Sequence Number=SeqID_47028
atggtggacagagatcagacaaaaatcggagcaccagagaagtgcacgattctggcaacagagcacatgtatatcacgctgcgcaagtacaacccatcttcctcccactttgaaccactcccagcaagaatcgccaccagaataccaggaaacgaactggagttcgacaagcggtacggcgtcgggtggcagtgcgtggtgggcgccaacttcgggtgcttcttcacccacagcagcggcaccttcatctacttctccatggagcgcctctccttcctcctcttcaaggccgccgtcgtcgcagccgccgccgccgctgccgtcgcctcctaa

SEQ ID NO: 5250 - DNA, 366 bp, Zea mays
  Peptide Sequence Number=SeqID_47029
atgcccacaaggatctttggtccggagggagagatagaccttaccaataatgagatggtcgcaggagcatttgaagcagattctcaccgaatgatgtccaccgagcagggccccatctttcttaccatcatcaaaggcggtccttctcattttgtggccgaggacgatgtagaactcgttttggtggaggatgcttctgatgatgaggaagctaccttgattgcgcaaatgacatttgaggacccatctttttttaccaccatcaaagattgtccttctctttctatagttgaggtcaatgtaggacctcaactggtagaggatccttcgatagagatagagtcttcttcgtccaccggagcttga

SEQ ID NO: 5251 - DNA, 1112 bp, Zea mays
  Peptide Sequence Number=SeqID_47030
aagaaaatgaaagtggactaatgaactatgacctctcacctgtcaaaagaaaggacgggcaaagagccggagccgcgaccgacgactcatcagacatggcgaagccggcggcggcgaggaagccctctgcggcgtcgaccgtcgcactgacactggttctggccctggcttcggctgtcctcctcttcctcctgctccgcttctctccctcctccccgtcccccaacccgcacccgcaccgccgcctccgcctccgcccccgcgcgcatgcgcaccaccaccagatcccattcgaccctgtcgtcgcggacatagagcgccgcctcgaagaccgcgagtgggagcgcctcgccgctgcagggctgcacgctccgggcatggaggcggcgccagtcccagaggatctcaccgacggtgaggtcgacgccgacgaggactacatcaatgacgctgcgcgcttcaacgtcacgcttcgcgtggaggcgctgttcccaaagatcgacgtcgaccctgccgatggcgccgtcacgggcgctgagctggccgcgtggaacctcgcaaatgcgcggcgggaggtgctacaccgcaccgcccgggagctcgagctgcacgaccgcgatcacgacggccgggtcgcctacggcgaatacgagcggcccagctgggcctggcgtttcgacggtatgtacatatttgtaccattccagctgtttatgtttgattcttcagtgagggaaagagataaagacaatgatgggaagctcaatttccaagagttcttcaacggattattttactcaattcgacactatgatgatgaaggcttaacagatgacaccggtggctctgatgcaccagctaaaaagtcattttcacaccttgatctggataatgatgggctcttatcagcagatgagctaaagcctgtaattggtaatctccatccatcagaatacttctatgccaagcaacaagccgactatgtaatatctcaggctgacacgaacaaagatggacaattgagcatgaatgagatgatcgagaacccctatgtcttttacaatgctttattcacagaagatgattatggctttcatgacgagctccgttag

SEQ ID NO: 5252 - DNA, 255 bp, Zea mays
  Peptide Sequence Number=SeqID_47031
atggaggatggctgccatagggggagggggcgtccagccaagggggagaaaaagggggtggcggccaagagggggggtgaagggaaaaaaaaggggtggccacctaggttggcgccggaagatgcctccgaggccactagattagaggaggtcatcgtcggaggacatccgagacatgccggatcaatggaggtcgtcgccggaggacgcacgagcggtattggatcagacgatgtcatgcgcaaccaccattga

SEQ ID NO: 5253 - DNA, 126 bp, Zea mays
  Peptide Sequence Number=SeqID_47032
atggaggatgaaaggcttgtgcacgcgaggttaatgcaccctgttgatccagttgatggcaatggtatggcctcttggtgccaaatagcggccacatacaactccaacaccgagcttcctcactag

SEQ ID NO: 5254 - DNA, 315 bp, Zea mays
  Peptide Sequence Number=SeqID_47033
atgtctggagatcacgccaagagggagaccgtgaccggcgaaaagcccgcgagctcggggaagactctctcaagggagtacgacaacaagtataaggaggaatcctcttcctccatcaagtcacatcagaggggtgacaagaagaagaagaaaatgaagaaggtggtctactatgagaccgactcttcatcaccctccacgtccggcaccgagtcgtccactacttctaagcgccatgagcgcaagaagtatagtaagatgccctacgctatcctcgtatttcaaaatgctctccgttactttccgtacccctag

SEQ ID NO: 5255 - DNA, 705 bp, Zea mays
  Peptide Sequence Number=SeqID_47034
atgaaggatgaaggtgactatttcactgttctgcagaacaagaaacggaagttaaaggtaagttcagtaacatgggctgagtatctatgtgatttcttggaaatgacaaaaaatgaagaacgttccacaaacattgcaacagtaataaggggttattatggtcttattgacactgatataaagcttaagatcctccgggaactagtggaagaagctattcaaacctctgccataaaggagatactaagtgaccgtgtggaccagaaacaagtcctcaatgcaacaaaaagagagaacaccagaaaggacaaacaagagaaaaatcttaacactgaaattgccatgaaaagtcaggagaatcagacagatgatgtgcaagttggtcatgggggtgtagatgagctggttaggagaaaagaagaaaatgacaagagcaatatttctcggagtagaacagaagggaaacgacacttgcaccttgagacggagattgagaaattatccatccgatccagcccacttggtaaagacaggcagtacaataggtactggtttttcaagcgtgaaggaaggctttttgttgaaactgcagattccagagaatgggctttgaaacggcaactagagaagttttacagtaagataagcggtgggagattgggggtcgaggcttcaagcgcgatgaacgccgagccgacgccatag

SEQ ID NO: 5256 - DNA, 183 bp, Zea mays
  Peptide Sequence Number=SeqID_47035
atggcgcggtcggtgcctcagcggcggtggcgtgggatcctgggccaaatgcctctctttgatacgaaacctttctccttactggagccccctaaggacttcgatttaaatgagaaggtgttccaaatccgattcacaaaggagattgctacacctgatttccaaaggagccctaacttgtag

SEQ ID NO: 5257 - DNA, 471 bp, Zea mays
  Peptide Sequence Number=SeqID_47036
atggcggggccgggtacagtttatcgccgcccatacccgttacccgtcggggacccgatattacaggtgggaccattaactcagtgtctcaaatgtcccagcgtggaataccagatcctaatcgccaggacgccgctcgcccgcagcccgctccttcgtccttccctcccttcacggaccgcggtcccctgccgccggcagccctgctccgccatccgccccctgctccgctgcctgctccttgctcgggcggtcgagccagacgtcctgctcgggctagccccctgcatccacgagcagatccccaggcggccgccccctgcgcttgagcagatccttaggcggtcaggcagccaacgtccatcgtccgcccctgcgctcgagcacatccccaggcagccaggcatcctgcgtccacgtggatctgatcgacatcggcttcttcctccagcgtccagccgtcggcactag

SEQ ID NO: 5258 - DNA, 390 bp, Zea mays
  Peptide Sequence Number=SeqID_47037
atggagcagggagaggcgtcgaccacggcaggaatggggagtggagactgggcggccatggacaccgaaggggcgagctccaaccaggacacagggaaacgtgcttggcagctcgcgcgcacagagagaaattcgagctggggcgagcagcacagcaagaggggtgagctcaggaggacggacgccatgggaggaccttgggcgcggccatggaaccagaggagctcggaagagagagagagcacggcagagagctcacggcggccatggcgtttggggccgggcagaggagagagagatgggcgctgggagagagaagcaaaagagatggggcggctggtatatgcggcagtgagaggaggaagaagatgtgctctacggttgaaatag

SEQ ID NO: 5259 - DNA, 480 bp, Zea mays
  Peptide Sequence Number=SeqID_47038
atgtcacccaatcgttatggttcgggagcagtcgaccgttggcaccgttgtcttcttgtgacaccagacagttcggtgccacaccggacactgtccgggttgctcgacaaatggacccgaaggaggtcatgtgactactttgggtaccctattcccagatacccgacaactatgtcctccctggatgacatggaggaagatgctggggaggaggggacaatgcaagagatctgtgatgagatacccattgcagcgtttcacctcacaaaaggattcttctcgtccggtctaaaggaggctaaataccacaattgtacggtgaacgcaactaaggattttatgcttaataaggaaatagaacaaaaaattatctcggatagtaaactctatgaagtgttggataatgagggtcctatggttgatcgggccaaggtggctctagagaaaactcacattgaaatgatgaagttgagagagtaa

SEQ ID NO: 5260 - DNA, 372 bp, Zea mays
  Peptide Sequence Number=SeqID_47039
atgcctgtcgccataggcataggacccacacgctctggcaggagcaaggcggagaagcggcgcgccgccgccctgaagcggtgccttaataggcctgccaacgctgtcggtgtttgggacccgaccgcgcacctggggttacccctcgaggtgcttttggggggattctctagtatgaaggatgctagagaattgagtagatggctaatgagtgacctgttctttgatggggtgcctactaggccttatatactcgaccgtggggcgttacatgcggaaatcagcatttcttcgtcgttccatgccctagaggtcagcgttctgccttcggggttgacaactcattgggtgggtgtagcccccgagctttga

SEQ ID NO: 5261 - DNA, 414 bp, Zea mays
  Peptide Sequence Number=SeqID_47040
atgggcaagaacaagaagggcggaagttcgtcgcaccattccggtgacaagcggaagcacgagccaagtcccccctcggaggacttcggtgactccgagtactcggaggaggagttttcatctgagtctgaggggtcgccggtgtggacgtacatccgggccgtcgagcgctccgggctcgagggctcggatgagtcggagatctcctcggacgaggagaactcctccgactcgtctgaggaggggagtggtggtgacggcgatgacgaaggcgacagcggcgatggaggtgacgatggcggtggaggcgatggcgactgcaagggcgacaacgacggcggcaagggcgacagcggcagcggcaagggtgacaacggcagcagcaaggccagtggcaaagcgccactggcttaa

SEQ ID NO: 5262 - DNA, 225 bp, Zea mays
  Peptide Sequence Number=SeqID_47041
atgcgcctcgccctttgccttcttgtaggccttcttcttctctctcttcccgcttttttcttgtccctggtcactatcattatcgggacaatttgcattaaagtgaccagtcttactagggatgaaaacgggatgggtacccggaacgggtactggatacgggtacgaaaacaggacgaaatttcggatacggaaacagggatggactttgctgatttgagatga

SEQ ID NO: 5263 - DNA, 324 bp, Zea mays
  Peptide Sequence Number=SeqID_47042
atgaaggaatctgatgaaggagaccatccctcgaagattaaaaatatttcatctgaggatgtagagagcccacaaattttgggtcttggaggcactaccttcagaggttcaacatgctccaaagaagacaagaaaaagaccactgaaggaggtggatcttcaaggcatgaaaaggcggagagagagctaaaaaggccaagccctgtttttgagaaagatgcactcgaagctactcagactaaaggtgaagaaggagaagatcttggttttttcgtgaggcatcttgctagggcgaacttgatgacaaagaagcttcggaaatag

SEQ ID NO: 5264 - DNA, 300 bp, Zea mays
  Peptide Sequence Number=SeqID_47043
atgcaggagagggatccaaaatggaaaaccaccccgacggtgaagttgacgatgatgttgaagacgattgcagcgccatggagctgtcctagatcaacgtcgcttgacccctacatggcgcgtcagttgtcagtgtttgattctgacggcacactatgggatgtaccacatagtggttttgggagggcggcgagtcaattgcagctcgatggtaggattctctatatactcacaaatgagtggcagattggtgttactagtgagtggtcacaggttcgaaaactgcgagaagcagcatag

SEQ ID NO: 5265 - DNA, 282 bp, Zea mays
  Peptide Sequence Number=SeqID_47044
atggggagcagcaacgacatgccgtgtacgatgctacagagaaacaaaaaccgagctaagctcgacatcggacaaaacactgcgcagtacccggcacggcgttcagctgtgcaagcacaaggagcgcaacgcagaggagcaggggagcagagcttcggccgagcgcacagggaactcggcggggagttggggctaggcactgggctcacggcaggggagacaggcgctggagagggcgagctagccgagcacctgggaggttgctcgcggcgcgcggcatag

SEQ ID NO: 5266 - DNA, 342 bp, Zea mays
  Peptide Sequence Number=SeqID_47045
atgaaggtaaaccgagaggacaacaagcgtgactaccagtccgaccggtacaagggcaagcatgagtacacctttgacaagcacaagtccaaagggagtgacatcaaccaagacattgataacacttcttctatgagtgatgacaagctcaagaggcatgttgaggacaagctcagtgaactgtgcttctttgctaatgttgtaggaggactctacatcttggcacttggtgaggatgtggtgagcgatgatgataaggacatcaataatggctctacctctgtgttatcactttccactaataatctctttgctgaggtagacgagttgatgactgtttag

SEQ ID NO: 5267 - DNA, 291 bp, Zea mays
  Peptide Sequence Number=SeqID_47046
atggccatgatgggttcaacatcgaaaaagatgtacctctgccaggtaccaaactttgggtttgaaatgataaagttgagaccgggagaagaaggcgaatcgccaaggcgcggatactggctgatcggtggactgatcgagctcgttattaaaaaacgatctagcaccgtgaaggggctattgttgggggtcttcctctccaccgaaagtcctcaagacaaaagtatcactgacaaagtgatgttgaggaccatctctgccgaaggtcctcaagacaaagctactatctga

SEQ ID NO: 5268 - DNA, 285 bp, Zea mays
  Peptide Sequence Number=SeqID_47047
atggcggatttctcccagacttctctctcttctcttgtgatggcggggctcggggcaaaaagggagccgatcacctggattaagcggggaaagatttttcttgaccccgattgtaaggtggtgcgggcaaggaaggtcccccaatggcggaatcaggcggacgtcgatccaggtgcgtggagtccgagtctaaagtgccgcggtcgcttccatgaggtctgcgttcgcgggaaggaggcgaagctgacggcctcgggcccacagcatacaaagatcacaatatga

SEQ ID NO: 5269 - DNA, 144 bp, Zea mays
  Peptide Sequence Number=SeqID_47048
atggcctggtgcggtggtggtctcggtgtctggtggcgctgtgattccggcaacgaggcgcacgagaacggccgctgcggtagtgaggaccgagtcccccggaggatttcgtcgctgttagcgctggacgcggagaagagatag

SEQ ID NO: 5270 - DNA, 282 bp, Zea mays
  Peptide Sequence Number=SeqID_47049
atggggagcagcgacgacatgccgtgtacgatgctgcagagaaacaaaaaccgagctaagctcgacatcggacaaaacactgcgcagtacccggcacgacgttcagctgtgcaagcacaaggagcgcaacgcagaggagcaggggagcagagcttcggccgagcacatagggaactcggcggggagttggggctaggcactaggctcacgacaggggagacaggcgctggagagggcgagctagccgagcacctgggaggttgctcgcggcgcgcggcatag

SEQ ID NO: 5271 - DNA, 168 bp, Zea mays
  Peptide Sequence Number=SeqID_47050
atggggggagctctggcgccaccgtggctcagccctagggaggaaggcgccctctgggccgtccattccggattgggtggcgatcattatgttaatgggaacatggagcgaccacccgagaaaacagtgctaccacaagggtttaatgggacacccttggctgattaa

SEQ ID NO: 5272 - DNA, 273 bp, Zea mays
  Peptide Sequence Number=SeqID_47051
atggcgggggtatttataggtgattttctttttgactccaccttccttttgaaggacttcagagccttatcaccattactgggtgattttctttttgactctactttccatgactatagagccttatcaccattactaggtgatttttttgactctgccttccatctgaaggacttccgatccttatcaccattactgggtgattttcttttcccgttacactcaaaggaaaactacttcatctccaaagagaagcttgaaatggttgaatga

SEQ ID NO: 5273 - DNA, 171 bp, Zea mays
  Peptide Sequence Number=SeqID_47052
atggagctggatgaggtcgttgttaccaccagagaggatgacgatgcagtgctcctggacatgtgtttgcagctatcaagtcaaacggtaatcatttgccacgccaccaagatgtgttcgatgaaatgtctgcctgagcctggcaagtttctgaaatggcaagctgagtaa

SEQ ID NO: 5274 - DNA, 444 bp, Zea mays
  Peptide Sequence Number=SeqID_47053
atgattatcttgctaacctctcgaaacaaaagggtcccatttggttatgatgaatcaaatgagcactgcatcgtcatcctctctggtggtaacaacgacctcatccagctccatgatggtcgcaatctggggctagtgtcctcctcgatggtctggccatggtcgtctaagcatggtgtcggatctatggatctgatgagcaggtcggcgccgagcacgctgctcggcgaggtgatgtgcggggatcagcacttccccgtggcggctggcagcggagggcacggaccaccgtaccatgccgccacggacaatgtcctcgtgctctttctcgctgggcaccactcagagtcccgggactacaagcctccctgcctcgtcgcggccgctcacttcatggacgaagctgccgcctcgcaacaacagcagcagcaactcatgtactag

SEQ ID NO: 5275 - DNA, 297 bp, Zea mays
  Peptide Sequence Number=SeqID_47054
atggccggcgctcgtcccaacgccgagctcggccttgccatctcccaacgctccgccacccggagtcctgccccgacgcgtgtgctcctctgctcgccgcgcccctgcgagcttcctccatcggccatggacgccggtgagcttatcccctggtgccgcgacctcgccatggagtttcaagcgcttttcttccctgctgcgcagctccctcggcgtccctcccgtgctcgcgcccagcccgaggagaaatccatgtggactagtgaaaagaagcaggcccagtacagcgtccgctag

SEQ ID NO: 5276 - DNA, 312 bp, Zea mays
  Peptide Sequence Number=SeqID_47055
atgacacaatcaaaggatcaaatcctctccaagttccaaaaatcaactcaagtgcttagtgacttgagagagaacacgctaaagagggagatggtcaccggtgaaaagcctgaagccttgggaaggaagaacgatgaaaggactccatcgaaggaggccgacaacaagcacaaggaagaatccaccggctccatcaagtcacataggaagggtgacaagaagaaaaagaaaatgaagaaggtggtctactacgagaccgattcttcatcaccttccacctccggcgctgagtctaccacttcgaagcgctaa

SEQ ID NO: 5277 - DNA, 642 bp, Zea mays
  Peptide Sequence Number=SeqID_47056
atggctggagagccgccatgggcgcacgcaggagccgggaagccgcggccagggctggacagtggcggggcttcgccggatagaggccacgccagtagggagcaggggcagggctgctgccggtgctggccacaatgtcgcaacgggccgccaggcttggccgcaccatggtcgaccgagccgcggagctcgcgcgcgcacaagaggcggccgggcgagcgcgctgggcggggttgctggcgcagctgggccatgcccacggccaagaagaagagggagagggcgagtggacacaggaaccagcgggggtggcttttggcgatgtgggcagcgtgggcgcacgatgtgggcaccggttgggatggacgagcgattgaggaagaggaacaatgggcgggggcaccactgacaggtgggcccggtggctgggcagccgtgcgacgcgggcgagcgcgcataggcagcagggagcacgcgcagcggctagggttttgggcgttgggccggtgtggctgcggctgcgagagcaagccggctaggggggcgcagtgctggccgcgcgtgctggatgggccgcggacgcagtgctctgggccacagggggctaagggaggaaagggtttttcttttgtttttatttga

SEQ ID NO: 5278 - DNA, 546 bp, Zea mays
  Peptide Sequence Number=SeqID_47057
atggccacgctggccatgccgagccgccggggcgcgcgcgcttccagtcgtggggaaagcgggagccataactcacgcgacgtgagtgcgtggagctcatcctggcggtttggagaaggggatgcatgcgaactgtggagaaaacagtgtgtccactgttgcatgcatgcgaactggcgcgcgggtgtggagaaagcagtgcatccactggtgcatgcgtccactgctcttggtgggctgcggggcgaggaaacgctaagcgagctgctggggcgttgctgggccgcggagaagaaaaaggggggacgcggggtgggctgcgcgcaggcgggccgcgctgaggtgctgctgggtcgcgggatgggctgcgaggccatgaggggagaagctaaagagcaaaggttgagattgcaagctcccgtggacacgccggtatttttaccgaggtatctagaaccgtgtaaagttcttactaatcctagttggtgcccctacacaaagggaagcccacagaaggggcaagcacctggtcaagtaactccatag

SEQ ID NO: 5279 - DNA, 1299 bp, Zea mays
  Peptide Sequence Number=SeqID_47058
atggggcccatcaaggactttaaaggagtacagagggtggtcagcgccgcgatcgtggtcgagagacgagaagaggggcacgcattgcccgtccagaggccggtctacttcatcagtgaagtactgtccgagaccaaaatccgctacccacaaatccagaagctattgtacgcggtaattctggtgcggcgaaagttgcgacactacttcgagtctcatccaatgactgtggtgtcatccttccccctaggagagatcatccagtgccgagaggcctcgggtaggattgcaaagtgggtggtggagatcatgggcgagacaatctcgttcgcccctcagaaggccatcaagtcccaagtcttggcggactttatggctgaatgggtcgacacccagcttccagcagctccgatccaaccggaactctggaccatgtttttcgatgagtcgctgatgaagacaggagcggacgcgagcctgctcttcatctcgcccctcgggaagcacctccgctacgtgctgcgcctccatttcccggcgtccaacaatgtggccgagtacgaggctctggttaatgggttgcgcatcgccatcgagctagggtccggcgcctcgacgctcgtgcccgaggcaccctcagcccccgagggtgaggcactgcgcgtcgaggaagagcggaatggggtcccgcctaatcaaaactggcagaccccgtacctgcaatatctccaccgaggagagctacccctcgacagagccgaagctcggcgactggcgcggcgcgccaagtcgtttgtcttgcttggtgacggaaaggagctctaccaccgcagcccctcaggcatcctccagcgatgcatatccatcgccgaaggtcaggagctattgcaagaaatacactcgggggcttgcggtcaccacgcagcgcctcgagcccttgttggaaatgccttccgacaaggtttctactggccaaccgcggtggccgacgccactaggattgtacgcacctcccaagggtgtcaattctatgcaaggcagacgcacctgtccgctcaggccctgcaaacaatacccatcacctggtcgtttgctgtgtggggtctggacctcgtcggtcccttgcagaaggcacccgggggctacacgcacctgctggtcgccatcgacaaattctccaagtggatcgaggtcagacccctaaacagcatcaggtccgaacaggcggtggcgttcttcaccaacatcatccatcgcttcagggtcccaaactccatcatcaccgacaacggcacctag

SEQ ID NO: 5280 - DNA, 663 bp, Zea mays
  Peptide Sequence Number=SeqID_47059
atgtggtcaacatcgagtctagaggcgagcaggggcttgggagtgagcggaggagcctcatgggcaactagaggagggccatggatgaggcgctgcgcggtggccatcaaggcggtcagagcgactcccatggtgcgctcttgttccagtgtgagggacacggcgcgctcgcgctcctgtgaggcgggcaaggcggtctggatggtggcgatggtggaggctagcgtggagtcggtggagggtaccagtgaagcccatgtggcgttggcgacaagcgagcgagtggtggggaagccacggggcagctaccaagagaagcgggctgacgagatggggtccaaggccaccacgatggcaagggagcccgtgctcatcgggtaccatgagaggcggagcccagaggggaaaaacatcggatgcacgtgcgctggctgccacgacgacgacgacgactatggcggcggcgctatgtgcgagcgcggaggtggtgcgggttgcaacggcgacgctggtcatggagggtcggggatgatggccggactgatgctgttggcggctatggtattggctacctacaaggggtccatcgtggggaggtcagtgatgaaggggagggccaacagcgctgcgcaggggggcagcggcgcgggtggcccggcatag

SEQ ID NO: 5281 - DNA, 567 bp, Zea mays
  Peptide Sequence Number=SeqID_47060
atgaacagtgcagcaacagaagtcagagctgcgaagtcagagggcaccagactgtccggtgtggcaccagacagtccggtgctgcaaggagacaaagctccaacggtcgacttcgctccgaaccctaacggttgggtgacgtggcggcacactggacagtgcacagtacctgtccggtggcgcaccggactgtccgatgtaaatttcagattacgcctattcaccccctctaggcgactttcagatggaaatctaaggatattctgttttggtgctgcgacaccgatgatgatgatgatggttctattaatgatggttctaactgtggatttttatattttctctatgaggaggttgactttggtgcaactacgctcaggtaaagaagaagaagacgtcgaggcagatctccaagagttctgggaattcgacgagtttgaggattatgctagcgacctcccccagtcagctgcctgtggtcttgacatgtccaaccttgctccttttcttaaagttgaccctgatgttgcaaaacatacaaataaggagaagtggaacttgatgtga

SEQ ID NO: 5282 - DNA, 237 bp, Zea mays
  Peptide Sequence Number=SeqID_47061
atgggagggggaggcatgctgcagggaggaaggagccgtgctgcagagaggaaggatcagtgccacagggaggagccacgccacatggctgccacacgcccacaccactgctgggagggagaaaccatgccgcagggcagccgcgccatggggagatccactagggaaggccggatctcaccaaacagaggagtcataccgcgggagaggaaggagcagaagcggaggtcggagtag

SEQ ID NO: 5283 - DNA, 2070 bp, Zea mays
  Peptide Sequence Number=SeqID_47062
atggcgaatgagggccggatgaagggcgtgcagggcgttgggggtggaactggtgacgaggaagatgggaatgaggaggtgcgagaggagctggaactcgcgctatcgctggggtggcgaagctggcacctcccgccgcggcaggagcccgctcccagctcacataactggacggcggttctgccggagtggaaccccgacgccgctggtagctcgcatgatgcgaaaacggccttgggcggacaatctatcccttctctcaggttccgagacatgttgggtggtatcctagacgcctcccatgcgggtggcagtgtggaggttgggtggggcaacctggacgaagaggatgaagacagagacctgcagaataaacggcttagagtacaacactttggcgagatacctaagatatattttgaactcaagcatgagaatttatgcagtgcatttttggatgtacggctgtcttgtttaccagaacacgaattggaatttggcttgtcccttttcccaaatgatggtagtgagagcctaagagatgccaataacgagatagtggatgatgcagaaaacccaggtgaaagaaattctgaaggtgttggaataagaatggatctctctgacgatctcctgcatctgatattctctttcttgggccagaaggatttatgcagagcaggtgttacctgcaaacagtggcgatctgctagtgtgcatgatgatttttggaagtgtttgaaatttgaaaacactaggatatcactgcagaactttgttaatatttgccgtcgttacccgagtgtaacagaactcaatttgaatggtgtcataaatgcagaaatgctagttctggaagcaatagtatttttaaggttctcccctccaattgtctcccatgttggcatattgagtatcttgtacttattggatagagtatcttgtaggcatctgaagactttgacaatgggcaagggacaactgggaggcccattttttcaagctttatctgagtgcccattattgactgctttaacagtaaacgatgcttctcttgggagtggcatccaagaagcaactattaaacatggtggattgcgtgagcttcatatttttaagtgccgtgcactcagaatatctgtcaggtgttcccaacttcaaatactgtctttgaggcgaactggcatggctcatgtatcactcaattgtcctcagttgcttgagttggacttccaatcctgccataagctttctgataatgcaattcgccaagctgctacagcttgcccgttgttggcgaaactagatatgtcatcttgttcttgtgttactgatgagacactgcgcgacataggtaactcatgtccaagtctgtctgctcttgatgcatcaaactgccccaacatttcatttgagtccgtgaagcttccaatgttagtagacttgagactgctaagttgtgaaggaatcacatctgcttcgatggttgcaatagcttacagccgtctgcttgaggcactacagcttgataattgcagcctgttgacatcagtgtctttggacttaccacatcttaagaatatgagtctcgtgcatttacgcaagtttgctgaattgaatctgcggagccctgtgctttcttacatcaaagtttccagatgttcagtgctccatcgagttagcataacatcgaccacacttcagaaattggtgcttcagaaacaagagagtttatccagcttgtcattgcaatgccacaacttgattgatgtggatcttagcgactgcgagtcattaacaaatgcgatttgtgaagtatttagtgatggaggtggttgccctaagctaagatcattgattcttgacaattgtgagagtttgagcattgtagaactgaatagcagttctttggtttgtctctctcttgctggttgccgctcgatgacatgcttaagactctcgtgcccaaatttgcaacatgtgaatcttgatggatgtgatcaccttaaaaatgcagcattctgtccagctgttggagtaccagtgaacttgtttgctgatatcaggtag

SEQ ID NO: 5284 - DNA, 620 bp, Zea mays
  Peptide Sequence Number=SeqID_47063
atggagttccccaaggagttgacacagcaggcggtggtgtggcataaacaggccaaggcacaacaagaggccgagaagcagacattgtctcaacactcagcagtagtcggtggtgaccagtcatgtattgatatcctgcgctgcttccttggtaacgcgcgagccatgatgagtacagtgtacgccacagcacagcgccgcgcggcccagaggccttatgtcaggctccgctcgctggctcacgtcacgggcagtaggccacgtggcagcatcgggcctggggtattctttgtcccaaaatcccgggaccctgctgagagtggctcgggaccccatacagagaggtcgggggacccgtcccaggggtccggtctgtacccgcggaggtcctggaccctgcctggaggtccggtccgtatatgcaggaatccgacactttctcatggggatccgggacccatcgttgatacccttggagtgtatcatcttttcccggccatgtggcggcccccggagccgtccacgtggtgggggtcgggtgctgtttacacgcgactagagatagccgcgtgggcaccgtgccttctcactgtagtaagggggtaccccctgtttcaggg

SEQ ID NO: 5285 - DNA, 417 bp, Zea mays
  Peptide Sequence Number=SeqID_47064
atggcggagccacagcccggcgagcctgggcacgtgcccgggctccggctccggcgctcctctattggcttcaacgcgagtgacgcacgatccctgccaccggcgtcctcgcctgcttctcccttgtgcaggcagtcaaacagaagcacagacagagttaacacatacggtggttcaagacgagacgatgcggtcaggctgtgcatgcagtggtctggtttttgttggatcgatccagacatcgagtggcgcgcagcaggccacagtgtgcacctccctcggcttcccagacggataatgagcgtcgatctccttcgtgctgccgttggtgaagccgctcttgtttatggcactgtttggcagatagcagatcggttaggcaggcacagaggcagtgtgcgcggcgcaaccagctag

SEQ ID NO: 5286 - DNA, 1962 bp, Zea mays
  Peptide Sequence Number=SeqID_47065
atggctcggccgccgcaggaggcgatcgacaccttcgtcagcatcaccggcgccgacgaggtcaccgcagtccgcgtgctcgagtctttctcccgtttgcggggaatctccacacttggagcatctcgcccttacaacgatgatcacaaaagaagcacagaaacgactgttgcagctctggggcagttggcgcaccggacactgtccggtgccccctgccgacctttggcgcgggccacgcgtcgctcgcggattgcgcggccgaccgttggctcaccgaacagtccggaacatggtcatgatctaaatgaagctgtgaatgcttattttaatgaaggagataggaccaccaccagaatcaatcagaatcctgtgcctgccactgccagttatgatgacatgatggagctggatgaaccacttgatcccatgttcaacagacctttgttccctagaactttgggcaacccttttgcccttttggatccaggttttgctgacataactgctggtgatatatttggacgtggaccccgagttacacaacctagggacgtgaggcagatacctattgaagttaaggacagcaatactcaaacaggcagttctggtcagggtcccattattgaggatgttactggacgtgaatctttctatggtccagaggtccatgggaccgttatagttgacgaagatgatgaagacttgccattaacactatctgctcaggatcctaagatcccaagcagtgctttgcacccaaaccatttcatgcctagtgcgcctccagtggttgatgttagtgaccataacaatgatatagaagaggagatgattaaggcagcaattgaagcttcaaaaagggaagctgacgggatgaaaaatacagcagagcgagagagagctctgcgccaagagggaatgtatgtagcagatcactctcctgacttatctgataaagaaggcggtcaaggaggaagtgggataagcgaaaggcgaggactaactacaggagaagtgggaacttctgagcaaacagtagatgaagagaacttccaagaggacaatgaagatggtgaagaacaacctttagttaggactcgttctaggcgacttcgaggcagaactattgagccagcagaaactgttcaaagggctgacagcccgccctcaagtccccaacctcatgttcaaattggtcatcagcgtaatgtggggtttccttcagtagagtggggtggtatttcttctgaagagcgtgatgaagctcttatgcttgaggctgcaatgtttggtgggattcctgaaggagcaccatatccattttccttcccagcccatggcaggtcgactcactatcccctagtagcacgtcctccatcaccatcattaacggcacagcggttgttaagggagcagcaggatgatgagtatcttgctgctctccaagctgatcgagaaaaagagttgaaggctgtgcaggaggctgaacttcgcagggtagaggaagctgcagcaagagaggctgctcttgaacgtcaaaagaaagaagaggaggagaagctaaagaaacaacgtgaggaagaggagttggaatccaagcttgcagccaaacaagcatcactacctaaggagccactacaaaatgacgagggggctgtcacagtggtagtccgcatgcctgatggtagtcgtcgaggacggcgctttctcaaatctgacaggcttcagtatctttttgatttcatagacatcagccggactttcaaaccaggaacttatagactgcaatatttactgataaaagatgtacagttagagtccatagcttattatactggagatatggcgaggtcttatcccaggcgtgccttcactgaattggagagccagatgtcactgagcgatctcggtctcactagcaagcaggaagctctgttcctagaaaaactgtctgcgtag

SEQ ID NO: 5287 - DNA, 336 bp, Zea mays
  Peptide Sequence Number=SeqID_47066
atggctcggccgccgcaggaggcgatcgacaccttcgtcagcatcaccggcgccgacgaggtcaccgcagtccgcgtgctcgaggaacatggtcatgatctaaatgaagctgtgaatgcttattttaatgaaggagataggatctttggggaagttatccgtgtggctggatgggtcggaggaggccgcaaaaatcttcatgctcgtgttgatgccccggcggcgcgcctcggcctcgagcaacgggcaacggatgaggttacttccgcgtccacttttgagaaacacttcgatccgagggtgcatgcggctgatgagcatgatctcccgccgtag

SEQ ID NO: 5288 - DNA, 225 bp, Zea mays
  Peptide Sequence Number=SeqID_47067
atgcaaaaaattccgctcgctcgccagctctcggtgttgtccaatcgaaagcgggtaaagatcccgccactgttcatgtgcgttcaggtaaccagcactctcagcatcgcccaggtgacgtgcgtcaagaagcaggcgtcgtcgtcggacgtggctgggctggagttgggccgccgcatcaggaagcccaatgccaagttcctaggagaggactgggtggcataa

SEQ ID NO: 5289 - DNA, 903 bp, Zea mays
  Peptide Sequence Number=SeqID_47068
atgatgatgagcgggaaccggaagcagagggtggcattgtcgccggtgaaggaggccgccgcggtgcccaaggaggaggtgtgggaggtccggcccggcgggatgctggtgcagaagcggagccccgacgcggacccgccgcctgtgcccaccatccgcgtcaaggtcaagttcaacggcgtctaccacgagatctacatcaattcccaggcatccttcggcgagctgaagaagctggtgtcggagaagacgggcctgcacccggacgaccagaaggtggtgtacaaggacaaggagagggactccaaggcgttcctggacatggccggcgaccccgccgccaaggccaagcgcctcctggaggagcgccggaccagcaaggccgagcgcgccgccaaggccatcgcccgcgtcgccctcgacgtcgacaagctcgccaccaaggtgtcggcgctggagacggtcgcgagcaagggcggcaaggtcgtggacgcgggacgtggcgacgctgacggaggcgctgatgcgcgagctggtggagctgggactccatcgccgccgacggggacgccaaggcgcagcggcgggcgcagggaaaaggcgtgtgcagaggcacgtggagacgctggacgccatccgcgccaagaacaaggcggcggcgcccagcagcaacaggacacggcggcccagcgcacctcccgccgcgcccgcagaaccagcagcggcggcagttccagccgccgggcgcccaccacggcgacggcgccggcgccgcagacccagacggcggcgagctgggactcgttcgacctcctgtcgtcggtgccgccgtcgacgtcggcggcggccccagtgacgagcaccaccacgccgtccccgcggttggagtgggagctcttctag

SEQ ID NO: 5290 - DNA, 1041 bp, Zea mays
  Peptide Sequence Number=SeqID_47069
atggaaaccatcgacgaggggatctgcgacgacgacgggggcagcggcgaagcgggcagtaaaccactcctggtcggcggtttaacgcgcttagccgccgataaaggcgcggaggcgacaatttttgcgtgtgcggcggcgacgggtctgtgggctctcagcaactggcatttctgcaaagctcgctcgctgttgctgtacgaaaaatcacaaatgcagcatcaaggtgccatgaatgagctcgtctcccaggcatccttctgctcccctgcctccccaccgtcctttttctcggcggcggttggccaccactcaatgctcgacttcgtgtcttgcggggtacccgagcagtggttcctgggcgaagaagcactcgataagcccatccatgatggcgcggagtgggtggccgccggaggctcgcatgactcggcgggctccgacctctccagcaacccgccggctgccgggatcgtcctgtccgagcgcgcggcgaggaggcggggcaggaagcccgggccccggtccgacaaccccggaatcagccatgtggaggcggagcggcagcggcgggagaagctcaaccgccggttctgcgacctccgggccgcggtgcccacggtgtcgcggatggacaaggcgtccctgctcgccgacgccgccgcctacatcgccgagctacgcggccgcgtcgagcagctagaggccgaggccaagcagcaggtcgcgtcgaggaagctgggcggcaacccagccatgtgcccggcctcgggggggctcgaggagaagctggaggtgcggatggtcgggcgtaatgcggcggcgttgcgtctgaccacggcctcgacacgccacgcccccgcgctcctcatgggcgcgctgcggtcgctggacctgcccgtgcacaacgcgtgcgtgagccgcgtcggcggctcggcgacggtgcaggacgccgtggtggacgtgcccgccgcgctccaggacgaaggctgcctccgcgccgcgctgctccacgtcctgcagcaggacgagagtgcctag

SEQ ID NO: 5291 - DNA, 360 bp, Zea mays
  Peptide Sequence Number=SeqID_47070
atgaacaccaattgtatccctccaccccagcaggctcctttctacccagttgtggtggaagaagttcctttggagctgcaccaccttcatgtaaggaatggtgtgatcttggaggatagctctgaggagattctagcgacccccacttcattatcagagtttcatgcctttgttgctggagcttcatcttcagcgccaccggtgccagtagctcaatcccctgctcctggaggtgatgaccctgatgattttggtgatgatggagatgatgatgcagaagaaaaagaaaacaacgatgaagatgcaaacaatgaacaagaagacaactttgttggattatggcctgtcgcagagcactaa

SEQ ID NO: 5292 - DNA, 543 bp, Zea mays
  Peptide Sequence Number=SeqID_47071
atggggggaagatctacattacctcgaggcccacacgacagagagatcgcggtgtgggcggtgagaagcggggctggcgcaagggcccgtgatgtcagcgtctacgacaatggcgcgcggtggcgtgtcctggcgcacgggctcgctcctcctgccctccgcgatgctcgcgtccacgtccgccgcgcacgctccccctaccccgcatcccctcctccgttcttatcctcatacccccacctcccttcgctactgccccctcgtctgagctccacccccaccgccgcggtgccaatgccgcagtggtggggccgagaagcgcagggtgacggtgacgtcacgtcggtggtggtgaagatggaaagcccggactgggccgtccggaagccagaggtggcgagggggaaggccggccgcggcaagaacgctcgccagatcacgtgcgtgcttctgctcaaggcgcaccacgccgcggggaagctcacgggcgccgcctccaccgcgctgtccccgtctacaccgagttccccccgcgcaatttaa

SEQ ID NO: 5293 - DNA, 111 bp, Zea mays
  Peptide Sequence Number=SeqID_47072
atggagaaccaccagggaaaacacgtgccaccacaagggtgggaggttctcgtgttgattttgctgcgatggtggtcagacaagggattcttgcaagtgctcttcccataa

SEQ ID NO: 5294 - DNA, 597 bp, Zea mays
  Peptide Sequence Number=SeqID_47073
atggcggaatcggtgacagccgataccagagcgcatggcgaggaagcttcgcagtttgatgagagtgtggccgagcgaattttatggcacggactggagaaggactcagcgagcaacaacgcgaggagtaaagtgaggtcgcggttgggcgaacgctatggcacggactgccccgcggccaggacggctgccgcaacgcacacgacgtcgctacgccacaacaccaccatggccaggaacagaggcgcgagcagcttgcaggagaggccgaacactagaaacgacggtcgggtcgctcatgagctcggtatgggcaagctagtttccatggtgagcgacggcgacacgaatagtgctaggcgcggcttggctggagaagacacaagtcccagcgagcagagaggcacggtccgagcacagggtgatggggcgcgctggagatggccgagaaggagaagtccaagcgtcgtccatagaagaaacctcggctgggcgtgcgctgggcgtacaggaagctcggttgaggacagaaccgagcagggtatgtcgagtagggaggtcgacgcggctggcaagggagctagactgagcagatag

SEQ ID NO: 5295 - DNA, 375 bp, Zea mays
  Peptide Sequence Number=SeqID_47074
atggagattctgctcgtcggtggggagatcgtggtggatggccacatccccaccgctgctgccattgacgacaccaagcttcgatgtcgtgtgcgctcatttaccaggcctaccgcagggaacatcttctatctcggatctctcgagacttgtgtagatggccgcaaccccaggtttgctgccaacaacgacgacgagtttctaggtctcttccccgccgagagtcaccacgtgcgctccgcctacacggccaccgataatgacaccgaccatcgacatttccacgctggccctctttgcctgctgcagcatcccttccgcatcatcgccgccgagaagctccgcggccttatcttctatgcccagtacatatga

SEQ ID NO: 5296 - DNA, 516 bp, Zea mays
  Peptide Sequence Number=SeqID_47075
atgacctctatctctcggtttctcgctctgcctcgacgtccgcgcccctcgtcgctcggctggtgctccgaggcaggttttcagagcctctgccccatcattgccgccgagaaggtctcgggccgcatcttctacgcccgcatggagattctgctcgtcggtggggagatcgtggtggatggccataaccccactgtcgctgccattgacgacaccaagcttcgatgtcgcgtgcgctcctttaccaggcctaccgcagggaacatcttctatctcggatctctcgagacttgtgtagatggtcgcagccctaggtttgctgccaacaacgacgacgagtttctaggtctcctccccgccgagagtcaccgcgtgcgctccgcctacacggccaccaataacgacaccgaccatcgacctttccacgctggccctatttgccggctgcagcatcccttccgcatcatcgctgccgagaagctccccggccttatcttctatgcccggtacatatga

SEQ ID NO: 5297 - DNA, 1653 bp, Zea mays
  Peptide Sequence Number=SeqID_47076
atggagatcacggccagctgcgacgacggcgcggtcacagctggcgccgtttctggtctgctgctcgcgtctgttctgtctctgttcggcgcgtttctggtatacttctacgcgccgttctggagcgtgaggagagtcccggggcctccagccaggttcccaatcggccacctccatcttcttgccaggaacgggccagacgtcttccgtgcgattgcgaaagagtatggcccaatcttcaggtttcacatgggaaggcaaccactggtgatcgtggccaatgccgagctgtgcaaggaggtcggcatcaagaagttcaaggacatccccaaccggagcaccccgccgccgtcgatcggttccctgcaccaggacgccctcttcctcaccagggactcgacgtggtcggcgatgaggagcacggtggttccgctctaccagccagcgcggcttgccgggctcattccggtgatgcagtcgtacgtcgacacactggcggcgaacatcgccgcctgcccggaccaggactgcgtccccttctgccagctctcgctccggatggccatcgacatcatcggcaggacggccttcggcatcgagttcggcctgtccaagaacgccgcaggcacaggcagcagcagcagcgagtccccaggcggcggcgagggcgagggcgacgtcagggaattcctcagggagtacaagcggtccatggagttcgtcaagatggacctgacgagctctctgtccaccatcctcggcctcttcctcccgtgcgtccagacgccgtgcaagcgcctgctgcggcgggtgcccggcacggcggactacaagatggaccagaacgagcgccgcctctgctcccgcatcgacgccatcatagccggccgccggcgggaccgggccacgcgccggcgttgcggccccggcgccgcccccgcccccgccccgctggacttcatcgcggcgctgctggatgcgatggagagcgggcggcggcggcggcggcggtgcaggcacgtgcgcgcgctggcgtacgagcacctcatcgccggcaccaagaccacggcgttcacgctgtcgtcggtggtgtacctggtctcgtgccacccgctcgtggaggccaagctgctgcgggagttggacggcttcgcgccgcgccgcgggcgcgggcgcgcgccggacgccgacgagctccagagcgggttcccctacctcgaccaggtcatcaaggaggccatgcggttttacgtcgtctcgccgctcatcgccaggcagacctccgagcgcgtggagatcgggggctacgttctccccaagcagggcgcgtacgtttggctggcgccgggtgtgctggcccgggacgcggcgcagttcccggacccggaggagttccggccggagcggttcgcgccggaggcggaggaggagcgggcgcgccacccgtacgcgcacatccccttcggcgtcgggcccagggcgtgcatcgggcacaagttcgcgctgcaacaggtgaagcttgccgtggtggagctctaccgccggtacgtgttccgacactcgccgtccatggagtcgcccatccagttcgactttgacctcgtccttgccttccgccacggcgtcaagctcagggccatcaggaggggctga

SEQ ID NO: 5298 - DNA, 684 bp, Zea mays
  Peptide Sequence Number=SeqID_47077
atggagaggtcgttgtcgtgcgcggagaggggcagccagtacggcgccggggcgggggcgggggcgatgaacctccggagctacagcgcctcctacgagcgaccgacgacagcggcgccgtccacggtgcagcgcgccaggagcgtgagctcgtggagcacgccgccggcgccgccgcccgtgcagcgggccgggagcaccaagagcggccccaccgccgccgccggtggccgggccgccccggggctgaacctgcgctcctacagcgcctcctacgcggcctcctacgggcccaccctggccgataccggcgggcagctgaagcgctccggcagcgtcaccaactggacctccgccaaccgccgctccgtcaacctgagggggaggaagctgcgggcgggggcggacgacgccgaggtgcagcggcggcggctggtcgtgtacaagacgtacggcgtggaaagggaaggtccgggagtcggtgcgccgcggcgtcagctggatcaagggcaagtgctccggcgcggcctacggctggtggtgatcgatcgccagctcccatcgccgtgccccaccggcctatcggagtggtactactacggcaagactgctgttgatggcctctttgaaaaggccggcttcggattcactattgtaactgtatctcagaagccggtgaagtga

SEQ ID NO: 5299 - DNA, 604 bp, Zea mays
  Peptide Sequence Number=SeqID_47078
atgggccgcgccggagcacggcctggccgtgtcatggccggactaaccacgccagccgcgggcagtgggtcgcgcgacgcgcgcgagggccgcgccaggcgcaccaggcaagccgcgctgcgctggccgttcgcaggaggaagcgggagcggctggggcgtcctgcgcagggactacgtgagctggccgccgcagaccgcgatgaaggccctgccgggcgcacgccgagcgctggccgcgctggcaggccacaccaagtttgccaagccaccgcaccccaggacacgctgcctccacgcacgggcggagatcatcacggggaaaagactcgggcgcgagatagacgcgtgcacagctgagaaagaggaagcagttgcaagagatgacaggtggggccaaaaaactgcggcaccagggccggcggtgctcgggttgggcgttgcccacgcgcgcgcaggccgctggggcgcatggcgcggcgcctggagtgtgctggcgcggggcacccccggcccaagccagctgggaccgatgcagcgggagggggccttgcccgttgcgtgcagaccgagggatgagcctgtggccgcgcccgcaaaagcca

SEQ ID NO: 5300 - DNA, 315 bp, Zea mays
  Peptide Sequence Number=SeqID_47079
atggcgagaagaaaggcggagagtctgtccacgcgggtccacgagtcggtgacgacaacggcacaagggcacccagtggctgaccgctctggcccacgtgtcggcgatccgccagaacagcgcgcgcgggagggcacactgtcgtttgggcccgcgagcagtggcagacaagcgtgggcgcggtcgctggtttccccggggccgccggtcagagagcggaaagagagcacggctgcccggtggccccacatgtcggcacgcccacggtgcaggattgggtcgcgcaacggaaaatgggaaatgggcccaaagtga

SEQ ID NO: 5301 - DNA, 228 bp, Zea mays
  Peptide Sequence Number=SeqID_47080
atggcgctcacctaccatcaacgtcgcggccgcccccgctcccctcccaggatggcgctcacttaccttcaacgggacgaaccttccatcgacggacttgtgaatctagcatacgcaattggagagtttggtaaatctactgaagcaggtgttacgtatcctagccatgctctggatatggttcccataagaacacttcaagttgctaggggtactcacatcctataa

SEQ ID NO: 5302 - DNA, 279 bp, Zea mays
  Peptide Sequence Number=SeqID_47081
atgcgagggacatggaggcgcgctgacagagaggcgcgcggcggcgcggggacagggaggcacgcgacggcgcggggacaaggaggcgctcggcggcggtggggaagagggtggcgctcggtggcggtgggagagagggtggcactcggcggcggtgggggagagggtggcgcggggacagggaggcgcgcggcggcgggggcaggaaggcgcgcatacaggaggtcgaggcgtgctcgaggtgttattgcaggatccctacaacaaccatgcagctaa

SEQ ID NO: 5303 - DNA, 747 bp, Zea mays
  Peptide Sequence Number=SeqID_47082
atgacggtctggggccagttccgtcccattggaaaggagcctgcgacaaaggccaggatgataaattccattgcaacagatgtggaagctttatacatgagcattgtagaaaccagaaaagttatactgaatatgaagctgatcggcgcgcgctacttcaacaagggctacgcggcggcggcaggcgcgctgaacgcgtcgatgaacaccccacgcgacatggacggccacggcacgcacacgctgtccacggcgggcggctcgcccgtgcccggcgcgtcggtgttcgggttcggaaacggcacggcgtccggcggctccccgcgcgcgcgcgtggcggcctaccgcgtgtgtttcccgcccgtgaacggcagcgagtgcttcgacgcggacatcctggcggcgttcgacgccgccatccacgacggcgtgcacgtgctgtcgctctccctgggcggcgacccctccgactacttggacgacggcatcgccatcggatccttccatgccgtccgccgcggcatctccgtcgtctgctccgccggcaactcgggccctgcactcggcaccgcctccaacctcgcgccgtggctcctcaccacgggcgctagcaccatggaccgcgagttcccgtcctacatcgtcttcgaccacaccaaggccaaggcatgcaactcctcagaatgccctcttgctagaccgccgaacagcggcctcacaaagatcaaggcacgcacgcgcccctga

SEQ ID NO: 5304 - DNA, 360 bp, Zea mays
  Peptide Sequence Number=SeqID_47083
atggtcgtgatgggttcaacatcggaaaagatgtacctctgccaggaccttgtcgatgtaggcttgctgatcgaggaccttttaactggtcacatgcctcatcatggcatggtgttcgagccccacgcgggcacggtggcgggcggcgacgtcgtgttctgcgcggccatcgtgtgcctgtcgctcctgtccatgatcatcttcgcggcttccggctcctctggcgctggggacggggaggaaggggtgaagccgcggcggcgcggacgatccaacgggcctgtgttcgtgggcggcaggggctgcggctgcggcggctgcggcgcgggggccggcgtctgcggcacctacctctcctga

SEQ ID NO: 5305 - DNA, 474 bp, Zea mays
  Peptide Sequence Number=SeqID_47084
atgcccccggaacaatacaccgtgactggggatggccgaccgagagcgtttcaatggtggcggcgcgagctctccgcttttttactgaactctctccatggtgctacagaagacaaaggaaaggggagcggtgcactactacttatctcgcggaccaccccgttttaccgccgagaagaccgcccaagtcgttgcagtacagaccccggaagaccaggcacggcgctcggccatagccgcgcaatcccgacattggcggaggtaggtgctgacccgtggtcctggtttgtcagtgagagcgcgagggcgtaccctgtgggcgtgagatgttctgccgagcgggccccacaggtcgacgaaacggggagggcaggcaagcgcatgcgagagactgcccggtggggctcctctgtcggcgcgctgcgcccggtcggggttgggccgtgcgacttagtttctccggtgggccggtga

SEQ ID NO: 5306 - DNA, 366 bp, Zea mays
  Peptide Sequence Number=SeqID_47085
atgtgggagataaggggaggccaggaagcagggacggacagccctgccttcaccggcgagctccaagtcggcgcgccatgggaggagcagaggtgcggccgaccggcggcatgggagatgggcagagagggactcgacaccagggagggcacacgtgggaacagggagcagggcgcggctaccatgggcaagctggaggccgagcgtgaccagggaaggagcaggggaggagcgcgcgccatgggaggaagtaggagggagtgccacgagagaagcagggcgcggcagccaggagataaagctgacggcaagaaaggaaatatcccaggcggtggagaggatagaggaagggcggcatggggatag

SEQ ID NO: 5307 - DNA, 210 bp, Zea mays
  Peptide Sequence Number=SeqID_47086
atggcgcagctcgccgtcgatggccaacccagcgaccagggcggcgatggagctgcccttgcggctcgctgcggtacggcggcgaaggtcccacaccgacgagaaatcccaggaacccgagccactaatcccgccaatgaagcacaatgggaccctccttgtatcgtagcgaagccccccgatcggttttcgaggactccgcgccggtga

SEQ ID NO: 5308 - DNA, 387 bp, Zea mays
  Peptide Sequence Number=SeqID_47087
atgagggagataaggggaggccgggaagcagggacggccagccctaccgtcaccggcgagctccaagtcggcgcgccatgggaggagcagaggtgcgggcgacccgcaccatgggagatgggcagagagggacttgacaccagggagggcatgcgtgggaacagggagcagggcacgactgccatgggcaaggtggaggccgagcgcgaccagggaaggagcaggggaggagcgcgcaccatgggaggaagcaggaggcagcgccgcgagagaagcagggcgcggcggctaggagataaagctgacggcaagataggaaatatcccaggtggtggagaggtgtcacactcgggttttaggggcaccaagacccgggcgcgaacataa

SEQ ID NO: 5309 - DNA, 168 bp, Zea mays
  Peptide Sequence Number=SeqID_47088
atgctggccgggctggcctggtcactggctgctggcgtgctggggcgctactgctggccgctaggctatccgcctggggatcccgcgcgggcgcaaagcttcgaagggccggaggcagtaggaggcaaccacgcagaggctctctctgggaggttgaacacggattag

SEQ ID NO: 5310 - DNA, 207 bp, Zea mays
  Peptide Sequence Number=SeqID_47089
atggaggagttccaggcggcggttcgaggcggagactcgcgaggaagtgcggaggctgaggctgaaatctacaatgcaggaggtgcagagcagtgcgatgtactcgaagtctcgaacaacacagagattgctgcaggagaagctaggaagcctgatctgactgctaagaaggcaaagctgggcgagagcatggcttcagcccgctag

SEQ ID NO: 5311 - DNA, 486 bp, Zea mays
  Peptide Sequence Number=SeqID_47090
atggcgaacggacaacgcgggatcgggtctgcgcggtcggttccttggcttggcgactgcgcttggtgcatggcttctggcgtcggggtcacggcagctgcgcggtcctgcgcggacagagtgcagggcgctaggtggcgtctgaacgttacaagttgcaaccttatgctcaatagagtggtgaatagaccttatcccaagttggcatttaagttcttcgggccttatactatcctggaaaaggatgtgtggcctgaagagattctggaccggcgtttggtgaagaaggggggtcgtgcagttccacagaatacagaatttaccccaaattcgagcattgtcgttctcgttggcggcctttctcgtgctcacatcgcggtgatcctcgccgtcatccaccggcattctcgagcgtggcgttgcggcgatgccgagttctttagcgacactgattttacagctgccaacagttcaactcatgtgtga

SEQ ID NO: 5312 - DNA, 306 bp, Zea mays
  Peptide Sequence Number=SeqID_47091
atggagcagagcagagcagagcagggcgagaggcgaggcgaccagtctccacttctgctgcttggtccaaaaaccgttataaaaagtcgcggggttctcgagacgggattttgtttgcgggcgaggacagggcggggggcgcgcaagggcgaggccacgttcgcctcctccgcgggaagcgccgcgccgccccgcgacacgacacgcatgtgccgccccgcgtttgactcggcgccgattggcaggcagctcgccggcctcggaatcggatcccccttcgcgctcgccggtgaggcttgcgagtga

SEQ ID NO: 5313 - DNA, 2262 bp, Zea mays
  Peptide Sequence Number=SeqID_47092
atggacttcgcggagctggaggccgtggagggcctccggtggccgtggcactcgtggccgccgactgctcccgccgccgcgtccctcgtcgtgcccacggccgtcctctgctcgccgctgcagcaccccacggcgcccgacctcctcccgctgctcccctacgcgccgctccgctgcgcctccccgggttgcggcgccgcgctcaacccgttctcgcgcgtgcaccacggctccgcgcgctggtcctgccccttctgcggcgccaccggcaacccgttcccgcgcctcctggcccccgacgcgctccccgccgagctcttccccacccactccagcgtcgagtactcgctgcctccggaccccgccgaggccgggggcccggggccacctgcgctcgtgttcgtgatcgatgcggccacggcggccgaggagctcgccgtgctgaaggacgaggtacgcagggtcgtgcaagggctgcccgaggggatcagggtggcgctcgtcactttcgctgcgtccgtatgggtgcacgatcttggatttgagggttgcgctcgagtggttgtgctcaacggcgagcgtgagctcgagtctgacaagatacaaaaacttctaggtgttcaccgttcaccatacaagaagttggctatgccaaggtccactgaagcacagcgatttttgctgcctgtttctgaatgtgaatttaacatcacatctgcaatagaggacctgagctccatgtctgcatgtccacgtgggcaccgccctttaagggcaactggcgcagcgatttctactgctattgctcttctagagggttgctgctcacccagtactggtggtcggattatggtctttacatctggtcctgcaacagttggtccagggtgtgttgtggaaactgatcttgggaaagcaattcgttctcatcgtgacatattcaatagcaacgcacctttgactgacaaagcacgtgatttctataagaaagttgcaaagaggttgacagatcatgcattagttcttgatctgtttgcttgctcccttgatcaggttggggccgcagagctgaggaatccaattgaagtgtcagggggtttaatggtgcatacagaatcatttgagtctgagcagttcaaaagctgttttaggcatatgttcaagcgtgaaggcgccaataaccttaatatgaacttcaatgcgacgattgaaatagtgacatcaaaggaggtgaagatttgtggcgcccttggtccctgcatttcccttcgcaggaaaaatagctccgttagtgataaggaaattggtgaaggtgggacaaattattggaaaactagttcactgagcagcaagaccaacattgctttctttttccgagttgattgcagtcgtaaagctgagcccccaactgtcttctttattcagttcatgacaaggtaccgagctggtgatggtagttatcgcctaagggtaacgaccgttgcaagaaggtgggctgctcctcgatctcctgaaattgctgcagggtttgatcaggaagctgctgcagctgttatggccaggcttgctgtttacagggcagagacgtaccatgttagagatgttatacgatggcttgacaagatgcttatccgcttcactgctaagtttggaaactatgtttctgaagatccatctacatttcggctgtcaacaaacttctccttgtatccacagttcatgtactacttgcggagatcacagttcattgatgttttcaacagctctcctgatgaaactgctttcttcaggttgatgctgaatagggagggagttgtggggtctctaatcatgatccagcctactctattccagtactcatttgatggaccacctattcctgtgctgttagatgtcagctccatctctcctgatgtcattttactatttgattcatacttctatatcgtgattcattatggctcaaagattgctcaatggaggaagcttggctatcacaaggacccaaaccacgaaaatttgcggaagctccttgaagcaccagaagtagatgcagaggcactattggtagaccgtttccctgtgccaaaactcataaagtgtgaccagcatggtagtcaggccaggttcctgctcgctcgcttgaatccatctgtgacacagaaaacacagctttcagagggatctgaagtcattttcaccgacgatgttagtttgcaagtgtttattgaacacttgcaggagttggctgttcagggctag

SEQ ID NO: 5314 - DNA, 1722 bp, Zea mays
  Peptide Sequence Number=SeqID_47093
atggcgatggcgatggcgaccgcgacgacttcggagcccggaggactgtgctgcgtgcaagcctttcctaaccagcacgggcacatgaacaatcccccggcggggccgggcgcgcgcgaccctaccgtgcacccatccggcagcgacacccgagcgtgcaatgcaagtgcaaggggggccgcaagcccccgcgtcgcctcgaaccgtgacgcggtgagtccactgcctcctcttctcgtcgtcgacgagccaaaccgcgtcgtggcaagcccgtcgccgcttcctcccgtcgtctacgagccgtaccgcgacgaggccatggcaggagccgacgccagggcgcactactgcgggtacctgccctgtgagagaggaggcctcgccacggcgtggcaaccgggcggcctcttcgacagaggcgtctactccgacgagcagcgcttcgaggagcccatcagcgccgacaactgtggggccgatgcaaggcaagaagtcgcgctcgcggcgcgcgtgcttgccgccgacacgtgcgcagccgggatcctcgacggcgccgcgcccttcgccgccaccagcgagaagcacatggcacctgtggcatcaccttcgccgtcctcattcctgaccacaacaacagcggctcgagttgcagtcgtggagaccaccaccagcaactcgccacccaagtgttcggcaaaatgcttgaacgtctcatcgacgcccaatctggcgttgggcgacccagaggagccggagaatatcgtcgcgtcggagcccatcgtggacaagccggtgactagcgccaacaccaagactttcccgcacgagatcaaggagctggcagtcaacgtctacgacaaggggctgaggctcgagatctattctaaggtcgggttccagacctgcgccaaggcccattccgggtcccttggtcacgaggagcaggacgccaagaccttcgcggcatggggagtggattatctagcagacccggtgtcctactccgaggagtacgggctcttgttcgacatctaccactcgaccagcaccgaggacagaattcttaccaccatgccaacctcgacatccacgctgctccactcgtcattgacatatgcacttccaggtgcttcccttccaaaccttgccttgctgagctcgatgtctctggagcatgccagcttgtgtgcacatcacgtgttggaggaattgtcaacacgcattgatgacctcttcagcaatagaatcggctccatgtccacactcatggcctacggtagtgagcttcgtgtagtccgagctgacaagtcaagacgaagccctgttggtaagataagagagctcaatgaagacataattgttcccgaatactattacgctggtggagataaactccaatcacttaatgcttggtttggtccagaggggaatattcagagaatagttgaactccaatcacttaatctaaacagtagaccatccttgtcattggtggtttcgctggagactagtacgagtcctccaattctatggccaagccgtggaccgctcaacatgtttgctatggttctatgcacacttgaggaagctgatcaatcattcatattctacagtatcagcagcttgggagcaagtaagaccaatgagttcggtgaccaaggcaatttctccatctttgttttggatcctggtgatcacgatgttcagccgatcaaaggatag

SEQ ID NO: 5315 - DNA, 219 bp, Zea mays
  Peptide Sequence Number=SeqID_47094
atgaggcaaccgagggcacctctggctggaggcaccggactgtccggtgtgcaccggacagtgtccgttgacgtcaccttattgtatgaactatacactttaggatcccttcttcctaaacggtatgttgcggcttatggcaattctgagccaacatatactacattgtatggaaaccctgatgcaacatatactacacaagcctatccagatgtttaa

SEQ ID NO: 5316 - DNA, 1644 bp, Zea mays
  Peptide Sequence Number=SeqID_47095
atgaacccttgcagcgggctcgcccacccttcgctgaggacgtggacccattccttgtcgacgcggcccaagcgcagccggtgcggcagctccgccgcctcccgccgcagcgccgcgcgccgcccgccctcctcgggcgccaccaggctggcccggcaccgcaccccgaggcgcgccaccgccgcggtcctggacgtccccgccttcacgcccaacttggcgctacccaccgccgcaacggccacccgggccgggcccggcgccggcgccaccgccaccgccacggcgcggtcgcggcccggctgcgcggcgagctgcgagaaccctgcgaggaaagcggcctgtgtcgccatgccaaggtggtttctgcagctcgattcggctcgggcggtggcgcgcctcgtccacctctgcctcctccacttcacgccttggtctcctctttatattgcggcccaagtccagttagcctgcgtttatcatcaattcatcatcaactcgatcccgtctgaggaagcaggaacgctacccttgttctatcctatccggctatccccattcggccactctccagtccgcggaagggtggcggacggcgaggaaagggtgcgaggtgagcgggaagacggcagcccggtcgattcgaggcgcggaagtgccactcggcgaggcacgaccgctggcagggctgacgcggtttccacagccgcccgcccgccttcatcagagtccataatccaagctctaaacaggttcgtccatgagcagataaggcgcgcgccacgccgcggccaccacacgtacgtaaggcgccaaccccatctccgggaaagtatgggggcgctacccgtcgcccacagtctcgctctcaccgccgcgttcctcccgtgccgccgccccgcggcccacggccggtgccggcgccggcggtacagagcggtggtggcgtacatggagccgaaccccaactcgccggcggccatcgcggggcgcctcgtcggcgcccttcccatcgtgggcctcgtggcgcgcatcctcaacgacgagggcggcgtcggcggcgacatcatcgacttcgccgagttccgccgccgcgtcagcaagaagtgcacggtcatggactccaaggccttctacgacttcaaccaacgacgcgggaagccaggcgatcccttctacgttctactgtgctgctggctggccgccatcggcgccgggctgctcaaaacggaggagatcttggaaggcgtggcgcgcctccgcatctccaacgacatcgagttcgaggaggagacgttcatcgacatgatgagggcggcaaaggagaaaagggcgaagctgaaggctcctgctccgcagataccgatggagacgcgggcggagaaggccctcgaagccatctacgtgtgctgcttcggtcaggacatggtggaggacgaggacgagaagcttctccgggcgatactgaacgccgtgttcccctccgtcgggcgggccgcggtcgagaggatggtggcgtccatggccaagcaggtggcctccggcgagaggaagcgggacgggaggaccgtgtccaaggaagtgcagcagcggcagctcaaggacctggagtttctgaagcagaacaagctggagtcgtcgtga

SEQ ID NO: 5317 - DNA, 714 bp, Zea mays
  Peptide Sequence Number=SeqID_47096
atggacatcatggtcgatcagttcgagcactgtgcatctaccaaaatattccaggttggtgtgccatactcggatccactggctgatggaccagttattcagagaccgtcggggttcgagcagctggatgggcaagtcaaggtgcttcagatagagggcgcggtgccaccgggagctgacctcgtcgcaggcggagttgctggagaggatccagaagctgaaataggaggtgcagacctggcgctccaatgtagagacgcaggtcaagacatgccagaatggaagcctgaccaattcgcatcggcgcgtccggagcgcacgctcttcggcttcaaggacccggtccctgacgccgagcccgcctccatagacgtcgaggtcgcggtggcgccgttctggaacagggaaaaggtactcattacctgctcccgccgcatcacgtacataaaacagaagatacctttggatggtgaagtcttctggagggtcaatggcaaccaatttgaaactgctgcaaggccatatgcttttatcaagattggtatgaggttgaggctatgtagaagaacactgcagcaagttcttcttaggaataagggaatgtaccatgaatcacatgaatttggtggtcatatgttcaacgctctcttagaggtattcccagttcttcgctttgcattctgctgtgcaaaactgaacattcaaatccactag

SEQ ID NO: 5318 - DNA, 1122 bp, Zea mays
  Peptide Sequence Number=SeqID_47097
atggtcaacatgtccgtccccatcgtgctctctgtcggggacgcacagcgaagggccatccaggccgacggcgccacgcgcgtcgcgctcgttgacgagcgcgaccgccccatcgccgtcctcagcgaccatgagaaaaacacattctttattgtagatatctatccgattgctaatgaaaacaatgacgttcatgttaattattgcataacctgttggtatgacaacattgagatctataagcataataaggaagaaagggtagcacggacatgggggacaactgcacctggattaccttatgtcgaggaggcaattaccaatgctggtgactggttggttggtggggacttggaggttatagaaccaatcaagtacaacgatggtctagatcagtatcgcctgtctccagcacagctgcgtgaagagtttgccaggcgcaatgctgatgcagtatttgcctttcagcttcgcaatcctgtacacaatgggcatgctcttcttatgaccgacacacgcaaacgtctccttgagatgggttataaaaaccctgttcttctgctccatccactgggaggattcacaaaagcagatgatgtgcctcttagttggagaatgaagcaacatgagaaggttcttgaggaaggtgtcctcaacccagaatcaactgttgttgcgatctttccctctccaatgcattatgctgggccaactgaggtgcagtggcatgctaaggctcgtattaatgctggtgcaaatttctatattgttggaagggatcctgctggtatgagccatcccacggagaaaagggacctctatgatgctgaccacgggaagaaggttttgagcatggctcctggcctcgagaggctcaacatccttcctttcaaggtggctgcatatgacacaaagcaaaagaaaatggatttcttcgatccatcaaggaaagatgatttcctcttcatctctggcacaaagatgcgcactcttgccaagaaccgcgagagtcccccggatggttttatgtgcccgggtggctggaaagtgctcgttgaatactatgacagcttggtgccatccgagggcagcagcaagctgcgcgagccagttgcagcctga

SEQ ID NO: 5319 - DNA, 1128 bp, Zea mays
  Peptide Sequence Number=SeqID_47098
atggctgccgcctcgaatctcgtcaacggcggcgtagcggcgctgcagattgagggggagccagaggaaccacagagtcagaccaacgcggcagcagcgttggcccctgtcccctggctgccttccgtggcggagcggtacgagcgccgcgagaagctgggcgaaggcatgttcggcgacgtgtacgaggcctgggaccgcgtgcacgaccacctcgtcgccgtgaagaggctctcggggaggaccaacgatcgcttcgtgaagacatccatccccgagttcgcgcgagaggtcatgtccctggcggcgtgtcgcggccacccttccatcgtccagctcctggccacgcacgtcgacggcaaccgcgccgacggtgactgcttcgccgtcacggagcacgccgggcccatgaacctgcgccagtacatggacgctcgccgcgcaaacggagatccgttcgacgaggacgaggtacgcgacgtcatgaggcagctccttgccggcgcggagcacacgcacggggcgggcgtcctgcacaggaacatcgtcccggagaacgtggtcgtcggcatggacggcgcgaccagtaagatggtgtacaagatatgcggcttcggcatgtccaagccggcggcgcagacagacaaggacgactctgggctgttggcgtcgcccagcccgtaccgcgcgccggagcttttcctcggctccaaggactacgacggacgggtcgacacatggtcgcttggctgcatcatggccgagctcgtcaccggcgccggcgtacctttctttggcggcgcgctggacaaagaggtctttgacaagatgatgcacgtggtcggcaccaagggcatcgtcaagtggcaagggctggagcgtgtggcgccgagggagaaggtggccagccttcagaaggtgggacaccgggagcgcggctacctgcacaagatgttcccgccgaaggtgctgtcttcggctggcttcaaggtcttggaagggctgctgcacagcaacccggatcgtaggctctccgcagcggacgcgcttaggatgccatggttccggcgtcgttgctccttgggtgcctgcttcatgcctcatggtgctagcatgaaaagcggctag

SEQ ID NO: 5320 - DNA, 1572 bp, Zea mays
  Peptide Sequence Number=SeqID_47099
atggcgtcctccgcggcgccgccggcctccccgtcgtcgcgatcgcacggcaatgcggcgggcgccggcagcagcgccacggcgatgatgctcccgggccctccggggcgcggcaacggcggctgcatcgacctcagccccgcgggcctcctggcgcacggcgccgggagcagcgtcgttgtgtccgacccgcgctccatgcagctcctctgcgtgctccccatgccctcctcctcactcgcctccttcgtcaccgccgtccgctgggcgccccccgacacgccctccctcgacgacgacgacgacgaccgtcgcccgctccgcctcgccgcgggggaccgccacggccgcatcgccgtttgggacgcccgcgcgcgggctgtgctccactggctcaacctcgacgaggcgcgcggcgttgcgccgggctccgggggcggggtgcaggacctgtgctgggtccaccacggctccggctggcacctcgcctccatccacggcccctcgctgctctgcatctgggagacgtccaacagcccgcgcgtcctctggatgttcgacgcggcgcccgagtacctctcctgcctccgccgtgatcccttcgacgccaggcacctctgcgccattggccttcgcggcttcctcctctctgcgattcccaggcaggactccgacatctctctgcaggagcaccgggtgaactgcggtgcaggggatgtcgccgacctgcagaggctggagaaggagatttcagcacctgtacccgccccggcgctcgcggcgttcccgctcttttcctcgagaatttgcttctcccccctgtggaggcagatcctcttcgtcaccttccctcgggagctcatcgtctttgacctcagctacagcactgcgctttctgttactccattgcccagggggtttggcaagttctcggatgttatggccgatcctgatatcgacatgctctattgcacccatctcgacggcaagctgagcatctggaggcgcaaggagggtgaacaagtgcatttattatgtgctgtggaagagctcatgccttcaattggtactgttgttccttctccggctgttcttgcagctacaatatggcagtcagagtctattttccgaagcattgaaaaacaatgtcaggatttggcacagccacattctttcatgattgatacaaattcagaccagaatgcttgtcaagggactatgacatatctaacgtcgatatcagaagatggcaagatctggtcgtggcttttgaaatttgacaagtccgcacttcctagcaaagctaatctaggtgcgaatctatgtgatcattccagtgcaaatgaaattatctattcaactgttaaacctactaatgtttctatttctgccactaatattgggaaggaaccaggtggtggaaacaatcctgctccagcagtgccacttgttgctctggggactcagaatggaactattgaagttgtagatgttgtggcaaatgcagtttcagccagtttttccgttcatagcagcacacatgttgcttctctcattggtttaacattttga

SEQ ID NO: 5321 - DNA, 2006 bp, Zea mays
  Peptide Sequence Number=SeqID_47100
aatggacactgccagctgcacctcggccaggtcaaaatgcatcatctaaacagtcttcaacctccaaggagcgatcagcagaggcttctggtgcagaaagttctgatgaaacatgtgaaagttttgcttttgcattagtcaatggcgctcttggtgtgtttgaagtgcatgggcggcgaatacgagatttaggccaaagtggccctcgtcatcatttgcatcttcagatggtttggttactgctatggcttaccgccttccccatgttcactcacagggaaggcatcaggaggataaagttttctcctgttgttcatgatcccttggcaaatgcccttcttcagccgcagtctcctggtacccttgtcttggagcttgattggttgtcaacccgaacaaggaaggatgaaccacttatgttatgcattgccggagctgatagtagcttccgactgattgaggctttgcgaatgatacttcaacttggggtgaagccttcttggtttgaatgcaatagtagtgataaattaactggggacagctttaaggtagcaccaacatttggagatcttcgtagttacatgattgagacaacactccctcctattggtgacgccgttgtggctgaattgctccttaaagtgttggaaccatacagaaaggaggctatagtgaacaagggagcttgtgcaagatttgcatttgctgctgcgatttttggtgatttccaagaagcacttttctggctacagctgcctcaagctcttcgccacttcctggcttcaagagagagatctgcttctgaaaagttcacgaaaaatgctgcgaattatgggcaattaagctcaatggcatttaatcaagagcaactatggttcaatgcaagtgaaaggataccttggcatgacaagctcgatggtgaagatgctttgcaaaagcatgttcatgagcttgtctctctcgggaacttagaggctgcggtttcattgttactttcaacgccacctgaaggatcaaatttttacccaaatgcattaagagcagttgtgctgtcatctgcagtctcacaatccttgcatgaacttgcagtgaaggtcccgctagcaccgcccgactccctccagcaccgccgccgactcctctcctccagcagtgctgccgcccgcctgcatccacctccagtgtcgcctgccgccctgcacctgttccagcgtccaacgccgccgacctccgtcctctcctctgcccccccccccctccagcagtccagcgccgccaggccagccctcccatccttcatcctcaagcagccgcttcaagatgctgggtgttggaatgatgcagctactttggccgcaagccatttgcatggatctgactacgcaagggtgctgcagaggtgggccgattatgttcttcgtggtgagcacaatatgtggagagctcttatcctatacgttgctgctggagcactgccagaggctttggatacacttcgcaagagccagcgcccagataccgcagccatgttcttgctagcttgccacgagacctactcacaagccttatcagaatcagagcccgaggacgacacttccgtgttagcactgacgccgacgccggagcagacggagaagctccggttcccttccaagaatgtggccgacgaggacctgatcgcagtcagtgaggtcttcgggcagtaccagcagaagctggttgcaaattccttccaagtttctgcgaagctttttgttctgtctgttggtaggtaccagacgtccagacatgacatcgggactgctgatgtggcagaatctgatggcaggaggcaggaacagacatgcagtgctagcgagtgcgcagcgaacttctcttgtggccgagatgagatgagaacagatgccatcgaggcagcagcagacgatatacttacacctgccctggagacatcgctgtcactggatccatcgtcattgccgatccgtgcagacattgttttggag

SEQ ID NO: 5322 - DNA, 609 bp, Zea mays
  Peptide Sequence Number=SeqID_47101
atgccatctgtacctcctgctgctcctaatggctcaaactctaacacattgaaccaaaacatgccctttctgcctgacactatccccagtactgcactgcaagataactcgttgcgcaatggaggttctagtagtatagttaatggtgctccatccgatgaccaatttatgtatactggtaaagttgttcatggccttcctggtggcatggatgcttcatcaagcctgctaacagcacacaatcctgctgttgggcagtttaatggacacaatggagcaacaataaagacagaatttggctactcaagcaactcagattttggattcagcaatgaggccgtgttcctagagcagtcagttggagatgtatcaggtgcatcctttagcagctctgagttgaatggacaaccactaggtggtccaattttggacacggattcatcttcatatggtttcttgagccagattcctcgtaatttcagcttttcagatttgacagaggatctcagccaaagcgcagaaatattagagaattatggtcgatcccctttcatcccttccgatgcaaataacttcccagaatctactgctggagaacatactggttaa

SEQ ID NO: 5323 - DNA, 432 bp, Zea mays
  Peptide Sequence Number=SeqID_47102
atgcacatgtcacacctcaacttcggggtgccgcccaactcgatgtgcaaggacacggccacgttcccggccgccgcgttcacgctgccggagctctgggcgctgttcctcgtcggctgcttcaagaaccccgacgtcgtggccgccttcaccctgacgccggcgtccaagctctcgtccttgcgcctgcagcagcttagcgtccgcgccaacctatcgctgtccggcgcgctgccgccgcagctggccagcatgcggtcgctccaggtgctcaccgtgttgcagaatgcgctcatccgtggcgcggtcctgaacgacattggcgcgctcgccagcctcgtgcacctcgacctcagctacaactccctcgctgaccatggcagtcattgccccaagcggccttgctcccttccccaacgctggccgccctga

SEQ ID NO: 5324 - DNA, 393 bp, Zea mays
  Peptide Sequence Number=SeqID_47103
atggcacaacgagacgatctaggtgcaagtttgtgtgtagcagtggctgagaggctaggaaagcaagcacacccgaaaacacgggcaggggcggcggcgctcggccgaacaggagcagcagcgcgcactggctgggcagtgactgcagccaagggagaggagagaggggggaaggaggagaggtggtcctcaccggccatggcggggcggcggcggccgcgccgagcagcggacggaggtggcggtgaacgggagaggagagggggaggggagagaagaaaggaaacccttgataccatattggagatcgccgtggccgccgcaaccatggaccctgccgagcaggagacgctgctccgtgtcatggagtccgtctcctccgaccgcgactaa

SEQ ID NO: 5325 - DNA, 231 bp, Zea mays
  Peptide Sequence Number=SeqID_47104
atgaccccaagtttcatcagagatgaactagctgctgatggaaagcctctgacgtgcttcgtgtcccaagagctgaagttgaatattgcctctggtgattcaaactttttggatcttgaatggctttccacctcaggcaactcaagtgatgaaagggtggagaggagaggtcagaggaaggatggcgatgactcgacgtttcgtttgactgactcagtctttctcccttaa

SEQ ID NO: 5326 - DNA, 359 bp, Zea mays
  Peptide Sequence Number=SeqID_47105
cagtggggagtagtatggaaggaggctccggagtcgaccacccaatcgtgaagagggagaaggtgcgaaggcgcagtgtgtgcagagagggccaggggaggggctctgacagagccactgagaggggaagtagacaacgaggtttcgatcgccatgaaggcgacctcagcacggggaaagataagcggtcctggtacgtgacggcccgcctgagggtggatctcaacgcaatcacaaagaacaaggttcatggcctgatcgaaggatacaaagatgccccgaacaagctggccatcgtgaaggaggacgcacacaacgatcccgtcagaattggacggagcccgctgatagtcgcctag

SEQ ID NO: 5327 - DNA, 513 bp, Zea mays
  Peptide Sequence Number=SeqID_47106
atggctcacgagatctggtccaccatcgagaaattccatgagcgcaatgatcatgtaatgaccagtagggatgaaaacgggatgggtacccgagacgggtaccggatacgggaggtgaagatcttagcgattatcgagtcgcccaactacaagagcctcattatggatgagatgttcaacaagctcaagtccatagagattgaccaccagactcgggctaagattgagaacctggatggatgcttcaactacagcgagcccgaccactacgtcgcatgttgccccaagaagggaaagcaggaggctggcccacatgaccacgtgtctggtcggcctaagggcaagcgggagtacaccttcggtaagcataagtccatgggaggattcaacaaggaggcactcaagaagaagtaccttcaaatagccaagattaaggagtgtgccttcctttcctccctcagcaacctcgaccacgactccaacgatgcaacgtattcctcaagcgtcgaatag

SEQ ID NO: 5328 - DNA, 1860 bp, Zea mays
  Peptide Sequence Number=SeqID_47107
atgggctgttcagcttccaagtgttgttcacaattgaagtgctctttgtgctcaaatgggtgcctggggcaggcacctgactccccgagggaatccaggggaaagtcaagtcgggggagagggagggtagattctagtggttcagatgattcttctggtgatgatctcggggaagatgacgatgcttttaaccatatgaatgctacaagggaatcaactgctggcatcagccgactgtcaagggtgtcgtcacagtttcttcctcccgatgcttcacgcaaggttcaggtccctttgggtaactatgacctgagatactccttcctgtctcaaagaggttactacccagaatcactggacaaggcaaatcaagatagctactgcgtacataccccatttggacctagtcctgatgaccacttattcggtgtgtttgatggccatggggaatatggagctcaatgctcgcaatttgtgaagcgaagattatgcgagaacctgctcagagataacaggtttcgtaccgatgctgtgctggctcttcattctgcttttgtggcaacgaacacacagctgcatgccgacaacttggatgactccatgagtggtactactgcagtcactatcttggtcaggggtaaaactatttacgttgcaaataccggtgattcgcgtgctgttatcgccgaaaaacaaggggatgacattgtcgctgttgacctttccatagatcaaaccccttaccggtttgatgagcttgaaagggtcaaggaatgtggtgctagggttctaacgttggaccaaatagagggcctaaagaacccagatgtgcagtgttggggtactgaagaaagtgacgatggcgatcctccaaggttatgggtgcaaaatggcatgtacccaggaactgcttttacccgtagcattggagattctgttgctgagtcaattggtgtcattgcagatcccgagatttttgtcctggatctcaattccaacaatccatttttcgttcttgctagcgatggcgtttttgagttcctttccagtcaaacagttgtcgacatggtttctaaatacaaggatcctcgagatgcatgtgcagaaattgtcgctgagtcctatcgtctttggctacagtatgaaactcgtacagatgacattacaatcatactcgtgcatattaatgggttaactgataagtttcttgatgtcttatcactgaaaaaactcaaacaacttgatgtgaaggcgcatattgagcggggcggtgaaggtgactgcttctatgtagttggtagtggtgagtatgaagttctggctattcagggagttgaactcctgacctgtagcttgcactcatgcttcgctaccgctgggcacaataagccgcttcaggcttcagttcgtgctgtgaccagtggaacattatgggctctaaagagggaggacttccgggatacttgggatctcattagtgctgaaacaaagcaggcacaaagtagtcgggaaaatggtaattatgtgcttgatatagatgagggagggcacttcggagagtggtctctcattggtgagactattgctttcactgctattgctgttggtgatgttacttgttctactatcatgaaggagaaatttgactcaattgttgggccttttcctaaactttcgcaagctgattccaagattaaagaatctctggtaactctggagaatgttgcagatggtgatttcccttttaggagggtgaagctctcagatttggaatggaaaatgtgcatatatgctgctgattgcagtgagattggtcttgtccaagtcaggggctatggtatgttaatggattctgcctga

SEQ ID NO: 5329 - DNA, 285 bp, Zea mays
  Peptide Sequence Number=SeqID_47108
atggtggtcgaagtattgaagaagtacgagatataccttcatcaattgacccctagcgccataatgagactaggggtgtttatttgggcgttatataggaaccagagatctagttcaagaacacttggcatagaatgtttggccatagaggttgagtggtcgatgccggagccgaagggcgacggtgatatgaagtatgcggtcaggcagactgtctgccagtctgactatcagactgactggcagactgaactgcagtctgacaaggttgaccagaccggttga

SEQ ID NO: 5330 - DNA, 177 bp, Zea mays
  Peptide Sequence Number=SeqID_47109
atggcgcggtggcgggcgaggtcgcggaggcggccgagatgcaggggcgcggtgggagatggcgcgacagcgtggagagcggcggcggcggcgcgtgagaagagaggaaagtccacgaccatgttgatgaagcaggacgttcgaatttgcccgtaccgttccagaaaagattcgtaa

SEQ ID NO: 5331 - DNA, 708 bp, Zea mays
  Peptide Sequence Number=SeqID_47110
atggtgcggcggccacagctgcagcagggcgctagcgcactgcgcgttagcgcatgggcgggatggtgcgagctgggctcggcgagggctcggacgtcgtacagcggcgtggcagcatggaggaggcattggggaaggagctttggcgaggggcgagtggtgcagaagaggtgccgagaggaggaaatgaagggtggcctcggcattcatggcgcagcggcgttggcagttcagcacgtgcgagtgcgggagtgggaatggagaggaaccggtggggaagaggaggggccgagctcgcggccgtccataaaaatggatccttacctccgcaccgttattattggcgccgaggttacacgtctcggcgccaatataaatagtgtcgaagtacctgctcaccgtgcagatgtgacacttacgtggccagagctcatcgccatgagcattgccgccgacctcgttttatttgccaacacagcgaccgacatgcatgcaagcaataaaaaggatcaagcaaggctttgcattttttggtgtgccaagaccctactagtgtacagacctttctttatggtgcagctattgtactcgctaaagagtaacgctacatatgtcagatcgagctccatccttgcattgggaggtgcagtagaccttgccagctgctttcgtgcattgaaaatggacgagcagtacagaagtaaatag

SEQ ID NO: 5332 - DNA, 423 bp, Zea mays
  Peptide Sequence Number=SeqID_47111
atggccatggagctgtcatggatcgaggtcgcagcccctacctggcgcaacgggtgtcgaagtttggtcccgacggtgctctacagggtgaaccgtgtagtcatcgcactcgatggtttgtggtatgcacgacaaaacacagagaattatacatactctgagttcgtgcaggtgtattacgctgcgttcttggttacaaagagttaccgagatgttgccagctctccatcgctgatgttgccagctgcacagcatgtctgctgccgtttgtctgtcaggaaaatgccggctgtcgtttgtgcccagctcccatccatttcttcaaaagcccagtccaatcaagccgtgacaggcgttgccgacagtacccgcaccgcgaccgcggagagccgagaggtggtgggtggcgccgggagcgactag

SEQ ID NO: 5333 - DNA, 237 bp, Zea mays
  Peptide Sequence Number=SeqID_47112
atggctgcgtcggggggaaatcgactgttggggcgcccccgattgctcgtcgtcgttcaaatccggccactagccgccattcaccgcgtggcaccctctctccatctcctcctccgggaggtttggatcgtgggcgttcgtggaccgtggatctctgatcttacggtcgacgttgcggaccggttcgaattggataagaatctaatcgcgaccgtccaagttgcattaaattcataa

SEQ ID NO: 5334 - DNA, 762 bp, Zea mays
  Peptide Sequence Number=SeqID_47113
atgactacgaagcgaagtaaagctccgaagatacatgatgaatcaactcctatagcttcggaggctacacctgaagttgagtgccggctatgcctgaggaaattccttctacatgaatcaaaggagcaaagatttaagagtgaggaggaggaggataaagaacagatagctccagtaatgagcttgttctttgatattgacaaaggagagtctaaggaaaaggatactgttggtacaatccttacagcagaggatattgcactgtctaatgtggtcgcgatcgtaccgagaggtccaaaggttgatctggcagctatagcggtgacacctttgacaattgtggtggttgaagagaaaattggttcttcgaaacccgcaatagcagaagacaaggcaaagggccagcaaggaatgaagaggctaaaaatgccattgaagatgacacaccccttggtgaagggcccttcgatcaaggacttggtggccgaaaaggccatgctgtcaactatgtcttccaaagatttctctaactatttggctaacatgcacctgaagggtttgtttctaagcaaggccttgaagaacaagagaaatgtcaagggtgaggctgtccatgaagagatagttaagcttaggtccgaagccttctcctctgccagcgcttcgtctaaagagaagaatttttcggatggtgacttggagggcttaatgcgttgggtgcttagtgaaattcgtgcttataaaagcattctctcagcatga

SEQ ID NO: 5335 - DNA, 345 bp, Zea mays
  Peptide Sequence Number=SeqID_47114
atgaagctgtggaaggagacttccaggagttccaagactacgacgagttctaggtgtgggttagcggcaacccccagtcggctgcctgtgaaggccgcggttatctacgtttcttttccgcactttgatttattcaaggctatgtcacacctgactggcctagcacatattgctaagacgacccttgatgatagggaagtctttgttgtggaattatcttccgagttggtggagaaggatccccatatcgagaagatgggcacccacacccgtgagctcgaggagcaagtggatgtctgggacaacaccattgaagtcctggagaaccagctccatgacttgtag

SEQ ID NO: 5336 - DNA, 516 bp, Zea mays
  Peptide Sequence Number=SeqID_47115
atggacattgaagtgtcccatgtaaaaagaaaagaaatccctttgtttgtttttcctggtggagtgtgtccttctcgtacttctagaacaacgcacaagaacagctgtgccattccaacacgtgatgtttcagctgatgatcaagtgggaaacctattgggcgttgccagttgtagtgatgctcaacataatctattgagagtgaacatccagaacactatcaggaaaaaagatgtaaatgctgaaaataacttggagatcggttctaaaaataacttggaacaaatatgcagtctgaggccccaagaatctaataataatctgaagcgtaaagtcaatcaagagctcgaggaattggatgagtcgaaaaaagagcagtactggaaaattcttgttctgtctccacaggttggcgtaggcagacttgaggatagcatcactgtcggggatggggcgatctcaggagggaggggctgcaatgttttggctgacaatgggttgaagaacacagggtga

SEQ ID NO: 5337 - DNA, 228 bp, Zea mays
  Peptide Sequence Number=SeqID_47116
atgacggtacgtcatcatgtcctatctcagccgaacccccacagacgtatggggacagtagagcccgttcatagggacctcagcgtcagagtctctacagtgacccggcggctcactgacatctggcgcgccaggggttgcaagggcttcgacaagatctttgtggtccaccacgatgatcatcagccgaaccccctggcgtacgaggttgccatcatcggccactag

SEQ ID NO: 5338 - DNA, 231 bp, Zea mays
  Peptide Sequence Number=SeqID_47117
atggggaaggaggccatcgagctacaagcgggttatccaagtgagatccaactacccttcggctgggtttggtcttggcgagctatcccactaggggtgctcgtcccgctgggggcatctcatcgagtccttccttattcgatcccgtttcggccctttggtcggtggcatgatggggtggttaccgccttgcctgttactggtgtaccccctgcggtgatgcacttctga

SEQ ID NO: 5339 - DNA, 735 bp, Zea mays
  Peptide Sequence Number=SeqID_47118
atgacgggtcccttacactccagctccggccacaacgccgccgccggcggcgggggcaagaccatcgaggaaatgtaccagaagaagacgcagctggagcacatcctgctgcgccctgacacctacattggctcggtggagaagcatacccagacgctctgggtctacgaggacggcgccatggtgaaccgctccgtcacctacgtccctggactctacaagatcttcgacgagatcctcgtcaacgccgccgacaacaagcagcgggatcccaagatggacgcgctccgcgtcgagatcgacgtcgacggctgctccatctccgtatacaacaacggcgacgggatacccgtcgaggtccaccaggaggagggcgtctacgtgccagagatgattttcggccacctcctcaccagtagcaactacaacgacaacgagaagaagacaaccggcgggaggaacggatacggcgccaaactcactaacatcttctccacggagttcgtcatcgagaccgctgatggacgtcgccaaaagaagtacaagcaggttttctctgaaaacatggggaagaagtcagagccccagattaccaagtgcaagcagggcgagaactggaccagggtcaccttcaagcctgatcttgccaagatttatgagcaagtaaatgatcggtgggaagtgtgtgttagtcaaagcgaagggcagtttcagcagttgagaaatctagtgtaa

SEQ ID NO: 5340 - DNA, 381 bp, Zea mays
  Peptide Sequence Number=SeqID_47119
atggcaggctgctgcatcgcggtgcacctccccgggcgcgcgtcgcgggaggccagggagcactacgaagtgctcgtcgccgaagtctgcctcatgcggcgcgggcgcgagcgcagcctcggccaggcgcgcagagccgctcttctacggcgccagtgcgccaccacgtgcagcgggaccatggcgtggacaggctctcctgggtcggcaacgcgacgactagggacaccaatatttgcggcgaatgcggccatggcgagccacggccaggccggcacaacccctgaccgggcgccgggcactgcagccgggcgcggccatggcgacccgctgaccaggcacacacgagccccggcttcaaatgcatgcgagcatgcatga

SEQ ID NO: 5341 - DNA, 201 bp, Zea mays
  Peptide Sequence Number=SeqID_47120
atgcagaaaactcgcgagtggggtggggcaagctgctggatggccggcgcaggaggaaacgcagctaaagccggcgagctggacggcgatggggagctcgccgtggtggagagcagatgcgagcttgcggcagcgatgaacggctggtgggcacataagcacaaatcgaggagaaggacttctgttgccggccagaaatag

SEQ ID NO: 5342 - DNA, 264 bp, Zea mays
  Peptide Sequence Number=SeqID_47121
atggatctctcctacccgacggggtccctcctaggaggcaagattcagattcatgcgaaggagaaggccatgcgccatcgtgatcgtccgagccctagacgtggaccgtctagaagcacgaagggaaggagccgctcctacagtgcaccggacagtctggtgcacccgcggatagaaggaaaccagggccttccaaatggagttccaacagctcctaggtcccttagggctataaaagaccccttaggcgccatggagaagtag

SEQ ID NO: 5343 - DNA, 243 bp, Zea mays
  Peptide Sequence Number=SeqID_47122
atggcgatcattctctactgggtatacacatttaccttcttgcccatcgtgctctactgggtgtacaccgacggctaccagttgatccttcacccgcttgagcggtacaggctccacacactggacgaagaggaggagaaattcatcagcctctgcaccgttttgcaatactgtgaaagaagtgcctggcagattacaacaattcgagtcacgggggcatggtctaggtttttcgacatatag

SEQ ID NO: 5344 - DNA, 654 bp, Zea mays
  Peptide Sequence Number=SeqID_47123
atggacgcccccgaggcgtggagtagcgcatcctcctccccagagttcgagttatggccgctctaccccaaccccgccgcctcgccctcctgcgccgacgagctcttcgctgaagccggcgccgggagcccgctgccatcaccgtgtcgctgcgcagattacactatcgctggtgtggtgggccacggctccgcgtggacccacgcgcagctgcagcgagcagaggatgcggcccgctgcgtggacatcgtcgccgaaaccgtcgcctcacggctgcgcacgtcgtccatagttcaacagagccatggcatgggcgccgatcctgttctcggttccgcccaaggcgtgccaacgcgtggcgggtgcgtcggacaagattttttttcttcaattcaacagaatgagcatcgcgtccgtgaggctgccgtagtcccacaacagtttggacctcccagccacgccacccgtgacgccgctaccggctccgaggacgagccagaccgagcgccgcagatccggttcatgggagaggtccaccgcgagcacgagcggaagcgctcccgatcccggtctccgtcggcggatcgggaccgctaccgccgccgccactctcagtcacgtcgaggccttcggcggtgggtgacggctaagtga

SEQ ID NO: 5345 - DNA, 321 bp, Zea mays
  Peptide Sequence Number=SeqID_47124
atggacacaaccctggaccttcgctgcgatcgtggaaaattggtggcaaagtctgggaacgatagggttgccgcgccgtcagcgattgctcgccgtacctcaccgccgtcgtgggttccgctcctcgctgcgggcgtgccacttcacaacgtaatcgtcggtgagggcctcttctctaaattcatcgttgtcgtgccaccatctagcaccggtagagcgaagttaagagttcttagggcgcgtgatcgcggggctccgacgatcccctgccgtgcgggcgcaagcgccaccgtgctgcttgacctgggcgagggaaaatga

SEQ ID NO: 5346 - DNA, 1539 bp, Zea mays
  Peptide Sequence Number=SeqID_47125
atggacgcaggctcccgctcgatctcctcggcgaagaaccgcgccgccgccgtcgccgccgcgccccggccaccgctgcaggaggcgggctcccgcccctacatgccatcgctgagctcgggaccccgcaacccgtcggccaagtgctacgtgagtcccttggtcttggtactggagcgcgtggggtgttcgacgttttgcctgaccaagcttggctcgttctcccctcctccttctcatgtttgtgtcctgcagggcgacaggttcatcccggacaggtcggcgatggacatggacttggcgcactacttgcttactgagcccaggagggacaaggagaacgcgtcgggcatggcggcgtccccgtccaaggaggcgtaccggaggctgctcgcggagaagctgctcaacaaccggacacggatcctcgctttcaggagcaagccgccggagcccgagaacgtttcttttgcggacacgacttcctccaacctgcaggccaagccggccaaacagcggcgccacattccccagtctgccgagaggaccctagacgcaccagagctagttgacgactactacctcaacttgcttgactggggaagcaacaacgtgctatccattgctttgggagacacggtgtacctgtgggatgcatcgagcggatccacatccgagcttgtgaccgtcggcgaggacagtggtcctgttacaagcgttagctgggctcctgatggtcggcacatggccgtcgggctcaactcgtctgacgtccagctctgggacaccagctccaaccgactgttgagaacactcagaggtgcgcatgaggcaagggtaggctcgctggcatggaacaacagcgtcttgaccaccggttgcatggacggcaagatcgtgaacaatgacgtaaggattagagaccacgtcgtgcagaggtacgaggggcacagccaggaggtctgcgggctcaagtggtccggatcagggcagcagctggccagcggaggcaacgacaaccttctgcacatttgggatgtgtcgatggcatcatccatgccatctgctggccgcaaccagtggctgcataggctcgaggaccacatggccgccgtgaaggcactcgcgtggtgcccgttccagagcaacttgctggccaccggcggcggtggcagcgaccgctgcatcaagttctggaacacgcacaccggtgtgtgcctgaactcggttgataccggatcacaggtgtgcgctctgctgtggaacaagaacgagagggagctgctgagctcacatggattcacacagaaccaactcaccttgtggaagtacccatcgatggtgaagatggctgaacttaatggccatacctctcgcgtcctcttcatggctcagagtcctgatggatgcacagtagcgtcggctgctgctgacgagaccctccggttctggaacgtttttggaacccctgaaacgcccaagcctgcagccaaagcttcccacactgggatgttcaacagcttcaaacatatccgatag

SEQ ID NO: 5347 - DNA, 387 bp, Zea mays
  Peptide Sequence Number=SeqID_47126
atgggggcgtcggctgccggccgtcagggccaacaggataagcaaggggtagaagggcaaggatatatagaaagggagtggaggaccaggccgtacgcatgctaccacgaccccgtggccatggcccatgtccacgagtacaccctcaagccgctctcggagccggcggtggcgcctgtatgcaccaggacgcaccagttctgggggcgggtgcagctcttgctcagcgggatgaaggagacagttgtgacgaaagttaccagtgctagctacaccgaagagtacctcttcatggttgtcaccactgctaataagggatcagctgttccaagttattacggagcaaccatgtcaatcgactcctcacaggtgttaccggatgattga

SEQ ID NO: 5348 - DNA, 2271 bp, Zea mays
  Peptide Sequence Number=SeqID_47127
atggggtttgagaaatgtgatggaggaacatgggattggtacaaccttgagaaatcaaaacgtgttaaagcattcaggtgtggggagtttgatgcctgtattgagaaggcagaggctactcaagggactcttgtgaagaaaagagagaaatatgcaaggagagaagatgctattcttcatgcgcttgaattggagaggaagcagcttgcatcaaagtaccagactcaaggtttcagacctggaccacctggtaatatttctgcttgcacaaaacatcacaaagaccttggaagtactcgctacaagagtaagaagggcaagaagcgcaaagatgcatctgttcctcctgatgtaaaaaaagaagtgggacaatgttttctgcctgctggttcaaagagaaacttttcaggatcacttactcaaggaaatcttgtcagtaatcacatgggtgacttctcccctttgggacattctcatggaggtgccactttagaaaacaaggagagtacagttgtgaagaaaaatagatcagatggaagtgattttgaagactctcttgtttcaaaatcagacagacgcagaccactttctcaagtattgcagagcagtgaaaacttgcttcctcacttaaagcaaaatgatgattttggggctttgttaatcgcggagagtaataatccttcacttgccgcctcctggtccagaagaaataaatatacgtacatggctagtgattctggcgaaactgagagtcatagtgatttaccttctataaagatgtcttctactagaactgattttgagaatgaaagctatcttcagcatcctgtttatttttctgaggagcagacttctgacttcattgagaagcaaataaccgagtcttccgagagggaatgttcagaaagcgagactgaagatgatgctgaacttctgcagaatgcaagtgtgattctacgtacagaatcacatgctccttgtccatattctattccagtttctgacaagttcaagcatgtggattatgatgacaatgaggtgatctattctacttatatgccccagttgaatgaatatgaggaagaggatggttcttctgagctgggtgtctctcagtggcacatgaaaggtaaacgtaacaatcgtaatgccgtgaagagattagtggatatgagagatggaaatacatggttaaataaatacaatggatcattaaaaggatctttgcataacacaaatggtgggaatcccagaaaagaaggtatgcacacatctggtgagcagttttttgaggaaagcttttaccaaataaaagaggagcccaattatgattctgatgaaactaatttatttgagaacatgagccattcagagactaacttgtactatggtaaaaaatacccttcatccttgagaaccacaagagatcttagccgaggctacagttactttaatgactcttcaaatgtttctcccctaaacaaggacactgaacgaatatatcatgttgatcggaatgcatattgggatagaccttcattttaccaaaggaagttgacttcaagttttggtggcatgggaccaatgttgttcaatgttaacctcaaagttcaggccagctaccaaggagagcatgtccctcttgtctctttgatgagcagacttaatggcaaagcaattgttggacaccctatccaaattgaaatagttgaagatggttccacagcagtattctgtggtgacagtggtatgcaagagaccacagctgctccacctgcttggccaacaggtagaaggactgccatgcaaagagttccccgttcaaatccatcaggagcactgttggatggcgataatgaaggtggtcttgtgtattctgattatgagacgaaaccaaccttaagaaagtactcatcttcttcgaatcaccaggttaaggtgaataataaaatcagttctaatgctaagaggtcatcagctaagccccctaagaagtcatccaagaaaacaaacctctcaagccagaaacttagagctctctcttccatctccactgcaaaaaaccatcatggagaaggtggtcaagcgaaggcaaattggcacaatgacatatttggtggtttaatcggatcagaaggagcagttcctctagtgacatgtgtcccaacgaaggttgtgttcactaggatattggaagcagttggaaggccacctctgtctgccgctcgccgtgttagaatggctagtcctccggtacgagatcctccatag

SEQ ID NO: 5349 - DNA, 1749 bp, Zea mays
  Peptide Sequence Number=SeqID_47128
atgaaagaaggggaagaactcaatactgacaaaatacactactcgctgcgaatgaatgaaaggaagaactcaatactgacaaaatacactactcgctgcgaaatgcgagtgaatgaaaggaaagtgaatgaaaggaagaactcgatgctgacaaaatacacactctcgctgcgaatgaatggaaggaaaacgaatgaagggaagaactcgatgctgacaaaatacactcgctgggaatggatgaaaggaagaactcattttcagctcattattataagctgtcctcgctattacgagggggaaacaaaaacaaaacgaaaaatagggacacgccacatcatcgccatcctcatttcgtcctgttatctcgtagctccacagtccacacccaccatcccgttctccctctcttctcctctccaaggtccctgccacccacacaaggcttggactcttgggccggccgggggggaagaagacaagacaaacgcagccgccggcatgatggcgatctgcagcgcgcacaccaccaccatctccctgcgctccccatgcacgacgaccgtctcgaacgcggcagctggcttggtgcagaagcaagtcatcttcttgaccagcatcaacaggaggagcggcagcagaaggcgtggaggaggggtgagcaggaccttactccaggtctcgtgctccgccgacggcaacaagccagtggtgatcggcctggcggcggactccgggtgcggcaagagcaccttcatgcgccggctcaccagcgtcttcggcggcgccgcggagccgcccaggggcgggaacccggactccaacacgctcatcagcgacaccacgaccgtgatatgcctcgacgactaccactccctggacaggaccggcaggaaggagaagggcgtcaccgcgctcgacccgagggccaacaacttcgacctcatgtacgagcaggtgaaggcgatcaagcaaggccaggcggtccagaagcccatctacaaccacgtcaccggcctcctcgacccgccggagcttatcacgccgcccaagatctttgtcatcgaaggtctgcacccaatgttcgacgagcgtgtgagggacctcttagacttcagcatctacttggacatcagtgatgaggttaagtttgcatggaaaatccagcgggacatggcagagcgtgggcacagccttgaaagcatcaaggccagcatcgaagccaggaaaccagatttcgatgcatatattgatccgcagaagcagtacgctgacgccgtgatcgaagttctgccgacccagttgatccccgacgacgacgaagggaaggttctgcgagtcaagctgatcatgaaagaaggggtggacaaattcaacccggtctatctcttcgacgaagggtccaccatctcctgggtgccctgtggaagaaagctcacgtgctcttaccccggcatcaaattcgcctacggcccagacatttacttcggaaacgaggtatctgttttggagatggatgggcagttcgacagactagacgagctcatctacgtggagagccatctgagcaacctctcgaccaagttctacggggaggtgacacagcagatgctgaagcacgcggacttccctggaagcaacaacgggacaggtctcttccagaccatcgtcgggctgaagattagagacctctacgagcagattgttgccgagagggctggcgcgccagtggaagcagccaaagtttga

SEQ ID NO: 5350 - DNA, 252 bp, Zea mays
  Peptide Sequence Number=SeqID_47129
atggcgtatgaaaggagtatagttcaattgtgtccactaaactgcaattttgctctcaaaaagttttgggatgcaatctataataggtgtgtctcacagtggtctgaaagattcgttcccaacaaattgcgtggcaagggaacaaatggggtctcagatcacaattatggattcaattctgctgctggagttctaaaaggtgttgggaccttctgtatggactatcagactgcagtatttgagaagatctag

SEQ ID NO: 5351 - DNA, 376 bp, Zea mays
  Peptide Sequence Number=SeqID_47130
cacacactcgacctcggcccctaaagacggacttcgcctcgcccggccccagggctcggactcagcctcgacatcggaagacgaactccgcctcgcccgaccccagggcccagactcgacctcggaggagcctccgcctcgcccgacctcgggctcggacccgccacgtcacaggaaggccatcattaccctacctctagctagctcaggctgcgggggacaagaccggcgtcccatctggctcgcctcggggctggatcacggcacgacagcgtcgttgggaggtgcggacgagggcgtagcgcgccggaggacatgccagtttgggagtccgatggctggagaacacaccggcgccggagggcagggcggctga

SEQ ID NO: 5352 - DNA, 282 bp, Zea mays
  Peptide Sequence Number=SeqID_47131
atggcacccacgcttgcccccggcggcggacccacactcatctgcacggtggccgaggtcccgcgtagtggccagcgccaaggccatgctcgaggctatggcctcgccccaaggaggccagaggaggggtcgctagagccgagcgcaggaaatgaaggggcaccgccactggtcgaagacgccgcacaagatgagaaaggggtcacagtctcacacatgagaagagtttcagacctaaaggccaacacagaactacagaaggagtatagcttattgctctag

SEQ ID NO: 5353 - DNA, 1095 bp, Zea mays
  Peptide Sequence Number=SeqID_47132
atgaagaaaaagtattattcttttgaggaatgtatgggtttgcgtgaagtaaagtctttgcggcgcatgaatcatcctaacattgtgaagctcaaagaggttatccgagaaaatgatatattatacttcataatggaatacatggagtgtaatctctaccaacttatgaaggataaggtcaagcctttctcggagtctgaagtccgcaactggtgctttcagatatttcaggctcttgcttacatgcatcagaggggctactttcatcgtgacctcaaacctgagaatctgttggttagcaaagatgtcataaagctagcagactttggtcttgcaagggaagtttcatctttgccgccatatacagaatatgtctcaactcgctggtatcgggcaccagaagtattgctccagtcatctgcttatgattctgcagttgctgatgagattcacaagatatgcaatgtcatcggtagtccagatgagcaatcttggcctcaaggattgtcacttgcagaagcaatgaagtatcagttcccacagatcaaaggcagtcaactggccgaggtgatgacaacagccagtagcgatgcaattgacctcatctcatcactatgctcatgggatcctagcaagagaccaaaggccgcagaagtcctccagcataccttttttcagggttgtacatgtgttccactccctgtccgtccaaaagcttcatcacttcctagaacacctccatgtgttggatcaaaaggaaattcagagaacagtgtggctagaagattctcaactggaactctatctacaatgaaatctcatagcaatgcatccgcaaaattaaatggtttatctaagactgggaatcctgtacttaggcattcacggagcttgcctgaaactggccgaggagcaatacagaaggtctcatcaattacagagaaactatcccaaatgtctgtgacctctagaacacggagcgctgtgaagcctgctgcccccatgatgaaggccggacatggcaagtcggactttcttgggaagtctgacgatatccctccagcaaagaggctgacaagaaaattggtcagctaa

SEQ ID NO: 5354 - DNA, 495 bp, Zea mays
  Peptide Sequence Number=SeqID_47133
atgacaccacctcgcaggatagctcgcagctgcaaagcatgcaacccgtcccgtgaaccctcggctcggccaggcgggcgacccgcccgcgctcgcgcctgctccagatatctgacccgggaggcggcggcggcaggcaggcagggagccaacccgggagaagaaggccagggaaggtgttcatcacttgagctcatatcatcgtcagaggcaggcagcagtaagcagattccgctgttgctgagcattgtcgtcgtgggcgtggcaggccagttcgcgtggagacggggagggaacatctggtgtgcgtttgctaaccggggggcggccggcgggtggaggcgaccaggcgaggactgctctgcggcggcaaagggtttcaaaatgctggcgtgcatcgcctgctcggccaaggacggcggggatcaggacggctcccgcgccgccacgccccacggaagggacgccggcaagtccctcacctcccaggggtga

SEQ ID NO: 5355 - DNA, 219 bp, Zea mays
  Peptide Sequence Number=SeqID_47134
atgtgggactgtggccagcctagcgtcgccgccatctgcctcctcgacgaggcacagacggtccgtggccaggggcagtacggtccgcgacctggcgtagggctcgggttcccgcctgacgggccggacggtccgcgcgtgcgcaggggcgacggagttcgccgacggtgcctgaatctcgctctcgggagggaccccatcagggaggagagatcctag

SEQ ID NO: 5356 - DNA, 180 bp, Zea mays
  Peptide Sequence Number=SeqID_47135
atgaccggtggtggtggtggcaaggctcatgcagctggggagtggctcgccgaagctactaacactaacaagcagaacaaccttcttggttgtgagctgaatcttcctccaaagcttcatccccctctgtctcttaaggctggtggtgttggggacttgttctcaaaagctatgaattaa

SEQ ID NO: 5357 - DNA, 315 bp, Zea mays
  Peptide Sequence Number=SeqID_47136
atgacgaagggcccacgacgatatgagaacgtcacgccatatgaatcaagccctgaggctgaaccatgggacccgccacatgtcatcacggggacgtcaaccacgtacctgccgcatgaacagcatctgtggtggttcacttacaactggcgtgctaggggttgcaagggtagcaccaagatctatgtggtccaccacgatgatcatcaacagaaccccgtggcgtacaaggttgccattgtcggccatcagccaagctccgccttcgacacctacgaggatggcccaagtcattgcttaactgaagaagtctga

SEQ ID NO: 5358 - DNA, 252 bp, Zea mays
  Peptide Sequence Number=SeqID_47137
atgtggcagcaggaagagttgtgcgacggcgggggacaacagcagaggtcggcgtcgctgcacaagcagcagaagctcgacgacgatggtgtgcagcagcgacgcgacagcagagtatgtgcgcagagcagttcaggcgggagagcgcagagtcgagcacgaaaggagagaagagctcagccgtgggagagaaagggtgttacaatcggcttttccgactttgaaaccattagtggtaaggaaatctcgtag

SEQ ID NO: 5359 - DNA, 309 bp, Zea mays
  Peptide Sequence Number=SeqID_47138
atgaagaacaaggaccaacaccgaccaactctgcgaggaggtccagatgaccaaatcttcgatgatgaccagctctctgatgatgaccaactctccgatgatgacgaactctccaatgatgaccaactcttggatgatgaccaactctctggtgatgaccaactctccgatggtgaccaactctctggtgatgaccaactctccaatgatgaccaactcttcgatggccaactccgatggccaactctccaccaatcagcttcgggcgaccagttctccatcgagcaacctggtgaggcagagatctaa

SEQ ID NO: 5360 - DNA, 270 bp, Zea mays
  Peptide Sequence Number=SeqID_47139
atggctatctttagtcgcgtggtaaagaagttgtgcgtaggaccagaccctggctcgccccagcctcagtcgactactctggggcagcaacagcacccgaccccaccacgtggacagctccaggaccgccacgtggctagagaatatgatatgctccaaggtatcaacactcttgtaagtggttggaagttgataaacttggatgacttgaatgtggggtggttgggggtatttgcggctaaaagcgaaactcttatgggatattcttga

SEQ ID NO: 5361 - DNA, 765 bp, Zea mays
  Peptide Sequence Number=SeqID_47140
atgacagatctgggtcgtgtcagaaattatgtgctttgggccgacttattaggcacaacacaaatgtacacctattggcactgtatgcttgcttcccgcactgtacggtctgccgaatgtcgacagagccgaagtgaccgcagtcacttcgccgctccactgaccgacctgacgggaaaacggcgccgcctgcccgctccgactgttgtgccactcgacagagtgaggctgacagcagctaagtccagcctcgggcgtcataggaagctctgcctcgcccgacccagggctcggactcagcctcgaccctgtaagacggtctctgcctcgcccgacccaaaggctcggactcagcctcggcctcggaagacggtctccacctcgcccgaccccagggctcgggctcaccctcgacaccggacgacagactccgcctcgcccgaccccagggcacggactcagcctctacctcggaagacggactccgcttcgccgaccacagggctcggactcagcctcggcctcggaagacggtctccgcctcgcccgaccccagggctcggactcagcctcgacctcggaagacggactccgcttcgcccgaccccagggctcggactcagcctcggcctcggaagacggtctccgcctcgcccgaccccaaggcccggactcagcctcgacctcggaggagcctccgcctcgcccgacctcgggcttggacccgccacgtcacagggaaggccatcattaccctacccctag

SEQ ID NO: 5362 - DNA, 297 bp, Zea mays
  Peptide Sequence Number=SeqID_47141
atgaccttagggcggacgctgctgcgacgagcccctcgcccacgtccccactcgaggggtgaggacaagctaccaaggccgtggagttggaggacatgcggcacctttggcgggcgaagcaggcgacgcttcacctccgccataatgaccgcgtcaaaaaagggaccgggaaaggggatacttcgaaagggatccttctccacgaaggaagcgggcccgagccccctactgatcagaggttcgaaggctgacccctcggaagggttcgacagccgcctcagagcactcgggctctga

SEQ ID NO: 5363 - DNA, 714 bp, Zea mays
  Peptide Sequence Number=SeqID_47142
atggagtcctctggtgcaccggacatgtccggtggtgcaccggacactgtccggtggcacaccggacagtccggaactaggtgtaagcctaattccctttcactaagtctagccttgggcgtcataggaagctccgcctcgcccgacccagggctcgaactcagcctcgaccccggaagacggtctctgcctcgcccgaccccagggctcggactcagcctcggcctcgaaagacggtctccgcctcgcccgaccctagggctcgggctcaccctcgacgccggacgacagactccgcctcgcccgaccgtagggctcggactcaacctctacctcggaagacggactgcttcgcccgaccccagggctcggactcagcctcggcctcggaagacggtctccgcgtcgcccgaccccagggctcggactcagcctcgacctcggaagacggactccgcttcgcccgaccccagggctcggactcagcctcggcctcggaagacggtctccacctcgcccgaccccagggcccggactcagcctcgacctcggaggagcctccgcctcgcccgacctcgggcttggacccgccacgtcacagggaaggccatcattaccctagctctagctagctcaggctacggggaacaagaccggcgtcccatctggctcgccccggtaacaagtaatgatggcaccccgcgtgctccatga

SEQ ID NO: 5364 - DNA, 831 bp, Zea mays
  Peptide Sequence Number=SeqID_47143
atggcaggtttccaccacccactcaggcttgggtcggtgatcaggttcgagagtcttgagttcatgtctctcggcaacgagtatgacatgatactccacccaccagtcccacttgagcgtccaagctcccgtcaccgcccttctcgtcgcaggaggcagagatggagcaatcgtgatcgtgccactcagggcacaccgtgcattggaggggccattaggatggatgatggcatcgagcccctctcaaaggacttagctagtgtccacatttcactcggagtgtcgcaagccgcacctgcaccaacattcctggcaccacctcctccgatgtgggagacaccagttccccacatcattgagcgagcggtgtcaactacaccggccctcccacccgcgggttgggaggaaccgaacgctccttggagatacatggcgagggttgggggagaaccgtctgtgttcaaccccatccccttccaactgagtttcaacactagctccatcacccagatgctgagagatcccgagttcatgctccagtttctatatgtgtgtgatgagatgctctccgaaagctcggagggttatagcttcggtggtgagggttacgatccgacccaagaatgcttccacgtcgacctagagatcctcaaggaaggagatcacctcggcatgccgcgagaaggtgatcagcctccaccatgtaacccagacggggcccagactcctccagggagccatgcgactcacctcgagcaactccgggagttgcacaacaagctcggggaagagcagcaatgcttgcagcggctacgacaagctttggattga

SEQ ID NO: 5365 - DNA, 1491 bp, Zea mays
  Peptide Sequence Number=SeqID_47144
atgggatgccttgctgctctgagccgtttcatctcgtgcctcggcgaaagaggcctacccctataccgcctcttgaggaagaccgagcacttcacttggacccccgaggccgaggaagccctcaggaacctaaaggcgctccttacaaacgcgcccatcttggtgccccacgctgccggagaagccctcttgatctacgtcgccgctaccactcaggtggtcagcgccgtgatcgtggtcgagagacgagaagaagggcacgcattgcccgtccagaggtcggtctacttcatcagagcgggcgcgggcctgctcttcatctcacccctcaagaagcacctccgctacgtgttgcgcctccatttcccagcgtccaacaacgtggccgagtacgaggctctggttaacgggttgcgcgtcgccatcgagcttagggtccggcgcctcgacgcttgtggcgactcgcagcttgtcatcgaccaagtcatgaagaactcccattgccacgacccgaagatggaagcctactgcgacgaggttcggcgcctggaggacaagttctacgggctcgagctcaaccacgtcgctcgacgatataacgagactgcggacgagctggctaagatagcctcagggcggacaacggttcctccggacgtcttctcccgagacctacatcaaccctctgtcaagaccgacgacacgcccgagcctgagaaggcctcggctctgcccgaggcgccctcggctcagctcgaggcgccctcgaccccgcccgaggcaccctcagcccccgagggtgaggcactgcgcgtcgaggaagagcggaatgggaaggcacccgggggcttcacgcacctgttggtcgccatcgacaaattctccaagtggatcgaggtccgacccctaaatagcatcaggtccgaacaagcggtggcgttcttcaccaacatcatccatcgctttggggtcccgaactccatcatcaccgacaacggcacccagttcactggcataaagttcctgaacttctgcgaggaccaccacatccgggtggactgggccgccgtagctcaccccatgacgaatgggcaggtagagcgtgccaacggcatgattctgcaaggactcaagccgaggatctacaacgacctcaacaagttcggcaggcgatggatgaaggaactcccctcggtggtctggagtctgaggacgacgccaagccgagccacgggtttcacgccgttctttctagtctatggggccgaggctatcttgcccacagacttagaatacggttccccgaggacaagagcatacgacgaccagagcaactggaccagccgagaagactcactggaccagctggaggaggctcgggacatggccctactacactcgacaaggtatcagcagtctctgcgacgctaccacgcccgaggggttcggtcccgagacctccaggtgggcgacttggtgctacggctatga

SEQ ID NO: 5366 - DNA, 1692 bp, Zea mays
  Peptide Sequence Number=SeqID_47145
atggacaggcgaggaaacccagctgtcaagacaaccaccggaagatggagatctgccatcctgctgctagctaactatgggctcgcgacgtgcgccttcttcggcgtcggcgtgaacctcgtggtgttcctgcgccgggtgctccaccagggcaacgccgaggcggccaacagcatcagcaagtggactgggaccgtctacatcttctcgctcatcggcgccttcctcagcgactcctactggggccgatacgtcacgtgcgccgtcttccagatcatctacgtgatggggctggtggtcctgtcgctcgcgtcatggctcttgctggtgaagccgtccggctgcggcggcgtcaaggcgcactgcgacgggccgtcggcgcccggcgtcgcgctgttctacctgtccacctacatgatcgcgttcggcaacggagggtaccagccttccatcgcgacgttcgggtcggaccagttcgacgagacggaccccgaggaggcgcgctccaaggtggccttcttcagctacttctacctggcgctcaacgtcggctccctgctctccaacacggtgctggtgtactacgaggactcggggcggtgggtcatggggttctgggtctcggcggccgccgcggcgctggcgctcgtgctcttcctgctcggcacgcccggctaccgccacttcaagccgagcggcaacccgctcacccgcgtcgcgcaggtgttcgtcgccgcgctgcgcaagtggcgcgccgaggtcccgcgtggcgagctcctccacgaggtggtggaagcaggagaggaccctaaggtctcgggcatccgcaagatccttcacagcgacgggctcaggttcctcgacaaggcggcgacgatcacggaggaggaggaggaggagggtccgtggcggctctgcacggtgacgcaggtggaggaggtgaagtgcatcctgaggatgctgcccatctggctgtgcacgatcgtgtactcggtggtgttcacccagatggcgtcgctgttcgtggagcagggcgccaccatggacaccaacatcgggtcgttccacttccccgccgcgagcatgtcgctgttcgacgtcctcagcgtgctggcgttcatcgccatctaccggcgggtgctggtgcccgtcatggcgcggctgtcaggcaacccgcagggcctgaccgagctgcagcgcatgggcgtcgggctcgtgatcggcatggcggcgatggtggtggcgggcgtggtggaggtggagcggctgaagcgcgtggcggccccggaccagccgagctccctgagcgtgctgtggcaggtgccgcagtacgcgctgatcggggcgtcggaggtgttcatgtacgtggggcagctggagttcttcaacgggcaggcgcccgacggcgtcaagagcttcggcagcgcgctgtgcatggcgtccatctcgctggggaactacgtgagcatcatgctggtgagcgtagtcacgagcctcaccgccggtgagaagcgtccggggtggatccctgggaaccttaactcaggacacctcgacaggttctacttcctcctcgccgctctctcgctcgtggacctcgccgtctacgtcgcctgtgccatgtggtacaagggcatcaagcttgacggcggcgacggcgataacaggagaaaggtctctgcgcacgtctag

SEQ ID NO: 5367 - DNA, 1857 bp, Zea mays
  Peptide Sequence Number=SeqID_47146
atggaggactacccagaggagctgcggacgccgccggtgtcgctcgtgtcaatcgtggggtgcccagagctgcacccctcgatctcggcggcactcagctcccagcagccgcccatgaatactctggccctccccgacttcgccaaggtctccatcctggcccgcagcggtaagccccgcgaccctctcgcaccgccgcacccccccgcgggaatcctcaagaaggactggctccttaaacaccgcacccgtgccccggccgccgtcgccgcgctgttccgtgctgaccaggtctccgacgatcctgcccagtggctcaaggcctgctccgatctcgaaaacctcaagtctgcaattcagaggaaaaacactaaattattggtggtccttgtgcaggctcaagctagtgatgagttaagtgaggatgtaacggttgccctgaggaaacgtgcggaaatcgattccaatcacttggttgtgttggttgagcacgatgaagcagaatggaacagatctctgaacaagtctgttgctatttatgcggagtttagaagggattggccagaagcattgaagttctatgaggaaggtgttcgtgttttgcgtgagatgattggaacttcgacaaggttgcctccaacccaacgcctagttgagataaaagcagttgccgagcaatttcactttaagatatcgaccttgctacttcatgctgggaaagcggtagaagcaatcacatggttccgtaagcatatcagaagctatgcacgggttcttggaacaccagaagttgcttttcttcactgggaatggtttagccggcagttcctcgtctttggtgagttgatagaaacaacatctacaactattccagatacattatctcctagatttggcactgcagactatggattgactgagtgggaatttcagccagcatactactatcagttagcggcaacttacttgagagagaagagcctttctgatactgaatacaccagctatgctttgtcagaagctgaaagatttcaagattcttatgagataatagcactgttcagaaaagcttatgaatcatttcagagcctaggtgctacaagaatcgcttctgtctgtagcggtggaatggccatggaatattatgcagctggggattttagcaatgcaaaacagctttttgataatgttgctggtctgtaccgcaaagagggttggaccactttgctctgggagaacctaggatacttgagagagtgctcaatgaaacttaattccccaaaggattttatcagttattccctagagatggctgcattaccattattttctcgtagtgaagaggaaaatcgagaaaacaaaattaagagtgggcctgcaggttcccctaccatttccaggagagagaatatacagcaggaagttattaatgttttggaaagaaatcagtcatcagagggaaccgatgatggatttaataatgcgatggaagaagttactcaccttgatattgatcagataagttcgctaagaatggtacttactacgtctgttgcttttcttgatcaatctgtaaaacctggttcacctttgcttgtcagcgtgtcactcttatctcatcttccttctccagttgtggttgatcagttggaggttcaattcaatcaatctgactgtaactttgtgatacatagtagacaggaagattctcctcctttctattcaaatttgcatgaccaagttgttcaagatacttctcttacactcttcaccaatagatggatgcggttgacacatgaagcaaaatcaggtactaatgtcatgatcaggaaccttgacaatacttcatttcattaa

SEQ ID NO: 5368 - DNA, 342 bp, Zea mays
  Peptide Sequence Number=SeqID_47147
atggcgaagggaggaggtggaggccagcgcgagggtagcgccctgaagagggcggcgatcgtcgcaggggggctcgcgctggcctgggtcaccgtggagaccgctttcaggcccttaatgggccgcctccgcgctgccatctccagctccaccgacaccgcccgcgaccccgaccaggaggagcctcccgcgcctgcctctgcggcggaggcggagaaggcgtccgcaccagaggagcctgccgcggtggaggagaaagtcgaggagaaggtggtcgagttggaggagaaggtggaggaggccgccgccgacaaggccgaggttcttgaggctgagaactaa

SEQ ID NO: 5369 - DNA, 420 bp, Zea mays
  Peptide Sequence Number=SeqID_47148
atgacaatcgagtttgtgtcgcggccgccaccgtgtaccggtgggaacaaggctcgcggcatttcggccgaaagctcgataatggagacggcggggagcatccgagaggaccctcaagcggagtaccacttgcacatggagaaggcccacggctctctatggagttactcaaccgagctaggtgatgcaaacattgtgaggaaaattatctccctcctaccacaacaaaaatatgggagcatcatcaccattcttcacaccatggatgatttgagtacaatgatcctgaccattatgattggaaagattgcaacatttaaaatgtcacagaagatgggtcaagaggagctaacttctttaaggccatatgcttttgcatgcgatgaaaatgtaacaccccgagatccacaaacaccctga

SEQ ID NO: 5370 - DNA, 522 bp, Zea mays
  Peptide Sequence Number=SeqID_47149
atgggtcacacacgctcgctgctgcctctcgccctcttcttcctctcctcggtaagtgagagaggtgtgaaccgacgaggaagagcacccatccccactgcgcatcctcgattcgattccgtcctcttgcctcttgcctcttgggtgtctccgtggctagatggtgtctcccctcccttcgacctctgcggcgatctcgatgacgacgacatcgatgaacctgtcaccgtcgtccccaaggatcgtcgtctccctgctgccgcccctacgccgaacggccacaacaaccacctcctccgcttcacccgcagcctccagcgccccgcccaaaaccctaaccctagccccaattcgccaccgtctccacccctagccaccgccgaagaacaagtcgagaaggtcaagctagatggcatctccgtggctagatggcgtctcccccttccttcgacctgtgcctccactgctgagttcgccgcctccactgctgagttcgatttggtggagcctacaaccaaataa

SEQ ID NO: 5371 - DNA, 147 bp, Zea mays
  Peptide Sequence Number=SeqID_47150
atggtctgcgtcgcgtgcctgctgccgctcttcctgatcccggtggtcaacgccctcccttacctcatcgacctcatcatctgcgtccagctttttgagagcccaggtggcatggaagacatcgtttttttttgtgcggggaagtaa

SEQ ID NO: 5372 - DNA, 912 bp, Zea mays
  Peptide Sequence Number=SeqID_47151
atggcgcggctactgctgtggtggacagcgctgctcctcccatccctcctcgccggcgttggtcccgccgccgccgccgccgcgtccccgccccacgatgcgtgcctggtgcctaccatcgcgcaatccgtccttaggactcccgacacgtgctcgacgctggatcgccgccttggcgacccggtcggcgtcatcgaggaatgcaaaccgaattttgagacactggcttacttattcccagctatccggcattttgcatttgaggaatctgcaattaggccaagcataatttcgagatacggcatccatggtttcccaacactctttctcttgaactcgaccatgagagtacgatatcatggaccaaggactgttaaatcacttgcagctttctacactgatgtctcaggtatcaatgcatcggtgaagtcaactgcaggggaggccatggtacatcccttggatgatattgagcataaaaaggacgctgaacaggaaaattgcccattctggtgggctcggtcaccagagaatatacttcagcaggatacttatctagcattggcgaccgtatttgtaattttgaggttgctgtatcgtatttttccaaagatagattcctttaccagatgggcatggaggaggcacaatatgtttgcaaaattgatgggagcacatgaatatttcctcacctaccttgagcaagcaagacagaagtttcataggctatacccttcaagttcaaagcgaggaaatctgcaggagggcgcaatgaacgctaccgcttgggcttccaaatcattagcatcagtttcaattggagaaccaagtgcaattggaaggacaaactctacaactaatccaaaccttggtgtcctgctctctgatctccaggtgcagcagcatctatag

SEQ ID NO: 5373 - DNA, 2100 bp, Zea mays
  Peptide Sequence Number=SeqID_47152
atgtcgcgcgcgttgtacaggggcgtgtcggggatcggcggcaagctggcggcggcggacgaggcgtacgcgtactacgaccccaaggagcccagcgagaacagcattggcggcggcttcggccggggcggcgcgcggaagcggcacctcgcggacgcggcggtgaaggtcggggtcctgctgctggtggcggccgcgctcgtgggctcggtcgcgtgggcggggacgctctacgcggggcgcggcgcggcggcgcgcgcggccgccgccgccgcgcaccgcgggtaccggcggctgcaggagcagctggtcgcggacctgctcgacatcggcgagctcgcgggcggcggcgcccgcgccaaggaggcggaggtgtgcccgcccgagtacgaggactacgtgccctgctactacaacgtcacggacgccgtcgacgtctcggatctgggcgccggcgtcgccataagctacgaccgccagtgcacgcgcgacggcagggtcacttgcctcgtcgcgccaccgcggagctaccggattccggtccgatggcccagcggcaagggcttcatctggaaggacaacgtgcggattagcgggcacgagttctcgtccgggagcctgttcaagaggatgatggtggaggaggaccagatctcgttcccgtccgacgcgcacatggccgacggtgtggaggattatgcccatcaaattgccgagatgattgggttgcgtaatgagttcaatttcaatgaggctggaaaatattgcatgttgagtagacttgctggaagtgccggtctatttctacttaatttgacaaatatacatgcccaatgtgctggaaagtgtatgtcagagtttactactgtacctgcaaaagtcaggacagtccttgacatagaatgtggatttggtacctttggggcacatctttttgagagagatctcttgaccatgtgcattgctaactatgaagcatcaggcagccaagtgcaaattacactagagagaggcattcctgcaatgattggttcatttgcaacgaagcagcttccatatccctatctttcctttgatatggtgcattgtgcgaaatgcaatatcgaatggtacaaaaatgatggcattttcttagttgaagtgaacaggcttttgaggcctgatgggtattttgtatggacatcaaatttgaatacacatagagccttgcgtgacaaagaaaatcaaaagaaatggacagccattcgtgactttgctgagggtctttgttgggagatgctgtcacaacaagatgagacaattgtatggaaaaagacaaataaaagggactgttacaattcgagaaaatctgggcctgagctatgtggccatgatccagaatcaccatactaccaaccactaaacccctgcatatcaggcacaagaagtcagcgttggatccccattgaatatcgtaccacctggccatctcaggctagacaaaactcaacagaattggacatacatggtgtgcatcctgaagtctttgctgatgatacctcaagctgggactccatggtgcgaaactactggtctttgctatctccacttatattttcagaccatccaaagagacccggtgatgaggacccacagccaccatttaacatgctaaggaatgttttagatatgaatgctcactttggtggatttaatgctgctttactgaaggcaggaaagtctgtatgggtgatgaatgttgttcctacagatgccccaaactatctaccgctgatatttgaccggggttttatcggggttcaacatgactggtgtgatgcatttccaacttacccaagaacatatgatatggtgcacgctgatggttttctatcacttcagaagaaccacaagcatagatgttctactcttgacatattcttggaagttgaccgcatcctacgaccagagggctgggtcataatccgtgacgctgcccctcttattgaagcggcaagatctgttgttactcaactcagatgggacgcccgcgttttggatcttgacatagccagtgatgaaaaactactggtctgtcagaagccgtttctcagaaaataa

SEQ ID NO: 5374 - DNA, 447 bp, Zea mays
  Peptide Sequence Number=SeqID_47153
atgcctataaagcaaagtcgttctgctacgctagcggggaaaagaatctgcaagagcacaccgccagcagagaggaggatctgcatgagcgttgtcaaccgggagatcgccatcaccgtcgccaacccagcgttgtggtcacccaaatctacggtatggccccctctcgagttcgcgcttgccaccgccctctcttacgccagtctacggttgggagatacgtattcgccgcggggcaggtgctccggcaatggcggcttccgcttgggtcactctcgccaccgtattcaatggttagagatgggagatgatctgatccaagggctgatagcgcataccggttcaatgaaagtagcatctaatctgggccaccagattttgatcaggcggccaggaattgaggatacctcttcgtgctcggccttttgcataagatcccctcgctaa

SEQ ID NO: 5375 - DNA, 633 bp, Zea mays
  Peptide Sequence Number=SeqID_47154
atgactaacgatgtacgagggaatttcttccgaaaaggcaaggaaaaagaacgagacctatcccgaattgaacctcagaacattcagagcgtccagtttgacttttctcatcagtgttgcaaggaactcatccttgggggtcaggtttcagatcctgttagaagtgtgcagcaagaaaagattatcagaaaaccggagaatcctgatgatctatctcctcgtcactgtaagccttcttatggatcttctcgtgaagtatttaggcttcagaatgggccagagatgtgtttacttctggcccatcatagtagcgccagttccatgatcacatccctctcaatcatgaagctagtgccagcagtaagggatatttcctttcggaagcttcagcatggcatgaaccagcttgatctggcgaccagaggacgcataagggactccctgtaccggttggccagcagtcttgaacaaaggcactgtggaggattgggatcctcgggttcaaataggttcgcgtcgggcggcggcggatttgccgagacgcaggcggaccccatggatcggtcagtggcacggctccttctgcagaaaccctcctaccggaagactgccccgccgcaccggagaccttag

SEQ ID NO: 5376 - DNA, 342 bp, Zea mays
  Peptide Sequence Number=SeqID_47155
atggcgacagagatccacaagtcttcacctatcgccctctcccaacatgcaacaacgctgcccctgctcgccggccgccactccccccaccgccagttgtgtcccgtccgcaagctgcccctgctcgccggccgccactcccccatccgccaaccccgcttcttcgcctcccgcgtcgccagcgtctcgccttgcgccgtctcgcgtcgtggcaggattcaatccagaagggatgagacaaggattggtgtcggggcatggagagaggattctacacagtcagctggatgtcgtcatacagtattacgtcaaccgatgacggcagctaaggtctacagctag

SEQ ID NO: 5377 - DNA, 192 bp, Zea mays
  Peptide Sequence Number=SeqID_47156
atgaccgagaacggcatcaggttcgacgtcaagcctcccagcagcggtgggcttatcgatatcggatcggtgatgacaggtgacgagccgctgcccatatccatcgggatcggtgaagagaagagctgtgctgctgtgcggtggggagtggtgtggaggcagttcatcaacggcggagtacctgagaactga

SEQ ID NO: 5378 - DNA, 759 bp, Zea mays
  Peptide Sequence Number=SeqID_47157
atgccgcggcccccgccgccgggccgcgggaccccaggcgcaaggcggccgatccgggacttcttcgccacctggctcgccaccctccgctcaccgctcctcccgctgctccgccgcgcgctctccacctcctcctcgtccggctcctgggacgacccgctctcctccgccgccgcggctgtcgaggctcacttccaggcgcactggtccgcgctcgacgctgccgcacgccaggacccaacgcgggtcatcgccgcgggggactggcggtccccgctcgagctccccttcctgtggcttggggacgtccacccctccctccttacctcgctcctccgcacgctctcgccctcgccgcgactcctcgctgccgtcgaccgcgtcgaccgccggatccgcaccgccgtccctgccgtctccgaccgcctccgccaggcccaggaagcttttgtggccgccgaggcaaccggcgccgccgacgtggaggcgttcttggcggagctaaagggcgtcgctctcgaagccaaccggctgcgtcggggcgtactctcagacctcgtcgccgccgctggggggtaccaggcggcgctgtacctcgaggcgctctcgcgcttcgtgttgtccatgcacgaccccgaggtgctccgccgcttcgaccagtgtcgcgcctcgcctccgaaactttctgaatatcaaagtggcatagagctccacttttatggccatccctatgaaggcctctccgggttcctgatatag

SEQ ID NO: 5379 - DNA, 264 bp, Zea mays
  Peptide Sequence Number=SeqID_47158
atgggccagttgttgaggcaatccctaaaaattgaggacaagatctgcaccgctgtgcgggctgtgctccgaaacatgtcggtcgccatgatgagttctccaaaccgttggtccatccaggaccaggccgaggccgaggcaggggggggcgagctcgttgcgcagcagtacacggagacattgcttcattatccactggaagatggcatcatgttggcagtaaaatatttgctgctgcgcattccatcccgcactggttgctga

SEQ ID NO: 5380 - DNA, 1296 bp, Zea mays
  Peptide Sequence Number=SeqID_47159
atggcagcagttcgtcttcgatggatcgagggcgggcacggcgatgtcatgggccaagaagcgccgaaccgcgtgccttggacttgggcacgtccgaggatactgtgtgtgcgcgagcgcgcgagccgcgagtggccgagtgccatcaaaccgtcagcgcgtcagctgcaggcaaagcctagtatgcaccacgatctctacatacagataccgtacattgacaccaaatatgtattggttacgaacttaaagcatagtaaccgctctgtttgcctaaccatatatacgaacgaatgtgtactagcctccacggtagctgctactgctcttgctctgctacaccaccacccacaaggccagcaccgcacagccgtcagccacaacgaccgctgcatctccggggcggggcgcctcatgcccgagaagcctccaccgctccgccgtcgcccgacggcggcggggagctgggtccggtcgctccactgcaagtccatggcggccgacgacgtggccgccagagtagcggcggcgcccaagaagctcctcccgcgcgctggctgcggtgggagctccggcgacaccctcaaccacgtcgtcgtctcgtccaagcccagcaggcccaagcccaagcccaagcctaagccaagccccgaaccgaagacgaccaacaagcccaagccggtgcctgtgccgccgtcgccgcctccgggccctctcggcccggtccctgcgctcacagagctccctgccgggcactcgtcgcggcaggtggtggagatcatcttcctgtcctcgtggtcctctccgccaccgggagcgcccaccagcagcagcagcacgttcccgggcgcggtggtggagatgctgttccgcgtgcacaacccggcgcgcgccgtggcgcgcttcgaggactaccgcgccgcggtgcgcgcccgggccggcggcgcctcgcgcagcgcggccgacggcaacgagatgatgcgcttcaccccggcgccgccgtacggctcctcggccgctgccgcggcggcggccggcgaggacggcccgcgcgtccggacgttcgacggcagcggcggcgcgcacgccagcgcgcgcgggcccgcgaccggccgccgcgccatgttcctgtgcagggtcatcgccggccgcgtggcggagggggccggcgcccacgccgccgcagcggccggaaaggagcacttcgactccgtacgggttggcaggggcggcgagctggtggtgttcgaccgccgcgccgtgctcccctgcttcctcatcatctacaagctgtaa

SEQ ID NO: 5381 - DNA, 714 bp, Zea mays
  Peptide Sequence Number=SeqID_47160
atgtatctcctgtttgagaaactactaaacaagcttgaaggtccagtgttaatcctcggatcaaggattgtagatatgaacagtgatgaggaatcaaacgacagattgactgttctattcccatataatatagaaatcaagccacttgaaaatgaaaaccaccttgtaagttggaactcccaattagaagaagacatgaagatgattcagtttcaagataatcgaaatcatattatggaagtgcttgtagaaaatgatcttgaatgtgatgatttaggttcgatttgcctatctgatactatgtgccttatttcgtatcacttgatgaataacaaagatccagagtatcgaattgggaaattagttctatccacaaagagcttgtcccatgcattagaaatttttcaaggcaacaagataagtgataaggacatcatgaaattggaagcgacagatgacgccttaaagaaaattgttttctatgtgtgccctagaggaactaatttatcaattaccctcgaggccgcccgggtcggcgaggccgccagccgcccgccacccgggtcggcgaggccgcccgccgcccgactcggcgaggctgatggccgccaggagccccgcgccgttggcccccaccacgacctcaggcgaaccggacagggagcgccgcgcagcggaggagaaagcgagcgggcacggcagcagactgggtag

SEQ ID NO: 5382 - DNA, 723 bp, Zea mays
  Peptide Sequence Number=SeqID_47161
atgaagtcgaagctgctacgtcaggggatgtggctcgacaacgatgacgtggggcgaaccccctgcttcgtgggttggtctgcttcgaagatgaggcatttggcggaggcggggcagtggattaaggttttggaagtctcgctgcacaaccccgctgctggccgtctcctctgcgggccgtcccgtcgtcgtcctcgtctggcggcactgcaggccaccgtccccacgaccaccaacgccgctcgtcgtccctctgaagtcgtctgccccaagaacatcgtccgggacaccaagttaccaagggccggcaagtttttcgagttggagatgacggtccgtgactgcgacctcgacgtgtacggggtcgtcaacaatgctgtgtatgctgggtacatcgaaatagctcgtcaagagatgcttgcaagcctcggcgtctgcacggcctcgatcgtgcgcacggaccgtgccatggcgctctccgagctgaacgtcaagtacttcgcgccactcaagcagcgcggcgccaagttcgtcgtcatggtgagggttgtgcaaatcaagggtgtgcgaatgctcatggagcacttgatcgcgacgctgccggaccgcaagctcgtgctagaagcgacggccactgtcgtctgcctcaaccaagagtaccgcccaactcgcatgttcccggagatggccaagctgctgcccttcttctctcaccctaattag

SEQ ID NO: 5383 - DNA, 741 bp, Zea mays
  Peptide Sequence Number=SeqID_47162
atggagctcggcagcatgcggcttcgctgttgcccccaggcgcctccaaacaagattaaaccactacctagaacgatcagtgctggagctcggcgtctctgcagccgccgccgccgcgcaggagctctgctgcatgtcgctgccccagactcgcgtccccttgagaccgtctgcgcagacagcaccggccaaggcacaaaaccgagtatagtggatgacgcgatgtacagggacgacgacaagttttgcctggtggagatggaggtccgtgactgcgagcttgaccagtacgggcttgtcagcagtgatgtatacgtggattacctcgaaaatggtcggcagcactgtaatatgggttgtgcttcggcttctcgatcaattattacttcacctatttcttttttgtttttacttggatcctatctagctcgggaagtgtttgcttcgaggctcggcatcggcagagattcgatcgcacgaacaggcaacgctctggcactctccgagcagaaactcaactactacacgcctctcaagcgtggcgctaggttcgttgtcatggtgagggtcgtccagatcaagggcgcgcggatggtcctcgagcacttcgtcgagacgctgccgccggagcgcaagctcgtcctggaagcgacggccaccgtggtcttcctcgacaaagactaccgtccgacgcgcgtgttcccggaggtggcgtccaagatgcggctgcacttcttctga

SEQ ID NO: 5384 - DNA, 1215 bp, Zea mays
  Peptide Sequence Number=SeqID_47163
atggttggcatagctgctggtgatgctttaagtgattcagaagatatggactccattgttgaaacaatgatgcagcaacttctgtccaaggagattcttcatgagcccatgaaggacattgtagaaaagtatccaaaatggctggaagataataaagataagataagcaaagaagaatatgggcgttataataatcagcttgaactcatggtgaagcttattgaggtctatgaaaatgatcctgagaacatgactaggatttttgacatcatgcaaaacatgcaagaatgtggtcaaccccccagtgatcttgtccaagatattgtacctgatctggatctaagcaagttgggacaactggcgacacaaaaggacaacaacagccttgtgggctttcttgcgtctatccgcatccgatcgtcgtggagccctgctaaggaggccggctgcagcgcacgcgtccgcgccggccaggatggccgcgcccgcggcagaatagaaggggtaacggcggatccggccaggaaggccacgacaacgacagatccaaccatgaagacggtggtctggccaaagtgcgccagccagcctctacggcgtcagcgctcatccatcagtggcgatattcgcccgctagctcggcaagcgacagtggcgcccgcgtgtggctgcacagacaacagttggcggcgcacgggagagggggaagaggtgccacacggtcgctgggggcttgccggcagcgagggcgacgcatctgtggccgagggaccactgggggcgccgacgtcgtgtcttggagggggcacaccaggggcggtgtggctgcgtcggtgggtgcatgccggaggaagggagatccagtggtggtccctacgcacaacagagtatccagagcgagcacgacggggaggggacgcgtcctggcgccgctgtacgacgagcaaaagccctacgacagcgtatggcacgggtggccagcgccctggcacgcgaccatgggagggaggaggggggagtgttgtctgccgccaggaggtcggcggcggggaggggggtcggcctccgtcgacgcaggggaagaggggtgagccacgcgaccgcgccggagaagaagggttcggtgtcgcgtgcggatctgaccacgaagacataggagtggatggatccggcggcgaaggaggtcggcgttgtggcagaaggccatgtcgctag

SEQ ID NO: 5385 - DNA, 339 bp, Zea mays
  Peptide Sequence Number=SeqID_47164
atgggggttgtgtggccattgatcatcgacctgaggcacgtacacttcacccaacccattgatcatcgactagttactcgtacacctcactccacatatgtttccttgccatatgtcacattctttgatttctggtggagaccatttcttggtcaaaaatctgtagcctttggtattatggaaaatggtcgttcatggctattttcgacaaaaatgggggtcgtgtggccattgatcattgaccagaggcttgttcacctcaccccagatatgtttccttgccatagatcacattcttggttttctggtggagaccatttcttggtcaaaaatccgtag

SEQ ID NO: 5386 - DNA, 755 bp, Zea mays
  Peptide Sequence Number=SeqID_47165
agagaataagaacatcgtcggcccccacagaggcacccgggggctccacgcacgagtcattgccatcgacaaaatactacaagtggatcgaggtccgacccctaaacagcatcaggtctgaacaggcggtggcattcttcaccaacatcatccatcgctttggggtcccgaactccatcatcaccgacaacggcacccagttcaccggcagaaagttcctggacttctgcgaggatcaccacatccgggtggactgggccgccgtggctcaccccatgacgaatgggcaagtagagcgtgccaacggcatgattctacaaggactcaatcctcggatctacaacgacctcaacaagttcggcaagcgatggatgaaggaactcccctcggtggtctggagtctgaggacaacgccgagcagagccacgggcttcacgccgttctttctagtctatggggccgaggccatcctgcccacagacttagaatacggttccccaaagacgagggcctacgccgaccaaagaaatcaagctaatcgagaagactcactagaccagctggaagaggctcgggacatggccttactacactcggcgcggtaccagcagtccctgcgacgctaccatgcccgaggggttcggtcccgagacctccaggtgggcgacgcggacacctatggatttttgaccaataaattgtctcgaccaaaaatccaaaatgtgatctatgacatagaaacatatgtggggtaa

SEQ ID NO: 5387 - DNA, 378 bp, Zea mays
  Peptide Sequence Number=SeqID_47166
atggcgcgcgcatgcatgccaagcaaggccggctcgctgtggtcgccgtccggccaggccaccaagcaacaagatgccaagcgacgaccaccatcgccgccggacgttcttgctcccggtctactgcccaagcttctcggccaccggggcccccgcgtcaccgccggctgccgcagcctcgacggggcgcctctgctgctggatgaccaggaagaagaggaagcggctcaagcaccgccgtgcgagcaccagcggctgctgggagcgcttccgtgctcatgctgttctgtgatacggcgctatcctcgccgagcttattcctcgacttccaacctattcaccaccgctgtcagaacccttcttgtgacaaaaagttaa

SEQ ID NO: 5388 - DNA, 813 bp, Zea mays
  Peptide Sequence Number=SeqID_47167
atgccgttgtgtatgggtgggatagggttcgagggttttctcgacctgtgtgagaaggaggatccagaaaccgaagttactggagagagtgctgcagatgacagtgctggaagcacagacgaaactccatctattattgtgacaacactgcaatcatacagagtagctctgattaatgatgatgacgcaaaagctgctgagatagaatcctttttactttctatcgaggatgagaagaactctcttttgaacaaaatcactgctctagatgtggaactagcaactcaacgagaacgtatcttgcggattagtgctgattttgacaatttcaggaaaaggacagaaaatgagaagcttaacatgatggaaaatgtgcaaggggaacttatagagagttttttgcctgttctcgataactttgaaagagcaaaaatgcaaataaaggtggaaacagagggagaggagaaaataaacaatagctatcagagcattaataagcaattcatcgagattcttaattcattgggtgttgaagatgttgaaactgttggcaaaccatttgatcctatgctgcacgaggctattatgagagaagaatcatcggagtatgaagaggggatcatactccaggaattcagaaaaggcttcaaacttggggaaagactacttcgcccagcaatggtcaaggtgtctgcagggccaggccctgaaaattctggagatgatgaccctacagttgttgaagatagtgtggcacctcaaaaggttgaggatgttgaagaagacggttttgatgacggcgatgcagaatag

SEQ ID NO: 5389 - DNA, 120 bp, Zea mays
  Peptide Sequence Number=SeqID_47168
atggggaaaaaggtgtccatcgctcacttgcgagctcataaccgtttggatgcacaggtgtccatcgctcacttgcgagctcataaccgtttggatcttcaccaggtggatgaagagtag

SEQ ID NO: 5390 - DNA, 450 bp, Zea mays
  Peptide Sequence Number=SeqID_47169
atgaacgaccgtcgactgcccccgcctctacacccgcccgcccgcaatcccgccgcggccgcccgcaaccctgcacgccaccaatcccgccgcgaccaatcccacccgcacgcccgcccgcacctcaagcaccacgaatcccgcgtctcccccgccgccgaacccgcctccacccgcaccccgcctgcggagccgctccccacctccgcccgcccgcccgcgcccgacctccggaaaccccgccgtgcttccaaccgcctcctcaaaccacgccgcaaaccccaccgcacacagcttcacttccaccgcacagatctacgtgttcggggccttctcgccgccggcgaccatggcgcaccccgcctgcggagccgctccccacctccgcccacccgcccgcccaacctccagaaaaaaaaaagagaaacccactgtctccgctccgactag

SEQ ID NO: 5391 - DNA, 1115 bp, Zea mays
  Peptide Sequence Number=SeqID_47170
gcggaggctcctccgaggtcgaggtcgagtccgagcccctgggtcgggcgaggcggagaccgtcggctgaggccagagctgagtccgagccctggggtcgggcgaggcggagttcgtcgtcttccggggccgaggccgagtccaagccctggggtcgggcgaggcggagttcgtcgtcttccggggccgaggccgagtccgagccctgggatcgggcgaggcggagttcgtcgtcttctggggctgaggccgagtccgagccctggggtcgggcgaggcggagttcgtcgtcttccggggccgaggccgagtccgagccctggggtcgggcgaggcggagcttcccatggcgcccgaggccggacttggctgctgtcagcctcactctgtcgagtggcacagcagtcggagcggcgcaggcggcgctgtcctcttgtcaggccagtcagtggagcggcgaagccatccttgcattaaatgctcctgcgatacggtcggtcgtcgtggcgatttggccaaggttacttcttggcgaagactgggccttgggcgagccgaaggcgctccgctctacatggaaggcgagacgccgacgcccaaatcgacggaatcactgcccgtgcgtctccatctctcgcgctctacatggaaggcgaggcctcgccaacgccaatcgatccgctccatcaaagtcggcgccctgctctcccctgctcttgcgctctacatggaaggagttgctggtgcccaaatcgacggaatcactgctcgcggacggcggcctcgatccgcgctccgcgctctcccccgctctcgcgctctacatggaaggaaaagtcggcgccccgatcacccttgctcttgtgctctacatggaaggaggtgacggcgcccaaatcgatggaatcaaactgctcgcgaacggctgtggcgggtttggcggcgcaggagggcgcgacatgggtttgagcgggagggacgacgcctgggcccctgcgctgctgcgcaaccccgctccacgccccagcgatgggatcacccattcctcctttcgttgcgcgatgggatctagcagcggcaagaggtcctcaattttcgacgacgagctcctgtag

SEQ ID NO: 5392 - DNA, 168 bp, Zea mays
  Peptide Sequence Number=SeqID_47171
gatgttcggaggcaaatccgcattcttgaaatgcggaagagggcgctgctggaagaacagcaatcgctcatcgtgaaggctgccctccgcggatctaaagaagaagaggttttcttagcgggcgtgaatccggtagcttctacttctgttctgttgtctcacttatga

SEQ ID NO: 5393 - DNA, 486 bp, Zea mays
  Peptide Sequence Number=SeqID_47172
atgcaagcttatcgttttctagagcctgctgttcctgagatcaacgaaaatgctcatcttgtggctctattctcctgttctccgtttgaatactaccgggtaaggtggctcggattcggggagatcttagaggtggtgaaactgctcagagaaaccctggttcatacctttagtgggttcagactagaatttacgtccagggacgggggaggagcgccactaagcagactcctgctccaagtgctgggtctacttgttgctttgaacgaagaaaaggggcaattgaacattggaattccccttcgacgttggggaaaccggctcacagtagctctgggtcggttacagaaagaagggctggaattcaatctgaccaacggcgcttcgattactaagggaagaaccattacccttactagtaccaaggctagagatccggatttgaaccaaggaatggaatcaaatgcaacaagaaaaaggttctag

SEQ ID NO: 5394 - DNA, 861 bp, Zea mays
  Peptide Sequence Number=SeqID_47173
atgaaggccagccgcccggtggtgtggtacgtagtggtaatagtacgcgccccgctccgaaacaaagaaaaagttgattctacgatcccatggaaattagataaaagaatcaattattccatccctgcgaatgatcctatgcggctcgtatatctatttcgtaattcgatcacgaaaactgtgattcttgaacggaaaagaatcactgcaaagaacagaacacctcgttcccatttatcttcttgtacggagaagtccgccgctagaataataatccactccagagaagtttcttcttgggcggagttaggatctgaacttctccctgtagtggccaactacttgcaaatttatagcgaaggtgcagtaccgcagccacaagggggggcagcccaagtagttcaggggacgccaacgccagccccacaagaggcccccctaccctcaattgtgccaccttcttgttactcgctgaccgggtatgtggaggattgggttgcttgcaatccgactttcatgagtgatgctttaaatgagaatatgatgggtcggggctctttagttcactcctctggctttccagcagcttcaggtagcgggccctcccttaaccctgctgtggcctctaccccctcctcgtcgtttttccaaggggttggttctgctttggaggccgccgcggcaccggcggaacccggggaggaagttcagcagggggccattgaggctctaaatgtcgctgcgcttcccggtgttcctcaggatgagctgtttggagccatggagcaaaacctcgggacagcccgcccttcctcaggttccagcggccccgcctgcagctccaattcatcaagatattga

SEQ ID NO: 5395 - DNA, 420 bp, Zea mays
  Peptide Sequence Number=SeqID_47174
atggataaggcttacttttgtgcttttcaccttccaccggcttcgaggcaaagatatccggggccctattcttatattcacgttaatgaatggatgggtagcacggaaaatgctctttctctcggtatggttcaccacatgcctgtgatctctctcaagctaggtatcggagaagtccgtcatggaattgaagtggtagagtggtgtgacctagtttgcttagtaagtatggaaggacaaaagacgagtacagatgactactattctccggcagaaagtcactcatttcctcttaaaggtcccaaagatatgagtaaaaaactcttccaaatcaaagatttgcctattcttcgtagtacgagaatactcttacttctcattgacacagacgagaaagaatttcgtaaagctatactttag

SEQ ID NO: 5396 - DNA, 189 bp, Zea mays
  Peptide Sequence Number=SeqID_47175
atggagacaaggtattctccttattgtaaatatgtagttcgcttaagatcggagaagttttgtgaagaggtgataaagaagaggaaggcaagaaagagacgccttctaacttttgcattgttccaaagttgctccattgctatctatcagctgtggcttatcatcaatcagttcttggtcagagtatga

SEQ ID NO: 5397 - DNA, 204 bp, Zea mays
  Peptide Sequence Number=SeqID_47176
atgccgcaataccatgggccagacgcgcacccatcccgcgacctcgacctcgaccacgaccacgaccacgaccacgaccatgtggtgtgggagatccgcgaccaggagatggacgcgagggtccggcagcagcaggctatggctgaaggcagcaagactgacttcgtggagcttgccctgaatggcaagaactatctgacctag

SEQ ID NO: 5398 - DNA, 300 bp, Zea mays
  Peptide Sequence Number=SeqID_47177
ccttaatctcgtgatatcctcattgctgccgaacactggaagttgggccatcaaggccggtgcccgctgcgacgttgttgcgcggtctgggctacgcctacgtcgtggcggctcgtcggtgtactctccgaaccgcggggacagctccatcgccgccctagccgggcgctgcggcaatggcgccgccgtggtggccgcgggcgccggcgccatcgttttcgtgcaagggagaaggactcgcggccgtcgatctgatattctgcggttgggattcgatctggcctgcctgattcacgcgat

SEQ ID NO: 5399 - DNA, 429 bp, Zea mays
  Peptide Sequence Number=SeqID_47178
atgggcaagaacaagaagcgcaagcgtgagccgactcctccatcggaggagtttggtgactcggaatactcagaggaggagttctcctccgagtccgaggggtctccggctcccatccccctgcgtgagtcgtctgatgattcagacgactcccaggggcttgtggcggaggtctggacgtacatccgggccgtcgagtgctccgggctcgagagctcggatgagtctgagttctcctcgggcgaagaggactcggacggcggcgaggacgaagatgacgacgacgacgacggcgacgacgacgacggtggcgacggcgacggtgatggcggcaacggcggcggaggcagcggcggcaagggcggcagcagcgtgggcagcaccggaggcggcggcggcaagggcagcggcagcagggccagtggctaa

SEQ ID NO: 5400 - DNA, 1155 bp, Zea mays
  Peptide Sequence Number=SeqID_47179
atgcgcggaggcctcctgctagggctctacgagctgggccgcctgctcggccatggcaccttcgccaaggggtaccacgcccgccacgccgacgacaccggcgagaccgtcgccatcaaggtgctcgacaaggagaaggccctgcgcaacgacctcgtcccgcacatcaagcacgagatcgccatcctccgccgcgtgtgccaccccaacatcgtccgcctcttcgaggtcatggccactaggtccaagatctacttcaccatggagttcgtccgcggcggggagctcttcgcgcgggtcgccaagggccgcctcaaggaggacaccgcgcgcaggtacttccagcagctcatctccgccgtcggcttctgccacgcccacgacatcttccaccacgacctcaagcccgagaatctcctcgtcgacgagcgcggcgacctcaagatctccgacttcggcctctcggcagtcaccgaccagttccaccccgatggcctcctccacaccttatgtggcacaccgtcctacgtcgctctggaggtgttcgcgtgccgcggcaccaaacatatacgcctcctccgcgatgccctcagaccgcccatcttcgcccaacggctccttgccgcatatgcccgcagcggctccctcgcatcccgtcatagatctcgtgccctcaccatcccaagcccgcccccttcctcggatctaacccctcctcatgtctccacggctagagctgatatcctcgttcatggcgggtggcgcgggtgggttcatcacgcagaggcctttgaggccctgcccaaggagcacgctgccaaccacggcaagttcgtcgcgctgcagcaatccattcagtcatatcttggtgtctgcggcccctttctaccctctcctccctcgcattgggatctcatggcggttgatgatggagttgtgatggtctttgtgtggtctatgtcgttccagatagcttcaagggggctacagcagaggacgcggtcatcacggcgcttgggtcagttggacgcgtgctcgacgggccgtaggccgagctggtgcctgctgctgcagccactccgcctcgccatcgagaccaagcacgtcaaggtcgtcgaggcccatgaatccactccgcctccacgtaattactaa

SEQ ID NO: 5401 - DNA, 288 bp, Zea mays
  Peptide Sequence Number=SeqID_47180
atggggaccctccctggcgggttctttgccgagtgtagcactcggcaaagaggcagacactcgacaaagttatcaattgtgtcttcagctgttggtggatatcttctcgaggaggatttggatctgaacagaatgcttgggaggcgccattctgtcgacttgagcagacaaagagccaccaccaaaaaggtcatataccagtcccagtcccagtcccagtcccagtcccagtcccagtcccagtcctgcactactcctgcgcgtgtttacttgtatatattacggtaa

SEQ ID NO: 5402 - DNA, 174 bp, Zea mays
  Peptide Sequence Number=SeqID_47181
atgggccacctcatggacatgaaaggatacatagatagcgtgcgctgggatgtgaaggcaaccattgtggagttctggagagaagcagcaatcctcttgaaactccaccaccctaacgtgctggggttctatgggatcgtgaacaatggacctgggggacattggcaaccgtaa

SEQ ID NO: 5403 - DNA, 369 bp, Zea mays
  Peptide Sequence Number=SeqID_47182
atggcgggtttgatggcgctggcgagggagactggcgcagcgcatggagcttcggacagggactctcggtgtcgcgggacacgcggcatagcgagcggcgcagcaccagcaccacaagcagctgcagcacaagaacaacgtcgaggccataagggaaatagtgatactagcgacgaagcttcgacgtggagaatggacaccgaggcagtctttgacatcggcggcgacgagcagcaaggaggttgtgcgagtagagaacttgttgggggcgcatccgacatggtaccggacgtggctgttcgactggcagctggcgcggaacgaaccaagatgagcatcaacggtcaaagagaggcaaacagagcttga

SEQ ID NO: 5404 - DNA, 147 bp, Zea mays
  Peptide Sequence Number=SeqID_47183
atggccctggaactcaccgccctagtcaaccagaagaaaccaacaggggagatctggagccgcactcgaggagagagaaagggggagttcgtcggatcatgtggagcgaaggtcgcggcaccagggcctgctagagaggttcgctga

SEQ ID NO: 5405 - DNA, 438 bp, Zea mays
  Peptide Sequence Number=SeqID_47184
atgggcaagagcaagaaaggcggaagctcgtcgcaccactccggcgacaagcggaagcgtgagccgacccctccctcggaggacttcggcgattccgagtactcggaggaggagttttcctccaagttcgaggggtcgccagtctacacctctcccccgacatcgtctgatgactcgaacgattctcaggggatcgccaccgaggtgtggacatacatccgggccgtcgagtgctccgggctcgagggctcggatgagtcggaggtatcctcggacgaggagaactcctctaattcatccgaggaggggagcggcggtgacggcgacggcgagggcgacggcgacgatggaggcgacggtgatggtgacgacgacggcagcaagggcgacggcaagggcggcagcggcaaggtcagtggcaaagcgccactggcttag

SEQ ID NO: 5406 - DNA, 468 bp, Zea mays
  Peptide Sequence Number=SeqID_47185
atgggtgtcttagtatctggagctgtgatccagtgggtccgggcacatggcttggctccccaggctaaatcctgcaggttctattgtcctagtcgagactacctccggggggccggggcaccaactctttttaggtttgctggtatgaactacttgacatcagcagggtcgcgctggaagcgcgtggccgccatctccacggcatcttgtacgacctcccgggtgacgtcttcagtgtcggcaaccgccgggcataggcctgctgctcaccctgaacacggtggcgacagtctgggaacagcggcattggcggcaacctggtgctacagcctcctcgatgcatgcgccaaggcgaaggtacccccaccgattggaggcgacgtcgaagccattaaagccaaagagatggaggcgcgaaagatggagccacaactcagcttgctttccacctcatggaattggagctag

SEQ ID NO: 5407 - DNA, 486 bp, Zea mays
  Peptide Sequence Number=SeqID_47186
atggactccaccaccgtcgccgctgccgcctccagcaccggctcgaccctccccatcgaccctgctgtggccagcaccgccaccgcaacaaggaaagccgccgcggcccgcaccacctccgagttcggcctcctcacgcctagcgcggccaccgcctctgccgcgaccagcgagcgtgcacccggcctcatcccctccgggcttggcatcccgggcttcccgacgtgcacaggcgccctcaccgaccttcgctcaccggctcgcctctccaggaagccaccccctgggttcaccacgcgcccgctcgtcgctgacgccacctgggctcccccgacgccctctactgactctgcgctagccaccgccctcgccaccatccaggccgcagtggccgcctcgcaggagcgtgagcgcgccgtgtccctcgcttgggaacaggagcgggctatgggccaagccttgaccactcaggtagccacggcctag

SEQ ID NO: 5408 - DNA, 135 bp, Zea mays
  Peptide Sequence Number=SeqID_47187
atggaggatctaggcatcgaggcgaaggaggctgcggttcgcgaggtggcgaagctgctcccgttcccggagctcctctcctctatcgcctctatcaaatacgactaccttacgcggcagcaggaatcgttttag

SEQ ID NO: 5409 - DNA, 351 bp, Zea mays
  Peptide Sequence Number=SeqID_47188
atgcaggtggcgtgcaaccacaccacggaggcgcaccccttcgacttcgacgcatccagcatggaggcccaggcccacacgtcatgtaaccggcacgccggttactacgtgcgagatactgcaccgctacttgcgccaatgccacgccttctcgactgcggaaccagtgccgcggctcgaggaaaccctgcgcgtggcccaatagtgccagtcgagcacatcgatcacggggaccgggaaaggggatactccgaaagggatccttctctgcgaaggaagcgggccccaagccctcctactgatcaggggttcgaaggctggcccctcggaagcgttcgacagccgccctag

SEQ ID NO: 5410 - DNA, 249 bp, Zea mays
  Peptide Sequence Number=SeqID_47189
atgaccaccaccacccccagactccgcacctcccctagtcgcaggcgggtgggacgacgcgtggaaccaaaggtgggagggacaaacgagtgcgaggatgagcaccccaaggtgtgggtggaggagggaagcaaccaccacctccttagcaactatgagggtcgcaaccagggtggagttaatagctacaacatcagcgaggggggcatggccaagccggtgttgggaattgccatggctaggcactga

SEQ ID NO: 5411 - DNA, 117 bp, Zea mays
  Peptide Sequence Number=SeqID_47190
atggggggcctcgggaggcacacaagccaaccgaggaaggccaaacaccccaaagagcgtgtggttgtggcgaggacgatggtgaagtggaagaaggatgcgaaggaggggacatag

SEQ ID NO: 5412 - DNA, 981 bp, Zea mays
  Peptide Sequence Number=SeqID_47191
atgtcggcgatccttggtgcgccgtactcagcgttggtcaggactgactcggactcgcaggccaagaagaagggcgtgaatctggctttagctcagatgaaaaactggtttactcgcttccccacaattcttcaaggttgcgaaagtatcattgaaaatttaaggggacaatatgcacattctgttggctgcttcgatgaagcagctttccactttcttgaagcaaaaaagctgacagagagtaaatcaatgcaatcgatgtgtgaaacctatgcagctgtgtcatatatttgtaagggtgatgcagagtcgtcttcacaggcactagaactggttggtcctgcctatagaacaatggactcatttgttggtgtgcgagagaaaacctgtatcatttttgtttatggactattacttatgagacagcataatccgcaggaagcacggaaccgccttgcaagtggtttgaaaatagcgcaccaacagttgggtaacatccagttagtttctcagtatttgacaatactgggcacattggcgcttcagctacatgacgcagcacaggctaaagagatcctgaagtcttcgttgaccttagctaagacgctatttgatattccaacccaaatctggatcttgtcagtatttacagagttatatcgtgaactggaagagaaggaaaatgaaatggagaactctgagtacgaaggaaagaaggaagacgatctgcagagaagactttctgaagcttattctcattcttttcaccatgagctgtgtttaactggagtgctctttcaggtggaaaaatcaagaatccagccgctgcacatgtcaagtaagcagccagagatggctgttccatcagctaatggtgatcttgacatcccagaatcagtggggctttccgctccccagccattcctcaaaagacttgttgaggccgagccgatgaggcgcagtaccaggaggcggcggtag

SEQ ID NO: 5413 - DNA, 1383 bp, Zea mays
  Peptide Sequence Number=SeqID_47192
atgtccatcgccgccgtgtccgcggatgggctcctcgcgttggccgacgaggctgagcgccggtatgacttttccgccgcggccgcttgcctcgagtccgcgctgcgtccgccctacgccgcagctctcctcccactcaccgaagcccgcgcgcggctccgcctcgcttcgctcctcctcgcgccccgcgggtcctcccgcgtcccgcgcgccggcgctcccgccgccgccaagacgcacctcgagcgcgcgctgctcatcctctcccctctcccctccgcgccaccgcggctcaagctgttggcccactcccacctcgcgggcgcctatgctgtcctgggggcgatcgcgtcgcagaagcacgtgctccaccgcggcctcggcctcctggattcggcttccgcctcggggctcctccagcgcgagccagcgcttctatggacttgcaacttccaggcgcagctcgggtccgttttcaccaatgacggggacgccgcgtcagcgctgtccgcactgtccgtgggagcatccgccgccgccgagctcgggagcccccagctcgagctcttcttcgccgcctccgagctccacgtccacctcctctgctgggaggacagcgctgccgttgagaacgctgtcactcgtgcctcgctgctctgggacgcactcacagccgagcagatggagcactgggttggactcttcttctacacgcagctgctgcagactttctacctgctcaggatctgcgactacaaggctgcctcacagcacgtagagaggttggatacagctgtgaagagtgagatgcagagaggacgccaaattacggcgcttgctaatgatctcagcacactggagaggacactagggcagtctgggctgaaggagcgggagatgctggcattatcgcacaagcaaaggcagctcaagggtcagctgcgagcattgtgtggctatgactcattgaatgatgtgttggattatggggataagctgcttttggcaccaccgctgatgcatggggagtggctcccacggacggcggtgtttgtgctcgtagatctcatggttgttatggtaggtcgcccgaaagggatatttaaggagtgcgggaagagaataaattcaggactccggctcatccatgttatcgagttggtgtcgtgcgccaatagccggtggggcacggattggagcgaagggtggttctatgtgaaggttggtggggagggcgaggaccatgaagagtggccgaaggcaagcgagatgcagcgtccagaacttggtcgaggagtttatcgcctgtggggtcaggcctctgagccgcggttggaaagttgttggcgtccaacgccgccagatgccactatttggggttaa

SEQ ID NO: 5414 - DNA, 774 bp, Zea mays
  Peptide Sequence Number=SeqID_47193
atgggtcggcgcgagacggagcacggaggggggaaacaaggagacaggcgtaaaggggaaacccgcggccttcgtgttgtcccgtgcccaggtcggggtaatgatggcccccctgtgacgtggtcggtccgagccctgggtcgggcgaggcggaggctcctccgaggtcggggtcgagtctgtattccgaggtcgaggtcgagtctgagccccgggtcgggcgaggcggagaccgtcgtctgggggcgaggccgagccctggggtcgggtgaggcggagttcgtcgtcgtccggggccgagcccgagtccaagccctggggtcgggcgaggcggagttcgtcgtcttccggagccgagcccgagtccgagccctggggtcaggcgaagcggagttcgtcgtcttccggggccgagcccgagtccgagcgctggggtcgggcgaggcggagttcgtcgtcttccggggccgagcccgagtccgagccctggggtcgggcgaggcggagttcgtcatcttccggggccgagcccgagtccgagcccttgggtcgggcgaggcggagttcgtcgtcttccggggccgagcccgagtccgagccctggggtcgggcgaggcggagcttcctatggcgcccgaggccggacttggctgctgtcagcctcactctgtcgagcggcacagcagccggagcgatgcaggtggcgctgtcttcctgtcaggtcggtcagttgagcggcgaagtgactgcggtcacttcggctctgtcgactga

SEQ ID NO: 5415 - DNA, 222 bp, Zea mays
  Peptide Sequence Number=SeqID_47194
atggggtccaggcacagtgcttgctctgccgaggctgagtgccgaggttctttcgttttgcttttgttagtcaccctcctgcggggagagagatacttgatcagagatggttggtttacaggtggtgacaaggatgatggttatgacgatggtaatggtaaagaagaaggtgtcgaggcagatctccaggagttccaggacgtctatgagttcgaggattag

SEQ ID NO: 5416 - DNA, 177 bp, Zea mays
  Peptide Sequence Number=SeqID_47195
atgccgacccagcgaagcctcgcgacaatcgtctctggaagtcctctggcgtccgttcctgatgtccacgcgatcgccaaggcggccatctccctctcgtccagcatacccgagcggccatatcccatgtgcggcgtaccaggcctgctcgaagccctccaaaatcctttcatgtaa

SEQ ID NO: 5417 - DNA, 676 bp, Zea mays
  Peptide Sequence Number=SeqID_47196
atgatctcttccatcccgtcttcattgaccacccttgtgcgccatggcgggtcaaggacagatccgccgctggagattgtagccaactgcaacctcggtgcggcggcaattcctcaccgggtctcggacgacaccgccttgccgcgctgctccgtggacggacccaatcatggcagtactctggggggcaccggactgtccggtgtacaccggacagtgtccggtgcaccatcggacagtgtccggtgcaccaggggactccgacttgaactcgtcaccttcgggaatttctcaggccggcgcgctataattcaccggactgtccggtgtacaccggacagtgtccggtgctccaaggaagcgcggcctccggaactcgccagccccgggaacgcgcagcagccgctccgctataattcaccggacatgtccggtgtgcaccggactgtccggtgtaaccacggagcaacggctacttcggcgccaacggctacctgcgacgcatttaatgcgcgcgcagcggcgcagaagtcaggcgcgcccatactggcgcaccggacaaggaacagtacatgtccggtgtgcaccggacatccaagcgggcccagaagtcagaagctccaacggtcagaatccaacggcattgatgacgtggcgggggcaccggacatgtccg

SEQ ID NO: 5418 - DNA, 189 bp, Zea mays
  Peptide Sequence Number=SeqID_47197
atggcgctggtgatacactctgctttcttcgccctcgctctgcactcgacgtctttggtcgcgaccccagggaatgaggcaaggcaaagactatccgagtatttacgctccaaggaaaatggtattttgattgtgggacaagaattaaaagttacttcaaacttagatattcatgtaaatagatgctaa

SEQ ID NO: 5419 - DNA, 564 bp, Zea mays
  Peptide Sequence Number=SeqID_47198
atggccggcgaagggaatggggatgaagggtggaggcggagcggcatcgaggtcagcgccctgcagttcggctacgacgggcagccgccgctcttcgcgcgcttcaacctctgcgtcgcacccggctcccgctgcctcctcgtcggcgccaacggatcagcattaaaacatctgaaacaactgcaggtgcttttgctcgatgagatcacggttgatctggacgtggtgaccaggatggacctgcttggtttcttcaaggaagagtgcgagcagagggaagctaccatcgtgtacgccacccatatatttgacggactcgagacgtgggctaccgactttgcgtacatccaagaaggcgagctgagaaggtccgggagatactccgacatcgaggagctaaggagcgccaagaacttgctgtcggtagtcgagtcgtggctgaggtcagagaccaaacttccgaagaaggaacccccaccacgtcctgagacccaggccaggcgttcctcgccgttcgatgcttctcctttccgttcgtcacgccacatggcctactaccgttga

SEQ ID NO: 5420 - DNA, 306 bp, Zea mays
  Peptide Sequence Number=SeqID_47199
atggcaatcgacatgtctatggacttagatatgggagatcagacgtccatgcaagatgtcaaggatccgtccggtgctccggtgtcccgggacacggaagcttcggtgcagataagcaggctgcctcactggaacaaccagccggacagctacctggcgtgcctgcgcgcggccaagaagccgtctgcggaccacgtgcccttcagcccgctggacagcaatctgaacacggttcacctcgccggtgcggtgtcgcccaaggtcaaccagatgagccccagctacatccgggagctgagagcttga

SEQ ID NO: 5421 - DNA, 207 bp, Zea mays
  Peptide Sequence Number=SeqID_47200
atgacgtgggcggggcgggccacagcggacggtgccaggggcagggcgttgaccgaggtgcagcatgccacggtggtggcgacccccgccacgagctccccttccaagtgcgacgccgagtcctcgcccttggtagcgtcccccgcattgttggatgggcggcgacatttgcttcggatgggcggcgacagtggtaagaaaccctag

SEQ ID NO: 5422 - DNA, 675 bp, Zea mays
  Peptide Sequence Number=SeqID_47201
atgaagggccttctcaagggcctccgatacatctcgcaaatttttggagatgcgaaggagccggagatgcagatcgggaagccgaccgacgtgaagcacgtggcgcacatcggctgggacaacgcctccgtcaccgcgcccagctgggtagccgcttccgttccagttccacccccgaccacgccgttcccgtgctccgcgccgcgtccgaatgtccgaactccaactaacagctgcggttgggcgtgtcatgtgctgcagatggacgaattcaaggcttcgccggggacggcgagaggcagcgatcctgagccctcgcagcccggtggatcggaaggatgcggagaggagcaggccggaggaggagaagacggcggcggcaaggcggagcggccgcggagggcgagggggaacaaggggtcgggcggcaacgagccggcgaagcggcgggactgcgcggccgaggggttgcggcgcgaccggcgggtcgcgaaggcggcggacgcggcagagggcgccgagggccagggggacgccgcggcggcggcgccgaagcagcggcggaggaagccccgggcggcgtccgggggcaggtccaagtcatcgtcgggaggcgccgccgcctcggactcggcgggggcgccgccggacgaggacgatcgctgcggctgttga

SEQ ID NO: 5423 - DNA, 1812 bp, Zea mays
  Peptide Sequence Number=SeqID_47202
atgtggatacgagatttgcagctggcatttggaaatctgtctgtaattgcagccctcaaatttagttgcattaatgttttggatgccatctgcaagaatactggtcttcagttcaagtatgtgacctggcagttgcaagctgctctggcaaacctgccacatagctgttttgagatatcagacgaagttcaagaagaggttgacttagtgcgagctcagcttagaagagaaatggaaaagaatggaggtcttgatgtaaccgtatttatgaaagttcatgatatcttagctcaaattgacaatgctgcaccacaatctcaacagccgcatcaacaaccagagcagccacagatggagaaattcagtaatgatgacctggagttgcgaaatgtcgtattgctagtttctgaaataagcgggttatccaaacctgacatgtcaaaaatagtatcagatctaattcaaggacttgaaaatgttgaaactcctgagtctccgaaaccagacaacgttgatcgccaaccaccaagtgatgaaacaaaaggctcatctgaggaagttaagaagtcggactctgtagctattcctgaagatttccgttgcccaatatctctcgagctgatgagagatccagtaattgtttcaacgggacagacctatgagcgcgctttcattcagaggtggattgactgtggaaaccgaacctgcccaaaaactcagcagaagctccagaacctttcgttgaccccaaactacgtgcttagaagcttaatactgcagtggtgcgaggaaaaggggatggaaccacctagcaggtctaaaagcgacggttctcctcttgaggttgctggcaacagattagcaattgaagcgttagtccgcaacctctcgagcagttcattagatgatcggaaatctgctgcggctgaaataagatccttggccaagaaaagcacagacaaccgtatacttctagcggaatctagcgctataccggctctggtgaaactcctgtcgtccaaggacccgaaaacccaagagcacgcagtgacagctctcctgaacctctccatatacgatcagaacaaggagctggtagtggttgccggtgccatcgtcccaatcacacaggtgctgaggacgggtagcatggaagcaagagagaacgcagccgcggctatcttcagcctgtcactgatggacgacaacaagatcatgatagggagcaccccaggggcaatcgaggcgctggtggagctgctgcagagcggtagctcgaggggcaagaaggacgcggcgacagcgctgttcaacctgtgcatataccaggcgaacaaggtgagggccgtccgagcggggattctggtgccgctgatccggatgctgcaggactcgtccaggagcggagccgtcgacgaggcgctgacgatcctgtcggtcctcgcgagccaccacgagtgcaagaccgccatatccaaggcccacgccatacctttcctgatcgacttgctgcggtcaggccaggcccgcaacagggagaacgctgccgccatcatactcgcgctgtgcaagagagacgccgagaacctcgcctgcgtagggaggctgggcgcccagatcccgctcgccgagctggcgaagaccggcacggaccgagccaagcgcaaggcaacctcgctcctggagcacctcagcaagctgcagtttagtatccgatatcttggcaaaagctcagactggttcacagagaaggatgccgatgaattggatccgtggcaactaaaccgattgccatggtactacctgcgctaa

SEQ ID NO: 5424 - DNA, 684 bp, Zea mays
  Peptide Sequence Number=SeqID_47203
atggaggcgttggcgttggcttctctgttttggagacgcagacgacagataaactctaaaatagatacgagatactcacttaggctgcttgccgccgcaggcgacgcggcgccccgttatctccttcacgccgccgtccccgatgcccgtgtcgcagagcctcggcagctccgccaccatgctccccgccgacgagctattcgccgacggcaagctgctaccgctgagaaaggcggcaactttgccggatccggaggccgccgcgccaccccggcgcagccagaggaggcaatgccggcgaccagcacggagccgatcaagcctctccgcgccgcggcggctgacggcacagacccttacgcgttctcgcccaaggcacccagctggtccagccgctggcgcgagctgctcgggctcaggagagcgtcagccgcgcagagcccgagcaccaaggcctcggcgtcggcgtcgcccgcggcggccaagaccccggcatcagcggtgagggcgacgaactccgcggcggcaaggtcgctcaagctcttactccagctcaccctgcagcttccacgcggcgtccaagtcgcggtcccggacaaaattacttttgggggagagcttgatgtgatgttaattcttagtcaagatagcagcatagaagccaagatgtcaggatgtgattag

SEQ ID NO: 5425 - DNA, 417 bp, Zea mays
  Peptide Sequence Number=SeqID_47204
atggctaaaaattttggcagcaaaacagtgcaaatagcaatgaatgctgtggcggacacccgctcgcactcgctgcgaagtggaccacagagaccgaacaccgacagactcttcctgatatggacaacagatagagatttagctctggtaaacctagccgccgtcggcgtcgtggtgctggcgcttgtcacggggctgaggcccgtggacgtgggcagggagcgacgggacgtcgacgcgccggtgctgggcgagggccccgccgtgatggccagcgtcgaggcagtggcggagctggcgttccggtgcgtggcgccagacaaggacgatcggcccgacgcccgggaggtggtggccgagctcgcgaggatccagacgatgctccccgagcttcccagccggatcgcacagaattga

SEQ ID NO: 5426 - DNA, 336 bp, Zea mays
  Peptide Sequence Number=SeqID_47205
atggccctagctagatccttgatagactctttggttcctaggacatatcagtatttaactattaagatgagggaagaggaattggatggctccaagattgtattagttgttaagaccagcgaagaggaacggctgtactctgacaaaaacaagctaggaacgaaaagagccgtaggtcacatgtgcaaatgcagctgcactgcactgcactgcctcatgttcacggatggctgtagcgtctgcgaatctccgggggcacgggcaccagcaccagcacggccggacgctcgaatcgaaacgcgtaaagctaaggctatccgcaaccgttacctctaa

SEQ ID NO: 5427 - DNA, 240 bp, Zea mays
  Peptide Sequence Number=SeqID_47206
atggaggacgagctacgggagaaggaggacggtagccccaggcaactcgaaagaggtagcagctgcactgtctcaggctttaagaaattctttagaaaggtgtggggttctcattgtgcaagaactattcttatgtatggtcacttgtttattgttaaaactttggaccacacaaatatcattagatgtatttctaatgatacgtacataggtggtagagaaaggagtagcacaatttaa

SEQ ID NO: 5428 - DNA, 1095 bp, Zea mays
  Peptide Sequence Number=SeqID_47207
atggcagctctcgccgtggtcttcgccatcaccgccatcagcggcgcggtggcggcggccgacgatgttgcgtcttctacggccgctagaaatttcacggtagcgtctcctccctctccgacgacgacgaccagtggtccggtgacgtacgtgttcggcgactcgatgtcggacgtgggcaacaacaactacttccccacgtccctcgccaagtccaactacccctggtacggcatcgactaccccggccgcgaggccaccgggaggttcaccaacggaaagaccatcggagactacatggccgagaagttcggcgtcccgcccccgccgccgttcctgtcgctgaggatgacaggcaaggacgtgctcggcggcgtcaacttcgcctccggcggcgccggcatcctgaacgagacgggcgtctacttcgttcagtacctctcgttcgacgagcagatatcgtgcttcgagatcgtcaagagggcgatgatcgccaagatcggcaaggacgccgcggaggccgctgctaatgcggccttgttccagattggactcggtgagagggcggccatgtgcatgcggctgtacgggctcggcgcgcggaaggtggcgttcaacgggctgcccccgctgggctgcatcccgtcgcagcgcgtccgctccacggacggcaagtgcctgtcccacgtcaacgactacgccgtgcagttcaacgcggccgccaagaagctgctcgacggcctgaacgccaagctgcccggcgcgcagatgggcctcgccgactgctactccgtcgtcatggagctcatcgaacaccccgaggagaacgggttcacgacggcgcacacgtcgtgctgcaacgtggacacggaggtcggagggctgtgcctgcccaacacgaggccctgcagcgaccgcagcgcgttcgtgttctgggacgcctaccacacctcagacgccgccaacaaggtcatcgcggaccgcctctgggccgacatgacgagcgccgggcacgggagcgcctcggctactcctcacgtcgccgcgtctagccccgacgtggcgccgtctccatccccgtctcaggactattga

SEQ ID NO: 5429 - DNA, 768 bp, Zea mays
  Peptide Sequence Number=SeqID_47208
atgacgacggcggctctcagccccttacggaagcaaggagacggacccccggggtcgaaacgccgacaagacttgagtcttgtttcttcaccaggccttcaaagacgagtagacagccgaacacgcgagcaggaaacagacactgctcgtgtgctccacgttgcagaaggactgatgattgcttccctcccgtcccgtgctctgggccggatcgacctcggccagcacacagcaggaagattcgacggaaacgaagatggcgagcacgcgctatacccaatggagcgccggtcggcccctacctgtcgggactcgggctcgttccaaacgacccatgccgcacctgaccgtatcgtgcgctgccgttccgttggaaccggccggccaaagttgacgcgtcccacgacggcaactataacccgcgcctggcacggccagccagcccagatcgctatcctgtttatgacttatgagcaagctaatatacttgctactcaccgtacactgcaggcggttggacgtgggatccccaccacccgggtccgctccgctgtgccgcgcccgggaatcactccgcacgcgaaccgcagtcgcggacaccccacgcccagctcagctcggcacgaccaccaccaccaccaccaccagtcctccctcgccctccctccgttgtccgttccatccccgcgccgcgccgcgccgcgccggatgcctggagagctggagtccatcgagcagcggccggcacggcactcggcctttctttaa

SEQ ID NO: 5430 - DNA, 1794 bp, Zea mays
  Peptide Sequence Number=SeqID_47209
atgggggaggttgttgctgcttcctccctggccctggtgctgctcttcttctgctcttgcgggcctgcaagcggccttctctcccccaagggtgtaaactatgaagttcaagctctcatgatgatcaagaactacctcaaggatcctcatggtgtactgaagaactgggaccaagactctgtggatccttgcagctggacaatggtcacttgctctccagagaaccttgtcaccggcttagaagcaccaagccagaacctttctggaattctctccccaagtatagggaatctgaccaaccttgagacagttcttctgcagaacaacaacataaacgggttaatcccagcagagattggaaagctaagaaagctcaaaacgcttgatctgtccagcaaccacttctctggagaaatcccaagctctgtgggccaccttgaaagccttcagtatttggatctgtcatacaataatttgagtggtccaatcccagggtccctgacaaggactttcaacattgtagggaatccactgatctgtgcagcaaccatggaacaagattgttatgggtctttacctatgccaatgtcttacggactgaataacacacagggaactgtgattcctgcaaaagctaagagccataaagttgcaattgcatttggtgctacaactgcctgcatcagccttctgttccttgccgttggttcactattctggtggaggtgtaggcgaaaccggaagactcttttcaacgttgatgatcatcagcacatagagaacggcaacctcggaaatatgaagcggtttcaattcagagagctccaggctgcaacagaaaacttcagcagcaagaacatattaggaaaaggcgggtttggtattgtttaccgggggcagcttccagatggaagtcttgtagccgtcaagaggctcaaagatggtaatgctgcaggcggggaagcacagtttcagactgaagtcgagatgatcagcttagcagtgcacaggaacctcctcagactctatgggttctgcatgactgccagtgagaggctactggtctatccgtacatgtcgaatgggagtgtcgcgttgcgcctgaaagggaagccaccactggactggatcaccagaaagaggatagcacttggggcagcacgaggtctactttatctgcacgagcagtgtgatcccaagatcatccacagagacgttaaggcagcaaacatactgctagatgactgttgtgaagcaattgtcggggactttgggcttgcaaagctcctagaccaccgtgaatcgcatgtcaccacagctgtgcgcggaactgttggccacatcgctcccgagtacctctcgactggccagtcatctgagaaaacagatgtctttggttttggaattctgctgctggagctgatcactggtcagactgcactggagtttgggaagtcatcaaatcagaagggagccataagatgcaccaagagaagcagctggacatacttgtcgacaagggccctggggagcaaatatgaccgcattgagctggaggagatggtgcaagtagcactgctatgtactcagttcctccctggtcacaggcccaagatgtcagaggtggtccggatgctggaaggcgatggacttgcagagcggtgggaggcgttacaacacactgagtcacacaaattcaaggtgcctgagttctccttcagccgctgccactctgacctgacggacgactcgtcactgttggtgcaagcagtggagctttctgggccaagatga

SEQ ID NO: 5431 - DNA, 318 bp, Zea mays
  Peptide Sequence Number=SeqID_47210
atgttttacactgtcgtcgcactggaggaatcgacgcaggttcagacaaaggggcacatccaccgtaccattcggaagatcaatcaggagatagcaaaggcttgttattacctcatgcttgatgacgcccctgatcatcgatttgtcaggtcggacggagcccggatcttcgacagatccaaagagacccggataagatttccatgtcctccaaagacgatggcctcaagcaacaccgaaaattcacagccggtggataaccaaccacaacatttctgtcaacgacatgctgaatattcagatgacaaagacgagtag

SEQ ID NO: 5432 - DNA, 1942 bp, Zea mays
  Peptide Sequence Number=SeqID_47211
cgcatatttccaccccgatcccatcaccgccgcccactacttcaccttcgactacaacaatcgcttcgccgacctgtaccactgcagcaaccgcctccaccacggcctcgtcaagcccgtgtcagtcaccaggatggtcatttcagccaagccttcgtttgcttccatggacgcccaagtggtgtttgcagaaatgccacaaagcagggttaccaaggagtactttgtccacgaaagcaccagagttgaggtgatggcaatgctaggtgtttttagagcaattataaatgcaactggctttgtgatatactcatacaggggctcaaggcagaatactagagagacagcacgagttacacatgccatggatgaggaggctgcagcggcaaacaacacagcacaagttcctgttacttttggtcagtgcttgcaattttcctgggatcctggtggaagtaatgctacacatcggcttgagggcaagccgaattttaagaagaggggaatgttaggaaagatgaatgagtctctgggggatgaaattacggagaaactgaatacaacggagctctctgttgtctcattcccaacccaagctatctctctcgcctacctctttctcttctccaatccgcctgtgatcggtgtgctaacaaggacaccgtcagcagtgatgaatatcgaggtccccgcgtcgctggggaaggggatgccggtttttccagagcatccaacaataaaggtgtatgaagaaggaggaagcaatcagacacttgaagataatgtggtcgtaatcttcatctgcctgacagagccaaggtcacacacgacgctgtgggtggcggacttccccgtttttcttgatgagaacctgaaggacatcttccactggcaggaactggtaagcgggccacgctgcaaggcgcgagcgcatgccggccggcatggcggcccacgtgaggctcaccgcgcgtcgcccacgcgcccgtccttcctcccccgcgacgccgcagcagcacggcccgcactggcactgcaccaagcaggcaggcaggcagaagcaggcaccaccaaccaatctcctcgtctcccactcggctacccacatcccccggagctccacaaaaatctccgctcccaggctcccacccgcgcggagggggcaagcagccagcagccgcgcggcgccactgccttgccctcaacccctcacccaaacgcctcgctttggccgccccccacaaggccactcacccaaaaaatctccactcctcgaccgcaccgagcagaggatcacatggcatccgccgtttcgcttctcctctcgcccccgcgcctgctccaccgcgacggcacatcccgcctcctcagcatcccgcaccggcgggtcctcctcgccgcccccaacaacgcgacccctcgtcggctcctggcccccgcgccgcgcgcctccaacaaaaacgacaacagcggggccgtggaggcgcccgaccgcctcgtggccgcggtcgcctacctatacccgttcctcgacggcgcgcaccacgggcgcttccttctcacgcagttccccttcttcggcgcgctgctccgcccgctggcccccgcggctcggctcttccactcatcgccgctcacgcccttcctcctcttcctcacgctctacttcgccgttgtgcggaaccagcaggcgttctcccgcttcgtccgcttcaacgcgatgcaggccgtcgtgctcgacgtgctgctcatctttcccgacctgctcgcgcagtcgttcgcgccctccggtggggttgggttcgagatcttccagagcatggagagcacggtcttcctcttcctgctcgtctccttggtgtacggcggtggcgcctgcctgctcgggaagacaccacgtctgcccattgtcgcagatgcagcggagcgccaggtgatgtga

SEQ ID NO: 5433 - DNA, 345 bp, Zea mays
  Peptide Sequence Number=SeqID_47212
atgggccaagcccataaaagatccaacagttcccccatctacaaggagctcaaggactcctcccagatcaggcctatcgtgcgcacgtccttgttgctgtgctcggctgtgtacatcaccagcagcttcttcggcttcctcctcttcggcgattcgacgctggacgacctcctcgccaacttcgactccaacctcggcatcccctacagcctactcttcaacgacgccgtcagggtcagctacgtgctccacctcatgctcgtcttcccggcccgtcatgttccgagcgctgcggctcaacatggacgggctcctcttcccgtcggcgcggccactggcctgtga

SEQ ID NO: 5434 - DNA, 1026 bp, Zea mays
  Peptide Sequence Number=SeqID_47213
atggcgtcgtcagcggcgcctttccacctgccgttcatgtgtccagaacggaggagggcccgccgcatggagcagaatcgggagccagggctcacagcggcccgctcgcgatgtggcaagattctggcgtcgaccaaagatccagagaattcaggaccctcttttattacactgccctgctgcatgttcaggcgcgagaggaggggaggggagaagcagcggcagcagcgccgatcaggggcccagcacaccgagatccaagcattccgctaccgagcagcggagacggacaaagataaacgacaggcaatgctcgttgagtccaatttcaattttcatcaattgcatctagcagatcagaaactaaaaaaaaagatttacccagaacgtagggaagctgagttggaaatacttcgggaactcctgccgcacggtgaccagaagagggacaaggcatctttccttcttgaggttattgaatacataaggttcttgcaagagaaggtccaaaagtacgagtcagcccaaccagaaaagaatcacgaggactcctccatgccatgggcaaaagtttactacagatcatgctggaaaaacacagagaatatcatccaaggaggaggattagcaccttccacgaaagatgagaacaaagaacagtatgattccaagcaaactacggtggcatcgtctgctctctttgacacacaaagtgctagagaaactagtgcaaacgatatttcctcccaaaaggcaacaagcaaagcaaaatgcagggcagacaacagcgtacctggcaaacagccaccatggttgagcatgtcaacctctgatgcagacaacaaaacactgagcaagaacgagaaacaaactctccaagaggatactcaaagtctttctgatgcttactctcaagggtttgttccgaaactactgttgtttatgatggatcatgaatgtgaagatattatacatgtgaccaagaagcttcggggcgagagaagcaagatctccagctcaaactga

SEQ ID NO: 5435 - DNA, 360 bp, Zea mays
  Peptide Sequence Number=SeqID_47214
atggacgcggagtcacttgtcggcggtgtggagctgggtagtggtgccctggatctttgctcgacggtgttggaggagctggcgcggtgccgcttggatgtggacacggagtcgctcgtcaaagtccctggacgagtggacgagtgttatatctctttcatcaatggaggtgggcatagtacattagtaccagacaatgccataaaaagtatatcaaacctcaatattctaacaactggtgaggtggacctattaccagtccactggtttcagatgccagtgaatttgagccccagggatagagcagccaggatcctcaagcacaaaaagaaaaggcaagaaagtttgataagaccataa

SEQ ID NO: 5436 - DNA, 336 bp, Zea mays
  Peptide Sequence Number=SeqID_47215
atggccttctcacccccgctgatcgactgggaggcggagagctaccctgcctacccagatttcgcggccattccccttttcgtcgtcttcttcctcgtcgtccgtttcttcctcgaccgcttcgtattcgaggttgtagtttttcccgctcatttttacaacatttctcgtttgctatttgctcgggtgggttcagttgtccttgccattcatgatgctactgatgtgttcctggagcttggaaaaatttccaagtatagtggccatgagttgtttgcagatgtttcatttcttgttttcattctgaaggtgaagaggaacatgaggattgattga

SEQ ID NO: 5437 - DNA, 201 bp, Zea mays
  Peptide Sequence Number=SeqID_47216
atgatttgtatggtatgtcttgccctcaatgtctggttggttggtcccgggtcaaaggcatctcgaaggaagctgctccgcatatgcgatcacctccatgtacctacagatgagggctccaacgcctactgtacaatcatgtgggaagtgcatcctgcacaccagaaaatcttaatcttaataggatgttggctaaaataa

SEQ ID NO: 5438 - DNA, 396 bp, Zea mays
  Peptide Sequence Number=SeqID_47217
atggaggtggcaatttcttatcaaaagaaaagaaagaaaagcagtttcaagcctaacaaccttcttacataccctagccagaataagggaattatggtcaagggaaaaatgaaagagcataagccagaaaatggaaactctcagaataggaatgaagtatgggaagaaataagagccttaggcctgtgcttgacatgtgttgggctaccctggtcatcagtgcaagcaagttcgtaccagtcgtcagtcaaggagggagctccaacctccgcgcctagccacaacctaaacgctggttctatcccggcaaggggaacccggtgggaagagggaaagaaagatcaggggaagaagcggggtagaggaattggtcgactcatcaggctcatgacctga

SEQ ID NO: 5439 - DNA, 429 bp, Zea mays
  Peptide Sequence Number=SeqID_47218
atgaggaaaacgaattgtggagctgtaggcttcaaagtaaggggaggaccgagattatatacccagcagcagcgcgggatcgaagggcttggttggaagtgctattgccttctcggtatcgttttcttcaagaagggaaggaatcgggggttccgggcaagactgtttggctctatgttcaggaaaggaatgccctcagggaagaaagaggaaagtagcatagcagagaaaagaatctctgttctcaatctaagcagaaatgaacggataccattctctagagccagagatagtagcttaattagcttaggtttcaatcctaacgcacgagaagaaaaacgaaaagcatgggacttccagtacgatagggccggacctcaatggtcctttatgtctgaagcggatgtgagcgtggtcaaccgaatctga

SEQ ID NO: 5440 - DNA, 243 bp, Zea mays
  Peptide Sequence Number=SeqID_47219
atgccgataattggagaaggcgagaccaagcctgccgggagaggagaagtggcttacgaggctagaatagagttggttggtgctgataccagtagctgcagctgccggggaaatctgtcctgtcgctcgagtaatagagacacagatcttgtttcttggcttgggaagacttccaacatagagttccttcccttcaatggaacagcaatcgatgaatggagtttgaggattgtcatagaatag

SEQ ID NO: 5441 - DNA, 135 bp, Zea mays
  Peptide Sequence Number=SeqID_47220
atgggggattgtggccttgccttgtggaactgtcaacctggtgacccaggattgggcgccgttccattcgaaaagccactaaaagcaggttcaggggtgctttcagatttgcagtgtgagaaagccagcttttag

SEQ ID NO: 5442 - DNA, 1134 bp, Zea mays
  Peptide Sequence Number=SeqID_47221
atggcagtgcaggcgcagtacccgtccgatctcctcttccacgccagaggtgagccagagaggaggaaggagatggacatgccaacgccgccgcagctcgctggagtctcgccggcggcagtctacttctccggcggtggagcgagtgggaagagtcggcggaagcggcccagggaggagtgcgtcagtctgttcacagtccagccgcagcagtcgacggcgttcgccagcgtggccctcttccagacccagaacatggtctcgtcgtcgccgtcgcccgccgcgacggcgctcgtgtccactggccttcgcctggcatttgacgagcagcagcaacagcaggagagcaagcagacggatgcctttggctatccgtcgtcgccctctcaatcgggctccgtctccgacgagctcgccgcgcaggtgaagcggcacgacgaggagatcgaccggttcgtacgcgagcaggtaccttcgcccttcccctgcacaacccgcctgctctcacatcgccctccgatcctgacgcgccgtaccgtacctggcggggtccgttcctggtcactcactcagggcgagcagctgaggcgggcggtggccgaccggctacggcgccacagccgggcgatcctggccaaggccgagcggtccgcggccgccaggctccgcgagaaggcctcggaagcggagcgcgaggcgcggcgcggcgccgagctggaggagcggctcgcgcgcctccgcggcgaggcgggcgcgtggcaggccaaggcgctctcggagcaggccgccgcggccaccctgcacgcgcagctccagcagcaggccgccgcgcgggcgtcggccgaggagcagctcgccgccggtggcggcgacgccggcgcggcgcagtcctcgtcgtcggcgtacgtggaccctcggcgctcggaccgcgcgtgcctgggctgccgcctcaggccggcctccgtcgtgctcatcccctgcaggcacctcccgctctgcggcgagtgcttcgccgccggcgacgcggacgccgccgatggcgtgccccgtgtgcctgtgcgtgcggacgggcagcgtggaggccatcctctgctgagcgttgcccgcctggccgtccacctcgggagccggtga

SEQ ID NO: 5443 - DNA, 432 bp, Zea mays
  Peptide Sequence Number=SeqID_47222
atggccctagctagatccttgatagactctttggttcctaggacatatcagtatttaactattaagatgagggaagaggaattggatggctccaagattgtattagttgttaagaccagcgaagaggaacggtttcttcgttctaatgttggtcgtacgtttcaagatgaaattaatcttttacctacctatttgttaaatcctactagtggggttcgtaacataagtgatcatgtgactgattcatccattaatcctgctaacaatgctttcccagcgcatgacatcgtgcaggaattggcgtcatcacatgctgacccccaaggtgattcacttgtgtctccaaggacttcggtagtgtatctgcccaggagtctgagcctggactatcctcccatgacacattgcctggactcaccacaacctctctaa

SEQ ID NO: 5444 - DNA, 318 bp, Zea mays
  Peptide Sequence Number=SeqID_47223
atgctgctgctgctgacgctgccggggctggacggcctgcgccggggcatggtctccgtggtgcggagcgcgctcaagccccatgatgtccgtggtgcccttctgcctcttcctgctcatggacatctactggaacacgcctgcaccccctccgagcacctccgccaccacaagtccgtcatgaagtcgcagcgcaacgcgctcctcatcgccgccgcgctcctcctctactggatcctcttctccgtcacccagctcgtcgtcaggctcgaccagatgcagcagcgcgtcgacaagctcaagaagcgcgacgactga

SEQ ID NO: 5445 - DNA, 387 bp, Zea mays
  Peptide Sequence Number=SeqID_47224
atggacggccccgagggcatcttccccactcggtcacgcgcgacggcggcgccgccgcatctcaccccgccgagcgccgctgggcgtgagtgcgggatgggtcacggaggggcctatttatccccgggcgaccggttcaaactccgccggattcggtcagcccgctcctatttccccggcggctggatcggtcacgaacgcgccgcgccgtatggagaagacggcgctgtcaagccggtcccacgggtcagcgcctattcctttcctgagcgcgcgagcgaaggtgcggctggtcaagcgggcccgcgcggcagtgtgaccaagtcaccgatcaagtgcgcgcgcgcggaagccagcggctggcatgcgggccccacctgccagtga

SEQ ID NO: 5446 - DNA, 312 bp, Zea mays
  Peptide Sequence Number=SeqID_47225
atggttaatgcggccaaaaatggaccggcagtaatgacgatggcaggcgggcgggagcagcggtcacgtcgtcagccaagctcacgtcccctccgggggcagcgagagaaccctctctcacggcgtgaagacaacgcgcctgtgttccgttcctcgaacggctcgcgcacgcgcaacgaccgccccgccaaccactcgccccgtcgcattaacttcgcggcgggacaggcgacgcctctggggccgggaaaggggataccccgaaaaggatccttccccgtgaaggaaccaggctccgagcctccctactga

SEQ ID NO: 5447 - DNA, 3276 bp, Zea mays
  Peptide Sequence Number=SeqID_47226
atgcatacattaactgtaggtcttattgactgctttatcctccacaagtttacacttcaaagtttttcctttccttttttggtcccttgggtttatgctttgttatctcctttaagaagcgcttttcttttgagcaaaacattcttggagatttctgttactgttgcagtatctcagtttgatctgaaatgctactctccagaccctcaaatagcagatggctatttcagtgttctggctgaagtctacatgcgccaggagattccaaaatgtgaaatccagagacttgtgagcttgatcctctacaaggtggttgatcagacaaaactaatccgtgacagtgccctccagatgttggagactctctctcttcgcgaatgggctgaagacgatactgatggtgttgggcattaccgggcttctgtcgttggcaacctccccgattcctaccaacaattccagtataagttgtcttcaaagcttgccaaggaccatcctgagctcagtgagcatctgtgcgaggaaataatgcaacgtcagcttgatgcagtggacattattgcacaacatcaggtccttacatgcatggctccttggatagaaaatctcaactttgtgagactgaaggaatctggctggagcgagaggttactgaaaagtctttattatgtgacatggaaacatggtgatcagtttcctgatgagattgagaaactttggagcactgtggcaagcaatactcgcaatatcatcccagttttgaacttcttgatcaccagagggattgaggactgcgatgccaatccatcggcagagatcactggtgcatttgcaacttatttttctgttgcaaagcgtgttagtctatatcttgctcggatctgcccacagcagaccatcgatcacttggtcttcgagctatctcagagaatgctcgaggacgacgaagaaccagtcaggcttgggaaggttgatgtctctgcaaatgttgtattggagttttctcaagggcctactgcctctcaggttgcaacagttgtggatagccagcctcacatgtccccccttcttgttcgtggttcacttgatggtgcagttagaaatgtcagtggaaacctgagctggcggacatctgcagttaccggccgaagtgtatctggcccattgagtccgttggctcatgaggtaagcattccaaacccaacggcaggccgatcaggacagctacttccagcgttaattactatgtcggggccattgagtggtgttcgaagctctgctggtaatctgaggagccgccatgtttccagagatagtggtgactactactttgataccccaaactcaacagatgatattttgcatcaagggggcagtggaattcacgggatcaatgccaatgagctccagtcagcactacaagggcaccaacacttgctttcacgtgctgacatagctttgattcttctggctgaaattgcttatgaaaatgatgaagactttcgtgaaaatttacctctgttgttccacgtcacatgtgtttcgatggatagctcagaagacattgtgctcgagcattgccaagatttgctcgtgaatctcctctactcgttggctggacgtcatcttgaactgtatgagatcgaaagtagtgaaagagagaataagcatcatgtggtgagcttgatcaaatacatccagtctaagaggggcagcttgatgtgggagaacgaggaccctacccttttccggatcgaacttcccagcgcttcactcttatcagcacttgtgcaaagcatggttagtgctattttcttccagggggaccttcgtgagacttggggttctgaagctcttaagtgggccatggagtgcacatctcgtcacctggcttgccggtcgcaccagatataccgtgccttgcgtcccagtgttaaaagtgatagctgcgtattgcttctgagatgcatccatagatgcttggggaatcctgttccagccgttctgggctttgcaatggagatactgctgactttacaggtcatggttgaaaacatggagcctgagaaggttatactttacccgcagctcttttggggctgcgttgcactgatgcataccgactttgtgcacatctactgccaggtgcttgagttgttttgtagagtaatcgatcgcttgacattccgtgaccggacaacagaaaacgtgttgctctcaagcatgccacgtgatgagtttgacatcaatgggtatgcaagtgacctccacaggctggagtctagaactacttcagagagattgctatctgtgactgggaccgggaaggtgcctgcttttgaaggggtgcagccgctggtgctgaaggggctcatgtccacagttagccatggatctgcaatcgagttgctatctaggatcacgatacctacgtgcgactctatatttgggagccccgatacaaggttactgatgcacatcacaggccttcttccatggctcggattgcagctcacgagggaagcaccaccttcccttgggtcagcttcgccactgcaagagcagaaccagaaagcttactatgtgtcatccaatatttcggcatggtgccgtgccaagtctctggacgatttggccgaagtgttcagagcgtattccttcggggaaatcatgtcgttggaagatctgtttgcacgagcttcaccaccaatctgtgcggagtggttccctaggcactcatctttggcctttgggcacctgctgaggctcctggagagaggccctctggattaccagcgggtggttcttctgatgcttaaatcgctgctgcagcaaacccctgtggatccgtcacagataccccaggtgtacaacttcgtgtcgcagctggtggagagcacattatgctcggaggcgctgaatgtgctggaggcgctgctgcggagctgcggcggcggcgggcaaggcgaggaggctgggtttggtgataacggcgggcatgggagcggggagaaggtcctccagagcatgctgcttcctcagtcgtctttcaaggcaaggagtgggccgctgcagtacgctgcggggtcggggttggggtccttgatggggcaaggcggcggtggcagcagcagcgccgcagatagcgggttggtggcacgggatgtagcgctgcagaacacccggctgctgcttgggcgagttcttgatacctgcgcgcttgggcgcaagagggatcacaagcggctggtgccatttgtggcgaacgtcgggtag

SEQ ID NO: 5448 - DNA, 237 bp, Zea mays
  Peptide Sequence Number=SeqID_47227
atggcgtcccccttggtgtccggttccggttgtggctcagtggctgatctggcaggacccgtctcagcttctactcacgcccgtctcagcttctacaccgcctgcgttgtccctgtcttctccaaaccaggacttggtgccttctgcccctgcgccgccccctacctctgcacgtgtacactcgtcggcgccagcagactacttcccctacagatcttccagcggctgatgcctctg

SEQ ID NO: 5449 - DNA, 408 bp, Zea mays
  Peptide Sequence Number=SeqID_47228
atggcaccgagtgttcgccctgatgcaccgcgtgcgcccgtggcatcatttagcgtggtggcgtcgcggactgcgacaaatcactcgtcgggcttggtgctcgcagccaagccaccgatcgccgtggccagcgtccaaccctgcagcaagttcagtaagaagacctcggttgaatccgcggtatatacaagatcgtgtagctcccctctgatcgaagttttgggttgcgaatgggagaattgggggagggcgccaatggatgccgccatgggttgggcggcgctgccatctgttgatggctggtggatgggtaggatgggggaaaacgttgtggccaccgatttctgcatcaacagctgggattgggccgagcatacctctttggctagattaaatcttggtcgttag

SEQ ID NO: 5450 - DNA, 3507 bp, Zea mays
  Peptide Sequence Number=SeqID_47229
atgggcgctggcggcgccgccaagcagatcgtcgattccctcctcgcccgcttcctcccgcttgcccgccgccgcatcgagaccgcccaggcacaggatgggcaatacctccggccatgtgatccaagctatgagcaagtattggattctctagccatggttgctagacacacacctctacctcttttggaagctcttcttcggtggagagaaagtgaatccccgaaaggtgctcacgacgcgtcaacataccaaaagaagcttgctgttgagtgcatattctcttctgcctgcattcggtttgctgagtgttgtccacaagagggaataacagaaaaactttggattggcttagaaagtttcgtatttgattggctaattaatgcagacagggttgtgagccaagtagagtatccgtcattggttgatttacgaggtctactcttagatcttgttgcacagcttttaggagctttatcacgcataagattcagttctgtgactgaaaggtttttcatagagcttaatgtgcggcgtattgattcacttgctcttagaagtgagacactcagcataatcaacgggatgcgctaccttaaattgggggtgaagacagagggtgggctgaatgcttctgtatcctttattgcaaaagcaaatcctctaaatcgtcctcccaacaaaagaaagagtgaattgcaacatgctttgtgtaacatgctctcaagtatacttgccccacttgcggagggtggaaaaaaccattggcctccacttggtgtcgaacctgcactgtcactttggtatgatgctgttgcacgaataagagtccagctcatgtattggatggataagcagagcaaacatgttgctgttggctttccacttgtcacccttctactttgtcttggtgatgccaatgcattcaactctagtttttcccagcatatggaaatcctgtataagtatctcaaggataagaaccatcgatcaatggctttggattgtcttcatcggctagtaaaattctatttgaatatttatgccgattaccaacctcgaaatcatgtttgggactatttagacagtgtaacctctcaattactgactgttctgaagaaaggcttgctgacccaagatgtgcagcatgataaacttgttgagttctgtgtgaccttagctcagagcaatctggattttgcaatgaatcatatgatactggaattattgaaaccagatagtttgagtgaagcaaaggttgttggtcttagggctttgctcgagatagttgtttctccatcaaatcaacaaattggcttggatgttttgcaagtatttggtattgggcactatattcctaaggtgaagtcagcaattgagtcaatactaaggtcttgcaacaaggcatatagcctggcacttctcacatcatcaaagactacaatagataatgtaaccaaggataaatctcagggatcactcttcaggtctgtgcttaaatgtatcccatacttgatagaagaggcgggccgtaatgataaaatgactgagattatacctcagcatggcataagtattgaccctggtgttcgtgaagaagcagtgcaagtgttgaacaggatcgtacgttgcctaccaaatcgtaggtttgctgtgttgaaaggaatggccaatttcatcctaaaacttcctgatgaatttcctctcttaattcaaacatcacttggacgcctggtggagctaatgcgtttgtggagagtatgcctatctgaggaggccttggcaaaagacatgcaaagtggtaggcgtttgagtataggaggggatgcactacagaggtctccttttcataggtccagggatgtatctgaatttcgcgcctcagaaatggatgcagttggccttgtctttctcagttctgctgatgttcaaataaggctcactgccctggagttactgcgatgtgttcgagcactgcaaaataatctcagggattactcagcaaatgaatggggtgacaataagctgaaacttgaaccagagccaatatttatcatagatatcatagaggagaatggggaagacattgttcaaagctgttattgggatccgggacgaccttatgatctaagacgtgaaatggaccctattcctttggatgtgactcttcaatccattttggagagtgtagataaaaacagatgggcgcgctacctcagtgaaattgtgaaatatgcagctgaactttgcccgagttctgtgcaggatgcaaggcatgaactctggtcttttctggaacgtctgcacgcacaatttactataattgggcatcttattaactttactgcaaaactccacagattagaggttattagaaggcttgaacagattactcctgccgatctcggtgggaaggctcagcaaccacaagattctgaaactaaacttgaccaatggttgatatatgccatgtttgcatgctcttgtccacctgatattagagaagaattttccatcaaatcagcaagagaagtcttccatatgatttttccatcattgcgtcatggttcagaagcatatgcacttgctgctacatctgcccttggtcactcacatttagaagtatgtgaaatcatgtttggagatctggcattatttgttgaggaggtgtcatcagaaactgaaggaaaacctaaatggaagaatatggtactgaatactgatactctgcagaatcctaggtcccgccgtgaggatctgcgcactcatgttgctaatatacaccgaattctagctgagaaggtttggcctgggatgcttagtcggaaacctgtcctctgccagcattttttgaagttcattgaagaaacataccgccaaattactatttccttggctgatagctttcaagacttgcagcctctgcgatacgcattagcatctgttctgagatacctagctccagaatttgttgatgcgaaagctgagcgatttgacaacagaatacgtaagaagctttttgatcttctccttacttggagtgaggattctggtagttcatggggacaggaaagcagcagcgactatcgtcgtgaaattgaacgatataaaagtaatcaacatacgaggtcaagggaatcatttgacaaacttgcatttgacagggaaatggctgaacagctagaagctattaattgggcttccatgaatgctattgcttcattgctttatgggccttgttttgatgataatgcgagaaagatgtctggccgggtgatatcatggattaatagtttattcatggaaccatctgcaagagcaccttttgggcattcaccagttgatccacgaacaccatcatattcaaagcatactgatggacgttttggtgggagggacaaacagaaaactagccacttgcgactcctcttagcaaaaactgcgctgaagaatattttgcagacaaatctggacttgtttcctgcttgcatagatcaggtagactaa

SEQ ID NO: 5451 - DNA, 460 bp, Zea mays
  Peptide Sequence Number=SeqID_47230
gcttcccttcctgctcaatattgggttgaaggacccgtctcagcttctactcacgcccgtctcagcttctacaccgcctgcgttgtccctgtcttctccaaaccaggacttggtgccttctgcccctgcgccgcccctacctctgcacgtgtacactcgtcggcgccagcagactacttcccctacagatcttccagcggctgatgcctctggtgcttctgcagttccgattgagcctgcaccttcgccgatgtctggtcttcctcccggcgctgttcctacacctgtggtggtcaacaatcatccaatgaccacccgggcccagggctggttttcgagtgccgactgccttcactactgcagccatctcccccggagccaacttcagttcgccaaggtttggctgatccccaagggggccgggcctggaaaaagaattccaagctccgggccccaataa

SEQ ID NO: 5452 - DNA, 804 bp, Zea mays
  Peptide Sequence Number=SeqID_47231
aatatggtactgaatactgatactctgcagaatcctaggtcccgccgtgaggatctgcgcactcatgttgctaatatacaccgaattctagctgagaaggtttggcctgggatgcttagtcggaaacctgtcctctgccagcattttttgaagttcattgaagaaacataccgccaaattactatttccttggctgatagctttcaagacttgcagcctctgcgatacgcattagcatctgttctgagatacctagctccagaatttgttgatgcgaaagctgagcgatttgacaacagaatacgtaagaagctttttgatcttctccttacttggagtgaggattctggtagttcatggggacaggaaagcagcagcgactatcgtcgtgaaattgaacgatataaaagtaatcaacatacgaggtcaagggaatcatttgacaaacttgcatttgacagggaaatggctgaacagctagaagctattaattgggcttccatgaatgctattgcttcattgctttatgggccttgttttgatgataatgcgagaaagatgtctggccgggtgatatcatggattaatagtttattcatggaaccatctgcaagagcaccttttgggcattcaccagttgatccacgaacaccatcatattcaaagcatactgatggacgttttggtgggagggacaaacagaaaactagccacttgcgactcctcttagcaaaaactgcgctgaagaatattttgcagacaaatctggacttgtttcctgcttgcatagatcaggtagactaa

SEQ ID NO: 5453 - DNA, 3009 bp, Zea mays
  Peptide Sequence Number=SeqID_47232
atggctccatctcaagcggcggcagcggctggccccacctttgaggacctcgagcgcgacctgcaggcagttctcatggaccaaaaccacatgtccccagtggacgacctcggcatgtttcgcagcggcagcgctccccccaccgtcgagggatctcgcacggccattggcgcactcttctctggtccaccgcttcacgccaacagccttggcgccggcggcggcagcggtgggactgcttctggccttgacgtgctcactgatgaggagatacggtcacacccagcgtatctgtcgtactactattctaatgagcacctcaacccaaggcttccgccaccaatggtttccaaagaggactggcgtgcagcgcagtggttccaggctgtgtctggaggtattggggataggaggaggaggcctgcggaggtcgggagtggaaactccctgttctcggtgcagccaggggcaaacgaggttggtggagagaaggcgctgctgagtgatagaatggagaggagtggaaggaatgggctcgcacgacagcagtcttcagagtggcttgggagaggctccgatgggctcatcggcttgtcagatgccagtgcccttgggtctccgcgcaagagctttgctgatgcattgcaggaaaatattagccgtcctgctgttatagccggtcatctttcacgttctaatagccgtaatgttcttgagggcccaactccaatcaggtcatctgattcacgcaagccacaactgcagaataggtcagaatccatgaatggcctgcgatctggatccacttcaccgagtctggtcagggtccaaagtcttggttcttcgatgtctcataccttcgcttctgctgttggttcatctatctcaagaagcaccacccctgacccccagctgatacggagaactcctagtccttgccttcctccagttggagttcggatggggagttctgataaaaaagttgaagcttctgtttcttcacttaatcatgatggtgctgacattgtggcaactctgtctagcttaagcctatctggaaataagatgtcgaatgtggaaaatgaagttcagactcatgcttaccagaactttggtgatcaggctgatgtgttgtttaatgtaccaaaggaacataggcaattttcaccacggaatttaactcaaaaaactgatgaagacttgcttaatgcccctgaatatgcagttttcccaaatggggggagtaacttcagtaatttgcatgctagtaaggtggcatctcatagcaatagcaagttccctatgcaatcaccacacggtaatgccaacaagaaaggatctttgatgagctcagctggatcagtttctcagtaccagcacttgaatggtgatagccatgacattgatgtatctggatggcatactcatacaggtggttttacttcatccatgctgaacaatcaactgaatcctgatggtgactatggcaatgttctttcgaatcatggtggatcgagttatcagggccaaccaacagagacgatgtacgcacaatgcttgcaggcaaaccctgattcaccccttggcgcagctgcaagcatgagccctttccaagggaggggttttactggttcaggacacttggatagtcctggataccaaaaagcttaccttgggtcattatttggccagcaaaagctacaatatgggatgccatacctgggcaattctggtgctcttaatcaaaatatctatggcaatgattctgcctttggcattggaatgacttatctaacaagcccgccatctactccatatatctcatctccccaaggccatgttgggcaaggaaaccgtctgactcgacttccagcagtggtgaggaacaccgctggaggatccatgggatcgtggaattcagagaatggtctgatggataatggttatgggtcctccttgctggaggaattcaaaagtaacaaaactagatcttttgagctgttagatattgtaggccatgtggtagagttcagttcggatcagtatgggagtcgctttatacagcagaaactagaaactgcttctactgaacagaagaatatgatttttcctgagatccttccccaggcacgtactttgatgactgatgtttttggaaactatgttatacagaagttctttgaatacggaactgaaacgcaaacgaagcaactggcaaccctgcttaagggttttgtgttacagctgagtcttcaaatgtatggctgccgggtgattcagaaggctttggaagttgttgaagtggaacaacaaacacaaatggctttggagcttgatggatctatcatgagatgtgttcgtgatcagaatggcaaccatgtcatccaaaaatgtatagaatgcatccctcaggagaggatacgatttatcatttctgcattttacggacatgtcgtggagctttctatgcatccttatggttgtcgtgttattcagaggatcttggagcattgtgacgatgaaagcactcaaaatgccatgatggaagagatcatgcagtccgtggttactttaacggaggaccagtatggtaattatgtaatccagcatgtcctgcaatatgggaaaccagaagagcgttctactataattgcacaactcgctggacagatagtgaagatgagccagcagaaatttgcatccaatgttgttgagaagtgtcttacttttggttctcctgagcaacggcagattctaatcaatgaaatgcttggcacaactgatgagaacgagccgttacaggcaatgatgaaagaccagttcgcaaactatgttgtgcagaaggttctggagacatgtgatgaccagaaccgtgaattgattctttcccgtatcaaggtccacttgaatgcactgaaaaggtacacctatgggaagcatattgtgacacgtgttgagaagcttattgccgcaggagaacggcgcattggcgcactaccctcctgctga

SEQ ID NO: 5454 - DNA, 435 bp, Zea mays
  Peptide Sequence Number=SeqID_47233
atggggatgtggaaggtggtgtgcgtcaccgacgcatcagcgtacatcgcgtcctggatcgttaggctcctcctcgaccgtggctacaccgtccgcgccaccgtgcgagacacagacatgtgtggattctcacagttcatttggttgcatttttacttgcctttaaacctgatccctgatgctggtcgtcaaatactcagcttgttggctgcaatctgtgtttatcttggtatatccttgaaagttgatagtacagaaccaaagcatattaaggcatactgctattatttatcattcatgtttcaaacacacttgatactgcatatctctacagtttgtttacatgctcagatgttgaactcgatctattccttgccatatttatttatgattgacgaaccaatatccattgaccatgacatcaatgttccctag

SEQ ID NO: 5455 - DNA, 795 bp, Zea mays
  Peptide Sequence Number=SeqID_47234
atgacgctcagcagcatcctcaccgtggcgggcatcctcctgctcttcgtcttcttcgccttcggcatcgtgtccctccagtactgcttcaaggtctgggacagggaaagccagcagggcgagcaaagccgccggcgccagcgccgtggtacggccgatggtagcagtggtggggtgcggaccagcaggggcgtcgacccggagctgctgcgctcgctgcctgtcacggtgtaccagctggcgccgccgcaaggtgcgggcaaggggccgcagcaggacgcggtggagtgcgccgtgtgcctcgccgagctccaggacggcgaggaggcccgcttcctgccccgctgcggccacggcttccacgccgagtgcgtcgacatgtggcttgcctcccacaccacctgcccgctctgccgcctcaccgtctccaagcccgacgacggatctcctccgccgctttcattggctcttccacccgtcccgccggagcctgcgaactacaccaccaccgccaacttgcccgccagcgtgcttctcggggtgtctgaccatggcgcggtcaccgctggcactggctccgcgcccgccatggtgatcgagatcccggagttgttcgcgccgacgccgacgctgaccccgtgcgacgcttccaagacaccgggctcggcggggctcagatcgatcaggaggttgtggagcttcggaaggcaaggggcggcggcgacttcttcctgcgcctgtgccggtgccggtgctggtgccagcggagtggacttggagcagggtatgagatag

SEQ ID NO: 5456 - DNA, 1356 bp, Zea mays
  Peptide Sequence Number=SeqID_47235
atggcgcctagaaagcatccatctggtagtaagaaaaggaagagaaggaaagaagtagaggaatttatagaatcacaaagaggtgccatggataaatttgttcgcactaatacaagaacttcaaaaaaatgcaagagttcattggggcatgatggatttggagattggaggcatactagtgagaggttaaaagaacatgaagctagtatggagcatattacaagtatgaactcatggaatgaattgagagtgaggcttcgcaagactgaaacaattgataaagaatttcaacatcaaattgcaaaggaaaaagagcgtatcaggcaagttttattaagaataattgctgttgtgaaatttcttggtaagcgtactttggcttttagaggatcaagtgagcaactctacaatgatcaaaatggtaatttcttagcctgtcttgagatgattgctgaatttgatgtggttatgcaagatcatctgagacgcattcaaaataatgatattcaatatcattatcttagtcataaaattcagaatgagttgatttctctattggcttctgacatcaccaaatctatcataaagattgttaaagagactaaatatttttcagttatccttgattgtactccagatgtgagtcatcaagaacagatgagtttgttggttcgatgtgttaatatgtctagtggcaaagttgaggagtattttctaggtttcatgaaggtagatgacacatctggtgagggtctttttaattcattgcttgattctattaaatattttggtttaaatattgaagatgttagaggacaaggctatgataatggctctaacatgaaaggaaagcataagggggtacaaagacgattacttgatataaatccaagagctttatttatgccatgtgcttgtcatagtcttaatcttactctttgtgacatggctaagtcttgtgccaaagctatttcattttttgggattgtacaacggatatatgtattattttctagttctaccaaaagatgggatgttttgaagggccatgttgaaagtttaactgtgaagtcatggtgcaatactcgttgggagagtaggattaaaagtgtcagaagactacccgaaatggaagaaggggcactcactgcgagatacacgaaccggagccctacccacgccgacccgtggcccgacggtgaacgaccggttctggcgatgaattgctcgaagactaggggcccttccaaccagcaatgcgatgagcggcttcagtggcgtcaggcgaatctccgaggacaccaattcggcctcgggtggcgtggtggtctagggcgagtacggcggcacccctaa

SEQ ID NO: 5457 - DNA, 309 bp, Zea mays
  Peptide Sequence Number=SeqID_47236
atggagaatggagctcgggcgctgagcgtccaccatggcagggacaccaagctcagctcgatggagaggagcggggctggcggaggagatgggcgctggcttcttgctgctggaaaacagggggacagagggaggcgactatggctggcgtcgagtgagtctggtcgggtgaggcggagacttctcctgaggccgaggctgggctcgggcggggttgtgactcctctcgaggccgaggctgaggccgaggcctggggtcgggcgaggcggagatcttcttccgaggccgaggctgaggccgaggcctga

SEQ ID NO: 5458 - DNA, 1959 bp, Zea mays
  Peptide Sequence Number=SeqID_47237
atgccgcgcccgggacgacttcagcggtcggggtccaagcgcgggctggaccccaccggtggtggcggcggcggcgacaacgacgaccatgcgcccaagcgcccgcgcatccctgccctcgctagtgtcattgtggaagctctcaagatggacagtttgcagaaactctgttcatcgctcgagcccattctccgaagagttgtaagtgaagaagtagagcgtgctttagccaaactgggtcctgctagaattcaaggaagatcctcccccaaaagaattgaagggcctgatggaagaaatcttcagctccagttcagaagtcagttggctcttccaatcttcactggtggaaaagttgaaggtgagcagggagcagctatacatgtcgtgctgttggatgcaaacactggatgtgttgttacttcaggacctgagtcgtttgcaaaattggatatccttgtacttgagggtgacttcaataaagacgaagatgaggattggacagaagaagagtttgaaagtaatattgtcaaggagcgtgaagggaagagacctcttttgacaggtgacctgcaagtgactcttaaagaaggtgttggaaccataggggagcttaccttcactgacaactccagctggataagaagcaggaaatttatacttgggctgaggattgctcctggcttttatgaaggcattcgtgtccgagaagccaagacagaagctttccccgttaaggatcacagaggagaattgtacaaaaaacactacccacccacgctgaaggatgatgtttggagattagaaaagattggcaaggatggcgcattccacaagaagttaaatgctagtgggatctatacagttgaagatttcctccagcttcttgttagggatcagcagagattacgtagcattctgggcagtggaatgtcaaataagatgtgggacagccttgttgatcatgcaaagacgtgtgtcttaagtggaaagcattatgtatactatgctagagactcaagaaacgtgggtgcaatattcaataacatctatgagttcactggtttgattgccgatgatcagttcatttcagctgaaaatcttacagacaatcaaaagggctatgctgatgcattggtaaagaaagcatatgaggactggatgcaagttgtagaatatgatggcaaggcactcttgagcttcaagcagaaaaagaaatctgtcatgacaagaagcgatgctgcagttgcctcgacaaaccaccctgcttcaaatggttcggccatttcacagaaacaattgtcccttccagcaaaagctggacaaacttcctccgcgggtattatgaatgaagatggaactagaaatgcttacaatgcaaatggaaaccagtcagcaagatatgcagccaccactcagaacattcctgcaaacgtcgccatgcaatatgacaggagtgcagtgtcgcctgaaagccagtttagtggttcatcccttcagagtcaagcttcaagagggtccaatacgctagcattgggccctccacagcaacatcaaagttttgcattcccagcactcggccagtccatgcggccaacaggcctgaatccttttgaagaatggccgcagcaacaggaaaactgtggcggtgttgatgactacctgatggaggagatcaggatgaggagccatgagattctcgaaaacgaagaaatgcagcagatgttgcggcttctgagcacgggtggtgcaggaaccaacctaactgaagatggcttcagtttcccttcgtacatgcctgcaccttcaccaaaattgagctacgaggatgaccgcacccgtgcacctgggaaagccgttgttgggtggctcaagatcaaggctgctatgcggtggggcatctttgtcaggaagaaggcagctgagagaagagctcagcttgttgagctagacgactag

SEQ ID NO: 5459 - DNA, 258 bp, Zea mays
  Peptide Sequence Number=SeqID_47238
atggctattctgagcattattagccctttcatcgttggcattggagttatgaatagaccgaacatgcttgggatgaagtcttcctccgaagcccctggtcatttcagaaaacatgtatcttcggattcaagccaggcgtcacagtggaccagaataatacgaaggttggtgaagcgccgaaggtgtaagcaggaaagcttcggtgtgacagcagcaggtgaaaccgacttaaagatgaaaaggctatttagaccttga

SEQ ID NO: 5460 - DNA, 207 bp, Zea mays
  Peptide Sequence Number=SeqID_47239
atggccatagaatatacacgagcactagaggctagattttattatctggcgcactggagtggagaaagagagtgtgtggaagatgtaattagaatagttattcgtttggcaccattagagtatatcggtggaaggttgtatagagatgccatattaatggattccatgtggcggaaccacccgaattattccagcttaagtgtctaa

SEQ ID NO: 5461 - DNA, 621 bp, Zea mays
  Peptide Sequence Number=SeqID_47240
atggcgttcgccagcccacgatggcgctatgcaggcgggatgccccgggtgaaccaatgccccatcacccgccgcactcaatgccacacaaaggagcttggtgaaagaaataggtattcttatcttaccggtgacccatgggtagacgacgccggctgcagagaacaggaacacacggccatcctcaacgtcgtcgaggcatcaagagtatcccaccccaggcatgcccggcaggagcgcgacccccgtcgagtgccccgacaaagcaccacgtgcgccagagactcccatggccattgcccagggccggagattagtcgcgggcgagctcctacaaaccgccctgtctgccattacgggccacggcgtttgaccgagcatgccccagctatatatgcaccggaggggggtgatacccagcatcgtggaggagtccgttcgggggaaggcttccgattcgcgagatttccggtggttgcatgccgtaacagatcggccacaaagtctggcatgggtttggttaccaggattttaatagatagttctgaccgcccgaccccacaaggcagccaccgagtgttacacatgcggcaagtggaggtccagcagcgcgcgcggtaa

SEQ ID NO: 5462 - DNA, 1143 bp, Zea mays
  Peptide Sequence Number=SeqID_47241
atgatatctggttttgcttataatggacagtttagagaagcccttttggtctacaatgatatgtgcagagaaggagtcacactggatgatacagtctttgttgctgcacttggtgcttgtgctcatggaggtttgttgcaagaaggttggagcatctttaatcaaatggttgagtactgtcgcattgttccaagaatggagcactatggatgcatagtggacctacttggtcgagctggtaagttacaagaggcagttcgatttattgaaagcatgcctcttaagcctggtgcatttctagaatacttgaagtgcttccttcggcaaagaaacatttgctttttgggaagtatagtagggttctcaatcgccttcagacaattgcaagaccaaggggtttctgcaatcttcagcaattgtccaaacatctgcacgctaatcgttacaggttgtaggcatctgtccggtgctggattcagaggttgttcaagttcattgcgttaccttgaagccgagtcttgcatgctttctccagacggtttgttggatatagctagtggcagtggactcaagtatctgaacttgcagaagttaagaagctccactggtctggatggcctcggtaaccttgcgctcactaaaagcctctgcattctgaatctcaggatgtgtcgctacctcacagacgattccgtggcagcaatagccggtgggtgcccgttgctcaaggagtggaaccttgctctttgccatggggtccatctacctggctggtctgcgatcgcgatgtactgcagtaagctaagagtgctgcatgtgaaccgctaccggcacatctgcgaccagagcttgctggcccttagcaatggctgtccgcgccttgaagctgtgcatatcaatggttgtgccaagggcattctggatccagcattcttgaagcatgttcaacctatctccatatgcccgtgcaccaagagcgtcccaatcgtgagactgcctgatggaagccaacgtatcagcatggaagttgtgctggagatgctgatggaagttgaggccaccatatacggtgtgaggcacgctggagtctatggcagggagaagaaaagtcctagtgtgatcattgctgtaaagattttttag

SEQ ID NO: 5463 - DNA, 909 bp, Zea mays
  Peptide Sequence Number=SeqID_47242
atgggggtcccgcctaaatcgagactgggcagaacctcgtaccttgcaatatctcccacccgaggagagcttgccctctcgaccgagttgaaagctcgacgactgggcgcggcgcgccaagtcgtttcgtcttgttgggggacaggaaggagctctaccaccgcagcccctcaggcatccttccagcgatgcatatccatcgccgaaggtttctactggccgaccacggtggtcgatgccactagaattgtccgcacctgccaagggtgtcaattctacgcaaggcagacccacctgcccgctcaggctctacagacgatacccatcacctggtcgtttgctgtgtggggtctggacctcgtcggtcccttgcataaggcacccgggggctacacgcacctgctggtcgccatcgacaaattctccaagtggatcgaggtccgacccctaaacaacattaggtccgaacaggcggtgacgttcttcaccaacatcatccatcgctttggggtcccaaactccatcatcaccgacaacggcacccagttcaccggcagaaagttcctggacttctgcgaggatcaccacatccgggtggactgggccgccgtagcccaccccatgacgaatgagcaagtagagcgtgccaacgacatgattctgcaaggactcaagccgaggatctacaacgacctccacaagttcggcaagcgatggatgaaggaactcccctcggtggtctggagcctgaggacaacgccgagccgagccacgggcttcacaccgttctttctagtctatgggaccgaggccatcttgcccatagacttagaatacggttcccaaggacgagggcattcgacgaccaaggcaatcgaaccaaccgagaagactcactggaccagctga

SEQ ID NO: 5464 - DNA, 1176 bp, Zea mays
  Peptide Sequence Number=SeqID_47243
atggagttgaactcaggactgaggagtggtactcagatggagtggtactcagaccacctaaccaacttagctaccaataaagaactcaattttttgacaactcagctaccacctaacgaactcaggacctgctgcagtgttttttgttatagaaagggtttagttatgtgcaaacagataaaaagaaaaaggacagaagcggaggtatttgacaaatttcttcatggttcaactttggaggaatgctattctgctgttgcctctgttgctaaccggtggttggacctactggataatcaaggaattgatattgctgacagtgaattgcttgatttcatatcggagtcgagcacaatgagtaaatctttagttgactacggagagcagaagtcttgtgctgtaactacagcaaaaagacttgccgaatttcttggagattcgatggttaaagacaaaggactacattgccaatatattgttgctcgggagccacaaggcactccagtgagcgagcgtgctgttccggtagctatattcgagacagatcctgagatcgcaaagcattatttaaggaaatggtttagattctcctctgatgcaaacattcgatctattgttgattggtcttactacaagcaacgcttaagttcagctattcagaaaatcattacaattcctgcagcaatgcaaaagatctcaaatcctgttcctcgagttcttcatccagattggttacacaaaaaggtcagggagaaagatgatcgatttcggcagcgtaaactgcgtgatatcttcagtcccttggctaaagaagaggggctgcataacttgaataggactggagatatggaagatttattaatttcaaacaaggatttgaggaaaaatccttctcatggtttagacattgacaaagaaaacaatccaaatggagcatcagtgggatctggtttgaatattagtaaaaaacaacaaaactgtatgactgggttaaatgttccttgcacttcacaaatccaaaatgctgcttcttatgaaacagttgataagggtactgactatcaaggatggcttgatgctaagaaaagaaaagggaaatatgtccgtgaacaaaaaaaacgtcgaagcgtatactacttcataatgttaaatttcaagtacaatcagattgcttaa

SEQ ID NO: 5465 - DNA, 558 bp, Zea mays
  Peptide Sequence Number=SeqID_47244
atggaatcaaatgttcaggtcgatggaagcgttgacgggagaggtggaggatatgaagaaggtacaaaatcggttcagttgatggcgcaggcgaagatcgatgcggcggtcgctgaacatgcggcggaggaaagaactgagttgtacctgaagttggaggagacgggtcatgagatggctcaggtgcggctggagcagattggaagagagctggagaattcatcaggggaagttgagaatcagggaaggaaaaatcatgagcagaacaaggtttcaacaagtgcctggaacaatataatagcgtgtgaagcaaattgttgtgcgctatttgctgtgcacgaggatccttctagcaggaccacagcgtgtgaagcaaatcgttgtgcgcataagcgcgttgaggagctcagggtggcgcgaaactctatgatgttcaagcttgccctgatcatcgtctacaaattaactccagggaggctcaatgcaaagctcagtttcctgaagaatgttattggatgctctgaggctgagctgggcaatatggatatgtttggttga

SEQ ID NO: 5466 - DNA, 741 bp, Zea mays
  Peptide Sequence Number=SeqID_47245
atgtctctgggtcattttcagtttaaatttcactataatcactgttcttggctgcgttcaagttgtggtgcaaagtgctccatcataaatggagcatctattatgcaggatagagatcttagaatatacaggcctgctgaatcgacaacaagtcggcatcttccttgcagccatgagctatgccaatcggttccaggctgcacaaacccaaagcagccttgcccatacaacattgactacttttcagaaaatactaccagctctggtttgctaattgaggatacactacacttgaactacagggaggaccatgtacccgtgaatgcttcagttattattggctgtggtcaaaagcaaagtggtgattatctggatggtattgcaccggatggactccttggccttggaatggcagatatttcagttcctagtttccttgctagagctggactagttcagaattccttctcgatgtgctttaaggaagatagttctgggagaattttctttggagaccaaggagtgccctctcaacagtctacaccgtttgttcctctgtatggcaaacttcaaacttatgctgttaatgtcgacaaatcttgtattggacataaatgtcttgagggtactagcttcaaggctttagtcgatagtggaacatcatttacttctcttcctttcgacgtttacaaggctttcacaatggaggtgaccatccacgcatttgcagctggttgctga

SEQ ID NO: 5467 - DNA, 513 bp, Zea mays
  Peptide Sequence Number=SeqID_47246
atggaagcaaaggtgagggacgaggcgtgtgcggaagaggaagacgagttggatggattctgggtatcgtacgggcggcgccgccccaggcgccggctgcccccgcccatcccgtcgcttgtcgcccgcggcgcgctcaggcggacgcgcaccgacgacgggaggctcgtcatccggatagtgcccgtcgtgcggccggagtgtatccgcgcccgccgcgaccgccgcgtcgagaacgtgggcagttctccggtgatgccgccgccgccgccgccgcttcgggatttgatggccgccgctcgggaggatggcatcaggattaatgctgcacgggcggacgacggcgacacggccaccacgccggccgcaggagagggcgtgcgcgacgtagaggacgtggtggcaacgcccgcggcggaggcgcagccggcggtgcctccgacgcgggtccgtgggatgcttcgttgcagcagctcgctccaccagatgcccagcctgaggatggtgcattga

SEQ ID NO: 5468 - DNA, 108 bp, Zea mays
  Peptide Sequence Number=SeqID_47247
atggacagccatggatttgtgccatgcagtttcactgtggacgatccggagccaccaccactgatccgcaggcctgaaggggacaggaccaacgacattcccgcttga

SEQ ID NO: 5469 - DNA, 1833 bp, Zea mays
  Peptide Sequence Number=SeqID_47248
atgcttgcctgcccaagcacatcaagtccatggccgcagcggcagccgccgtccccgtgcccgggcgggggtggcggcgccacgcgccacgtggcgctcgcggccaggagcaagcggcggggtgcgggccccgcggcggcggagggggtggacgaggcggcggcggaagcggcggagctggtgcgctcgctgctgcggaggacggcgggcggcaaggagaggctggtgccggtgctggaccggcacgtgcgggtggtccgcaccgagcactgcttcctcctcttcgaggagctcggccgtcgcgacgcctggctccagtgtctcgatgtattcagatggatgcagaaacaacggtggtatgttgctgacaacggcatctactccaagttaatatctgtgatgggaaggaaagggcagatacggatggcaatgtggctgttctctcagatgcggaacagcgggtgcaagcctgacacttctgtatataactcccttatcggcgcacatctgcattcacgagacaagactaaggctttggccaaagctctcggctattttgagaagatgaagtgtatagagagatgtcagccgactattgtgacatacaacattctgctaagggcttttgcacaggctggtgacacaaagcaggtagacatgttgttcaaggatctggatgaaagtgtagtatcgcctgacgtatatacttacaatggggtgcttgacgcatacgggaagaatggcatgatcaaagagatggaatctgtgttggtgcggatgaaaagcacgcaatgccgtccagatgtgatcacattcaacatactcatagattcatacgggagaaagcagacatttgataagatggagcaggtgttcaagagcctactgcggtcaaaggagaggcctacacacccgacgtttaattccatgataacaaattatgggagagcaaggctcagagagaaagcggagtctgtggttgagaagatggaagaattgggattcaaaccaaactatgtgacacaggaatgcctcatcataatgtacgctcattgtgattgtgtatcaaaggcccggcaagtgtttgatgagcttgtgacctcgcaaaccaaagtgcacctttcttcgttgaactcgatgcttgaagcctactgcatgaacggcttgcacacagaagcagatcggctgctggatactgcactgcagcaatgtgttgtgcccaatggttccacctacaagctgctctacaaggcctacaccaaggcgaacgataagttactagtgcagaagttgctcaagagaatgaataaacaggggattgtcccgaacaaaaagttcttcctggacgctttggaagcatttggcacctctgacaggaaacccaggacatcgccaggcataaactctgcaagcaagccaagtacagattctgctggtgattcagaaacagctacttctgacaaaccagagattgtacagcaccaagcagacgccttatcagagaatggtgcatccacatctgttctgcttgggggaattggcaagctgcttctctgggaaagtacaggtgaacatgttagaacttgtggaggccgcactaccacatgcattgtaattacaccacctgggatctctcctactggaacacgggactctgcaagtgtccggttattctccaatatccttccaccattgataagcttcaagtcattaacagtttttggagctatatccttatctgttagctcaaatgaaaagaagaaacttcattcagcaaataagaacgacaggcatgggttgcagaacaaagatattgtacaggaaaagttctaa

SEQ ID NO: 5470 - DNA, 555 bp, Zea mays
  Peptide Sequence Number=SeqID_47249
atgcgtcattggattgtcgtgcatgtttgtttgactgtttattttgaaatggaaaacaagttcggcctgtttccacataggatgccaaaaagccatgactacggtctacggcagcagtacagaacagggaagaaggcgacgagacccagggcggtcaaaacgccagagatagaagccatcgccgacgtcgaatcccggccggcgcttgcgcgtgtttctgtggatttcttcccgcttccctgctcctgcctcctatgggcctttgatccggggcttcgtggatcttgggaagaggaggtgcggtgggcgcctcggcggcgatctggcggggaggatatggccagcgggaaggagccgatcgaggtcaggtttcgtctcttcgacggcacggatatcgggcctacgaagtacgatccctccaccacggtctcctcgctcaaggagttcatcctcgctcggtggccgcaaggtgaggcactgatgaggcttgttgatttggtagcgtacacgcctgtgccgtcccgatctgctgacaagctacggacgcttttgtaa

SEQ ID NO: 5471 - DNA, 468 bp, Zea mays
  Peptide Sequence Number=SeqID_47250
atgcagctcagcttcaacgacacgtccatgaaggccatctgcgggcacccgtcgcggagccgtccgccagcacaactggcaccacctacacgctgtctcctcgctgtcggcttgggcagccccacgcacgctcggcaggagatggtgacggaggggaaacaacacctagaggagacatcggcgccacctgcacaacggtggaatggtagggagagatacggtgtcgcaaggctggaaccatctctgcatctgattgatgagccaacccgtgttgggtctgttcaagcctttcaatgtgctgttgttgcgggttgggtggtgacggatgccttcaatattatcctgaagggcttgactacattgagcagtatggctagcctctttgtaaaccaatggtcattaaaatatcatgatctagaactcgacaaggaagcagagaatacatgggtggattgctacatagagtag

SEQ ID NO: 5472 - DNA, 738 bp, Zea mays
  Peptide Sequence Number=SeqID_47251
atggcacgattattccagttaccacatgccaaggccaagttcgttttacatatatacacgaaattccctgcacgcgccatttcgtgccatcctgacacgaccgaccggaaagcaaagctgcggcctcagcccacgccgatgtactccttcgacttggagcaagaccacacggcggcggcagcgcgcactaccgccacgacgacctaccagccctgcgcccgcggtgcccgctcgctccagctctccggcgcccaccactaccaccccggcgaacaagcactccggaccgccgccgccgtgcggccacggcgcgccaagagtagcagcagcaggaagcacgcgccgtcgtcgtcgcgccgctcctcgaccaccgtggtggcgaccgacgtgagcaacttccgggccatggtgcaggagctcaccggcttcttcccgccgcctgccgcggtcttccggccgctgccgcgcagggtgcacgcgaccagccccagcgtcgccgtcgccgtcgccgcggggcaagggtgtggctgggaacgccgtggaagtcacggaagctcggaggccgcaaacagtagcactgccggcggtggcagcagccccgacgagggaccggccgtgccgccgcctctggtggtggcgccgcagccgcagttcgcgccgctgggcgtgttcgacggcctgcccgacctcgggtcgccggagttcggctggtggggagatctgtccatcgatttttag

SEQ ID NO: 5473 - DNA, 1071 bp, Zea mays
  Peptide Sequence Number=SeqID_47252
atgggcacgaggagtaccgcaggcattccgaggaggcttgggccgctctacgacagcatcatgatgacgcgaggcgaccgcgtactggagcaacaaggcggccgcgctcgccgcgctcgggcggctcatcgagccgtcgccgactgcaaggaggccgtccggatcgacccttcgtacgatcgcgctcacacggcttggcggcttgtactcagattaggagaagctgacaaagccatctaccacttgaagcaatcttccaacgaatccgcgagcgcagacgtttcccgtgcgcagtcggtgaagagccgcatcgctaagagcaacgacgcgcgaaggctcaagaactggttcacggtgctccaagaagcgcaggccgccgcgtccgacggcgccgactgtgctccacaggtgatggcgttgcaagccgaggcgttgctgaggctgcagcggcacgacgaagcggactcgcttctcagcagcgccggcgcgccgaggttcggtgtcgacgagtcgaccaagttcttcggcaccttcggccacgcctacttcctcatcgtgcgagcccaggtcgacatggctgctggcaggttcgaggacgcggtggcgacggcgcagacggcgtttcagctggacccgagcaaccgggaggtggcggtcgtgcagaggagggccaaggcggcggccgcggcgcggctgcgtggcaacgacctcttcaaggccgccaagttcgtggaggcgtgcgccgcgtacggcgagggcctcgacagggagcccggcaacgccgtgctgctctgcaaccgcgcggcgtgccacgcgaagctcgggcggcacgagaaggccgtcgaggactgcagtggcgcgctcgtcgtgcgcccgtcgtacagcaaggcgaggctcaggagggccgactgcaacgtcaagctggagagatgggaagcgtccttgagagactaccaggtgctgatccaagaactgccggagaacgaggacgtgaagaaggctctctctgaagtcgaagccaagctcaaggaccaaaggaacggggctgcagcagccagatctcagcactga

SEQ ID NO: 5474 - DNA, 1014 bp, Zea mays
  Peptide Sequence Number=SeqID_47253
atgcttcacaggaggagccgcacgctgggagggagctccgaccgagccgcgcgccgagcggtggcgaccaagagcgggacgagggggagcggcaatggcgcggccacggacctgctcgtctgcttcccgtcgcgggcgcacctcgccctcatgccgcccaaggccatctgcagcccgtcgcgcccgccgtccgcgtccgagcccgtcaagcgccggcacagcaccagccgggcggggccgacgccattgccgcccagctggccggggctctacaagtcggccacgtgcacggccaggaacccgccgatccaccggcaccgaggcgcggatcgcgcccccgtggacgacgagccgacgtcgcccaaggtgacctgcgcgggccagatcaaggcccgcccgcccaagcccagtggcggtgggaagaaggccacgtggctgcaggcgctggggatcaagaaggatgccatggcgctcttggacgccctgcacggcgctttcaggttcaacgtcgccggctgcttcggcagcttccccggtgccgcgggcgtggcggggtacacttccgcggaggatgacgacgacgacgaggaggaggaggaggacgtgccgcgcgccgagaaggatacggagcacggcggcgcggcacgggcgcggtggttcatggtgctggaggaaggcaataagaaggtgtctaccaagaagctgcagggacaagagccggaacggagccaggaggaagacgcggccccgccggcgaacgcgctgatgctgatgcggtgccggtcggcgccggcgaagggattagcgaggagggtagaggcagaggaggagcgcgaggatgtgaagatcgccaccaataagactccggagaaagagacggaaaaggagagggagagcctggtgctcatgacgtactccccggacttcttcaaggtgtcccttgacattgccaaggagacttggatcgtcggcggtgatgacgccgtcctgcgctgccggagctggaagagatag

SEQ ID NO: 5475 - DNA, 501 bp, Zea mays
  Peptide Sequence Number=SeqID_47254
atggacgcaattcaggtcaaggcttcgtctactcaagggacgcgatctcgcctcgcccgagcccagcctcgggcgggaacagtagtcccaggcgaattcacgcctcgcccgagggccttctcaagcaacgggcgcaccctcgactcgccgaagcccagctcgggcaggcttcgttgtgaagcaaccttggccaaatcgcctcaccaaccgaccgtatcgcagagtgaggctggcaacagccaagttcagcctcaggcgcaacaggaagctccgcctcgcccgaccccagggctcagcctcaacctcggcctcggaaggaggactccgcctcgcccgaccccatggctcggcctcagccttggcctcggagggtggtctacgcctcgcccgaccctagggctcggcctcaacctcgacctcgggaggaatcgcgtcctcgcccgaccccggcctcggcctcgggaggagtctccgcctcgcccgaccttgggctcagactga

SEQ ID NO: 5476 - DNA, 243 bp, Zea mays
  Peptide Sequence Number=SeqID_47255
atggccaactcctacttagctcgcctggctcttgactacgcgcaaccagcaaaagaactataccaaaaacaacaacaaatgcttactatcagggtaaccaacagagaacttgagagggagacaagatgtagatggcagtgcccctttggcagggctctcacgacggttccttctctggctcttcgtgaagccgtatcaaacgatcttaaaaacgacttctcgtcgagagccatcaaggagtaa

SEQ ID NO: 5477 - DNA, 1098 bp, Zea mays
  Peptide Sequence Number=SeqID_47256
atgcagtacaagaacctggggcggtcgggcctccgcgtcagccagctctcgtacggcgcgtgggtcaccttcgggaaccagctggacgtgaaggaggccaaggtgctactgcaggcgtgccgggacgctggcgtcaacttcttcgacaacgccgaggtgtacgccaacgggcgcgccgaggagatcatgggccaggccatccgggacctgggctggcgccgctccgacgtcgtcatctccaccaagctcttctggggcggccagggccccaacgacaagggcctctcccggaagcacgtcgtcgagggcctccgcggctcgctccgccgcctcgccctggactacgtcgacgtcgtctactgccaccgccccgacgcgtccacgcccgtcgaggagacggtgcgcgccatgaactgggtcatcgaccagggctgggccttctactggggcacctccgagtggtccgcgcagcagatcaccgaggcctgggccgtcgccaaccgactcgacctcgtcggacccatcgtcgagcagcccgagtacaacctcttctccagacacaaggatacaaggcgcaagacagcaaatcctaatgatgaaagcacctatggcattggtttgactacatggagtcctctggcttcaggagtactatctggaaaatatggcaaaggggacatacctgctgatagcaggtttgccctagacaattacaagaacctggcgaacaggtccctggttgacgacacgcttcgaaaagtgaatgggctaaaacctatcgccgctgaacttggcgtttcgttagctcagctctcgattgcttggtgcgcgtcgaaccccaatgtgtcgtctgtgatcactggagccaccaaagaaagccagattgtggagaacatgaaggccctagatgtcatcccactgctgacgccggaggtcgtcgacaggatcgaggcggtggtccaaagcaagcccaaacgcaacgtcgagtcatacagattttggaccaattcaatcctgcattgtgttgcttgcgagcagaaagatttgttggatgaccatgatcctttctggtcgtgctgcaagatttctggagcgtga

SEQ ID NO: 5478 - DNA, 969 bp, Zea mays
  Peptide Sequence Number=SeqID_47257
atgagaggaggaggagcggggcccactgcggcgttcatgtccgacgagccgcctccagccgacgcggaagaggtggaggagaactccggcgccgaggaggaggacgaggagacggtggtggagcaggacgacgacgagctggagctggggctctgcctcggctccaagcaacagcagcagcagcatccgccgccgtgccggatcctcacggcccgggacctgcagccgaggtccctgtcaccggattcctccgtgtcctcttcctcccccgcggcaggtgcaggtaccgcggcgccaagcaagagggccaaggcggatgcggcgcccaactcgccagggacggtcgcgtctggccacccacagagcagctttggagtggtgggatggccacccataagaactttcaggatgaacagcctatttaaccaggccaaagagaatgcatcggaggctggcgccaagaagcccatcgtcgaacctgacatgcaggaagacaaggaggagagcaagaaaggccggaccgtcggttgggtgaaggtgaacatggaaggagatatcattggaaggaaggtcgatctcaatgcccatcgctcttacaagacccttgcctcagcacttgagctcatgttcatgaagccgtccattggtctttgcacttctagcagttcaaagactctaaagctattagacagctcatcggagtatcagctcacctatgaggacagggacggggactggatgcttgttggagatgttccctgggagttcagtgaagaggctcaagatcatgagaacctcagacgccaaaggtctcggtccacgattccaagggtctcacagacccacagcagcttgcacgagaggcaggacgtgaaaccaccgattatgtctttgctaattgctgtggtctgcaatgcaacgccaaccacccacccgggtgttggatggggacaaaatgtggacgtctga

SEQ ID NO: 5479 - DNA, 723 bp, Zea mays
  Peptide Sequence Number=SeqID_47258
atggcatgcgtcagcaccttccagagctgccccattgccagaagagcaaagatcaacaccaggtccaggggcagcagcagtagcgtggcgaaggggtcaccaccaccagccttccagttccagtgcagggcgtcgactttcgcggcggacaccagcctccggctcgagctggacgagaaccccgaggcgatcatctcgggggcgtggcccgggaactgctccctcctcagctacgacgacctccgcgcctacctcgagtcgcaggagacggcggcccaggcagacgatcagcgcggcgtggcgctcctgagcgagaccatgtccacacccgtgctggtggccacagcagaccagaccctggaggacgtcgagtgccacttcgaggccgtgtcggggcttccggtcgtcgacagcggcctcagatgcgtcggggtgatcgtcaagaacgaccgggcaagagcctctcatgggtccaagacgaagatatcggaagtgatgacatctccagctatcacactatcgtctgacaaaaccgtgatggatgctgctgttctcatgctcaagaagaagatccacagattaccagttgtaaaccaggacgaaaaagtaataggtacgagattatatgttgcaagggctaatggggttctaaacactgtcaacaggcatgttgaagatttaggagcgcagatacccatgctcggaagccacagcctcttgtaa

SEQ ID NO: 5480 - DNA, 1194 bp, Zea mays
  Peptide Sequence Number=SeqID_47259
atggcaatgccagatctcacagccaccgtgatcccaaagctaggcgaggccgacgacgagtcggtggagatccgggaggtgtgggccgacaacatggaggaggagttcgcgctgatccgcgacatcgtcgacgagtacccattcgtcgcgatggacacggagttcccgggcatcgtctgccggcccgttggcgccttccgctctcccgccgactacaactacgccaccctcaaggccaacgtggacatgctgcacctcatccagctcggccttaccttctccgggccgcgcggcgagctaccggtcctcggtgctggccgccgccgctgcgtctggcagttcaacttccgcgagttcgacgacgcgcgcgacatcttcgcgtccgactccatcgagctgctccgtcgcagcggcatcgacctccgcctcaacgccgagcgcggggtcgatgctcgccgcttcgccgagctcctcatgtcttccggcgtcgtgctcaatgactccgtatactgggttaccttccacgcaggatacgacttcgggtacctactgaagatcctcacttgcaattgcctcccagacacacaagccgggttctttaaacttatgaagatatatttcccgactgtgtatgacatcaagcatctcatgaagttctgcaacagcctgcacggtggactgaacaagcttgctgagctacttgatgtggagcgtgttggggagtcccatcaagctgggtccgatagcttggtcacgtcctgtgcattctggaagctcaaggattcattcttcacgggctcaacagagaaatatgcagggcgattttattgcccagatgaatcctgcttgcccttgactgtcaatgctgttgtggcgtccacaattcccagtgacgtacggttctgccgtccctctgccctctcgcgctccctccgccaccctccacgctgcatcaacgcccgcgggttctgcctctccctctcactgtgtcgtctgcccccgccgcaccccttcccccaccgtggatctcgcccgaaggcgccgcggatccaccgtaccctcgccttggcgcctcagttctccgccatggacgccctggatccaccacctcctcctctctccctcactacgccgcctgcccccgccgcacacctccaccgcgccccttccctcgccgtggatctcgcttggtga

SEQ ID NO: 5481 - DNA, 375 bp, Zea mays
  Peptide Sequence Number=SeqID_47260
atggccgctgccgcgcgctcgcgcctcgccggcctccgcctcgacctcgcctcccgcacggcaccaaaccctaagcccctcctctcctccgccttctcctcctcgaccatctccgcgcctcccgcggccggccgggtccgcgaggacgagagtggcctcctctcgcggcgcctgctccggctccgcttccgctcgccggccgggaccgccgcggctgccgtcgagagatgggcccaggaccgcgtccacgtctcgcagccggagcttcggcgcgcaatcgggatgctccggcgcgaacgtcgctacgagcaggccctcgagctcccttcgactgtcgtcatgggatcatgcagcaagactggacttgattgctaa

SEQ ID NO: 5482 - DNA, 423 bp, Zea mays
  Peptide Sequence Number=SeqID_47261
atggtcatttcattagatttattatatgcaaaaattataaagaacaagtggtgttgtatgagtgcaaaatcaacggccttccttcacggcgcttttagtggagacctactacaggtgtggttggtgcaagctgcaaaaggaacttcaatagatcagcattacgaggcacaacaacaaggaattttccttcatgatcctgtgagcttcactgtcgcacttcatccagagtacttcacattcaagaagggtgtggtgagagtagagatccagggcatttgcactggcaacactttgatggatcaaggattgaaaaagtggaattcagagaacccatggtcagggtataaaccgatttctgttgcatggacggttgatgtgccaaaggtcatcagctttataaagaagcttctcatggcaccatga

SEQ ID NO: 5483 - DNA, 354 bp, Zea mays
  Peptide Sequence Number=SeqID_47262
atggccgtcatcgcctacaggcgtgcggtgctcctgcacgggcaccagaggagccgcacggctcgcgccctcgacccctccgtcgtcgctgtcgcatcacatggtagggggaggaggaggacatggccgtcatcgcctacaggcgtgcggtgctcctgcacgggcaccattagtggtcgcaatggtggtagacctcaccctgcccccactccatctcgtagtggagcagttccatcgtcggagaaggcaaagatccagccaccaagttctaccaccactgcgtccaggtatggatccaagtccctcaactacgatctgtacacagagctatacgttgtgcaagatcttccctaa

SEQ ID NO: 5484 - DNA, 225 bp, Zea mays
  Peptide Sequence Number=SeqID_47263
atggcggtggcaagcgatggtatacgcgcggccagggagtctggtagatggacccatggggcagtggtcgagtcagcgcggtggagttcggaaatgggttgtgcgcgcacggagacaaacgaacggtgggctgaattccggttccaaggcccaatacagggagatgtgactcaaaagctttgtggaaaatattctaactcacattctttggaaaattttacataa

SEQ ID NO: 5485 - DNA, 381 bp, Zea mays
  Peptide Sequence Number=SeqID_47264
atgaaatgggcgcgggtcggagcgtcgtcgttcctggttttgtacctggttagagaggtttttgatgatattgctcctatggtgggcttgtcagtaggttcagcagttggtcaatcatcaatagcagatgaagtttctagtcttgtcccgaagcccaaacaagagttttacccaactattgacgaagaatatgtccaaatggaaccacagactaaaattgatatattggtggcaacccctgaaagactaatggatcacattaacatgacaaatggtttcagtctggagcatcttcagtacctggtcattgatgaaacagatcgaatgctaacctactatgtatcatgtaggggtgtggagcgtgtatttaaagatatataa

SEQ ID NO: 5486 - DNA, 216 bp, Zea mays
  Peptide Sequence Number=SeqID_47265
atgtccaagacgttgagaaccggaaagcagaataaagtgcatggtaggaacaggtacccggatagcctcatgcaccacggttggtttttggttgcctccacggaacagttcaataattcctccgggctttacatgaagactcatgctgatgaaaggaagaactactctgtcgctgagattcagagcttagactctttagagtgtgcatttcaatga

SEQ ID NO: 5487 - DNA, 1065 bp, Zea mays
  Peptide Sequence Number=SeqID_47266
atgcagggcggcggcggaggcggcgggcaggacgacttcttggaccagatgctgtccacgctgccgcccgcgtggcccgacctcggctacggcaagtcgtcgccctgggagctccccgcggggcccgacgccgccgccgccgccgccgccgcgttcgacgagaccgcgctcctcgcctcgcgcctccgccaccaccagatcggcggcgtcgatgagaagcccctcatgctccacctcagcgacctgcacggcgtcgccgccggcggcggcgacgacgcgggtttcatgccgctgccgctcttcaccgaccgcgccgccttcaagtcccccaatgccgccggagccgaccaggcgctgtacaacgggttcggagccgctgggatgcatgccgccgccgtgcaccagccgccgttcgggcagctccggagggagaggatagcggagaggatgaaggcgttgcaggagctggtccctaacgccaacaagaccgacaaggcatcgatgcttgatgagattattgactacgtgaagttcctccagctccaagtcaaggttctcagcatgagcagacttggtggagctgcagccgtcggccctctcgtcgccagcatggcatcagagggcgacgacagagccggaaacggcacaagcgacgacggcggcgatggtgccaccaacggtgataacggtggtggcggcagcagcctgcgggtgacggagcaacaggtggccaggctgatggaggaggacatgggcactgccatgcagtacctgcagggcaaggggctgtgcctgatgccgatctccttggcctcggccatctcctcctccacgtcgtcgtcgccgccgccgtccctcctgccccgcccctccgtgggctcagtggaaggcgctagaggtcccttgcacgacgacagtggtggtgccggtggcgacgatggttctaggaccatcaagtatgccggtgccggcggtgaggaggaatcgaaattattggtccaaagggatcatattcatatcacataccagcccgagtacacattttatggaatgagattaggatag

SEQ ID NO: 5488 - DNA, 2988 bp, Zea mays
  Peptide Sequence Number=SeqID_47267
atggtgaatcatttacctgaacttgtgctgaagaagaataatgggatgcatatgacatatggtcttgatctggaacatagtccagaaactcggtatcgtcagagatatcttgatctaatggtaaaccatgaagtgaggcatatcttcaagacacgatctaaagttgtctcgtttatccggaagtttcttgatgaccgtgaatttttggaggtggagactccgatgatgaacatgattgctggtggagcagctgcaaggccttttattacacatcacaatgaattaaatatgaggctttttatgcgcattgctcctgaattatatctgaaggaattggttgttggtggattggaccgtgtttatgaaattggaaaacaattcaggaatgaaggaattgatttaacacacaatcctgaattcacaacttgtgagttttatatggcttatgccgattataatgatttgatggagcttactgaaaccatgttgtcagggatggttaaggagctgacaggtggctataagataaaatatcatgcaaatggagttacgaactcaccaatagaaattgatttcacacctcccttcagaaggatcgatatgattaaagatttggaggctatggccaatctcaatataccaaaagatctagcaagtgatgaagcgaaacgttacttgatagaagcatgtgctaagtatgatgtgaaatgtccacctccccaaacgacatcactgcgtccagagacagagacagagatgtttgacgtgtggagtgtcgtgggatggtgggacaggtggcagctgcgcgtcctcgtcctcggcagcctcggcatccagtggtttctgctggtggctgcccccatgcgcaagtacaccatccgccccggcctcaggctatgcatctggcttgcctacatcagcagcgacgctctggccatctacgcgctcgccaccctcttcaaccgccacgccagggcgaccagcagcagcagttgtgacggcggtgccaacagcaaggcgaggatcctggaggtcctctgggctcctgtcctgctcatccatctcggcgggcaggaggagctgaccgcctacaccatcgaagacaacgagctgtggacacggcacaccgtgaccctcgtgtcccaggtcgcggttgccctctacgccttctacaagtcctggcccaaccccagcgactggaagctgctggcgtccgcgatcctgctcttcatcatcggggtcgtcagcttcagcgagaagccatgggcgctcaagaaagccagcatcaacaggctggcgtctgtgtcggccacgatacaggggaccaagaagcgcacgaggctggcggtgtacttggacgatcttctcttctccgattggtacagctgctccagagccaccgagaagagtagcagcagcggtagtagcctccccgcagccgcagccgcggcaggtgtgggttggcacgactgcttctccttcaccgagccgagcaataaggggcacggcgatcatgtgggcttgtcggaggcagataaagtctacatggtgctctcggacatgtcgctgtccgcggccgccgacgaccttgtgctgcgaggcagggctcgaaatgtggaggatgttcttcggcccctgagcaccaaggcggagcaggcactcaagcgctggctgcgtggcgcgtttgggctcatatacaccagagccaacctggtcttcactcgcacgtacctggtgtaccatgtgctggtggtgccgatcctgcacgtcgccgccctcacgctgttcgcgacgagcgacaagcacgggtacgaccgcaccgacgtgaagatcacgtacgtcctcctgtgcctcaccgccgcgctggacgtccttgcggtgttcgtccgccagctgctgtacggggccatgtccgccaaaggtgtcccggcgctgtgcgagacggtgccaggctacaacctcgtggacgcggtcacccggcggaggcagaaggacattgggtggctgttcaggtgcgccgccgccatgggctgcaaggaggagtacttggagtactgcaagtgcggcggggggcagcagcactacacactgtacaagaatgtgtcgaagatggtccttgcggatctggtggacgcacagggccgcgacctcgccaactacagagtcttcacggtgccctacgcatcacctgcaagcactgctgccgggccggccgtggagcagcagcgcgcatcgccagcaggcgcggccaactgggctctcagcgaggagcagcagaagctgtgcggccgcaaggtccgggacaccctgcgtgggtccttcgacaggagcgtcctcgtctggcacatcgccaccgacctctgcttccgcatggaacaagttcctcctgacgccgacaaggaagaagactcgcactggctccgcatcaagtgcacggaagcgatatcctgctacatggctcgcctgctcgactcccaccccgacatgctgctcaccggcagcaggcggcacctggtcagcgaagccttggatgaactcgagtccatctttgaccgcaccatggtagatcgcagcggcaagccaccgggcaaagacgacctgcacaagatcatcgacgacgtggcgcgggtacgtttccaggtgcccgtcggcgtcgctcatggagctgcagacgacgacggggaggaggcggtacagtctttcttccacatccccgaggcatgcgggcttgcaatggagctgctgcagcttgaagcgtccacgcgctggagggtgatgtatcgggtgtggctgggcatgctcttctactccgccagcatgtgcaggggctacctgcacgctaagagcttgggtgaaggtggcgagttcctttcctacgtctggctcgtcctctcgctcaagggggccaagaccctggccgacaagcttcagatgttggaggtggaaggggacgacaggcagggacgaaggcaaggacgaaagtggtaa

SEQ ID NO: 5489 - DNA, 168 bp, Zea mays
  Peptide Sequence Number=SeqID_47268
atggggaagcctgtcccatcactcctcatgctcctcctcagccgaggcagggtcccactcgacagtccaacccggtggtcacctgcattagtaaaaatcatcctccggcggcggtggggctcatcccgtgggagtttaacgttcggcttgcgtagaacgtacgattag

SEQ ID NO: 5490 - DNA, 399 bp, Zea mays
  Peptide Sequence Number=SeqID_47269
atggcggctcgccgtggcacgcgaccccggctcgccggtgcccggccgtggcgcccctcccccggcgtccccgcgcagcccctgcctgccctcggcgcgcggcttcgcgcccacgtggtccagccccggtggctcgccggcgcggcggcccgcgacctcgtcgtggcggccatggcgcccccggctcagtgccccccggcgtgctcccctagcccggctgtggcgcggcccggttcgccggccatggcggctcggccccacccgcttggctctcccctgccccgtccccagtgccccgccatgccctggccatggtggcacggccccgacagctgcccgccttggcgtgcccgcccctgcccggcgcggtcgtggcgtgtcggcccggcacggccttga

SEQ ID NO: 5491 - DNA, 318 bp, Zea mays
  Peptide Sequence Number=SeqID_47270
atggccatgatgggttcaacatcggaaaagaagtacctctgtcagaaacagtgccaagaaaaggagaaaagaatgggagaaaatatggctcaggacagccaaaaccagcaccagcctggcacaccggacagtgtccggtgccccagactggcccgacgtgaactggctgctctcgggaatcggtcgggcgacttggctaaaaatcaccggactgtccggtggtgcaccggactgtccagtgagtcttcagcaccctcgcccaagtacatcgacgacgaactcgtcgctctcgggaaaaccagaaagcgtcgcgactaa

SEQ ID NO: 5492 - DNA, 375 bp, Zea mays
  Peptide Sequence Number=SeqID_47271
atggaggactactactactacttcacctcctgggggaccgtgggctccgtcgagcccaccggcttcccggcccacacgttgcctcgcaaccctagctcggcgtcgccgaagacccgccgtgcgtcccgcggcgacgctgacgccggagagcggctccaccactactacctcgacgcctgcttccggtgcgggcgacatcttggcgggaacaaggacatcttcatgtacaggggcgacaccccgttctgcagcgacgagtgccggcagcagcagattgaggacgacgaggcgagggagaagaagaggtccaggcagcatgctgctgcgactgcgactgcgactgcgacgaagcgggagcgggagcggcggagctag

SEQ ID NO: 5493 - DNA, 1293 bp, Zea mays
  Peptide Sequence Number=SeqID_47272
atgaggcccctgcctatggcgtcggcggcgggcgaagcacacacgagaggcgaggagctcgacctcttcatggagaataaggttgctacaatgcagtacatatccggtactggatctttaagagtcggaagtgaatttcttgcaagcttatttttgaaggcttcttctgggaggacattaatcaccgcacaaattccgcttgttgcgagccatccagatgtgcatgagccatgtgatgattcctttgcccttgttgatgcactactctcagataaagcacaactcttgacactacaaccaaggttatgtatggaggtagggtttggtagtggttatgtcatcacctcgcttgcaatcatgctcaggcagttaggctctggagcccagtacctagcaactgacatcaaccaacatgctgccgagacaactcaagcgacccttgaagctcatggggtgcatgcagatgtgattgttactgacatcatgtctggtcttgataaacgccttgctggtatggttgatgtggcagttgttaaccctccttatgtgccaactcatgtggaagaagtcggatgtagaggcattgctgcgtcttgggcagtcggtttgaatggccgccaagtgatagacaggatccttcctgctgtgcgtgagatgctatcagaaagagggtggctgtacatggtggccctcgaagataatgatccttcagacatatgtcatctgatgagcgagatggggaaccttcgagaaatgttccagattgatgctgcagattacatgatgtccatatgtggtgatgacagtctgaaagagctttcttcacctgggaaaagcggcagtattttctatctctcacaggatgaacgttttgtcataaaaaccttgagaaaaactgagttgaaggttcgctttgttgtgatgagaaatatgttttgcactgagctgcgaattcatcgtaagtatgacttaaagggttctacacaaggccgatcaaccaaaaagcaaaatataaatgagaacacaacactggaggaccttgacctatcatatgtttttcatgtcgataaaccatggccggacgcacttttcagacaagaggagcatacccatgaggaccttaaggaacaacaggttgtgcatggtgaggtggaaaacactttagggcctggttctatcaacttggcattagagaatccaataccaaaggattggagaactattcatatgattggagctgaaagcaatctactagatattgtatctaattctgttggcacatctataacttaa

SEQ ID NO: 5494 - DNA, 267 bp, Zea mays
  Peptide Sequence Number=SeqID_47273
atgaatgctgcccactgccaccgacgggtggggcacgcatctcttgtcccgatgctcctcaaccgtgcgccccaaccaactgccccgcatcgcttccgttcttggcgtgggttcctcgttcttgattctctaagcttttcgcagcgcagcctaggaggtaagaatggctcattccgcaaggataagtttgcgtatagaattattgagggccatggctctacaggtgtggccttaagctacgctccgaaaagttggatctttatgtga

SEQ ID NO: 5495 - DNA, 435 bp, Zea mays
  Peptide Sequence Number=SeqID_47274
atggagttcacgtcgtcgtcctacttccacgcctccggcaaccccgacttcgcggcggtgttctccgacggcggcggcagcgcgcaggcccaccggccacggcgctccaccgacgacggcacgaaggcggaggacggcaggagccccaccacggcgaggcggccgccgtccgcgttctgcgtccccgacacggaggcggaggagcccaacagcttcctggacgagtgcaccctctgccgcaaggcgctctgcggcgacatcttcatgtacaggagggagcagatcgagatggaccgcataaggcaccgcaggaagaagcagcacgccctgatacagcagcagctgcagctgcagcagcagcagcaggcggcggccgcggcgatggcgcagaaggaccagcgtgcccagcgccggcagcttcagccacagcactag

SEQ ID NO: 5496 - DNA, 105 bp, Zea mays
  Peptide Sequence Number=SeqID_47275
atggaggaagataacatcgaggtggacgacctaggagagaatttggtcgactatggagcctcgctagagcacccagaagccgccttcactaagccaaaagaatag

SEQ ID NO: 5497 - DNA, 345 bp, Zea mays
  Peptide Sequence Number=SeqID_47276
atggcgctcggtcccctgggccggcccttcttcctcccgtgccattccctctccctccgatggcgtttggtgttctactgcgcggggctacagtgccccgtctcaagctgtgatacggccctcggatccgcgattgtcttgggtcgggtggagcccgggggtgtcgccgatccctactcggtctcgcttctccacgcgcgagtcgtctcccccgctgtcttctccgccggaaaaccctacttccaggttagggtttcccttggatttcatcggttcgcactcgtttccccattgcaccgctttcctctcgcatctctggtcgctcccggtctcggcgaggtctag

SEQ ID NO: 5498 - DNA, 486 bp, Zea mays
  Peptide Sequence Number=SeqID_47277
atgcagcaaaagcgtcgcggcgcccagcaagggaaagggataggagagggacaggtggcgttccgcgggccgcgcacttggggcgcgggaacgccggtagctgccgaaaccggtgaggatgggtcaggtcagcagcaggcgcaggtgaacgtagtagtgcgcggtgacatgcgcgacggacggacggacggacctgctctccgactccccgagcatcggactagcgtgccgacggccaggggtgggaacgacgccgcggccctgcctgcctgcctgttgggtgttagtggtggtggtgggcaggccgcgatgcaactgacggacgcccggcacagcacggcacggcaggggcaggccgcggcggacaatcagtacgagaaaaccactgctctgctcgcctggaaaatggctccagaggactgcaacagtcttctgcgtgacgacgtcaagtggccactctgcactcgcttgctccattctgcgtga

SEQ ID NO: 5499 - DNA, 1173 bp, Zea mays
  Peptide Sequence Number=SeqID_47278
atggcgaagccctcgcgccagaacctgacccatgcctccgtcacatccctgcgccgcttcggcggacagtcgtcgctgccgccttcgggcgcgtcgccggcgttacggctcgcggcggcggcgctcctcctcgcggccgcagtggcgctgccctgcgccgtgctataccgcgccaccgtggagactatggagcccatccacgtcccgcgtgtgcacaggcccttattgcctgcgccgccgcttcctccggttcaggtccccgaggatgacagcgacttcgatcccttccccacaggcgatctggacagcgaagatctcaaactagaactggttctgcaggaggcttccatggacaataagaccataatattgacgaccctcaacgctgcatgggcttcaccgggctcagttatagatcttttcattgatagttttcggcgtggtgttggtactagttcactcttgaggcatcttgtgatagtagcatttgattttaaggcatatgaacactgtgtcaagatccatccctactgttatgctcttccaaccaaggatgttgatttttctgaagagaagaggtttcagacaactgggtatctggaaatgatgtggaaaaggcttgatttcttgcggctagtgcttgaaaaaggttacagctttgttttctcggatgctgatatcgtgtggttccgcaatccatttccccacttctatactgatggagactttcagattgcatgtgatcactacgtagggaatgcaactgacttgaggaacatagccaatggagggttcaactatgtgaagtcaaacgaccaaagcatagagttctacaagttttggtattcttcccgatttagatatcctgggtaccatgatcaggatgtatttaattttataaagcatgatcgttacactacggacattggtctgacaattaagttcttaagtactacctacttcggcggcatatgtgagccaagcagagatttaaacaaagtttgcaccatgcatgcaaactgttgtattggactgcagagcaaaattcatgacctaagaatcatgatggaagactggagtaactatatgtcgatgccaccgagcttaaaacaattcagggcactgtcgtggagagtaccacaaaattgcagtctttcgttactaagcctgtga

SEQ ID NO: 5500 - DNA, 372 bp, Zea mays
  Peptide Sequence Number=SeqID_47279
atggccaaaaagattgctcaaagagcaaataagagcatagttgatcaagcagcaaagggcgagagaaaacagaaggatcgtccgcccaccacgttccggcttcccagactggacgttcaaaatcccagagatggaccgatgccagtgactactcgtcatcctctggtggctccagtctggcaccgggttcctacaaataggctgtttcctactctaggagcacagttcctcgttctacgtcgggcgcacgaccgccaaacagtggcgctaaggcgtgcgcggaacttgaggcgtctgacgcgccttgccgtggagcgtaaggcgtccgtcgtggcgcagggcgtccgcaaggcgtcgacggggcgtctttga

SEQ ID NO: 5501 - DNA, 1180 bp, Zea mays
  Peptide Sequence Number=SeqID_47280
gccccagctctcctccctcctcgcgaccgcgcaatcccctcttgatgctttccatggagagctgagtgtcggccttccgaaatctccgcatccttatggtgaagcgtgcccccgccactgccctcgtcaatcccttcaatctcgcaaaaatcactgcgtgcccacagacctcgtcatggaaggcccgtcctcgccgtctcgcccccattcgcgctccccccgacctcgtcatggaaggccgagcaacccgccattctcgctcttccccaccatcctcgacccctccgcgcacggccccggatcccctcacgccggcatgccacgacggatttgcgtgcgccaacaacctatgccatgtctcagtccacacgcgctatctcccattgccccctccccctctgtgcaaggccctgcctcaccctcacaccgacgcgccatctacgcccattcccccagtttccacgccgtcgtccccccgccccgctcgcggtgtccacggaaggcacaacaagaaggccgcgccggagatcctcctccacgctcccgttgctctggcttccttaacgaggtcgagcttcgcctcctctgctgcaacctccctgcacaccctcgactgcgcccccactcgcttcccctccccctgcgcatctgctcgcccaagaagttcaacctcgaatcccgcaataatcgtatcgatcctcccaataccgttgccattgtcaacgcggacgttgacctcaaccactcgtggatggatactaccgggaaggttgtgcgaaggaaagaagaggcggttggagaggagggcgacatggagaggccgacactgctgtcggaggtgctcaggatgacccagcctgctgcttttgtctccatgcagtcgtccgatggtcaacccacaccgagcaatgtctcgaagaacaagatgaaggacggtggcgatgtgctgttcttggatggcttcagggaggtcgccgtcaccatcggtcgcaacagcctctttccacagcccctccacccgaggatgaacacgatgttgtctggttttggttgtaaaaggataaaccgcatgagtgcccagtctgctcacaatactttgtgctcaaggtcaccagtgatggtggtgatccaaatggccacaatgacgaggatgatcatcaatgaggcgttgtgtcgataa

SEQ ID NO: 5502 - DNA, 606 bp, Zea mays
  Peptide Sequence Number=SeqID_47281
atggggaacgccttccgacaaggtttctactggccgaccgcggtggctgacgccactaggattgtacgctcctgccaagggtgtcaattctacgcaagacagacacacctgcccgctcaggccctacagacaatacccatcacttggtcgtttgccgtgtggggtctggacctcgtcggtcccttgcagaaggcacccgggggcttctcgcacctgctggtcgccatcaacaaattctccaagtggatcgaggtccgacccctaaccagcatcaggtccgagcaggcggtggcgttcttcacaaacataatccatcgctttgggatctcaaactccatcatcactgacaatggcacgcagttcactgggaagaagttcctggacttctgcgaggaccaccacatccgtgtggactgggctgccgtagctcaccccatgacgaatgggcaggacgcccaagggcgccacaagctcactcctccctgggaagggccgttcatcatcgccaagattttgaagcccgggacatacaagctggccaacgatcaaggcgaggtctacagcaacgcttggaacatccaacaactacgtcgcttctacccttaa

SEQ ID NO: 5503 - DNA, 2229 bp, Zea mays
  Peptide Sequence Number=SeqID_47282
atgcctggaattacagaggatggagttgttgcagaggaggtgccgaacggggtgaatttctctccacagaacgaaagtctgcctgccccaaagtcgacagcagcttcaacgatggcgggtagcatgcaaagcgaggcgcttgagatgcatgttgaggcctccggtgctggggaaccctcaatcgagcaactctacaacaacgtatgcgagatggagagctcaagtgagggtggctccccatcacgcgagagctttggctcggacggggaggagtctagaattgactcggagcttcgacatcttgttgctggggagatggaggccatgaaggtgattgaggaggaagaggagaatgggagtgttgccaacgttgtaccccctgctcctgctgagaatgggaccccagtaaaggaacactcttccagttcgtccaagaagtcgaagaaggcatcaaaatcacagcttgagtctgatgcctctgttggactcaatggaaaggcgtccactgaggaaggtgagagcgaggtcagcaaaccggcaagccgagttggccgacggcggaaatcaaatgccaacccacagagtggaacagaagatgctgggcttgataacccagaccttggtccatttcttcttaaacatgcaagagacttgattgcctcagaaaacccacggcgggcattgaaatatgctctccgtgccacaaagtcgtttgagaagtgtgctggtggaaagccaagcttgaacttagtgatgagtttgcatgttgttgcagcaatctactgcaacttgggaaaatatgaagaggctgtacctgtgctgcatcgatccattgagatccctgtaatcgaggaaggccaggaacatgctctcgcaaagttttctggttgcatgcagttgggggacacctatggcatgctaggtcaaactgcacactcactgcaatggtatgcttctgggcttgaaatacaaaagcaaacattgggagagcaagacccaagggttggagagacttgtcggtacttagctgaggcccatgtgcaggcactacaactcgatgaagcacaaagattgtgtcagatagcccttgacatccacagggagcatcgcgagacggcctcactagaagaaacagctgataggaggctgatgggtctaatttgtgacactaagggtgatcacgaagctgccctggagcatctagtgatggccagcatgtccatggtagccaatggtcaggagacagaggtggcctcagtggattgcagcattggtgatatctacctctccctgggccggtatgatgaggctgtgtttgcttaccagaaagctctcactgtattcaagaccagcaaaggggagaaccatgcaactgtggcttctgttttcgtgcgcctagcagatctgtacaataagacggggaagctgagggagtcaaaatcctactgtgaaaacgccctaaaaatctaccaaaagcctattccagggacttctctggaagaaatcgccactggtctaactgacgtctcagccatatatgagacgatgaatgagcacgagcaagcgctcaagctacttcagaaggccttaaaaatgtacaacaactctgccggccagcagagcacgattgctggcattgaggctcagatgggcgtgctgcactacattttgggcaactatggcgagtcctacgactccttcaagagcgcaattgcaaagctccgcacttgtggcgagaagaagtctgccttcttcgggattgccctgaaccagatggggctggcatgtgttcagaggtattcgataaacgaagcagcagaattgttcgaggaagctagaactgttctggaacaagaatacgggccataccatccggatactttaggagtctacagtaatcttgctggaacttatgacgcgatgggaaggctggatgaggccatcgagatcttggaatatgtggttggaatgcgcgaggagaagctaggtacggcaaacccagacgttgacgacgagaagcggaggcttggggagctattgaaggaggctggccgggtgcgaagcagaaaggcgaaatccctggagaatctgctcgagaccaacccatatgtttcacctgagtatagcttgtattttctgaattcaccttcatgtgaggaagagctgttgaacagcgccctgaaggacgaatatggcataaccagagtattcgcctacagcttcaagtaa

SEQ ID NO: 5504 - DNA, 528 bp, Zea mays
  Peptide Sequence Number=SeqID_47283
atggcgcctcctgttgacgtggtcggtccgtgccctgggctgggcgatgtggaggctcctccgaggtcgaggtcgagtctgtcttccgaggccgaggtcgagtccgagcccctgggtcgggcgaggcggagaccgtcggctgaggccaggactgagtccgagccctggggtcgggcgaagcggagttcgtcgtcttctggggctgagcccgaatccgagccctggggtcgggcgaagcggagttcgtcgtcttccggggctgagcccgagtctgagccctggggtcgggcgaagcggagttcgtcgtcttccggggctgagcccgagttcgagccctggggtctggcgaagcggagtttcccatggcgcctagggccgggcttggctactgtcagcctcactctgtcgagtggcacagcagtcggagcggcgcaggcggcgctgtcctcttgtcagatcggtcagtggagcagcgaagtgactgcggtaactttggctctgtcgactggagggcgtgcgtcagaataa

SEQ ID NO: 5505 - DNA, 3351 bp, Zea mays
  Peptide Sequence Number=SeqID_47284
atggttgctagacacacacctctacctcttttggaagctcttcttcggtggagagaaagtgaatccccgaaaggtgctcacgacgcgtcaacataccaaaagaagcttgctgttgagtgcatattctcttctgcctgcattcggtttgctgagtgttgtccacaagagggaataacagaaaaactttggattggcttagaaagtttcgtatttgattggctaattaatgcagacagggttgtgagccaagtagagtatccgtcattggttgatttacgaggtctactcttagatcttgttgcacagcttttaggagctttatcacgcataagattcagttctgtgactgaaaggtttttcatagagcttaatgtgcggcgtattgattcacttgctcttagaagtgagacactcagcataatcaacgggatgcgctaccttaaattgggggtgaagacagagggtgggctgaatgcttctgtatcctttattgcaaaagcaaatcctctaaatcgtcctcccaacaaaagaaagagtgaattgcaacatgctttgtgtaacatgctctcaagtatacttgccccacttgcggagggtggaaaaaaccattggcctccacttggtgtcgaacctgcactgtcactttggtatgatgctgttgcacgaataagagtccagctcatgtattggatggataagcagagcaaacatgttgctgttggctttccacttgtcacccttctactttgtcttggtgatgccaatgcattcaactctagtttttcccagcatatggaaatcctgtataagtatctcaaggataagaaccatcgatcaatggctttggattgtcttcatcggctagtaaaattctatttgaatatttatgccgattaccaacctcgaaatcatgtttgggactatttagacagtgtaacctctcaattactgactgttctgaagaaaggcttgctgacccaagatgtgcagcatgataaacttgttgagttctgtgtgaccttagctcagagcaatctggattttgcaatgaatcatatgatactggaattattgaaaccagatagtttgagtgaagcaaaggttgttggtcttagggctttgctcgagatagttgtttctccatcaaatcaacaaattggcttggatgttttgcaagtatttggtattgggcactatattcctaaggtgaagtcagcaattgagtcaatactaaggtcttgcaacaaggcatatagcctggcacttctcacatcatcaaagactacaatagataatgtaaccaaggataaatctcagggatcactcttcaggtctgtgcttaaatgtatcccatacttgatagaagaggcgggccgtaatgataaaatgactgagattatacctcagcatggcataagtattgaccctggtgttcgtgaagaagcagtgcaagtgttgaacaggatcgtacgttgcctaccaaatcgtaggtttgctgtgttgaaaggaatggccaatttcatcctaaaacttcctgatgaatttcctctcttaattcaaacatcacttggacgcctggtggagctaatgcgtttgtggagagtatgcctatctgaggaggccttggcaaaagacatgcaaagtggtaggcgtttgagtataggaggggatgcactacagaggtctccttttcataggtccagggatgtatctgaatttcgcgcctcagaaatggatgcagttggccttgtctttctcagttctgctgatgttcaaataaggctcactgccctggagttactgcgatgtgttcgagcactgcaaaataatctcagggattactcagcaaatgaatggggtgacaataagctgaaacttgaaccagagccaatatttatcatagatatcatagaggagaatggggaagacattgttcaaagctgttattgggatccgggacgaccttatgatctaagacgtgaaatggaccctattcctttggatgtgactcttcaatccattttggagagtgtagataaaaacagatgggcgcgctacctcagtgaaattgtgaaatatgcagctgaactttgcccgagttctgtgcaggatgcaaggcatgaactctggtcttttctggaacgtctgcacgcacaatttactataattgggcatcttattaactttactgcaaaactccacagattagaggttattagaaggcttgaacagattactcctgccgatctcggtgggaaggctcagcaaccacaagattctgaaactaaacttgaccaatggttgatatatgccatgtttgcatgctcttgtccacctgatattagagaagaattttccatcaaatcagcaagagaagtcttccatatgatttttccatcattgcgtcatggttcagaagcatatgcacttgctgctacatctgcccttggtcactcacatttagaagtatgtgaaatcatgtttggagatctggcattatttgttgaggaggtgtcatcagaaactgaaggaaaacctaaatggaagaatatggtactgaatactgatactctgcagaatcctaggtcccgccgtgaggatctgcgcactcatgttgctaatatacaccgaattctagctgagaaggtttggcctgggatgcttagtcggaaacctgtcctctgccagcattttttgaagttcattgaagaaacataccgccaaattactatttccttggctgatagctttcaagacttgcagcctctgcgatacgcattagcatctgttctgagatacctagctccagaatttgttgatgcgaaagctgagcgatttgacaacagaatacgtaagaagctttttgatcttctccttacttggagtgaggattctggtagttcatggggacaggaaagcagcagcgactatcgtcgtgaaattgaacgatataaaagtaatcaacatacgaggtcaagggaatcatttgacaaacttgcatttgacagggaaatggctgaacagctagaagctattaattgggcttccatgaatgctattgcttcattgctttatgggccttgttttgatgataatgcgagaaagatgtctggccgggtgatatcatggattaatagtttattcatggaaccatctgcaagagcaccttttgggcattcaccagttgatccacgaacaccatcatattcaaagcatactgatggacgttttggtgggagggacaaacagaaaactagccacttgcgactcctcttagcaaaaactgcgctgaagaatattttgcagacaaatctggacttgtttcctgcttgcatagatcaggtagactaa

SEQ ID NO: 5506 - DNA, 879 bp, Zea mays
  Peptide Sequence Number=SeqID_47285
atgaagactctgggttttgtcgaagccaaagcagatacctccctgttcatttttcacaatggcactgagacagcttacttgcttctttatgttgatgatattatcctcactgcatccagttcagctctattgcagtgtgtcattgcagcacttcagacaaattttcccatgaaggatctcggacctctacatcactttcttggtattgcagttgagcaacgaccggctggtctcttcctccatcagcgtacatatgtccttgatatcattgaccgtgcaggcatgtctggttgcaaaccttgttctacaccggttgatctccagtccaagctcgctgctgacagtggacctgctgttcaggatgctacccagtacctgagtctggctggtacggctgatcatggtcttcttctaccacgctccacatctatttccgagcttgtggtctatactgatgctgattgggctgggtgtccggacactcgtcgctccacttctagttatgcggtgtttcttggtgataatcttgtctcctggtcctccaagcgacaaaaggttgtctctcgctctagtgctgaagctgagtaccgtgttgttgccaatggtgttgccgaggcttgttggctgcgtcaactcctccaagaacttcacagtcctcttcatagaagcgttgtctacttatccactaatccagttcagcatcatcaaacgaagcacgttgagatagatctccattttgttcgtgagcgggttgctactggtgaagttcgtgttcagcatgttcctaccacctctcagtttgcagacatcttcacgaaagggcttccttcctccgtgtttcttgagttcaagtccagtctcaacatttgcagtgactag

SEQ ID NO: 5507 - DNA, 216 bp, Zea mays
  Peptide Sequence Number=SeqID_47286
atggatgagatcgccagtacggctgtcctcaccgccggcgacccttctacgccaaaattcgcgccgccgccgtccgggttcatgtgcgatatggagtggataacgtcggggaagaatagctcgtacgtggcaccattccctgagctcggccgaggttactcaccggcggccgccgtgactcagtggaattccgccgcggtggcgcgcatgccgtag

SEQ ID NO: 5508 - DNA, 339 bp, Zea mays
  Peptide Sequence Number=SeqID_47287
atgtcccagcatcaccagccttgcttgcgcgtgggctcgcatctctgtgctccatccaccgccagtcgtgcccgcatctcctgcatgctcaccgacccctgctcacaggtgcataaaggttcaacgcaaaccaataaaaagatcaaagtgagggttcaaaagctaaggagtaagaaacccaagtgtgccttggtctggcgcatcggactgtccggtgtgccaccggacagtgtccggtgcaccaggaccgtacaactccgaactcttcacattcgggtttctcaggccgcactccgctataattcatcggactgtccgatgcaccaagcggagcaatga

SEQ ID NO: 5509 - DNA, 228 bp, Zea mays
  Peptide Sequence Number=SeqID_47288
atggcgtcccccttggtgtccggttccggttgtggctcagtggctgatctggcaggacccgtctcagcttctactcacgcccgtctcagcttctacaccgcctgcgttgtccctgtcttctccaaaccaggacttggtgccttctgcccctgcgccgcccctacctctgcacgtgtacactcgtcggcgccagcagactacttcccctacagatcttccagcggctga

SEQ ID NO: 5510 - DNA, 372 bp, Zea mays
  Peptide Sequence Number=SeqID_47289
atggagctcagtagaagagtacatttcatgtcacagcaaaaagaggaactatataggaaggccagtgaaccaagaggtgctgctggtgcaagctctagcactccctacagcttttgtattgcaacacaacaagcagatgcccctgttaatcttgaacagaggcactcgcaaccaaaggagggaaatcggtgccaagaatttatggctcctgaactgggggaaattacaaatcctgagctgtacaggatatacacaggaggaggaaggtccataatggtgaactccaggcacataaaggttgtgatcacagtacaggattcctgcctcatgcttggtgccaccatatgcaatacaccaatggctaatgaatga

SEQ ID NO: 5511 - DNA, 390 bp, Zea mays
  Peptide Sequence Number=SeqID_47290
atgaagcatgagtggccaattttatcatggagcttgaacctacatagctctcaaaccagtgacaatgagcagccacaattttcagcgacagcgagaagaggcatccagaagaacaaagcagatagcactactgaagaggcagaaaagctacaagagagtgggtttgcgcagcaggaaggtaagataagcgtcgggcatacctggtgggcgctcgtcacctgcgaagagccaaggaagctgcaaagtgtggcggcgctcgaccagccgtcgtcgcagcagaaaagggagagcggaacgcagcgcagcaacgccctctggcctctggtcgtctggatggaaatgaatggcaggattacgacagaatactcctatcgaacctcggctcagtaa

SEQ ID NO: 5512 - DNA, 1482 bp, Zea mays
  Peptide Sequence Number=SeqID_47291
atgagcagctccaagcacgccgcgggcgccgtaggcggcaaggccgcgcgcgcctgcgacagctgcctgaggcggcgcgcgcggtggtactgcgctgccgacgacgccttcctgtgccagggctgcgacgcctcggtgcactcggcgaacccgctcgccaggcggcacgagcgcctgcgcctgcgcccgacggacccgcactcgacgacgctcgaggccggcgtggcgacggcgacgtggaagaagcgccagcagcaggtcgcgccggcgtggtccaagcgcaaggcgcgcactcggaggccgcacgtcaagagcgtcggggagctcctgtcgaggaagctcgtcgtcgtgcctgaggtgtcccccatcgaatcgtcggaggagcggaaggccgaggaggaggaggaagaggaggaggggcagctgctgtactgcgtgccgacctttgaccgcgccctggccgagctctgctcgccaccgcctccggtcgatgacccgacggcctcatcctgctgcagggatgacgtcgacggcgccgtggagaacaacacaaaggcaccaccggtcgtggtcgcggaatcgcccgtgcagcagctcccggacagctttgccggcttcggccccacggacgccgagctcagagagttcgccgcagacatggaagcccttcttggccagggcctggacgacggcaacgagctggatagatcgttctacatggagagcctagggctaatggcgcagcaggcggaagacgtcggccggataaagatggagcccaacggcatcgtaagctcccgctcccgcggcgagggcgctcccgggtttggccctacggagatgaagccagaggcgtcgtcagctgctgctgaggtgctggacacagacttcaactgctgctcgcccacggtgatgatggataacgaggatgaggacagtttcgaacagaaggcgtcggcgagcaacgctgccgccgccgccgcgggtacgcaattcttgaagaggagcctggatctcagcctcaactacgaggccatcatcgagagctggggaagctcgccgtggaccgatggccaacggccaagcgtccagctcgacgatttctggccccacgcccacctcacgggctggatggcgggaggaggacggttgggtggggaggcggcggtgactccacggctggggatgggcggcgggcgagaggcgcgggtaacacggtaccgggagaagcggcggacgaggctgttcgccaagaagataaggtacgaggtccggaagctcaacgcggagaagcggccgcggatgaagggccgattcgtcaagcgaccagctgccgctgcaggaggaggaggcgaggagctaccattgccgccccgtgcgccgtcacctagcttgccgatcgaagtcgcccgtgtcgcggcgcagtccccgtgcggcgtgccgatcggggtcaggccgcgcccgtgtcccccaaacctttaa

SEQ ID NO: 5513 - DNA, 348 bp, Zea mays
  Peptide Sequence Number=SeqID_47292
atggaggtctctaatgatgacgagacaggatggcgcgagctcgacgtaactggctcgcatcttgcgcgagtaatcacattcaatatcagttttgtcatcaagacaaggaccaatgaaagatatggagctagttctgaacgtggccaaggtggcgttgtcgtagaagctggtggagctggaggcgagcgattcagggtcatcggagtcgttagtgttgaacgtggaggtagtggcgatgagctgtggacccgcgccgacggaggaggaatgcacctcaacgtcagtcgtgctccagttcggcatcctcgtcaggagcaacaacgacgcggccaacacgaacgaggatga

SEQ ID NO: 5514 - DNA, 618 bp, Zea mays
  Peptide Sequence Number=SeqID_47293
atgtcggatcctgcaaatcagaatggtggcaagtggataattagattcaaaaggcacttttcagttctaacttcctacttatggatagctgatgtcacatttcatagaattgtcccggtgaactataggaaccttgcttttgtacatgtcctgctcggtgctgttccattccctagcgatgttctccggctaaagacgcttggagtttgtggtgtggtgacacttaatgaatcatacgagaggcttgttcccacatccctatacgagattagttttgcacaggcactcgtttgtggtatgctggttctactccctggatatgagcccttgggcctccagttcgggcaacaagcatatggcaaagagaaggcaaaggatccttcagagttcatcactcatcgagccaaagattttgtgtcaagcatgaaggacattgaaacccggtttatgtgtatagttgaagcaggaaataaggtttctagaatgcttgaaaccaagaagatcttgcttgacatatgtgctaaaataccaggtacaaaatacatggtgatccaaggtgaacctagagtggtcatccgaggaaagaagtttattgcatttgcaagcttcgtgtcctag

SEQ ID NO: 5515 - DNA, 369 bp, Zea mays
  Peptide Sequence Number=SeqID_47294
atggcccaagggcacatttccctttcaataatgctgatgaacttctggaaactgtcatgcttgttgcagaggcaaatccactggaatgcgaagggcactgttattgaagcatgccttgacaaggccaaagggcctcttgctaccttagttgttcagaatggaaccctaaacaaagctgatattattgtgtgtggtgaagcttatggaaagatccgtgcattgtatgatgactatgggaagctcgttgacaaagcaggaccatctgatgtagtgcaggaggcactcacgttggcgtcgctcatcgacgacgagaagaagcttgacaactgccagttcgacatctggaagcagtcctacgtggccgcatga

SEQ ID NO: 5516 - DNA, 390 bp, Zea mays
  Peptide Sequence Number=SeqID_47295
atgtttggctcccttgacgtcctcaccaccgccaccgacaaactccacctcaccgaccctgacatgcctgtcgccacaaatgcaggacccatgcgctccaccaggagcatgatggagaggcgacacctcaagtggcgcgccactgccctaaagcggcgccttaaccgactcgccaccaccatcaagcagcaggcagaaggagcctccccttcaacacccgtggccgtcattggccaccaaccaacatccgtcctcgacccgatcgaggaagactcgagccactactcgactaagcctaactccgacaccaacgaagtagctgaaagggcctgttttgtggcgacactgccacagaacgacaaatggtggagggaacgaggagccccctaa

SEQ ID NO: 5517 - DNA, 669 bp, Zea mays
  Peptide Sequence Number=SeqID_47296
atggggtgccggcggctgcttctcagccatgaaccgttagggcacgcccatctgtttgggcacctgctgacatgtgccaaattcagctcctgcagcagtggagtcagtgcacctacctatctatggcgcgtgcacgcgcacagctcgtgcggggcaagaggtgtcatgggatgggcgagggggtgccgggggtatataagggttggtaaagaagcgggaaggaagcgtgcgggccgccatggtgaaaagcggcatgctaacaagcacagcggaggcggccagacgcgtattcgagcggggatgcatgtgtgtgtattggcttgcgctgagctggtgcctgagaagcaaagcgcacgagacacaagcccacctaacttaagctctagtaaaccggataaaaccgctaagcttatagttgtagccgcgcttagctctgctgctctccgcctcccccgaccccttcgtcttatcttcgtcaccgggagacagcgagatgccgccgtcgctgtcattagcgggcggggcgaggctgggctgagggctgtcattaaattagccctgcgcggtcatgcgattcgtgctaattcttcctcgcttgcttgtgttgtgtgggtgacgcgagatacgcgtgccggacgtggggggcaggttctgtggctcacggcctga

SEQ ID NO: 5518 - DNA, 291 bp, Zea mays
  Peptide Sequence Number=SeqID_47297
atggcaacgtccgatacctgtgcctgcggaaccggcggcagcgtcgctctcggggatccccggacgcggaaaaaccagatatgcggccgcagcagcattgtaacagtgtacaggacgatgccgcgcctgcagtgcaactacaactactacgtcgtatgtaggatcacgaaccaatacaccgtgaggcactgccatgcacagacggtacgccgctctcctttccgctacggcctacagggcctgcattgtccggggaagggatcattgattaatggattggtgcgtgcctaa

SEQ ID NO: 5519 - DNA, 1797 bp, Zea mays
  Peptide Sequence Number=SeqID_47298
atggccgaagcggcagttttcctcttttttcctgctttcgtgagggatagaaataatcagggtagagcggcgcgttcccctgcttcgggtatgtcgtactgcgccggcgccacggcggcgttccgggacgccgacggtgccggcgaggaggccctgaccgcctgtttgctccccaaaaccgaggtccggctagcggttgaggacctgccgccggtgctcacgagcaagccgccaggccggttcgcgagggcggtgaaggaagcctggtccgtctcgctgtccgtcacattccccatgatgccgtcgatgtcggccggcgcagcgggcgcggaggcgcggtccatcctgagcctcgcgctgccgatgatcctcacggggctgctgctatacctccgctccatgatctcgatgctcttcctcggtcgcctaagcgggctggcgctggccggcggctcccttgccatcggcttcgctaacatcacgggatactctgtgctgtccggcctcgccatgggcatggagccaatctgcgggcaggccttcggcgcgggccactacgagctcctcggcgtcaccacgcagcgaggcgtgctgatgctgctcgcggccgccgtgcccatcggtggtttgtgggtgcacatccggcctctgctcctgctctgcggccaggacgccggcatcgccgcggtcgccgagacatacattcttgcctccctgccggacctactcctccaggcgttcctccaccccgtccgcatctacctacggacgcagtccatcaacctgcctcttaccctgtgcgccacgctcgccattgcgctccaccttcccatcaactacgtgctcgtctctgtcctgggcctcggcatcaggggggtggcattggcctccgtactcgccaacttgaacctcctcctctttctcttcgcttacatcctcttcaagggcgtccacaagcgcaccggcggcttcgcgctgtcggccgagagcttccgcggctggggcgagctcgtcagcctcgccctgccgagctgcgtcagcgtctgcctcgagtggtggtggtacgagatcatgatcctcctgtgcggcctcctcgcgaacccgcaggcaacggtggctagcatgggcatcctcatccagaccacgtcactcatctacatcttcccttcctcgctgggcttgggcgtctcgacgcgcgtcagcaacgagctcggcgcgaaccggcccgaccacgcgggccgtgcggccacggttggcctcatgctcgggttcgcgttcggcggcgtggcgtccgcgttcgcgtacctcgtgcgcggcgcgtgggcgaccatgttcacggccgacccggcgatcgtcgcgctcaccgcggccgtgctgcccatcctgggcgcttgcgagctcggtaactgcccgcagacgaccggctgcggcgtgctgcggggcagcgcgcggcccaaggacgccgccagcatcaacctccggtccttctacctggtgggcacgcccgtggcgctcgtcctcgccttctggtaccactacgacttccagggcctgtggttgggcctcctcgcggcgcaggcgacctgcgtggtgcgcatgctgctggtgatcggggggacggattgggtcgccgaggccaagcgcgcgcagcagctcaccggagcacgcacggtggaggaaacgaaagagagcagcggcaagagcagtcacgtcgttgaagtcacagcagccggcggagacgaggagctgggcttgcctatcgacgttgtgatcgatagaccaaaggatcagtgctga

SEQ ID NO: 5520 - DNA, 330 bp, Zea mays
  Peptide Sequence Number=SeqID_47299
atggcaagcgtgctggacgctgtcatggagacaacaagggcattaactcctacccctgtgaagaaagttgctgaagctgtcatgactcgtgttgaaaccgaagctgggccctcagcgcccacggaggcagagcctaccacaactgagcaaaaagatgagcgagaatttctagatataagcacggctctagagaaagacgtgaccgaaaaagctaaatctcctattcccgaagcatcgtccgaagatatagactttattattcaacatgctttggaaaaaagctatctgaagaagaaattgcagaagccaaacactatgcccgggaactga

SEQ ID NO: 5521 - DNA, 288 bp, Zea mays
  Peptide Sequence Number=SeqID_47300
atgaagctgtggaaggagacttccaggagttccaagactacgacgagttctaggtgtgggttagcggcaacccccagtcggctgcctgtgaaggccgcggttatctacgtttcttttccgcactttgatttattgtggagaaattgttgcttgcggggacacggttgcgaagggtactcttggcataggggacccctaggatattgtgccatggtggaggttggtgagggcgtaactaatgtcgcgaactcgagagaggtggatgtcacacctagatttaagggataa

SEQ ID NO: 5522 - DNA, 300 bp, Zea mays
  Peptide Sequence Number=SeqID_47301
atgacttacagaggccagccatcgatagaggtcttcgtaaagcactactaccttcactggcaaaaaaggactattggaaacacagttgtgcaattacgcacctgcacattcacaccaaagaccgggaagacttcaggcaaggtgatagaacttgtctcgtgcgccaagactaggtggatcaacttcactgatttctggttctatgtcgagatgggtgaagtcgagcagggggttgcaggattgcctccagagcgagatgtcttcacatccctttgtaacttttcctcgcttcaatgttaa

SEQ ID NO: 5523 - DNA, 1194 bp, Zea mays
  Peptide Sequence Number=SeqID_47302
atgaatccgtatttcttgggattcattctcccttttgtggcatctctgctgcttaccaagagaaagtccgagaagaagaggggggtgccagtcaatgtgggtggagagcctggctgcgccatccgtaaccacagatttgaaagacctgtcaagacgcgctgggaggggatttccacgcttgctgagctatttgagcaatcgtgcaagcagtttgcctctacacccctgtttggcaccaggaagctcattgcaagagaaatggtagtggctgctgatggaagatcctttgagaagctccatttgggaaactatgagtggagaagctatgctgatgcattcaaaactgtctgcaatttcgcttctggtctactgcggattggacacctcaaggatgagcgtgttgctatttttgctgacacacgggctgagtggcagattgcgttgcagaccgaggtaactactgttgtatgtggacgaaaagaatttaaaaagctgattgatataagtgggcaacttgacactgtgaaacatgtcatctacattgatgaggaaggcatctcagttgaagtgtccttggctgaaaactgtactagctggacagtcaagtcatttgaagaggtagagagtataggcttgcaaagacctgttgaagcaaacttgcctctcccatcagatactgcagtgattatgtatacgagtggaagcacaggaatgcctaagggagtcatgatgagccaccaaaatgtcttggctgtagtttcagctgttatgacgattgtgcctggtcttggcaagaaggatgtgtacctggcatatcttcccctagcacatatccttgaattggcagctgaggcaatcataactggtgttggggcttcaataggttacgggtcacctttgaccctgactgatacatcaaataaaataaaaaaggggacgcaaggtgatgcttctgtactgaagccaacgctaatgactgctgtacctgctatacttgatcgtgttcgtgatggtgtacgaaaaaatgtagatgcaaaaggtgggttagcgaagagattatttgatattgcctatagccgtcgtctagctgctgtcaatggaagctggttgggtgcgtggggactagagaagcttttgtgggatatgctcgtcttccgaaagggctccaatatctcaaggatatggcttgactga

SEQ ID NO: 5524 - DNA, 1542 bp, Zea mays
  Peptide Sequence Number=SeqID_47303
atgcccatgccaagatctttccttctccacctcctccttgtcgccagcggcatcgccaatgccggcggcgccgatgacgccctctcgaaggagcccacgccctcctcattccagggagaatggcagctcctccacgcgagcatcggcgtctcggcgatgcacatgcagctgctcccgggagacttggttctcatgttcgaccgcaccgacacgggactctccaacatctcgctcgccgcgctggcgccgtgcgcggcgacccccgacagcgccgactgcacggcgcactcggtgctcctcgacctccgctccaacgtgctgcacccgtacccgctcgccaccaacccgtggtgctcctcgggcgcgctcctccccaacggcacgctcctccagaccggcggcttctccaacggcgaccgcgtcgcgcggctcttctccccggccacgggctgggtcgagctcccgtcgttcctcgccgcgcggaggtggtacgccaccgacatgatccttcccgacgggcgcgtgctcatcctcggcgggcggcgacagttcaacctcgagtacttcccgcacgacggcgcggcgccggcgctgacgttcttcccgttcctggacgagaccacagagccggacgccgagaacaacctgtacccgttcctccacctcctccccgacggcaccgtcttcgtcttcgccaacgaccgcgccgtcgtcttcgacccctacaaccgcgcccccgctccgctggcgctgcggaacggcacgttcgtgcccgccgaccggacctgcgcccgcgtcgcgccgacggacccggacccagtgtgggcgatcgaggagatgccgctggccagggtgatgggcgacatggtgctgctccccacgggcgacgtgctgatcgtgaacggcgcggcggcggggaccgccgggtgggagctgggccgggagcccgtcacgcggccggtgctgtacaggcccgacgcgccactgggcgcgcggttcgaggcgtcgctggcggcgtcggtggtcccgcgcatgtaccactcgtcggccgcgctggacacgtacggccgcgtgctcgtgggcggcagcaacccgcacgtcgggtacgtgttcaccaacgtgacgcaccccacggagctgagcctggaggcgttcctgccgccgtacatggacccacggcacgacggcgcgcggccgcgggtgctggcggcgccggcagaggtcgggtacggcgaggccacggccgtgcggttcgggatacccgcgggggcggcggatggcgcggctacgggcgaagaggtgcgggtggccgcggtggctccggcgtttgcgacgcactcgttcgggatgaaccagcgcgtggtggagctcgcggtggtgaggatcgcgcagctggacgtcggtgtttacgaggtcgaggtcgccgcgccaccgacgcccggggtggcgccgcccgggtactacatgtggttcgtagtgcacgccggcgtgcccagcagcgccgcgtgggtgcgcatgcggccgctaggaacaggcgcctga

SEQ ID NO: 5525 - DNA, 360 bp, Zea mays
  Peptide Sequence Number=SeqID_47304
atgaatgttgtggtaacttcacacctacctgtctgtttatatagtgctgcaggtaggacatatcggttcagattccggagattattgcagaaagaagatcaacccgtcgccgaggacattgcgagtcctatatttcaaaataaaaccatatttagggctcctattggaggtgctattatatggtattgggcgttatcctttactaaagataacctagttaaacgcgggtggaaaggtaggacatatcggttcagattccgaagattgttgcagaaagaagatcaacccatcgccgaggacattgcgatgtgtcgagcatcagaagtagtggccatggagatcttcacagggcgtgaatga

SEQ ID NO: 5526 - DNA, 645 bp, Zea mays
  Peptide Sequence Number=SeqID_47305
atggcagcaccgcccagcgcggccgcggacaggaggcagcgcgcggcagacgcagagcgcgtgcggacgcggagtgcgggtgacagcgtggcagagctgcaggtgacggctggcggcggcgggacagcaggcaggaggaggatgacggccggcggcggcgggacagcaggcaggaagaggatgacggtgcggcggagcttcagggaaacattgccagagctatcaacacaatacaagctaacaaagtcaccgaagagggggcataagggatgcaaggctgggcgatccactgatttggggcggatcagcagatggttgggcttgtgcatcaactctacagagagctacagctacactcgaagcgaatgcatttttgttcaacggcaagagaactttacatcattaccatcgtgccagaagaaaatttgggcccctgcattaaagaaactccgtggttttattgaactttataacgatagcagtgaccagttcaccaaggagcgccttgatgccatcaacgacgatttgaagttgtaccgctgccacaccatcaagaactacacgcatacctccaccaaggccctgaacctgacaaagcaaattaacacactaaagaggcaacaattaggtgcctcaaatctgtaa

SEQ ID NO: 5527 - DNA, 672 bp, Zea mays
  Peptide Sequence Number=SeqID_47306
atggaatgtgctggaggattcacatggcaatcatacaatgaggatataaacttcttgggtgacgaatcatttgcaacagttgggttaatggaacagataaatgtgacaagggataacacaaactacttatggtatacaacatatgttgatattgctcagaatgagcagtttctcagcaatgggaagaatcctatgctaactgttatgtcagctggtcatgctttgcatattttcgttaatggacaactaacagggactgtgtatggaagtgtagaagatccaaaattgacatatattggaaatgtgaaactttggtcaggcagtaacaatatttcatgcttaagtatagcagttggtctcccggttggtctgaaaggtgaggctttgagtcttcattcacttagtggcagctcttcagtagagtggggagaacctgttcagaagcagcctctgtcatggttcaaggctttcttcaatgcacctgatggtgatgagccattagctttggatatgagtagcatgggtaaaggtcaactatggataaatggacaaggtattggaaggtactggcctggctacaaagcttctggaacctgtgggatctgtgattaccctggagagtatgatggaaagaagtgccaaaccaactgtggtgactcttctcagagatga

SEQ ID NO: 5528 - DNA, 150 bp, Zea mays
  Peptide Sequence Number=SeqID_47307
atggatgacgaagcagatcataggtccaataagattgatgtcatccatgaagcagatgtgtcacaaccaagagccacgaccattaccgtctgcaacgccaaggccgatagggaagaacacacatatgcaatcatcaggtttggtgcttga

SEQ ID NO: 5529 - DNA, 363 bp, Zea mays
  Peptide Sequence Number=SeqID_47308
atggtgacggccgattccttctgcggcgatctggttggggacgcctcggccgaggaggccttcggcggcgttgcatcttcagttttggctagaacgatggctagcgtcatgctccccgattcgctagccgattccgcctcctcctgctccgacttggcttccgaggacgccggcgctggagagaagcatcagcgctcggcggaggcggagatggtgggggctgtggcgccgagggatgcggagttgaggaaggagagctatcgtcgggagtatgaggaggcggagatggaagaggctgtggcgccgagggatgcggagttgaggaaggagagctatcgctgggagtatgaggatgcggagtag

SEQ ID NO: 5530 - DNA, 684 bp, Zea mays
  Peptide Sequence Number=SeqID_47309
atgacgctagccatcgttctagccaaaactgaagatgcaacgccgccgaaggcctcctcggccgaggcgtccccaaccagatcgccgcagaaggaatcggccgtcaccatcgcgaagctcctctccgccgaagacctcgcggcgatggaggctaaggccacgccggacaaggttacacctccgagcgacgctgggtccctcgccgctgccgccgccgttactaccgttgggggagtcagtggcggcgtggggtccaagaggtggctcctaggcggcgtcccggagaaggtgcggcgcgctgagctgaggagggccgagctagggtttagggtttcggccgccgtgttctgcctggtcgcgctctccgtcatggcggccgataccacgacgggctggtccggcgactccttccgccgctacaacgagtacaggtacgtacttgctgcgagcgtcgtgacttttacctactgtggattccagttggtagccgagatgttagcttacctcctgttgtcagcatcttcagcagcgctttctcgtaatggtgtttggatgtcgcggtttggaggggatcagtttaccaaactgatcaatgtctcggcttccatggcattcctagctttcattgctctgggtcttaactcggtgatctctgcttactgcttcttcagcttggtttcatag

SEQ ID NO: 5531 - DNA, 291 bp, Zea mays
  Peptide Sequence Number=SeqID_47310
atggcaaaagtgaaggttatgcgggtttgtgccaatggaccgggaacggtgaaagacgaacgaacgtgtgaagcggatcgtgttgccgacgcggacacgcggtcgcggaccgataggacacctattcaggacatggagacacgtatacgatacgctactcatggcggtttggtggttgagcctcaaaaccacctagcgctattgatggcgggtttcatcgagtttgggcctcaaaactcgacgatacggttcctgcgggaatcagaggcacatgtggtgtcatcacgaaag

SEQ ID NO: 5532 - DNA, 882 bp, Zea mays
  Peptide Sequence Number=SeqID_47311
atggagttgaggaggcctgcatcctctcctcttgtcgacaactacgtggtacctggtgacgtcgtcctggacctctctgagatgaacaaccagaccattaaactcggcgcgggtctgcgtcaggagtgtgacaccatccaggcgactagtgctgggaagctgcggcagttgaaacccaacaagtattggattgaaaactcacagaaaagatatataccttctgtagaagataccgttcttggtattgtggtcgacaccaaaccagacaactttttggtagacataaagggtcctaatttggcctttctaccagtactttcatttgaaggcggtacaaggagaaacatacccaagttcgagatcccgtgggagcttcgagcggtgacgctgcacggagccgtcgtcgatgttgccttcagtgagatttctcggagaaggtcaaatcggctgaagtcttgggcggaagagggggaaggctgcggttttcttggcgggggcgaggacgccagcaatctaggagagattggtacattaatatatgctcgagtggtgaaagcaaatagtatcatgaatcccgagctctcatgcatggatgctactgggaaagctgccgaatttggacagctcaaagatggttatatgttcgacacatcaactggcatgtcacgaatgttgttaagttccccaacgtgtccagttctggaggtccttgggaaaaaactgtcgtttgagattgctgttggactcaatggtcgagtctgggtgaatgctcctgcagcaagtactgtcattcttgtatcaaatgcaataatgaggtcagaatctttgagcggcataaaacaaagagctatggtagaaaatctattggagagattgtcatga

SEQ ID NO: 5533 - DNA, 759 bp, Zea mays
  Peptide Sequence Number=SeqID_47312
atgggcgtgcaggctgctacgggcacgggagcagcgggggctgcacaaccgcgcaggcagctgtcggcatgcgacacagtgactgcgggagcccaggcggcgccggggctgtcctatgatattgaggacagactcgactccttcatggtgcgcatggagggtcttgattcaaccaagcgcaaaaccatcatgggattcattcaacaaactcatggcttggtcaccaagttcaggattcgccatggaatatctgataacattaaagacatcgagagcaaagtaaagaaggtgaaggagcggtatggcaggtccaatgtgcatcgtattgtagctagtcttgtcgcaaccacagttgaccctcgtctcttggctatgcataatttgtttgaagatggtgatgagccagcgaaaaagatcaagacagtctttgttgttaactttggaggactcggcaagactactcttgttaaagcagtctatgacaaggttaaggagtttgattgcagtgcttttgtatcaataggtcagaaatgtgatctcaataaagttttcaaggacgttctttattatcttgacaagcaacatcatgaaaatatcattgcatcaaaaatgaatgaaaaacaactcattgataagctactggaattcctcgcagacaagaggtacacctcatactttatgatgatcacatgcagtgatgccttgttcctgttggaaaacaaataccagtacatggacctacatttctgtgtatattga

SEQ ID NO: 5534 - DNA, 306 bp, Zea mays
  Peptide Sequence Number=SeqID_47313
atgggcgacggcgttgctgatacagagcgagacaataatacggcagacgcagtagctggctatgtgggcgttgggatacacagggcagtagctgagaaagcggtgggagaaccagtcagagagtgtgggacgggtctagagtgccagcgtgtccacatggcagtaactaagagagggacgggaaaacaagtcgaggcgcatgggacgggtctagaatgtcagcctgtccacagggtaatgctaagagagggacggaagaaccagtcggggcgtgtgcggcggtcccagtgtcagcatggagggtaa

SEQ ID NO: 5535 - DNA, 524 bp, Zea mays
  Peptide Sequence Number=SeqID_47314
atgcaggggaaaaatggccggcgaacggggcagggaagaatggcgtcgagcttggctcgacagcgagcggcgttccggggttgggtaccggcgacggagatcgaacagggcgcgacatcggctctggggtggtcctcgccagcggcgaacggggcgtcgatggtgacattgggcaggcagcaagcaggggcacggggggagaggcgaggtagctgggaatggtctccaaaaggtgagggcgagagatttatagagagaaggagggagaacaaggacaccgatggagaagcagtggtatcagccatcaatggcgccgcagtaaacggccgcactacgcgagtggaagatgagaggaaatggtgtaggcggttggagctccacgacggggagaaaataggaagagatatgtggctgtggggcccactagctagagaaacaacgaggaaggatggcgcctggatactggctaaatgggttgggaacgtgcgagctgggctgctggccaggctagcccgtacgcccat

SEQ ID NO: 5536 - DNA, 405 bp, Zea mays
  Peptide Sequence Number=SeqID_47315
atgacgacctacattttgcaatggagtattggattagaggcaaagattcctgatatagagaagtgtttggatattgtttcaacattacaagctaaaaatgatttgggtgaggcacttatagctgattttgaattatccgaggggatatactcctgtgcgaaaatcgaggatactgactcagtgtgcctgtggttgggtgcaaatgtgatgctggagtactcttgcgatgaggccaatgccctcttgaagaaaaacttggaaaatgctaaggccagcttagaagtccttgttgctgatcttcagttcttgcgagaccagcaaaccatcactcaggttacaattgctcgggtattcaactgggatgtacaccaccggagaagcaaacaggctgtaaaggaaccttaa

SEQ ID NO: 5537 - DNA, 864 bp, Zea mays
  Peptide Sequence Number=SeqID_47316
atggccggaggaggtgacgatgaactcaagctgctgggggcgtgggcgagcccattcgtcctgcgggtgaagctcgcgctcagcttcaagggcctgagctacgagaacgtggaggaggacctctccggcagcaagagcgagctgctcctcgagtccaacccggtgcacaagaaggtgcccgtgctcctccacaacggcaagcctgtgtgcgagtcgcagatcatcgtgcagtacatcgacgaggccttcgccggcactggtggcccgtcccttctccctgccgacccgcaccagcgcgccgtggctcgcttctggggtgcctacattgacgacaaggtcgtactactcatgctgctgatgactttgtcgttcatcttttatttgtattattcaacgtacgatctccggcggcacgagtacgatagatgtccgatgcatattgacggagttcggcgtcgtcggacggatgcgtccttccctttgcagctcctagcctcgtggctgcaatcggcaagggccaagacgcaggaggaaaaggccgacgcgctgaagcaggcgctcgccgcggccgagaacctggaggcggccttcacggagatctccgagggcaagcccttcttcggtggtgacagcgtcgggtacctggacgtcacgctgggagcgctggtcgcgtgggtgcacgccgccgagaagctaaacgggatgaggatcttcgacgccacgaggaccccgcggctgagcgcgttcgtggagcggttcggcgcgctcggagcggccaaggcggtgctgcccgacgtcgacggcctcgtcgaatacgccaaacagaggcaggccgacgcggcagctgcagcctcggacagctaa

SEQ ID NO: 5538 - DNA, 726 bp, Zea mays
  Peptide Sequence Number=SeqID_47317
atggctggaggaggaggacaggagctgaagctgctcggtacgtggacgagcccgtttgtgaccagggtgaagctcgcgctcagcttcaagggcctgagctacgagaacctggaggaggaggacctctaccacaacaagagcgagctgctcctcaggtccaacccggtgcacaggcaggtccccgttctcatccacaacggcaatcccatctgcgagtcccagctcatcgtgcagtacatcgacgaggccttcagcagcgcaaacggcccctccctcctcgccgccgagccctacgaacgtgccgtggctcgcttctggggcgcctacatagacgacaagctgttggcgtcggcgtttcaggccggcagggccaagacggaggaggaaaaggccgaggcgttgaagcggacgttcgcggcggtggagacgctggaggcggccttcgagggcatctccgacgggaagcctttcttcggcggcgacagcgtagggtacctggacatcgtgctggggggcctcgtaccgatggtttactacggcgaggcgcgtcatggcatcaagctgtttgacggcaccagaagcccgctcttggaggcgtgggtggagcggtttggggcgttggatgccgccaaagcagtcctgccggacgtccacgagctggtcgagcacagcaagatgaagcgcgcacgagctgcagccatggccgcggccacgggcagcgactaa

SEQ ID NO: 5539 - DNA, 543 bp, Zea mays
  Peptide Sequence Number=SeqID_47318
ggacttccaaatgctggaaagtcaacacttctatcagctataacacttgcaagaccagacattgctgattatccattcactacattaatgcccaatcttggccgacttggtggagatcctgctttaggggcgttacagttttcctcagaagcaacattggcagatttgccaggtctaattgagggcgctcatctaggaaagggccttggccgcaatttcttaagacatttaaggagaactagagtaatcgtccatgttgtcgatgctgctgcagatgaccctgtcaatgattataagattgttagagaagaattaaggatgtataacccccaatacctggagcgaccttatgttgtggtcctcaacaaaattgatcttcctaaggctaaagctgaaggtgttgaaaaggagctcggggactatccaagacctgaagctgtcgtggctgctagcgtattgaggcatatcgggatcgacgagatgctgaaggagataagggcagccctgagaaaatgctttgatcacaagttaccagaacattga

SEQ ID NO: 5540 - DNA, 771 bp, Zea mays
  Peptide Sequence Number=SeqID_47319
atgaggattgaccccacccgcagcagcaataacacaactaaaacgttatctggtggacctgcaggctccgttttgaaagttgaaactcgtggggtgcgccgctccgcagttcgcaagtccaacggcaacgcccattggctctgcagttcaaacaagcttgcaccgccgagactcgaggcgagggtcaccgtgggtgaggatgcagcggacacgccgcgcgcgatcgccgtgcatcccggcggccgggagctcgtctgcgcaaccgccaaagggtgcaggctctttaatctagtttataaagacttcggtgttcaccttatttcaagagatgcttcacctctccaatctgttgggcctcaaaaatgtttagcattcagcactgatggtgctaagtttgctgttggtggtgaggatgagaagattgagtattgccgcttttctagggatggagccaaacctttcctgttttgcacacttgtaaaaggaaaccgtgatggcgacttttgcgccgtagaagtaaagaagatggaggttgctcactggagcaagaaggttcatcttggcttcccagtttcctccattgagttctgccctagtgaaagggttgtaatctccacctcacatcaatggggagcagagataacaaagctcgacgtccctcctgaatggaaagtgtggcagatctggctggcgctgctgagcctcttcgtgtcgtcggccgtcctcttctacgccttcttcacgcacgcgaggctcaacctgaggccgtag

SEQ ID NO: 5541 - DNA, 222 bp, Zea mays
  Peptide Sequence Number=SeqID_47320
atgtcgagaggtgccattgtcaacgagggtggccctgaggcttattctgcatggagtctccgctctgcgcgaagagagaagggcactaggcgggctgggccaagctccggcacatgctttgagagcccattgcagagcaggaatagctcagtcagtgaccactacaaatctcctgtgcagatggaagtcgctagtgacgccgaccgacacccgtaccggtga

SEQ ID NO: 5542 - DNA, 330 bp, Zea mays
  Peptide Sequence Number=SeqID_47321
atggagctcggcgccatgattaatgacgccgagctcgcatggtttcttttgtcacccatccatggccgggaccgggagggtatttttcttgttcggaaggaagcggcagagaattatacatcgcgttcaaagaaaggcatattggtcgctgggtcccagcgcgcggccacgtcgcacagcatcgcagggatgcgctacatcgccaaggtaaaaaccgtagggcgtcaggacggatcgcaatgtgaaacgcccaaaaaggtggccggagaactcgcctccgtcaactccaaccgctgtcctgtccttgacaccaacgatgttttcgactga

SEQ ID NO: 5543 - DNA, 183 bp, Zea mays
  Peptide Sequence Number=SeqID_47322
atggctcggcgaagttgcaagttcctgtcgtttagcctgcggcgcgagtacatctgctgtggattcggcgaggactgtacccctttgacagcaattttcggggctggcgttcttggggtgaagcagcagccaaacgaagaacaagtgcgaagtgttaagctaagtggtctctcgtcgtattga

SEQ ID NO: 5544 - DNA, 2115 bp, Zea mays
  Peptide Sequence Number=SeqID_47323
atggggaagcgatccggcggccggaagcttccgttcttcaccagatcctcctcgtcctcctccaagcggaatcgctccgggcgtcgcctcccttccccctccaagcaggacaacgcgacgagggctcttctcgcctcccccaccgccgcctcgccgtccgcgaccccggactctgcagcggcggggcagaccgcccagccgccctctcccctctcagtcaccgcgggcgccgggggtgccttgtcggggaagatcaccaagaagaagcccggcgcgcgcctgtggatgcggctggaccgctggggtgcctccgaggtcgtcgagctcgacaaggccaccataatccgccgcgctggccttccctcgcgcgacctacggatccttggtcccgtattctctcgctcctccagcatcctcgctagggagaagacaatggtgatcaacctcgaattcatcagagcgatagttactgccgaggaggtgctcctgttggaccctctcatgcacgaagtgctccctttcgttgatcaattgaggcagcacctgcctctgaggagccttgtgggtgggaatggtgaatgtgcccctgatggcaatggagaaaaacaggggggctcgcatggaggccaggtgccccgtcttaatgaggcgaccggggcagagcatgagtttccatttgagttccatgtgctggaggtcgcgctcgagattgtgtgctcatcgttggaccttagcgttgatgaccttgagaggcatgctactccagtgcttgacgaactgacaaagaatgtgagcacaaggaaccttgagcgagtgcggagccttaagagtcatcttacccgtttgcttgcccgtgtgcaaaaggtcagggatgaaatagaacatcttctggatgataatgaagacatggaacatctgtatctaacaaggaagcaagtacaaaaccaacaggttgaggctttaatgtcatctgctgcttccaacagcattgttcttgctggacctggtgtgcccaggttgaactctagcttccggcgtagcttgagcgttgctacgagcatgcatttggataatgatgtggaagacctagagatgttacttgaggcctacttcatgcagctggatggaattcgcaacagaatcttgtcggttcgggagtatattgatgacacagaagactacgtcaacattcaacttgacaaccagcgtaatgaactaatccaactccagcttacactgaccattgcatcctttggcatagctgccaacactttcattgttggagcttttgcaatgaacatcccgagctctctgtacaacaccgataacaccctcttctggccatttgtcgggggtacctcatccggctgctttgtgatcaccatcctcttgtttggaaagggagcaggcgctcgaaggatattagagaaccgtggggatagcatggaaaccgcagtcgggtccgaccaaaggcaccataggaagctccgctccgcccgacccagggctcggactcgggctaagtcctggaagaaggcgaactccgcccgacccagggctcggactcgggctaagtcccggaagacggcgaactccgcccgacccagggctcggactcgggctaagtcccggaagacagcgaactccgcccgacccagggctcggactcgggctaagtcccggaaaacggcgaactccgcccgacccagggctcggactcgggccaagtcccagaagacggcgatctccgcctcgcccgacccagggctcggacttgggctcggccccagaagacgacgatctccgcctcagggctcggacttgggctcagccccagaagacgacgaactccgcttcgcccgaccccagggctcggactctgccccggcgccagccggcgatctccgcctcgcccgaacctggggctcggacccgacctcggccacggaagacggactcgacctcggcttcggaggagcttccacatcgcccaacctagggcgtagaccagccacgtcaacaggaggcgccatcatcaccctaccccgagctgacccgggccgtagagaacaagaccggcgtcccatcgggctcgccccgccagataggcaatga

SEQ ID NO: 5545 - DNA, 714 bp, Zea mays
  Peptide Sequence Number=SeqID_47324
atggctgcaacacccactgccgccgttttgctcgcgcgcccgctcatcgcactctccagtgctttcacctcccctcatcgtgcgcgggtgccgagcgatccctcctccatctcggtgccgccactgaggagtcgatggtgccagtggcgcggcccgctccgatcgctgccccccgaaggagctccggccgagctgatggaagaggactccaagtttgtgccgttgaacgcggacgatcccatgtacggcccaccggcgctactgctcatcggatttgagaaaggcgaaactgtcacgattcaggccttcctgaaagagcttgaaggtgaattcctcaaggcaagtcatgcatcggctgtcactgacatatgcaagaatgctctatccatatacatgttgattagagtgatcaacttgactcaggtgatccattgtacagaggagatgacaaagcaaaccttatgggatgccatgcacactgagcagcctgatttggaagctgtcaagattgcaggaccactgccaaggatatgcatattttctggtctaactggcgaggagatgatgatgttcatcaacgccttcccagaaaccgggctggaagcagctgcctttgctgcgcttgtccctaacagtgcagagaaggttctcggcgaagtgatcgaggaaataatgggagaccatgagatgctgacaggaaaggactccaaatga

SEQ ID NO: 5546 - DNA, 387 bp, Zea mays
  Peptide Sequence Number=SeqID_47325
atggggccgggccggtgtcggggtgcggggcataaggcccggcctcccccatcacgtcccagactctcggtgtcctactcccacacggcttctcctgctctgctcctctcaacctctccccactcgattcgctcgtccgcggtccgcccgccgcgccgtcgcccctgccagatcttcatcatcggcgacatcggcgggtctcctactctccttccgtcgccggccgactacgtcgtggtcgtgctagtgccactagggccgttgatgtacggtgccgagaagggggacatggatgacgacaacgacaacgaacggtaccctagggtttctcacgaggaacctccagtcacactagaccctcttaaatcaacactaatatttgtctaa

SEQ ID NO: 5547 - DNA, 258 bp, Zea mays
  Peptide Sequence Number=SeqID_47326
atggcgctgcggcaggccggcgtgccggttatcggtctagccgcgggggagccagacttcgacacgccgcccgcgatcgcggaggtgaggggtgcaattagcccgcggtataatttcctacaagctacctttcgatcgatgaaactgaatgacttcgtgtttaattatgactgtacagaggagaacggggtatcctacctcccagatgaggtgctgcctctgggaattagactatgtgattgtgcaggttttatctga

SEQ ID NO: 5548 - DNA, 249 bp, Zea mays
  Peptide Sequence Number=SeqID_47327
atggccatggttttggacggccgcagcgcgctcacccttgggctgatggacgtgtccactgcctcctcccgcacaatcgccatcctggtcctcgccgcgtgttttgtcctcccggacgctctgcggacgcagccatccatggaagcgaacagttccccggctgtgggccgtggctatgcctatactaatataccatcaccattcaccaaggggtataccgtatacgtggccaatggcgccggccggtag

SEQ ID NO: 5549 - DNA, 222 bp, Zea mays
  Peptide Sequence Number=SeqID_47328
atggggttctttgagcgtattgggttcgtcggcgtgtcggccaacttgatcacgtacctcaccgggccactcggcatgtccacggctgccgcggccgccggcgtgaacgcgtggtccggaaccgtgcaggtgctaccgctcgtcggcgctctcgtcgctgattcgcggcttggccggtatcgagctatcctcgccgcctgcgtgctctatcttctgatatag

SEQ ID NO: 5550 - DNA, 1203 bp, Zea mays
  Peptide Sequence Number=SeqID_47329
atgatgctaaccgcgagctcgccgccgtcgccgtctcctgcccggctcaccctcttctatgtcgcgctctacctgctggctctggcgcaaggcttttttgggccatgcggggaagccttcggagcagaccagttcacgcctagcgacatcgacgacctcagcgcgcccacactccggagctcatacttcaactggttccacttctccatgtcctggggctacgccatcgcgacggctgggctgagctacgtccaggacaacgccggctggaccttggggttcggcgcgtgctggaccgccatggtgctatgccttgtcgtcttcttacttggcacgcgaacgtaccgtgccgccaagcaacccatcgatggcgtgcaggcgtgggtcgcgagggtcttccgtcggagtggcaccactccaactgatgaaaggctgcttctagctccacaacctgagggtgagggcggactcatagctaagctgctcccgatatggttgacgagcttagtcttcgcagccatctactcgcagacgtccactctgttcaccaagcaagccagcacattggacaggcaccttggcacggagacgggtctcgtcgtgccgcccgcggcgctccagtgcttgatcgacgtcaccttcatcgtcatgatccccttatacgaccgcgtcattgtgcccttggcgaggcgcctcacagggcacgcctcgggcatcacgatgctccagcgcatcggcgccagcatggccacgtcctgtgtcgccatggccgtcgcggcgctggtggaagtcaggcggctccgcgtggccagagacgcgggcctggtcgaccggccggacgtggctctgccgatgagcctgtggtggatgattccgcagtacgttctcatgggccttgccgcggtgctgggtatggttggcctcgaggagttcttctacgaccagatgcccgacgctctccgcagcgtcggtctcgcgctgtgcctgagcatctttggggtgggaagctacgccagcagcatgcttgtgtccgtcatcgactgggcgacgagggtcaaaggggagagctggttctctgacaatctcaaccgagcccacctcgactacttctactggctcctggcagggctcgcggctctggaggtagccgtcttcttgcattttgcaaatcgatacgtctacacaaaaaaagccgagctgtga

SEQ ID NO: 5551 - DNA, 192 bp, Zea mays
  Peptide Sequence Number=SeqID_47330
atgcccacgttagaacttgactcgtacatgtccatgtatgcactagttggtacagtcccatggacttcggaccacatggtagtcaatgatttttatgtccctaagtgtggaattcatttttttcaaatgatggacgataaggttaaagatgggactagttctaagcgtgaattagagttaagaaacacttag

SEQ ID NO: 5552 - DNA, 855 bp, Zea mays
  Peptide Sequence Number=SeqID_47331
atggccgccgcctccctcctcgaggccactcgcttcctctccaccccgcacccaagctcgcgctcgcgcccgctcccttacccgcccggcagcggcctacacccccacctcctcaggacccctcgcctctccactctccgcgtccacctccaccgtcccgctcctctcggcgcgcagaagccggcgaggcctggcgcgctcctggtcatcgacgcgctcaggaggtccgtgctcgactccctcgcggcgctcaagcggcccgcgctcgcgctcctcctggccggtgtgctgctcgccgcggcatcggcgggcgggccgcacgcggcggcgctggccgcctcgggcgggcgcgtcggcgggtcggccttctcctcgcgctcctcctcgcctcgatcctacgggtacagcgcgccggctcccaggggcgggtacacggccgctcccttctactctccttcgcccttcgtatccgtcggcccagccctcggcatcggcttcgggggatcggggttcctcgtgaccctcatgggtttcgcgactttcctctacctggcctggacccggacgcgtcgacggcggacggtgccgccgcgaggcgccatggaggggaggccagcaatggcgcggcggtggggatgtcgatggggctcgaccggattggggaggcgacagagggtgaggccatgccggtggacgtgggcagggtgggcagaggccggggaggaggacccggacgcgtcgacgacggacgacaccgatgcgaggggcaggcgggcagcagcggggaggccggcaagggcgcggcagtggggatgtcggcggggctccccggatcggggagacgaccgtgggtga

SEQ ID NO: 5553 - DNA, 1218 bp, Zea mays
  Peptide Sequence Number=SeqID_47332
atggcgacattggatgaactcatgaggcaactaattaggctttcacctcgcggcttaatcccaattgggttggctggagcgcaacccaattgggggttaattgggattgctacttcgcgggtgctcgtccgtcgtggtcttggattggcgaggcgaatcgactggtttcctgcagccggaaatcccgatggaggaacccgattattaggactgcacatgtttgcacagtatcgtgttgtttgttacttggtagttggtacttgcatccattgcctccttggtaggatcatgaagctgaaaaatagtgcactggagacttttaaggagaacaatacgattttcactcctgaaggaaatttccactctacaaagatgcgagaagagtatgttgctggtccgaaccaaccagccgttgttgagacaagatgcaaatggatgattggagatgtaactgaggtcctggatcgcaacacgtggaagcttggaaagatcttaaagatgctgaagaacgattacttcgttatcaggcttgctgattgcatccgactgaaggagttccacatatctagcttgagaattccacgcggtctggaagctcctgaaagcaagccctttcatgcagcagcggacaaggccaccggacgcgataaacgccgaccagctgatggcgcctcgcccggcacaagagctgtgcagcagacgtgtcaccgaacaacctacgatctagggagcagtggcaagaagcggaaaccagacgcagatgcctctcgccatccgggcatagcatcagcacacatccggaaggtcgccgcagcctccaacctgaacggcggcatcgccgacagctacctgcacaacgatccgcaggccataggagacgcccaatgctcggtggccagctgcagcgtcaacgacctgtaccgcctcggcaatggcggcaacgcagagcggcgccccgccgccgcagtgtgcctccctgacgacgccatgtccgcgtgcccgtgcacgcccggtgccagggacggggagggggaggaggaggccgcggcggccttgcacgggctgcagctggaggcttaccggtcgacgatgcgagcgctgtacgcgtcggggccgctgacgtgggcgcaggaggcgctgctgacgaacctgcgcctgtcactcaacatctccaacgaggagcatctgctccagctcaagcgcctactgtcctcctga

SEQ ID NO: 5554 - DNA, 234 bp, Zea mays
  Peptide Sequence Number=SeqID_47333
atgggtgcaatggaaatggaaatagcagagcaacgcaggcgcgaggcgaaacgggcacgaaggtttcggggcaatacagatagagggaagaagaggaaggaagcgaggcgggcaggggcagaggggcaggtgtccgtcgccgtaacgggcagcgcctggacaggtgggcaaggtgcgtgggcccatgaggaggttgatggtaacggcgaccacgacgccggtgttatcgcctaa

SEQ ID NO: 5555 - DNA, 312 bp, Zea mays
  Peptide Sequence Number=SeqID_47334
atggctcctgaacccgacccccgctgccgtggccccaaccccgagcccccgccgccgcagctcctgcctcgagcccccaccgccgcggccgcgaccccgagcccacaggccccgatccccggcgcctcccgcctcccgcctccgccccaaccgctggtcagatttggaagactgatgagaggcacacttacccatctggaagccatgaaggccagtcgtcggacctcatcggtgccatgtcgcccgccaatccggaccctggtcctccaccatgattccccatcctcgcttaacccatccttggtgctgtga

SEQ ID NO: 5556 - DNA, 942 bp, Zea mays
  Peptide Sequence Number=SeqID_47335
atgaagaactcccactgccgcgacccgaagatggaagcctactgcgatgaggttcgacgcctagaggacaagttcttcgggctcgagctcaaccacatcgcccgacgatacaacgagactacggacgagctggctaagatagcctcgaggcggacaacggttcccccggacgttttctcccgagacctacatcaaccctcagtcaagaccgacaacacacccgagcccgagaaggtctcggccctgcccgaggcgccctcggctcggcccgaggcaccctcggcccccgaaggtgaggcactgcgcgtcgaggaagagcagaatggggtcccgcctaatcgagactggcagaccccgtacctgcaatatctccaccgaggagagctacccctcaaccgagccgaagctcggcgactggcgcggcgcgccaagtcgttcgtcttgctggatgacgggaaggagctctaccaccgcagcccctcaggcatcctccagcgatgcatatccatcgccgaaggtcaggagttattacaagaaatacactcgggggcttgcggtcaccacggagcacctcaggccctcgttggaaacgcattccggcagggtttctactggccaaccgcggtggccgacgccactaggattgtacgcacctaccaagggtgtcaattctatgcaaagcagacccacctgcccgctcaggctctgcaaacaatacccatcacctggccgtttgttgtgtggggtctggacctcgtcggtcccttgcagaaggcacccgggggctacacgcacctgctggtcgctatcgacaaattctctaagtggatcgaggtccgacccctaaacagcatcaggtccgaacaggcggtggcgttcatcaccaacatcatccatcgctttggggtcccaaactccatcatcaccgacaatggcacctag

SEQ ID NO: 5557 - DNA, 135 bp, Zea mays
  Peptide Sequence Number=SeqID_47336
atggagatggcgctgcaggacgccatgcgggtctgcaatccggacgtcaatacgcccttccagtccatcgaggacgctgtcaacaggtacacaatgtttgctaacgtcatcgacttgagccagaatgtggtgtaa

SEQ ID NO: 5558 - DNA, 711 bp, Zea mays
  Peptide Sequence Number=SeqID_47337
atggcgtacgctgtctccgcaaacgctgctgcgagagctcccgcggtgcctgacggcgaggatccctacattaccaaggagtattttaaagggaaacagtacaatgtatacgttcacagctacttgcgctatggttcctttgcatcacgagcggagattctgatgtccaagaacggaccattcagctcctgcatgctgcgcggatttagtggtaaatatacctacaatggacagcagttcgatgcgactgctagaccagaaggagcattgtatgacaaatgcaggggagagattgccaaggcgatgaatctcaaggcaccatgcaagacagcaaagaactgcaccttctgtggtgtgtggaaagggggaggtggagctggccaaaacgacatctacgtcgcgtcagatagcaaagctccaagcgcaaaggcccctcctgccgcattcagggctgcggctaagaaggcctgcaaattcgatgtcaacagagcaaaagtggcctacccagatgtttctaacagtgatgtgccgtacttgtgtatggatcttacttacacgtacacattgctcgttgacggcttcggtctgcagccaatgaaaaagattacatttgtatccaaggtgaagcatggcgaatactacatcgaagccacatggcctttgggtacggctattgaggccgtgtcaccgacaaggcagatcggaaactaa

SEQ ID NO: 5559 - DNA, 195 bp, Zea mays
  Peptide Sequence Number=SeqID_47338
atggctgatgtcatccctattgctccatcactcgatgacatgtggggaccttttgctagaactcctgttcttgtgcttcatctcgccatgcccaggagacggagccatcgcgatcccaacggaaacaataaactcgcagctcaggactcagggaaaataggagaaatgaatttagaaaatgaattttcaatataa

SEQ ID NO: 5560 - DNA, 564 bp, Zea mays
  Peptide Sequence Number=SeqID_47339
atgcggcgccggcccctcctccctcttgcgcaatttggctgtgtggccacggactatcaagaacaggcagtggatcctgacccctttttctctcattccagcagcagcggtggagaagatcctgcaggcgaggtcgagcagcagaggacgccggcgacaactaacttgctctccggagcggagggcgaggaggtcgaaaggaggaaggagaccatggagctgttcccgcagagcgtcgggttcagcatcaaggatgctgctgcccctagggaggagcaaggagataaagagaagcctaagcagctcacaatcttctatggcgggaaggtgctggtatttgacgatttccccgccgacaaggcaaaggatctgatgcagctggccagcaagggcagcccagtggtacagaacgttgttttgcctcaaccctctgcagctgctgctgtcagtactgacaaggccgtgctggacccggtcatcagcttggccgctgctaagaagcctgctcgcacaaatgcttctggtataaacactctccctctggccagctggggtatttattga

SEQ ID NO: 5561 - DNA, 882 bp, Zea mays
  Peptide Sequence Number=SeqID_47340
atggctccgtctcctgggcatggcgagatgaagcacaagaacaggagttctagcaaaaggaagcgcctttttgtcatgattaataacctccctacaatatatgaagttgtcacgggaactgccaagaagcaaaccaaggagaaaactccgaaaagcagcagcaagagcaataaagctggcccaaaaccgccacgccagccagaacccaactcaaggggttcgaagatgccacctccgaaggatgaggatgacagcggaggcgaggaagaggaggaagaggaagatcacgaaaacacgctgtgtggttcttgtggtgacaactacggacaggatgagttctggatatgctgcgatgcgtgcgagacttggttccatggcaagtgtgtcaagatcactcctgccaaggccgaacacatcaagcactacaacgccgcccgcgtcgctccgactgctgtgccactcgacagagtgaggctgccagcggccaagtccggcctcgggcgccataggaagctccgcctcgcccgacccagggctcggactcgggctcggccccggaagacgacgaactccgcctcgcccgacccagggctcggactcgggctcggccccggaagacgacgaactcctcctcgcccgacccagggctcggactcgggctcggccccggaagacgacgaactccgcctcgcccgaccccagggctcggactcggcctcggcctcagccgatggtctccgtctcgcccgacccaagggctcggactcgacctcgacctcggaagacagactcgacctcgacctcggaggatcctccgcctcgccctacccagggctcggaccgaccacgtcacggaaggggccatcattaccctacccctag

SEQ ID NO: 5562 - DNA, 174 bp, Zea mays
  Peptide Sequence Number=SeqID_47341
atgaatggtcggatgctgctggattcctcaccggagctcaggatgcatcccggatccgcccgcgacgtagtcagcaccgccgacgtcttcaccgccgccgttgatctacaggggcggaccgtccgcaccaggagggcggaccgtccgcgctcagcagaatggcccaacggctag

SEQ ID NO: 5563 - DNA, 285 bp, Zea mays
  Peptide Sequence Number=SeqID_47342
atgccctacataaattcaccttttgagggtcttagcttcatcttgcttagccttcaaagtgccttcgagctatcttatgcaaagaagctgaaggtgccaaaggttctcaacaaaccaataaaaagaccaagaaaggattcaaacaaagagagcaaaagacaaccaaagtatgctctggtctggcgcaccggactgtccggtgtgccaccggacagtgtccggtgcaccagggacccgactccaaactactcaccttcgggaattctggaggccgctccgctataa

SEQ ID NO: 5564 - DNA, 1401 bp, Zea mays
  Peptide Sequence Number=SeqID_47343
atggagctgctcctgcgtatcatttcactagttggagatgacaggatagtcattgtggcctccggtgaccgcatgaatgacttggtgatatcactggctcacaaattcacgaagctgcaagttctatctctacgccagatcaggcctcagctagaagacagcggcgtggaggccgtggcaaaccactgccacgacctgcgcgagctggatctcagcagaagcttcaggctgagcgaccggtccttgtacgccctggcgcacgggtgccctcagcttaccaggctcaacatcagcgggtgctccagtttcagcgacgtggcgctcgtgttcctctccagccagtgcgggaacctgagatgcctgaacctgtgcgggtgtgtgagggcggcctctgacagagcgctacaggccatcgcctgttactgtggccagctgcagtcgttgaacctgggctggtgtgatggcatcactgacaagggggtgaccagcctggcttcgggatgccctgaactcagggccgtcgacctgtgcggctgtgttcttataacagatgagagcgtggttgcgctggcgaacggctgccttcacctgcgctccctgggtctctactactgccagaacatcacggaccgcgccatgtactccctggccgccaacagccgcgtgaggagtcggggccggggctgggacgcgacagcgaagagcggcggcggtggcaaggaccgggagcgggacggactggcgagcctgaacatcagccagtgcacggcgctgaccccgcccgcggtgcaggcggtgtgcgactcgttcccggcgctgcacacgtgcccggagcggcactcgctcaacatcagcgggtgcctcagcctaacctccgtgcactgcgcctgcgtcaaggcgtgtacttggggtctctactctctagggaaccgtgtagaagcaaccgagttgagttcatcagaaggcgccgacgggatcatccaccaccaacgtccttcccacctccatctccacgaactcccaactccccaactgcgtcacaccgcggcgcaagagcctttagcaaagactgcccaacaaaaactttttggcggaactcaacatatagagggagggaaggtggttaattgcctggggaaagtggcgaagtgcgaggtgcaaggtgaggcgagtggcgtagacgatccctcccccatcgatgtccgcaccggcgccgacgaggtggtcccggtgtgcgtgggtaaggaagcggtggcgccggcttcgggaggaggacccccacgtgtcgacggcgaaggggagaccccgcggcatgtctatcggcattctcccccaggctcctttccgaaattacggacagagaatggggatatcggctccttccttcggaaggaagagtaa

SEQ ID NO: 5565 - DNA, 1374 bp, Zea mays
  Peptide Sequence Number=SeqID_47344
atgcccggcataccgagggatgtcgccgaggagtcgctggatatccgagctggagcccgacccgtgaagcagcctctgcgccgattcgacgaagaaaagcgcagagccataggcgaggaaatccacaagctaatggcagcagggttcatcaaaaaggtattccatcccgaatggcttgccaaccctgtgcttgtgagaaagaaaggagggaaatggcggatgtgtgtagactacactggtctaaacaaagcatgtccgaaggttccctaccctctgcctcgcatcgaccaaattgtggactccactgctgggtgcgaaaccctgtctttcctcgatgcctactcagggtatcaccaaatcaggatgaaagagtccgaccagctcgtgacttctttcatcacacccttcggcatgtactgctatgtcaccatgtcgttcggcttgaggaatgcgggtgcgacgtaccaacggtgcatgaaccatgtgttcggcgaacacattggccggacggtcgaggcctacgtcgatgacatcatagtcaagacgaggaaagcctccgacctactttccgaccttgaagtgacattccaatgtctcaaggcgaaaggcgtgaagctcaatcccgagaagtgtgtcttcggggttccccgaggcatgctcttggggttcatcgtctccgagcggggcatcgaagccaacccggagaagatcgcggccatcaccagcatggggcccatcaaggacttgaaacacgtacaaagagtcatgggatgccttgcggctctgagccgcttcatctcgcgcctcggcgaaagaggcctgcctctgtaccgcctcttaaagaaggccgagtgcttcacttggacccctgaggccgaggaagccctcgggaacctgaaggcgctccttacaaacgcgcccatcttggtgccccccgctgccggagaagccctcttgatctacgtcgccgctaccactcaggtgcttagcgccgcgattgtggttgagagacgagaagaggggtatacattgcccatccagaggtcagtctacttcatcagcgaggtactgtccgagaccaaggtccgctacccacaaattcagaagctgttatatgcggtgatcctgacgcggcggacgttgcggcactacttcgagtctcatccggtaactatggtgtcatccttccccctgggggagatcatccagtgccgagaggcctcgggtagaattgcaaagtgggtggtggaaatcatgggcgaaacgatctcgttcgcccctcggaaggccatcaagtcccaggtgttggcggacttcgtggctgaatgggttgacacccagctcccaacagctctgatccaaccggagctctag

SEQ ID NO: 5566 - DNA, 862 bp, Zea mays
  Peptide Sequence Number=SeqID_47345
atggggatcacgtcgggggcgacgggacgggggcacgacctcgaccctgcggacacctcctgttgccccttgataggagtagagaacctgcaaggcacgtttataagttgctaccgtactcttttgctggccaatatggtaccatttatttgcgccgcggtagagaacatgtgtcgaatttatttggctgaccgatatgaggcccatctatcaattcaattgtataccgctaaggcccaatcgctcagtcagctccactcccgcggcatccctcaccacggcctccacttctccgagtcagttcccctccgcgcccacaacccccgccgcgcacacccccactcccgatgtgtccgccccaacgccgatagtcctcgcccctccccggacagggccaaggaggagcagtacggccagcccctgcaggctgagttctcctccccctccccggactccggcggcggcggctcctgcgtcaccaccgagtccgacgaggatgcctcctcgccttccccggacgtggtgcggcgtagcctggcaccgcaggagcgcacggtcctcctggagcgggaacactcgctgccgccgtcgcaggccgtggacggcgacgacgacgacgacctggacgccaacgtggaacgccatcatgcagaagacgcgcccggcggatccggctgctacccctccaactccagctcccgtcgcgcaccatcagcaacggccgccgccgagggcccgggacccgtcggtcggcgccgaggagatgaacaggcgattcgacgacttcatcaagaagaactgcaactccttcggccggcaataggcgacctccgctccgttacggttcggccacctccccgct

SEQ ID NO: 5567 - DNA, 315 bp, Zea mays
  Peptide Sequence Number=SeqID_47346
atgcctgcagtcaaattcgccatgaacaagcggccaagccaagccaagacacaagcggattcgtttcaatttgaaaggacgcgatcaatattacataaactgaaggaacagatcagtgacagtactccagttattcgagctggtgctggaacaggcatatctgcgaagttattcgagcttcacagacacctttgtcgtgccgccgcggctgccctctccatccaggtcatattcaccaatgattgctatgtgtttgcgctgtgccctttcgcaggacctcaatttcagatgaatttaaaagacgaggagtactaa

SEQ ID NO: 5568 - DNA, 678 bp, Zea mays
  Peptide Sequence Number=SeqID_47347
atggagtttgggcgcctccccgcgacccatggtatactcgcctacctcccgctgacgcgtgttcccggacccgaagccttcatcaaatttagctgtgaacgcccagtcgctcccgatctggtctgtctggctgccaaagccatgccccgagcccctctactcgacgacgagttctccacccatccctctctcacgacgccgaactcgccgccacaggtcggtccgggcacgccgttcggatcggtgccgccgagccccatcatcgtggtgtcgagcccaccaggatccggccctgatcccggctccggctcaggaggcggcggctcgggttccggcggcggtccgttccagccgccgatcatatacccacctccgctggctccaccgctggcgccgggcgcggggcagacgttgtggtgcgtggccaagcccacggtgccggaccccatcatccaggaggccatttactacgcgtgcggcgccggcgccgggtgcgactccatcctgcccagcggctcgtgctaccgccccaacaccgtgctcgcgcacgcctccttcgcgttcaacagctactggcagcaggccaaggcgaccgacggcacctgcgacttcggcgacaccgccaccatcgtcaccagagacccaagctacgaggagtgcaagtttgaccttctgtga

SEQ ID NO: 5569 - DNA, 663 bp, Zea mays
  Peptide Sequence Number=SeqID_47348
atgcggaggggagggaaattgtcggaaacccgtggccaatgccgaacgggcgaggcggggccctctctacctcgcaccgtcgaggccatcgacgagcagggaagctgcgactcggcagtagggccagagaaggcagcggtcctgccgcctccgcaatgccccctagccttcgcgaatcatgtgccacccaacccccgcgatggcagcgctccactcggcaatggtcgcctcctgcgcagcctgcttgcccttgcgatgcgcttgtgccgccgcgtccccgtgtcaacattgacacgcgccgacgtgcgcgatctccacgctctcgggcgcaacgggttctactacgcgcccctcgcaaacgccaccacaccccctccgaccccccccccccccccccccgctcgtcgcccacctgcccccgcaaatgccgccatggatggcgatcgcatcctcgacccgctgctgtcgggcgcagagcagcaaaattccgcctccctctcccgtcctcatcccgccccaaccacggccgctacaacaacgatctgcgacagacaccgcctgctctgcgtcccctcgacctcatccaagcgttcgttccgtgtggaacgcaggcccacccttcctctaagcccccaccccctcgacgacacgcgctccgtgtga

SEQ ID NO: 5570 - DNA, 207 bp, Zea mays
  Peptide Sequence Number=SeqID_47349
atgaactccaacatagtcgatgaacctgttgctgacactaacgccgacacgcagacgccgagcctggcggccctgccgcgtagctctggcctagatgatgtcgggctaggcagcgacgagctcgcgctgggccagctccttctcgtgggccttggccatcttctggggaagctggtcgaggatttgcttgatcatgacagactgtaa

SEQ ID NO: 5571 - DNA, 561 bp, Zea mays
  Peptide Sequence Number=SeqID_47350
atgggagatccgccatatgtcgtctcattcctcgcccaacccacggcggaggcggatccccaacccaccgagccgaccgaggtgatgtaccggacgagagccgatgacttcctcggacgatgcaagtccatcgtctatcagaacaacaacgggctctgcccactcctcaccatatgtaacgtgctgctgctgaagaatgtgatcagcctgaaccctgacgcggaggaggtatcgcagaagaggttgctctcgctcgtggccgagcgcctcatcgatcccaacattgctggacagcatgttaatggttcgattcgtaggtcatggatgaggggcgacctagatgtggaatctttcgaaggatcccatctggtcttggttgccaccggatcagactcatttgaggtggtgtcttataaaaatgttaactgtctgaaacaagattcactcgacaagggaatgggtgcctcaaatattatctgtcatgtatcaagcattaagcttttgagttcaatttgtcaaatacttgtgagccatgacctatacattcgactgtctcattga

SEQ ID NO: 5572 - DNA, 414 bp, Zea mays
  Peptide Sequence Number=SeqID_47351
atggccgcgcacgccgcaacattcgcctccgccctgaagaagtcgctgtcgtcgctgccgccacagcggcgggagaaggaggaggagcaagggtcgctggcggcgatcaaggctatggacgccgatgtggctgttcaggaggaggaagaggggaggacgatggtggtaggcgtgcgcgcgaacgccgagagcagggcgctggtcaccggggtgctcgtcaatgtggccacgactatagatggccaaacgggccggcacggtccgacccggcacgacccgccaggcccggctacgaagcgtgtcgtgcccagatggggccggcgtgccgctgccgcggcccaggcacggctcgtgagcctgttagtcgtgtcgggtcggcccgatggcactatggcccatctgagtatattgtag

SEQ ID NO: 5573 - DNA, 279 bp, Zea mays
  Peptide Sequence Number=SeqID_47352
atgggccccggccccgcacaccgcggttcggagatagacacagaaccgtaccttagcaccatcatggacactacactacgatcccgatcagccctttttgaaccagaatcatttattcgtggtagtggtagtggtagcacccatgatctccttgaaaaggcgcgcaggtatattggccgctatgagtacaatgcaatgatgagagaagcaggtgcatgtcccgccgcgcccaaaagctccgatccggggacggacgagagcgagacatggaagccgtga

SEQ ID NO: 5574 - DNA, 486 bp, Zea mays
  Peptide Sequence Number=SeqID_47353
atgggagctgctcctccctcgctatcgacgaccctcgtcaccagatccggcggcggttccaccactcgctctgggggcttgtcccagcactcctccggctgcatgtggacttaccatagagacatgctgcggttgggccctgttgacttgtggacaaaggcaaaaacgcacgccgatccagtgacgccgatgcccgcctcgtcatcggagggcgaggctaccggcgccaagccgccaaggcaatgcgtggtgcacagggccacgtcatgcgagggaggcaaggcacgcgcggtcagcgaagcgacgaccaggtcgtcgaacatcggaacatggcactctcaagtctcaacgcgctataccgacctagcactgaacgggcctgaaacatggattcgatccggcctggcccagacacggatacgatctgggctggagtttcccttcctgtgccccctccgccgcactgctgccacgcgcgagtcttga

SEQ ID NO: 5575 - DNA, 1152 bp, Zea mays
  Peptide Sequence Number=SeqID_47354
atggtcgtcagcggcgcgctctctggctgcgcgatcgagagccgtccgaacgcggtcgtcggcggcggcacactcactaacagcgacggcagcctcggcctcggcctcggcctgctctgcacgcgccagggtggcgaggcgggcgctggcggccaggagattctcccgagtaccgcgcctagtgttggaagcaaaggtgcagtggaggggtgcagagagccagccatggcagaggggaagaggtggtggcgcctagggctgcacgccagggaagaagagagctcggcggcgcctatggcagcgcgccggagcagcggaagatggccgggaaggaggcccgttgaaatcaaagagctgaagcaaaaggtgtctgaactcattgaaatcaaagctcaacttgaggatcgcaatcaaaagctattggaggaaagtacatatgcaaaaggcttggtttcagctgctggtgtcgaactgaaagcattgtcagaagaagtgaccaaactgatgaaccagaacgagaaacttgcgacggagctgtcatcgctgagaagtctgactccagctccacgcagagttagcaatgcaccaagaggtactaggagggagagcatgagcaggcgacacgagccagctagcagaagagatacgaacacaagccatgaaagggaaaaggctctagggacattgcttatggagaaggagcaaaaagaagcagagctccaaaggaaagtcgaggagtcaaagcacaaggaagccttcctggaaagtgagcttgccaacatgcaggcaaagccggtggcggtggcggtggcggtggcggtctccagttctccaccttgccagcgtctctccacgtacgccatggacgggtcggcgttcccgtcgctgtcgccggagctccgcgacgcgctcgccaaggtggccgtgttcgtgctcgtccaggggctggtctacctcatcctccgcagctcctccgacgtcttctccaaggacggccggctcaggtccctcagcttccgccccatgcgctccatgagcgtcaggcgcgtgctggcgccgctctccgacgtccccgtcggcaccgacgacgcctctccatcgttgtcgcccgccgcgacgtcgtcgcaccgcaaagctgcccgcgaggattga

SEQ ID NO: 5576 - DNA, 411 bp, Zea mays
  Peptide Sequence Number=SeqID_47355
atggcccgtggtgattactttgacttgccgcgagagatgccggcagaaacgcttgaagcaaggcgctgcagcctcgatccgttgcggcgcggatggtcaccgactggtttccaggtcttggtccaagctgttggtggagaacaaacctggcgagtagaacggctgatatggttctactccatcatgctttcagcagctgctgtgaaacttgctctctggctctactgcaagagtttagggaaatattatgtccaggcttatgcaaaggacagattctgtggattgtcaattgtgcccgtggaggctgtaatacttgttgtgcataccaaccggtccaaatctgtattagaaaatgcagtaaattttacaccaaaccacttcaacaagtatagattaagattatgtgcctga

SEQ ID NO: 5577 - DNA, 237 bp, Zea mays
  Peptide Sequence Number=SeqID_47356
atggcgggagagaggggggctggggacagctgtcaagttgcgcagtctgctgacactgacaggaggcgaggggaaggggtggatgtggcattcctccagctaggcacgagcacgatgcatgattttgatccacatccagccccctccgaaacagtcgctgtcttggaacacgtaaccaaacagattaagcaattggctttgggcgcaaggcttcgattggctcatcatcttcgatga

SEQ ID NO: 5578 - DNA, 237 bp, Zea mays
  Peptide Sequence Number=SeqID_47357
atggcaggttggtgtcggaaatgcatctacctgatgcccagaatggagaagatggcaggagaatatcctgaagtgaggttttacttcatcgatgtcaataaagttccacagggggtggtgaaaagaggaaatgtaactctatggaaggatggagagtggaaagcggaagtaataggaggccacaaagcttgtcttgtgatggatgaggttagagaaatgatcgagaataacaagtga

SEQ ID NO: 5579 - DNA, 1104 bp, Zea mays
  Peptide Sequence Number=SeqID_47358
atggccctggacgacgcctgcgcctacgactgttgcgcgttacctccaccgctccattgcttggactgggactgggactcggagctgcttcacactcatcgtcacactaccagtgccggaggtgccgccgtccaagcagagccgcccaccttcttcgtcccggcgacgccaggtgtgcagccgtcggcggcgtccagtggcggctacctgcacgacgccatcactcactggagcgacgaccgtcgcagcaagcggcagcggatggcggcggcggtggcaacgacgacgacgcctcccgctcggcgtccggcgaccaccgtcagcgaggaccttcagtgccttcttgcgggcttctgggattcaacaagcgaggccgagggaggagcagacttccgccatgatctgaacaccacgaccccggagccggagccggagacgacgacggagatacgctgcagttttgcctcagttaaacactgctggctaccgacctacgtgctgccccgactccgtgttaaatttgccattgtttgtcagtacgccggtgctgcaagcagagcagaggaggaagcagacaatgggagcggcgaggacgaggcagttgcgtcgggcagggaggaccagcagaggggggccagcgcgcaggtgctgctgccagcgccagcggcagtggcgcagcgcggagaggaggaggaggaggaggcaaaggcgaccgcggtagtcccccctcctcggttccccgccaccgcgccagccgctgctcccgtgcagcggcagctgcagctgcaaaaggcggccgagggtgcagccgccacgacgacggcgcccgcctctgcctgctcctctttgctgtcactgtcaggggaggacagggagaagagaggcgtcggggtgctgtaccccttcgcggtggtcaagccgctggggctagacgacggccgcatgacgacgctcagcgacgtgaaccacagaatcctcaagagaccggcaaggccggtcgccatgcctgttgtccagggtaatcatggtacattggctgctacggttgtaaatacaccctccgggttggttttcagtgcaggcttctgccttctctactactag

SEQ ID NO: 5580 - DNA, 357 bp, Zea mays
  Peptide Sequence Number=SeqID_47359
atgtcaatgatgagggagttgaagtacttcttaggatttcaagtgaagcaacttcaagagggcaccttcattagccaaacgaagtatattcaagacattctaaacaagtttgggatgaaggatgccaaacccatcaagacacccatgggaaccagtgggcatctcgacctcgacacggaaggtgaatccgtagatcaaaagaaagagcacatcggggacttgccagttcttgggaagatccttggtgtcttgggtttcaaagaagcaaaattccgtcgctctttctaccgccaaagccgagtatattgttgcaggacattgttgcgcgcaattgctttggttgaggcaaacccttag

SEQ ID NO: 5581 - DNA, 2196 bp, Zea mays
  Peptide Sequence Number=SeqID_47360
atgaagggcgcgtggaagcagagcggcgtggtggccgtggccgatcaacttggctacctcggcggagcagggttcgtcgggcgcgcgcggcccgtcaccctctgtctctacggcctcgcgctcaccttcgccgggttcgcggtgttcctctgcttcgcgccctccctccccgtgccgccagcctcgtctccgggcgcggcgtggttcgacggcctgatcgcctccgcgtcgccgtaccgcgcgcaggtctcgggcttcctctcgtccctgttcccggccaactcgtcctccacggtgcctcctggtggtggcgtcgcggccaggcgtgccgggccgagcggcggcgggttcgcggcgagcggttcccgaggcaatggctccacctccagcgcggttcggcctggcgagcagttgggaagcggaggtggagttccgcccagcagagtgggcaacggcgaacctcccagcggcaaggaagcgccagttcctggggatgctactgcggcggtgcctagcggcgcgccgcccgatgatcatgtgcaaggcgaaggcggtgccggtgccaagcattccgtggggagtgccgctgccgaggcgaagggtgggtctggacctggtcctggacgcccgagcggtggttcagcccagaatggcacatcggctaaaggaagagtgcctattctgatcaacggctcttacgcgaacgcgaattccgcggatgccggagatggcaacggaatgagagcgagtgcaaggaatgctgccggctccacgcaccaattgagaagcggaactgcagctttaggcaataccgttgctgtttcatcccttaatcagactgcgagtgcagttgcagtagcggccagggaaggaaatggaactgcaactgcaggcaataaccagaccttcctgattcaggctcctgcggataacaagaaccacagttcagttgcttcagatggaagcaatagcagtccaaccaataagcagaatgaatcgcctgctagtcctcaggggagcactagcacggtgaaagatcaatctgcacgagggcccaccccagcagccattgtgccggtgaaagcagatgctaatgccggtcggcgcatgaaggctgattggactgagaacatggccggctgcgacttgttctacgggaattgggttcgagatgactcgtaccctctgtatcctgcgggatcatgccctcacatcgacgagtccttcaactgccacctcaacggccggcctgacaaagcttacgagaggctccggtggcaacccagcggatgcagaatcccgaggttgaacccaactgacatgttggagaggctgagggggaagaggctggtgtttgtcggtgattcgctcaacaggaacatgtgggaatccctgatttgtatattgaggaattctgttaaagacaagagtaaggtttttgaggtatccggtaggagccaattcagggctgagggctcctactctttcttgttccaggactacaactgcagtgtggagttcttccgctcccctttccttgttcaggaatgggagatgccagtcagcaatgggaagggtacacgggaaactctcaggcttgacattatcgatccctcgtttccgaggtacaagaatgcagatatcgttatcttcaatactggccactggtggacgcatgacaaaacttctctagggaaagattactaccaggagggcaaccgcgtatacagtgagctggatgttcatgacgcctttcggagagctctcaacacctgggctaagtgggttgattccaatgtgaaccccaagaaaaccactgtgtttttcagaggctactctgcatcccatttcagtgggggtcaatggaattcgggcggcagttgtgacagggaaacagagccaataacggatgaccagtacctcacgccatacccaacaaagatgagcattttggaggaggtgctccgggggatgaaaactcccgttgtgtacctgaacataacaaggatgactgactacaggaaggaggcccacccttcagtctaccgcaagcagaagttgaccgaagaggagaggaaatcgcctgagctataccaggactgcagccactggtgccttcctggagtaccggactcctggaacgaacttctctacgcacagattttgctgacacagcagcatgggatgcaacaataa

SEQ ID NO: 5582 - DNA, 276 bp, Zea mays
  Peptide Sequence Number=SeqID_47361
atgggctcctccaaggacaagactgatggaggcggcggcggggacaggggaacaggaggaggtggacgagctgctggccgcgctcgggtacaaggtgcgttcgtcggatatggcggacgtcgctcaaaagctggagcagctcgagatggccatggggaggacaaaggatcaactattggagttggctgtggtcgtgctgttgcaatgcgtgctcagagttcaaaagttgttcaagatggcagtaatccttacaccttggaagggacagatggctag

SEQ ID NO: 5583 - DNA, 522 bp, Zea mays
  Peptide Sequence Number=SeqID_47362
atgacgcgcgtgcctgacttctgcgagctctggcgcgcatttaatgcgcccgcagaggacagcgccgcctgcgccgctccgactgctgtgccactcgacagagtgaggctgacagcagccaagtccggcctcgggcgccataggaaactccgcctcgcccgacccaggacccagggctcggactcgggctcggccccggaagacgacgaactccgcatcgcccaaccccagggctcggactcgggctcagccccggaagacgacgaactccgcatcacccgaccccagggctcggactcagccctggcctcagccgacggtctccgcctcgcccgacccaggggctcggactcgacctcggcctcggaagacagactcgacctcgacctcggaggagcctccacctcgcccaacccagggctcggaccgaccacatcacaggaggcaccatcattaccctaccccaagctaactcaggctacggggaacaagaccggcgtcccatccggctcgccccagtaa

SEQ ID NO: 5584 - DNA, 267 bp, Zea mays
  Peptide Sequence Number=SeqID_47363
atggaggtgaacagaaatggaagcaccatgtttggggtcaagaaccaaagctacttcaggaagggagttgctggggactggagaaactatataagaacttgttcggaatttgatagtatgtggcaccttggcatgccaaaaccatatgcattactatatacaactatctggaagcatgcttcaatctatggtccggggcctatggtgggcgagaggcggtgcactcttaaggcggacgagcaagtggtgcccctgacgtgtgagtag

SEQ ID NO: 5585 - DNA, 894 bp, Zea mays
  Peptide Sequence Number=SeqID_47364
atgcaggcggcatgcaaccgcaccaagtgggcgcaccctttcgactccaacacgcccagcacgggggcccaggcccacacgtcatgtaaccggcgcgccggttgctacgtgcaagaaactgcaccgccactcgcgccactaccgtgcctcctcgactgcggaaccggtaccgcgactcgaggcaaccctgcgtatgacccaacagtgccaaccaggcacatcggtcacggggaccgggaaaggggataccccgaaagggatccttctccgcgaaggaaacgggccctgagccccctactgatcagaggttcgaaggctggcccctcggaggggttcaacagccgcctcagaacgctcgggctccgcgcccgctactggctggccctcgaagggttcacagccgcctcagacgcagagcgagggatgaccctggggctcggactcgggcttggtcccggaagacgacgaactccgcctcgcccgacccagggctcggactcgggctcggccccggaagacgatgaactccgcctcgcccgacccagggctcagactcgggcttggtcccggaagacgacgaactccgcctcgcccgactcagggctcggactcgggctcggccccggaagacgacgaactccgcctcgcccgacccagggctcggactcaggcttgggcccggaagacgacgaaccccgcctcgcccgaccccagggctcagactcggcctcggcctcagccaacggtctccgtctcgcccaacccaagggcccggactcgacctcgacctcggaagacagactcgacctcgacctcggaggagcctccgcctcgccctacccagtgctcggaccgaccatgtcacaggaggggccatcattaccctacccttag

SEQ ID NO: 5586 - DNA, 1893 bp, Zea mays
  Peptide Sequence Number=SeqID_47365
atgtcgttcggtttgaggactgcgggtgcgacataccaaaggtgcatgaaccacgtgttcggcgaacaaattggtcgaacggtcgaggcctacgtcgatgacatcgtagtcaagacgaggaaagcctccgacctcctttccgaccttgaaacgacattccggtgtctcaaggcgaaaggcgtaaagctcaatcccgagaagtgcgtcttcagggtcccccgaggcatgctcttggggttcatcgtctccgagcggggcatcgaggccaacccagagaaaatcgcggccatcaccaacatggggcccatcaaggacttgaaaggcgtggtcagcgccgcgatcgtggttgagagacgagaagaggggcatgcattgcccgtccagaggccagtctacttcatcagtgaggtactgtccgagaccaagatccgctacccacaaattcagaagctgttgtacgcggtgatcctgacgcggcggaagttgcgacactacttcgagtctcatccggtgactgtggtgtcatccttccccctgggggagatcatccagtgccgagaggcctcgggtaggattgcaaagtgggcggtggaaatcatgggtgagacaatctcgttcgcccctcggaaggccatcaagtcccaagtcttggcggactttgtggctgaatgggtcgatacccagctcccaacagctccgatccaaccggaactctggaccatgtttttcgacgggtcgctgatgaagacaagggcaggcgcgggcctgctcttcatctcgcccctcgggaagcacctacgctacgtgctacgcctccacttcccggcgtccaacaatgtggctgagtacgaggctctggtcaacgggttgcgcatcgccatcgagctaggggtccaacgcctcgacgctcgcggtgactcgcagctcgtcatcgaccatgtcatgaagaactcccactgccgcgacccgaagatggaagcctactgcgatgaggttcggcgcctggaaaacaagttcttcgggctcgagctcaaccacatcgcccgacgatacaacgagactgcggacgagctagctaagatagcctcggggcggacaacggttcccccggacgtcttctcccgagacctgcatcaaccctccgtcaagaccgacgagacgaccgaacccgagaaagcctcggctcagcccgaggcaccctcggctcagtccgaggcaccctcggcccagcccgagaaggcacccgggggctacacccacctgctggtcgccatcgacaaattctccaagtggatcgaggtccgacccctaaacaacatcaggtccgaacaggcggtggcgttcttcaccaacatcatccatcgttttggggtcccgaactccatcatcactgacaacggcacccagttcaccggcagaaagttcctggacttctacgaggatcaccacatccgggtggactgggccgccgtggctcaccccatgacgaatgggcaagtagagcgtgccaacggcatgattctgcaagggctcaagctgcggatctacaacggcctcaacaagttcggcaagcgatggatgaaggagctccccccggtggtctggagtctgaggacaacgccgagccgagccacgggcttcacaccgttctttctagtctatggggccgaggccatcttccctacagacttagaatacggttccccgaggacgagggcctacgacgaccaaagcaatcgagctaaccgagaagactcactggaccagctggaagaggctcggaacatggccttactacactcggcgcggtaccagcagtccctgcgacgctaccacgcccgaggggttcggtcccgagacctccaggtgggcaacttggtgcttcggctgtga

SEQ ID NO: 5587 - DNA, 264 bp, Zea mays
  Peptide Sequence Number=SeqID_47366
atgagggtggaatggggtacccttagcagaataattagaggatctgaggtgataatgagactgatggttcttggttttgactctggtcatgctagtccactacagccaaacatgatacttgctgagtatgttgatgtgtactcacccttgctctacacaccaaaccccccatccccaggttgtcagcattgcaaccactgctcaggagaagataaagccgtggaaggagaccatcgggagttccaagattatgatgagttctag

SEQ ID NO: 5588 - DNA, 1071 bp, Zea mays
  Peptide Sequence Number=SeqID_47367
atgaacgaccttcaatgcgaggctgtagcgaggaaaggtttccaaagtatattagaaatgtcaacggacgggctcgctgttggcttgtttttgagctggttgatggacaagttggatccagttgatatgaccatacgactgggccgaggaaaagagttgaagataacaaaggagacagttcgcctaattctcggcttgcccagtgcaggtggcgggaaaccgtttatgaattgctatggtaaaattgatgctgctgacagcctcaggaaagaccttaagatatcgagggatgagtttgatattgccaccctccaggaaataattgtcaagggacgtgatggtgatttaaccatcaggaacactaatcatgtcaccactacgatctatgggtgttccatagttgttgcgatctattatgtagaccatttgcatcatgaggtagcaccagagaacaagtatggcattccccgtattaaatattttgataaagagacaattgacgcattgaccaaggctgacaggaggaagccacgacatgctggtgaaacgtatggacattgctatttccgtagcatgacagatacatgctatgttgctgctcctgaacgcccagtaaatgacacattccatattcacgttcctcggatgaaagacttgatatctagtaaggttctttgcctgccaccaccataccgccctaggtttgagtctctgttgaaagcccatgaccaagaggttgataagtactgtgcaacgcttgaacggactcaccacaaattagtatcaaaacaactccatctatctgagaccttcacatacatgattgatgatgtcattcgaattgggtccaaggttcaaggttcacaacaaccagacactcaaacagatgaatttaaggtaaccgatcattgcagtgatgtgatggacaacatgcgtgaagacatctctaccaacatcgatcaaactcctctaccatcgccgaccgcctcacccccaaaactccaggaagacctaatggaagccgatgttgacctactcacgaccatcaataagattgttgatctgctatga

SEQ ID NO: 5589 - DNA, 111 bp, Zea mays
  Peptide Sequence Number=SeqID_47368
atggatctgccaagccgcgtgggtagccatcctcgcaagcttaatagacgggtcaccggtgatcctccgtcgagggtggtgtgcgacgccaccgtgattgctaggaagtga

SEQ ID NO: 5590 - DNA, 288 bp, Zea mays
  Peptide Sequence Number=SeqID_47369
atggccgaaactacaggtgaactcgtcggtgtggaccctaggcctgaggcaaggccaagcatggctccggtgacggatcccgccacaacatcagaggagaagcagagggcaactcaagctggaagaggaccggggcatcggatgccaatgggatgggcaagcatggaagataaacagtgcctgaccatcagggcccacatggcggagactagcgtagcactactgaacgagacagctgatgacccggccccacggtcagaggcatggcgcaatcgcgaacacagttga

SEQ ID NO: 5591 - DNA, 447 bp, Zea mays
  Peptide Sequence Number=SeqID_47370
atgaggtctgttgatcgccctccatctaatgcaaaaagattaactattgagtcaagtcaggaggtgttttcagttgacatttctagatgcacaagatctagcaactcagcccaacatgctgataatccccagaacaagcagcagattgatcctcagctattaccagttactcgtgtccgtagaaaggcgctagcttgtcaggtgaaaaaaagtcagcctacaactccatccgcattgtccgacgacgatttcatgcctgctccaacattgaagcacaatttcaaatcagctgcaccctctacttcaataaataaccgttcaaagaagaagtctcgtgtattgaacatagacatcccacccccacaagtccccattatgtcaagcagatcaaagtctgatattgatttcaagtcaaatgacattatgaaaacaagctcacctaattag

SEQ ID NO: 5592 - DNA, 168 bp, Zea mays
  Peptide Sequence Number=SeqID_47371
atggcagtaatggaggctcgggtcgttggtggttttcagagatctcagaggccggcggtgcattttataaagatgaggtacggttatggcaagtataggttgtggcaaggtaggttagaatctcttgctagtttaaaattgaggggttatgcaactattggtggttaa

SEQ ID NO: 5593 - DNA, 300 bp, Zea mays
  Peptide Sequence Number=SeqID_47372
atggagcacatgcacgcaccgatagacaggcagggtcagagaaaaagacaggcttgtggcgcggcaccgcgcagcgcagtaaacaaatccgtgccgcaatgcggcagcagagttaacgatgcaggaggctgccgagctcctgcatgcggcatgcctgatgcgacgcaattcaatgcaaggacggccggcatggtggcatgcgtcgctttatacggagaagagaccgtacgcatgcaagcgaagcgatgcagcgttcagcaagcaggaggaggtaatacaggtgaggaatcaaagagatga

SEQ ID NO: 5594 - DNA, 453 bp, Zea mays
  Peptide Sequence Number=SeqID_47373
atgtcgtggctgcgagccgcgctggctggggcacggggccgcgcgcaccgcgccgagccgcacggtggccgcgagccacgccaacaggggagggagggggccggggttggcgcgagcgccacgaccgcgccgagccaaacagggccgcgcgccgtgccggggcaggccgcgccgagacgggcgcgagggggagggagccacgctgaggcaaggaagagaagggggaggcagggggatggagaggacgagaggagagaggggctgcgcaagggcagttggggaagacgtgggcggcgcggggaagatgcccctggcacgcgggccccgcgagtgatggcggcgcggctgggcagggggagcagcttgcgcgctgcgcgcgctatggcgcggggggggggacaggggggccgcacgggggagtgggctggcgcgcgctgggctaaatggccgtga

SEQ ID NO: 5595 - DNA, 411 bp, Zea mays
  Peptide Sequence Number=SeqID_47374
atgtgctctcggctctccgcactgttccgttcaaaagcttgccagcccgcttttgcttcatccggctgctgctcgctggagtcgcttgcgcttacgcctgccttttcgcctcgctgcaggacgaggggcgagggtggaggagcagcagggctgcgcagcgaggccggccaaaaggacattcggcgccgtgggcccgccgccctccagctgagcagggaaggcatcggcgagggaggcggtggaggaggatcttctctcacgtcaaaaagagagcagggaaagcataaattaaaggcaggaggagaagagaagggggaaggcgcagggctttccagccgcacaaaggaagaggcttcagaaagaagaaagcttcggtcttctgacggagagggagagcaaggcatccagtga

SEQ ID NO: 5596 - DNA, 267 bp, Zea mays
  Peptide Sequence Number=SeqID_47375
atggcggcattgcaagagcagcaggaggaggaccgcgacgagggcgagggcgggaaagacgacgacgaggagtcagaggatgatgggggcccgtttggcacagctccagctcctgattctaagcgaggatctggaggagccgtgccaaacggccgaaagatcgggagtcgtttttgtgaagaaaggtgggatctaaaaaaacctgctccaccctcccttaaaacagctcctcaaccaaccaaatatggacctccccttaaagtttga

SEQ ID NO: 5597 - DNA, 555 bp, Zea mays
  Peptide Sequence Number=SeqID_47376
atggcggcggatccgagcaggcggcggccggagtaccatccggcggtgaacgacgtcctgttgacgctcaccaacgccagaggcaccctcgccgacgtgcagcgccgactcgaccttgagttccgcgccgcctaccctgaccatgcgaatccggcgaagctggtggcgcgggtgaagcggttggaggaagaggcggccgcgctcaaggagatgtgccgcgacctcctcacccagaagcaggagctgatcgaccagatccgcgtgagcttgatggcgcagcgtggcatgacgcagcggctgctcgctgcgtccgggctgcccccccttgtccgacgccgacgagaccgtccacaacagcctcaacgagggactgggaaccggttagaggcgacaatggagaatttaccgctggatttgggcatccatacccattcccatgaagctatagacatccccgtccccgtgctgactcaatttgtcacgctcgcaggggagatcgaggacctggacaagaagaaaaatgccaaccagatgctcttctcagcgatcatttag

SEQ ID NO: 5598 - DNA, 945 bp, Zea mays
  Peptide Sequence Number=SeqID_47377
atggccgccgcaccggaggagcgcctcgacgtcctcaacgccgctggggacaagatcggcgtctccaagcccaggcacgcccccgtcccgactcccgagccgaaccctcccgtctcggttggattccttcgatctgatggtgtgattctgccgatcgctcgctttgctttcctcaggtcggaggtgcacagggacggcgactatcaccgggcggtgcacgtgtggatctacagcgagagcaccggggagctgctgctgcagcgccgcgctgactgcaaggactcgtggcctggacagtgggacatctccagcgccggtcacatctccgccggcgaatcctcgctcttctcggcacagagggagcttgaggaagaactaggcatcaaccttccagtcgatgctttcgagcttatatttgtatttcttcaggaatgcgttatcaacaatgggacatacacaaacaatgagtacaatgatgtttaccttgtgactactttaactccaattccacttgaggcattcactctccaagaaagtgaagtatctgcagttaggtatatgcgttgtgatgagtacaaaagctgccttgcaaaagaaagtagagaatatgttccttatgatgtgaacgggcaatatggtcaactgtttagcattattgaagaaaggtacaaagagaatacagagtcacagagtttaactttgcaaaagcaaatgaaccgttatgttcccatccatttggaaccagatttgactagtctctctgaaggagacagggaggccttgggatatatccttaaagccgcaatagttattgatgacatattctatgaacaggtatggaatagtaacaaaatgcttagagactggctgaaaggacattctgaattctcaccattcgataaattgaagtgggcatattattctattaataagagtacctggtaa

SEQ ID NO: 5599 - DNA, 1839 bp, Zea mays
  Peptide Sequence Number=SeqID_47378
atgggccaaagcccaatacaacaacagatatacacaagtgatttaacaccccctgcagttgcaactctagcaattacagatgttgagacagaaccgaaactccgagaacatcgtggaggggaggcccttggtgaagatatccgtgagttaggaggtggtcgggacgcggacatcgccgacaacaacacgcgcagacgaagtgaaggtcgatctccacatgcttcgtgcgctgatgctgcacgggtttggtggagaggacaaccctctcagtcagtcggtgtagatgaccagctcgaaggccagagaagatcgaaggagaacgccgtggtccagggtgctatggagtatacggaaataggacgtaggctattacgcatcttgcggtcctgccttgatgaaaataaggcttttctatcgaccgcagattctgctgtgcaattactcacagaagccaccaaaccagtttcaggatggaaggggattgagtatcgagcagcatttcctctacataagcctcccggtgctaacttctatcctcctgacatggacaaagcggagtttgaactttggaagagtaaactgacagataaagaacaaaatgatgccactgggtttttcaccgtcataaaacgacatgactctctgtcttcatcgtcattaacacaatcagatggatcggatcagaccaagactaaagatgatctttttattgttccatactccaaggagtatagaccattcctagagaaagcagctgagcttcttgagaaagcatcagcgtgctctgattctccaagcctcaagaatttgctgagaaccaaggcgaatgctttcctttcaaatgattactatgaatccgatatagcttggatggaattggactccaacttagatctcacaattggcccatatgaaacatatgaagatagcctttttagttataaggcaacttttgaagcatttgtcggaatacgtgatgacacagcaacttctcaagttaaactctttggtgatcagctccaggatttggagaaaaaccttccaatggacaatattttcaaatcagatagtatatctgctgctcctattcgtgtgatcaatcttctctacaatgctgggcttcatgacgctctaacaggattgctggtgcaggatgtgaagggtccacaaaccattgctttcaatttgcccaatgatgaaaggattgtgaatgaacgaggaacttccatggttatgctcaaaaacatttcagaagccaagttcaagcatatcttaaagcctatagctgatgcctgcatcagagaggaacaaaaggaatatgttgatttcgagccatattatacacatatagtctgtcatgaatgctgccatggaattggacctcattctatcacccttccaagtggtaaaaaaacaacagttagaagggaacttcaagaattccattcagcattggaggaggcaaaagctgatatagttggtctctgggcactgaatttccttattaagaagggattgcttcctaagagcctgtcacaatctatgtatgtctctttcctggctggctgcttccggtcaatccgctttgggctggaagaagctcacggctcattagagtttgtattgtggaaggttgaggatgctgtagaaagcctgagcagggagatactgacaatacaggcaaagggcgataagccttctgcccaatctcttctccagtcccgtgcaacattgacacaaccattgagaatggcattggagaggatagagcacatgcaggtacctgttgacatagccccggtattcagcacggcaaacaagctatttgcagacatttaa

SEQ ID NO: 5600 - DNA, 135 bp, Zea mays
  Peptide Sequence Number=SeqID_47379
atgcgtgggcccacctctcagacctactccaagtctccaacagtccaactggtccagtttccactgggtggctgcggcgttccgctgcagggtcaaaggaacatattgaacaaggttcttgacactgttgcataa

SEQ ID NO: 5601 - DNA, 432 bp, Zea mays
  Peptide Sequence Number=SeqID_47380
atgtccaacaagcaaacctacttccaatccaacaagcaaaccccggcgttcctacacgcctacatgctgccagcctgccagcagccttgcatccaatccaataaccaaactgcaaacacacggtcacacactaactcacaggacgaagttagagcggacgctcgttcgttggccagctggccactggacctgggcggggggaagttgggagctggagcagcggagcggacgccggagttggagctgcagcgcagccgcgcccgcgcaggagcagaacatcggacgtcaggggcagtggagccgaacgccggacaccgggagcctgcgggtggattggccttcctgctggcggcgggcagcggcgtggggccgtgggcgacgttcctgcaggcgtggcgagcgtgggcggcgggcggcggcgcttgcgagtag

SEQ ID NO: 5602 - DNA, 1377 bp, Zea mays
  Peptide Sequence Number=SeqID_47381
atggcatctatttctaagtttctacttgcactgttgttcagctatcacaccctcattgctcacgcagcagacgatcgccgccacaaggttctgtccgttggctctctgatgaagtcttccacagcatgctccgagcccaaagtgactccaccatccaccggcgtcacggtgccgttgcaccaccggtacgacccatgctcgcctgtaccctccaagaaggtgcccaccttggaggagcggctccggcgcgaccagcttcgagccgcctacatcaaacggaagttctctggcgccggcgacatcgagcaatcggacgccgctaccgtgccgaccacgctgggcacctccctgagcacgttggagtacgtgatcaccgtcggcatcggctcgccggccgtgacccagaccatgtccatggacaccggcagcgacgtgtcgtgggtgcagtgcaagccgtgttcgcagtgccactccgaggtggactcgctcttcgaccccagctcgtcgagcacctactcgcccttctcctgcagctccgccccctgcgcgcagctcagccagagccaggaggggaacgggtgcatgagctcccagtgccagtacatcgtcaactacggcgatagctcgagcacgaccgggacctacagctccgacacgctcacgcttggctccagcgccatgacggacttccagttcgggtgcagccagtcggagtccggcggcttcaacgaccaaaccgacgggctcatggggctcggcggcggcgcgcagtctctcgcgtcccagacggcggggacctttggcacggccttctcttactgcctcccgccaacttcgggttcgtccggattcctcactcttggaacgggaagttcgggtttcgtgaagacgccgatgctcaggagcacccagatcccgacctactacgtcgtgctccttgagtccatcaaggtgggaagtcagcagctcaacctacctacctcggtcttctccgccgggtcgctcatggactccggtacaatcatcacgaggctgccgccgacggcctactcggcgctgtcgtcggcgttcaaggccgggatgcagcagtacccgccggcaacgcccagcggcatcctcgacacgtgcttcgacttcagtggccagtccagcatcagcataccgaccgtcacactggtgttctccgggggcgcggccgtcgacctcgccttcgacgggatcatgctggagatcagcagcagcatccgctgcctcgccttcacgcccaacggggacgacagctccctcggcatcatcggcaacgtgcaacagcggacgttcgaggtgctgtacgacgtcggcggtggcgctgtcgggttcaaggctggggcttgctga

SEQ ID NO: 5603 - DNA, 633 bp, Zea mays
  Peptide Sequence Number=SeqID_47382
atgggacgaccgaaatcagacccaatgcgtatggtcgtctcgcggccaatcaagcctttcactgggggcttcaacgaccaaaacgacgggctcatggggcccgacgtcggcttcattgaccgcgaagccggcgtcgagaggcgttcatggtgcacggttatgccccccttccccgacatcctccccctctgctccgctccccatcgcgccctcctcaccctcccggctgcctctgctccgctccctatcgcgctctcctcaccctcccagctgcgatccccgtcgcccgcaatccccggaggggacgcgccggtgccggagctggcggccatcttccgggtgatggtggacctcctcggcgacccggcgtggccgcagctccacccgcggccctgcaccgacacgccgtggccgggcctgcagtgcgagctcgcgcccgacgacgcgtgtgtgctccgcgccaaccgcctccacctgggcctcgacgtcgccaccccgccctgtaggcctagggctaggctcgaccccacctcgctgcgcggcctgctgcacctccggacgcaatccatcttcggctgcttcggcgccgcccaggcccccgtcgagctgtcgcccgcgctgttcacgtcgtag

SEQ ID NO: 5604 - DNA, 1413 bp, Zea mays
  Peptide Sequence Number=SeqID_47383
atgggctcccccgtggtgcggcacgcgctcctcttgtcactcctctgcgccggagcactcggtttcttgctctgctgccatggcgccgcggtagcgccggcctacgtcaccgtctccgccgccagcttcgcgccgtcctcaacgtgcagcgcctccgacccagttgcgccgcagcagaacgacacgttcaccgtgctgcggctgacgcaccggcacgggccgtgcgcccccttgcgggcgtcctccctggcggccccgtcggtcgctgacacgctgcgcgcggaccagcgccgggcggagcacatactgaggagggtgtcggggcgcggcgcgcctcagctgtgggactataaggcggcggcggcgacggtgccggcgaactgggggtacgacatcggcacgtccaactacgtggtgacggcgagcctcggcacgccgggcatggcgcagacgctggaggtggacaccggcagcgacctgtcgtgggtgcagtgcaagccgtgcgcggccccgtcgtgctacaggcagaaggacccgctcttcgaccccgcccagtcgtcgtcctacgccgccgtgccgtgcggtaggtccgcgtgcgcggggctgggcatctacgcgtccgcctgctcggcggcgcagtgcggctacgtggtcagctacggcgacgggtcgaacaccacgggcgtgtacagctccgacacgctgactctggcggcgaacgccacggtgcagggcttcttgttcggctgcgggcacgcgcagagcggcgggctgttcaccggcatcgacgggcttctcggattcggccgcgagcagccgtcgctcgtgcagcagacggcgggcgcgtacggcggggtcttctcctactgcctcccgacgaagtcgtccaccacggggtacctgacgctgggcgggccgtccggcgtagcgccgggcttctccacgacgcagctgctgccgtcgccgaacgcgccgacatactacgttgtgatgctgacgggcatcagcgtcggcgggcagccgctgagcgtgcccgcgtcggcgttcgccgccgggacggtggtggacaccggcacggtcatcacccgcctgcccccggccgcgtacgcggcgctgcggtccgcgttccgcagcggcatggcctcgtacccgtccgcgccgccgatcgggatcctggacacgtgctacagcttcgctgggtacggcaccgtgaacctcacgagtgtggcgctcacgttcagcagcggcgcgaccatgacgctgggcgccgacgggatcatgtcgttcggctgcctcgcgttcgcgtccagcggcagtgacggtagcatggccatcctcggcaacgttcagcagcgttcgttcgaggtgcgaatcgacggctcctccgtcgggttcagacccagctcttgctga

SEQ ID NO: 5605 - DNA, 2328 bp, Zea mays
  Peptide Sequence Number=SeqID_47384
atgggggacgccgccaccgccgcagcggcggcggcagcgtcgcccgcttgcgccgcgcggaagcggcggcgcggcgacgacagcgcggggctgaggcgggtggcggagatcgtgatggtcctggccgcggccggggaggtacgcggcgggaggcagcccacggccgcggagcgcgcgctggcggccgaggcgcgggagactctggccaccgccgtcgccgagagggccgtgcggcccaaggatctgttcccgggggaagcggtgcgcgcggtcgtcgaggatctcgggctcaaccgctccaaggacccagctgccatggggtttcgcccgcccaaggcctccatcgccgataggctcatgcttactaagcgcaagatggaagaagtcaaggaagctccagtggttagcgcacctcaaacagtcgtctcaagtggaacgtctgagttccatggtttgaatggggctaccaagtttggtgttggagttcctaggaacccaccagttccatctttagctgctactggcccattaacctctacatccccagttaccttgaagccaccaggatcatctcctgtaaaaccagttgccaactcatcagttgttcctctagtcaatactggtccatcaaaccttaaattggacaaaaatgttagtggtcctctgaatttagcattcagtggagcaacggtcgtccactcaaacaagtcaactttagacacatctgctaggcccgatgtaaatgctgtacagagttccaatcagacggtgaaaaaccatgacacaaaaccagtggcagttcaagccgcgacaggtaaccctgttatgggtcatcgtgctacaccaggcgtggcatttgctccaccaaaacctactttcatcaatcacaatgagatagcaaagaatgttctacaatttcttcaccaacctgcaaaccatcctagctggactccaccatcaactgagtacatgcattctcgtttgtgctgtcaaatatgcaaagttgatatcattggtacagacaatttacttgtttgtgatgcttgcgagaggggagtacacttgaaatgccttcatcagtatggcaataagggcgtccccaaagctgagtggcattgttctgcatgcctgactcagagtaagggaaaacccttgccaccaaaatatggcaaggttacaaggactgtagttgcatcaaagactgctccacctggtggtggagcacagctttctttgcaggaatcagcagaaaacatggctgcaaaggaaaatcaccaaaagttggctgcaaatggaaatcttatgaagccattctccattcatggtggcagcacagtacccgacagtaatgtattggcactgagtgctgtcatggctggttcacaatcacaattagtttctaccttgagaccatcaatagtcgttaaagctgaaacaccctctaatggaaaggaaggaactgggcaaccatgcaatactgcaatacaacctaatgtgcgatcatcttctcttaacaacagattgagaagtgattcctgtttgaaccctgctgattcagcaaatgaaatcatgcatggtaagcatgctgcagaaatttctggtgttgaagcaaaggtcaagtctgaagcaaactctgaggttgttgtgagtacagatgaggaattggttcatagcagtggaacatcaatcgaaactgaacgagccaaggttgtcgctattgaagaaaacagggcacaatcaacctttgagacagataaaatgaaagttggggaaacaactatcaacacaggaacaacagatcaatgcatcaatactgaagaaaagctccccagtttagcaacttctgaggcacacacaatcactgacgtgaagatgactagcaatacaggaataccagtacagcaacacaacattgctactattgaagagaagacccagattgatgcagtgtctgatccacatccacatgcaatccaagatattcaagatatggaaatgggcaccaacaatggaccacccatagatcaaacaagcagtcttgttgaagaaaacccccctggacaatcctcttcaattgctgatgcgtgtgtcactgctaatactggaataccaacagatcaaacacagcatccaaatgagtcaactgaaaatgcagtaaagaaatctcccaacagagaactatataaagaaaaaccgggctgcaacataacctcagatattacccaaaaagtaacttcaaatggcatcatgtgccctgaggacaaaactttatgtgttcatgaagataaagcagtgggttgtgacacagaagcaaaagaagaaaactaa

SEQ ID NO: 5606 - DNA, 201 bp, Zea mays
  Peptide Sequence Number=SeqID_47385
atgagctcccccgcctgcgcacgaggtccgaccgactccggccctccccggcgacaaaccgcacaccgacgtgaccgtcgtgacctcccctatgtcatcgaccaccttcctagagctatctcgccgccggtatcttcggactcgtatcagagagggagaagctcaaaagatacgaaggtttacacagcgccgaagctctga

SEQ ID NO: 5607 - DNA, 789 bp, Zea mays
  Peptide Sequence Number=SeqID_47386
atgaatgcgaaggcgcacgtagcccagaggcgtcatgctaggttctgcctgttggccctgattaaagctcgggcgtgttctgtcctaggaccttgggaccctactatgggcggcctcgaccccatacgggggggtccggatcccattctaggggtccgagaggacttcacggcatacgcagacgtgtgcttcagcaacttcggcgacagggtgaagtactggagcaccatcaacgagcccaacgtcgagacgatcggtgggtacgatcaaggaatcctgccaccacggcgatgctcgtcccccttcagcttcggctgcgaggaaggcaactccaccatggagccatacgtagcggcgcaccaccgcttgcttgtgcacgcgtgtacagtgtccctgtacagagacaagtaccaagctgagcaaggaggacggattggactgaccttgcttggttggtggtacgatcctaggactcagactcccaacgatgtcgcggtagccgcaaggatggacgatttccacatcggatggttcatgcatcctatggtgttcggggactaccctccggtgatgaggaagaacgtcgggtccaggctgccgaccttcacggacgaggaggcggcgcgagtgagggggtctttcaacttcgtcagattcaaccacgctctaacgcgacctccaaggaactggattgaagctgcttgtcgcgttgtcgggcaaaggtttcggctgtggcggtgctggagggggatagggacgagagaagactccgaattcgagatggaatag

SEQ ID NO: 5608 - DNA, 483 bp, Zea mays
  Peptide Sequence Number=SeqID_47387
atggcgtggacaccagacgagctccctggtgctcgcccctctccagccgagctcctcctatctctccctcgcgtcttcctctccctgccatggacgccggagttccgctgctcggccatggccgctgtcgagcttcctgctcgtgcctatctccctccatggctgcgcttcatcaagctctctgcgcgccgtgaagcccctgcgcgtcgcggtctcccaagctcgccatggctgccggacgagtctcttccgtctctgctcgacatcttcgagcttggttcctgcgcgcgcgctgcactgctcccatggcgtgttcctacgcccggctggatttccctgctgagctcggtcacatgcctgggcaccgtgttctgcacgctcgccggtttcctcgcctccatcagccgcggcaacatgctcttgctggggcccctagtcgcaactcaagttgtcttttcggctggccaccagcgtgtcgtctag

SEQ ID NO: 5609 - DNA, 255 bp, Zea mays
  Peptide Sequence Number=SeqID_47388
atggggaggaaagctccgccacaacccacgaatttccctggcgtggcaccctgcctgctggtgcgctgccgatgctttgtgtgccggggtttgggcagcaggcgggaggttgacgatggcacgtccgccgtcggatctggaaggagtgtgcgagattcatccaagtggggcgatgatcgttggccgttagatgacaatcgtagagccacaatcacgcaacaggtgtaccggttcgaggttgtgttctccccgtag

SEQ ID NO: 5610 - DNA, 411 bp, Zea mays
  Peptide Sequence Number=SeqID_47389
atggatcgaacctggccctgccgcgcgcagaaatggcttgcgcgaccgcacaaagacggcgacaagggtcagctcatatcacaccaaaagatctccccgatgatggccgagggatctcgtgcccgatcgaatgagcacctcccgaggcattctagactggaggtctcaagctcgattcctcttgagcgcatctttttttgctcgattggttgctgcaacgggacgaagaaaacgaagcgcatcgagcgatgcaattactcaggggcagcgacgtccaaatcccagacccacgcgcgctacgacttcttttgtgcacgctcggtcacgcgcaggataaaactgattaagaggctcaggattatgcatgccctgaaggcgtcagacacgagggagaaggtaatcgagaggtga

SEQ ID NO: 5611 - DNA, 417 bp, Zea mays
  Peptide Sequence Number=SeqID_47390
atggcccacaacgtcgagcgatcgtcgactccgtcctactccaagaaacaccttgaggggcaaccccgggtgtgcggtcggacccaaaacaccgacaacaacgacctcaacaagttcggcaagcggtggatgaaggaactcccttcggtggtctggagtctgaggacaacgccgagccgagccacgggcttcacaccgttctttctagtctatggggccgaggccatcttgcccacagacttagaatacggttccccgaggacgagggcctacgccgaccaaagcaatcaagctaatcgagaagactcactggaccagctggaagaggctcaggacatggccttactacactcggcgcggtaccaacagtccctgcgacgctaccacgcccgaggggttcggtcccgagacctctag

SEQ ID NO: 5612 - DNA, 426 bp, Zea mays
  Peptide Sequence Number=SeqID_47391
atgggtatggcagattttgatacccatggatattttattgggtcatttgttatgcccattaggtacggtgggcgtgggtggttatttagtatcacttttacatttttggcagatattgttgagcttaaccttcttaagacaactaagattacttttaagaatggcaaggatgatctgatgaactttgagtccactattaagcctgatgaaggatactacatgggtggaaaatttatttttactttccaagtttacctgcatgaacctccaaaagtcaagtgcaagactaaggtttaccatcccaatatttacttggagggaaacgtatgcctgaatagtctgcttgaagactggaagcctgtcctgaacatcaacaccattgtgtacatggttgaatcttcttttcttggtgagttattgagatag

SEQ ID NO: 5613 - DNA, 696 bp, Zea mays
  Peptide Sequence Number=SeqID_47392
atgggtgaggttatgatcattggcatccttgacgcaggcatcaccaccataggccaaatcaatgccaactccaaagccaaagggatgccaccgcctccggtcaagtggaaggacaggtgtgacaataaccaagcatgcaacaacaagttgattgggttcaaaacattcgtagataccagtgatacgtgtgggaattccctgctgcagcgcgcatccgttcttggaatcgagtacgacaaggcgttcgcggtggcgcccaaggcgcacctcgtgatgtaccatgtgtgcgacgaggagtgccaccccaaagaagtaagagcagggatggactccgcggtggacgacgacgtcgacgtcatatcgatgtccttcaatggcaccgaggacaacatgtacacgccggccgggaggaacaacccagacatgctcaaggtcgagagaaacgtgccctggctgctcaccgtggccgccagcggcgtcgtccgtcgtgtcgtcacgaacatcgagctcgacagcaagatttttaagcccgacgttagcgcgccatgcacgaatacactcacggtggtgccacacggtgacgtggggtacaccaacacacagatagtgttggccacgtcattggcggcagttcacgctagtcctcgcggcgatggtcaagaaggcacaccaggactggtcgacctccgagattaa

SEQ ID NO: 5614 - DNA, 1608 bp, Zea mays
  Peptide Sequence Number=SeqID_47393
atggccgccgcctcgccgccgccctccccaccccacgcaaagcgccccaagatgtcctcctcctccgacccggaagccgatgctgagcccacctcggcctccgccgccgttgagggcgccgatcctgcgcagcgtcgtcccaggtacaagcgccgcaaggtcgccatccttctcgggtactgcggcgcggggtatcagggcatgcagaagaatccgggcgcgcgcaccatcgagggggacctcgaggaggcgctctaccaggcgggcgccgtgcccgaggccgaccggtccgcgccgcgccgttacgattgggcacgtgctgcgcgcaccgacaagggcgtcagcgccgcggcgcaggtggtgtccgggcgcttctacgtcgacccgccgggcttcatcgatcgcttgaacgcgcagctcgcgccgcagatccgcgcttacggctacgtgcgcgttaccaactcattcaacgcgaaaaagttctgcgaccgccggaggtacctgtatctgcttcccgtatttgctcttgaccccagcgcacacccggaccgcgaggccgtcatggcgagcatggggagtgggagcgagcttaccaagtgcctggagtgctccgagagaggcaggaagattcctggtgtcatgggccgggaggggaaactgcccagccccgggcagaatggtgttgatgctcccgtggagggaagtagccatgacgaatctggaacacttggggatgcaaaatgtgaccatacaagttcagatggtaataacccatttgcccatggggaagttggatcgaacagcaaggagaagcctgatttaccggtctctggtgatagaactgaagttgcaaatgcaaagatgggatcaaatggcgacggtgctgttgtatcatcagatttttgttctgatctgaatagttcagctgatgcagatatttatattgggaacgaggagaagaaacttgagcctgcagccactgaaaataaagctcaaggtatggaatctgagaagatcaatggagaagagaaactgccaactaagagtaccttttcttacactgatgaagtgaaggagaggttcaacaggattctcaagtactatattgggacacacaatttccataacttcactacaagaaccaaagcagaggatcctgcagcaaaaagatttatcatttcctttgctgctgaccgtgttgtcagcctggatgggattgattttgtcagggatgtcaatcttaatgtgcctactgcacctgaggtcggactgtacctagatgaatgtatgttcacatcatacaacaagaaatggaaggattcacatgaggcagtttccatggaaccttattctgaggaggccgaagagttcaaggtcaagtatattttcactcatattgcggcgatggaacacaaggagggagctgtagctttgtggttgcattcattgaaccacagaaattatccagatttccgttacatggaaactgccgagcacaatcctggtgctgaagttgagagtattgctgctggtgcagagcccaaggttggagctgaagttgagaatactgaagaagtacagatgccaagcgacaatctaagtgagtaa

SEQ ID NO: 5615 - DNA, 273 bp, Zea mays
  Peptide Sequence Number=SeqID_47394
atggagaaagatgatgttggcctggccatcattgtccacgagttccttgcgaatctctcagcctgctacattgcagctgataaccatggcgtcgatgtgaggggcattgcagagattgatgtcgttttggtcgaaggggttgtgggtaggcctcttcttcttttggcggtggtggcggtagatgcctctgatggtggtgaaagggaaatggcctcaaccatttcctataatcgattttggtatttgacgctcatcacaaatctcatggactaa

SEQ ID NO: 5616 - DNA, 522 bp, Zea mays
  Peptide Sequence Number=SeqID_47395
atggcttgtactgtcttgcaaaaggaaagcaaatacgatacttgcaaacatgattggtccccaaatcagcaactagtcagaaatgaatggggacttcaagaagcgaagcgggatctggtggacttgatcctcgaggacgctagcgccgacggagcggctctccttggcgagtggattggaggccacagaacacctctgctcctcgaggacagtgtcggcggtggagcggctctccgttctctcacgaggcggatacgcgcctccatcttggcgtccctggcctccacctcgagcgcatggaaggcaacgtcgagcaccgagcgggagtgcttcctggccgcggcggtgtcggtgacgcggcgctccgttcctccggtgagcggcgaccctgtcgcgggtaatggacgcgagctatggcgagatgtggtggcacgtaggggtccgatgaggcgaatgcggcatcgagaggtggtggcacagtcggctgaggcgaatgcgacggcgagcgtgagggaggcgtga

SEQ ID NO: 5617 - DNA, 318 bp, Zea mays
  Peptide Sequence Number=SeqID_47396
atggggagggagaaatggactattgaagctccattaacgacgaaggagacgaacagtcggctggggcttcggcgcggcgacgactcgggcgcggggctggtcgtggctgacagcgggccgggtgtggggctcggccgcggttgtcctggcgcgagctgggtcgcctggcgcggggcggcagttcggtgtcgggctcctggcggcgcgacttggggaagcagggaagggagaagggaggagagagagggccgggtgggaaccacgcgcaagagagggaaggggagaaagcagagggtggtcgcggcggctgggagctag

SEQ ID NO: 5618 - DNA, 1380 bp, Zea mays
  Peptide Sequence Number=SeqID_47397
atggatggacgtaaattagagcaacgattatgcaagcttgctgctgttgaaaagaacaatgcagtactcactaccagccatcctcgaactaaggaagttagttcgagttatgaagcacccactccaccaacatcttctgttcctaggcgttttccatctccaaacctaactagaacaagccctacacctttccaggtggtgcaaaagagagctgtgtcagctgagaggaagcatccatcaacaccaccgtcgcatcaaaatccttctactccagttcatgattcatcaacatctatgccaatttcatctagaaggctatcagctgatcgtataccagaaagtttatggccttctactatgagaagtcatagtgtttcatttcagtctgatgatatttctattcctgttagccaaatggaaaaagaaaagtctggtagtattgtttccttggatcgcacattaaaaccaccttcaaatgtggctcataaacaacaatcagagacctttaccttatcacgaaagcctagtccagagagaaaaagaaatctacttgaagggaaaaatgtagctgatcagtctgaaaatgcaaaacctattgatgatttgcctagccgattgatagatcatcatcgatggccaagtagaattggtgggaaattatcttccaattcattgaacaaaagtgtggattttggggataagattgttaaaaatttatctacaccgattccaggaacagtatcatcactgaaaagaatgctaatgtctaataatttaggtaaacctttacaaaaaacttctagcgatgctgcaaggttgttaccacatgaagaaattggtcgagtagggtctgaggcaattttaattaatgataagcctctgcgaacaactgtacctattgggatcctttgtgcaagttcattggaaaaattgactgtagcaaattctggatctcgatctcagtcaccaagtacgacctctgtttctaggagcattagtccatatccggcaggaccttccagtccacctccaagaggagttggccccactccaagaggagttagtctacctccaagggaagtcagtccaactcggattaggacatccatcgcatcaagtcaatcccaaaactcaacttcagttttcagttcaactccaagaggagtcattccaactccaaggaagtggcgatatgccaatgcccattcagaagctgtattgtatattcagaaagtaaccgcagaggaaactttgtacaatgtttggaatgctactttggttctgtgggatgctttgatcaaaaaaagaatcaatctccaacggttgaagttagagctcaagttgaactctattttgaatgatcaaggaaagggagattga

SEQ ID NO: 5619 - DNA, 321 bp, Zea mays
  Peptide Sequence Number=SeqID_47398
atgtcgaaaaggtatgttctaagtgcatcacatgtaaacaagaaaaatctaaggttttacaagatagcacattttattccttgtcacaaaacagatgatgctacacatgtggcagacttattttttaaagatgtggtaagacttcatggcatccctaaaataattgtttccgacagagatgccaaattccttagccacttttggaaggtattgtgggattcgaggacgaatctttttgaggaagggggaatgatacgagtcacaaaggcccaactcaggcttaagaacatgatgggctcaaattaccacaaggctcaataa

SEQ ID NO: 5620 - DNA, 126 bp, Zea mays
  Peptide Sequence Number=SeqID_47399
atgagcccgaagagcttcgactacactatgcccccgatgagcaaagctctaataccaaatgatacgatctgcgtcgatgttgagtcgagtcgtatttgtgttgccaaatcatctatgatgaagtaa

SEQ ID NO: 5621 - DNA, 129 bp, Zea mays
  Peptide Sequence Number=SeqID_47400
atgggcaagctgttcagctcacaaggaggcttcattaaggtcattgaattcggctacttaatggctaaggagacatgcattttaggtgctgttaacatgcaaggaacggcatttaaagaaggtcattga

SEQ ID NO: 5622 - DNA, 180 bp, Zea mays
  Peptide Sequence Number=SeqID_47401
atggcaacggtcgacggaggatgcaacacagttgatgcgggagcagacatttacgtactccctctagtcctccttgagcagcaggatagggggcctgctggagctatgaacagttcatcgggctacagaaaaagggatagagagcgtgatagggaggctgatcaagttggtcataactga

SEQ ID NO: 5623 - DNA, 372 bp, Zea mays
  Peptide Sequence Number=SeqID_47402
atggcgagcgtagtagacttccggcgaacagcaaagactgggcatggcgatggccgacacctgccattgatggcgagcaacaatgggaaagacgagagggaaatacgcgcgagtggggagggtgacggacggtcgacttctctacggcgcaggcgccgggagtcgaggagcagagcagcagacacgaagtggcggtcggcgcttcagctttctcatggcgtcgtcgtcgtcatccgattcgtgcatgcgggcaaggggctggaagacaagcagggctgggagggcccacacgtaagcgagatgaggggggaggggaacgcatcgtggaaacagctggggctgctgggccaagtgccggtccgtgttgggtag

SEQ ID NO: 5624 - DNA, 330 bp, Zea mays
  Peptide Sequence Number=SeqID_47403
atgggagagtgccgaacccctgtatatacggtccaaacctccaagtttggaccaggacccccacgtttacagatcggacccctagaatgggatccagatccccctgtgtggggtccgagctgcccacaacgaggccccaaggttccaggtgagaacacacccgaacctcaattagggcccaggagagggtccagagctgacacgtgtccagaccaggtctggcgacgtgctcagtccatgatacatgggccgcgcagttactcaccattactcccgcattactcgtacggtaactgcccatcaatgcagcatggattgcagacatcatga

SEQ ID NO: 5625 - DNA, 252 bp, Zea mays
  Peptide Sequence Number=SeqID_47404
atgggcatattttcacatttaagcacttgtgtttgcactcaatcaccaaaatacttagaaatggcccaagggcacatttccctttcaaggtgcggagatgagagagtactcataggcatattgagtgctaggggtggcttctattttgcacttcaggatagggggcctgctggagctatgaacagttcatcgggctacagaaaaagggatagagagcgtgatagggaggctactcaagttggtcataactga

SEQ ID NO: 5626 - DNA, 282 bp, Zea mays
  Peptide Sequence Number=SeqID_47405
atggaagttcaccctatggcttacggacagtggacgtgggcgtccggacgtgacgcctacatccgaacgtccggtagtaacacatttggactcaaactccgggtgcagaacgacagagatatatgctcatcagtagattcagatgcaatgaacggcgacgtggtgtactggtatgaccacatgacattgaagagaaaaggcggcgagcacgaggatgaccatgaccaacgcggcatcgtggtgcacacgccagacaagaagtgtggcatgagtcaggcgtag

SEQ ID NO: 5627 - DNA, 390 bp, Zea mays
  Peptide Sequence Number=SeqID_47406
atggccaccgccgccttgtgcgtcaccgacgccggcgacttcatcgggtcgtggatcgtcaaaatcctgctcgcccgtggcaagaggagggatacagaggatctgagcggccagcaagaagtggatatggggggcgccgtctgcgagctgtgtgcgtcggcgggggcgcgcgagaggcggatcctggactgcgagcttgccgaggggcgcgggggagaagcagatcgtggacgtcgaggtgagcatacgggaggagtggcgagcggctggtttatagatcgggggtgggggaggcatcacgaggtagttgagatgccgaggggcgcggcgggagtagagatggcaatggggacccgatctccgattcctcgcggggaattcccctattag

SEQ ID NO: 5628 - DNA, 324 bp, Zea mays
  Peptide Sequence Number=SeqID_47407
atggcgactgttactgtccttggcctccctctgcgcgtgtatatatacgaggaggggaggttgcttctggtcacgacaatagttcgagagaacacacgacattctcagacgcgttgtgtacagcccatccccgtcccaccttctgtgagcacagacactgtgggagagcaggcctccgaaatcgccgtctgcagagagacatttgcacggcctcaccctggtgggtggcacagcagtcggagcagggcgggcatcgctgttttcctgtcaagtcggtcagcggaagggcgaagtgactgcggtcacttcgaccttgccgactga

SEQ ID NO: 5629 - DNA, 351 bp, Zea mays
  Peptide Sequence Number=SeqID_47408
atggatgagtacatccgagctgacaacgacttccgccaaagaagggaggaagcttacagtttctctgaaaatgaccaggggcttcagaggaagagtccatccgaggcacgtcaggaacttcaagctgtccgtggccaacttgcttctgagcagtcaagatgtttcaaacttgaggttgatgttgcggaacttcgacaaaagcttcagagtatggatgcattggaaaaggaggtcgagctgcttcggcgacagagagccgcttcggagcaagcagcaatggatgctaagcagaggcaaagtttgggtggcatgtggggttggctcgctggaagcccgacaccagcagtttag

SEQ ID NO: 5630 - DNA, 252 bp, Zea mays
  Peptide Sequence Number=SeqID_47409
atggatcccctagggatccctagtcaccaaattagccctaaggtgactatcaatgggtatcagagaccggcacttttttttagtctaacaactcgaaatgatgtcagagaagaatcctacaagaacgagaaggcaccattggaagacaaggacaagaacaagaacaaggtgccctcaggagaggggattgaagaatccacacactccaattcccacaagagaaaggatggcaaaaagaaaaggatcaagaag

SEQ ID NO: 5631 - DNA, 444 bp, Zea mays
  Peptide Sequence Number=SeqID_47410
atggacccccctgtgacgtggtcggtccgagcccgaggtcgggtgaggcggagaccgtcttccgaggacgaggtggagtccgagccctggggtcgggcgaggtggagaccgtcttccggagtcgaggctgagtccgagccctggggtcgggcgaggcggagaccgtcttccgaggtcgaggctgagtctgagccctggagtcgggcgaggcggagaccgtcttccgaggtcgaggtcgagtccgagccctggggttgggcggggcggagaccgtcttccgaggtcaaggtcgagtccgagccctggggtcgggcgaggcggagttcgtcgtccgaggtcgaggttgagtctgagccctggggtcgggcgaggcggagtccgtcgtccgaggtcgaggttatgtccgagccctggggtcgggcgaggcggagtccgtcatcctag

SEQ ID NO: 5632 - DNA, 282 bp, Zea mays
  Peptide Sequence Number=SeqID_47411
atgggtaaaacgatgaaaaatgttaagtatgtaagatgtgtttctctaagtcttagggaaatcctccctaaagttgaagtcaaatggagtaaagaagtttggctaagtttggctaaacatgggccaagtgctgtaaagaagactgtaagcagacgcgacaccgttgtaagcgtcataaacatagtagaaggctctatctatctcattgacagatctgagcaaatggagaaaggagttgaaatagactccaagccaaggtgggctaactccaacgaggactag

SEQ ID NO: 5633 - DNA, 309 bp, Zea mays
  Peptide Sequence Number=SeqID_47412
atgaggcagctatgcagctctccggatcgagaacaggattcgggagggcggcatgcggtgctacaacgagatgtggcccgtcacgcggaaggggtactgatgcagcggcgcggaccggcggatgatggagatggtgtccgacgtgctgggtcgattacgggtgcccgtcacgctgctcaacgccaagcagctcacggagcaccactcgacacctacgtctccgtgtacactgagaccggcggcgagcagctcaccgacgacgcgcagagggccgacccgctgacgtacacggactgcatccactcgtga

SEQ ID NO: 5634 - DNA, 687 bp, Zea mays
  Peptide Sequence Number=SeqID_47413
atggagctggatgcaacccccgtgacagcaggggtaggcgcagctgggacctcctcggtctctgccgatggtgtactcgacagcgtcgccgtcgttgaggctgtggcaaaggatggtttaagacccgtcggcataataattacacaacgctacaagaaaggagctacacttacttcggaccctagaccttccagcggccctggaagcgggacgcccactgctgctactgttgttgttgttgttgttgtcgctgctggtgcccctgggggacatcacccccaagcggtggtggtggcggcgggaacgaggtggtggaggcggcggtggtggcggatctgttggtggcggtggcggaggactagcgtgcctctgcgcgccctgggcctcggagccgatctcctcggccccgctagctgtcctctgatgcttctagggtgggtccgcatcaaccgcccctttgcccttgtccaagaggctgggggccgtgagggggactctggagcccgctccagcgggctgggaacctccggccggtacaccgaggatctggatcccgcggtgggggtcccggctgccggtctagcgaaccgccacgccgctctaatcgagggtcggcagacagtccaagatcgccgccctcagccctgcgtcttcgcagagcagagggatgccctagggagggattag

SEQ ID NO: 5635 - DNA, 597 bp, Zea mays
  Peptide Sequence Number=SeqID_47414
atgacgggtgttgggaacaccctaaaaaggcattatgagacgtacttgcttgaatatgaacttgcacatgacgatattgatggggaatgttgcttgatttgccacagtggtgctctgggtgactgggtgaactgtggattatgtggagaatgggcccaccttggctgcgatagacggaaagggctgtctactttcaagagcagccgctaccgccctgcatcgtcgactagccagtcggctacaccggaaagccatcctgggtgcctactcgtccatgaatcggtattgcaaaaaacattagaagggggcaacactacacgttttgaacaacaccttacattgcgtggggggaatgtgcaagattgtcgtaatgttccgtcagaagttgccaattacttttggcgggagattgacaagggccaatataaaaggaaagtaagaatggtaaaggaggtacgaaggttggcattggcgggtttatctcgtggttctgatgatgacaatgacaataagttgcaggccacattgcgtgcttcgagaaaggatgaggagcttaggagggtaagggatccgatatccgaaaggttacttgattga

SEQ ID NO: 5636 - DNA, 846 bp, Zea mays
  Peptide Sequence Number=SeqID_47415
atgccgctccccgaaatcctccatgcccccgcgcctgaaattcctccttccccttccagaaccttccatagacgctacgccgtgatcccttccaccggccattcaaccatctgcttccaactcctcggcgtccaagttgtccacaagcacaagcagggggctcttccatccatggctcgccccgcacaggcagggggcccttccaacgatggagcacctcgccccgcacatgcagggcccccttccatccatgagagcatgcaagcagatctcccccttcctccgtgcaaggcagtccgctcggattatccgcaaatcgtgcctgccccacagcacccttccatccacggtgaaatcctctccctccgcgccagctcggcagatccgcaaaccgcgtctgcaaccacggtgcacttccatccacgccgtggagccgcgcccgaggaggaccgctgtggtctgccgaggccggccggctgggcacgcgccgcgttgggatgcatggttgctggggccagaccgcgcccgcccctgcgccggatccgaggccgaggccgcgcccttgcccggaggcagagcagttcgctgctcgtggccacgcggaggccgagcgggcctgcctgcgcgcgccgggtggcgaggccgaacactactcacatctgtgcacatgcagtcgctggggagccaggtggcgttccagaccatggtgtccatcgcgacgctgagtctcaatttttgaaaatccggcaagcgccacatggtgttctcgccgaggcaaccaggagacatcgaacggatcatcagggcacaaaacactccatgtcaaggggtgggcagatagagtag

SEQ ID NO: 5637 - DNA, 294 bp, Zea mays
  Peptide Sequence Number=SeqID_47416
atggcggccgtagaacgagcgacggaccacgacgagaggtggcggaactccctgggcgtgcgcgcggtgatgaacgacgaccgcggcgtcgagttgctctcctacccgaatgcatggccatggggcacatcggccatgggttatatacctagcatggaatcggttgggaagccagagttggctatccaactgtgggatccccaagatgtgtggcgatggtttgttgtggcccgcggcgctcgatcagggttgttacggagaccgcacggggagaagaaggttctgacgagctga

SEQ ID NO: 5638 - DNA, 411 bp, Zea mays
  Peptide Sequence Number=SeqID_47417
atgcgtcggatcttgcgcacctacgcagccgccaggtcccgcgtgttggccttcatgttgccgattgcggcgcagaagctggcgcgccccgcgaagcaggcgcctagctcgggcacaccgaaggccctgcccagccccgcggcgtgcgcggcgcgctccgtggccatggtcgtggcgaagtactaccggagctcctccaccatgccgtcgtgcaccatgtcgtccgcgcaccggtccaggtactccgcgaggagcgcggcgtcgatgtggacccagaggactagaggaggcagcacggggattggagcgcggggcggaagccccaccgcggcaccggcacaagaccctagggcagtagtaggcggcggcggcgacggtattgccgtggtgatcggtgttgttgacgagtag

SEQ ID NO: 5639 - DNA, 987 bp, Zea mays
  Peptide Sequence Number=SeqID_47418
atggccgacgcctggggctggcccatccagaggctcgacgcgtccgccactgtctacgcgcgcctccgcggagtcggcgtgctaggagcgcaacgtgcgcgcgcccgacctcgatgccatccggaacttcttgttggagctggacggcggcagcgtcgtcgacgacgctgtggtggaggtggagccgcggttgcgatgctgcgaggcgacttcgagtctgcggatgaggttttgaaacatcttgcgccagaaatctcctacagaagcttggttgcacttggaattgcttgggtaaatggtacaccagtgtcctcatttgataggcaggatgcagaccggcttcttttcttttgctctaaccagtgcggagatcaagctattcaaaatggctcatatgctcatgtatccagctggtcagcaccccttaccaaggatagaaccactggaagtctcgagtcaaaacagatgtcatttggtgcaaaaggagttgtaggggataatacgatctccctatcatcattgaaaccaaggctaaagcctgcaacaatgagaccccttcctcactctcgcaagcaacaaatgcatccctttatggggtttcctcagtccatcattcacgatgctagtcaagttaagcctagcttgccagcccctcctgtgaagcacaacgcagtacctgttaccgcagtgacaccgagaaaatcatcatctgggtcaccatcatcctggtcacgtgttcagctaccaatcccattgaatcctctgccaataaagaaacatgagtgcaatcggttgcctatccacagttgctctgaagaagacttcttgaaagatgtcatgcagtttctacttcagaggggccacatccgacttgtacctcagggaggactggcagaatttcctgacgcagtgttaaattcaaagcgtcttgatttatataacttatacaaagagatgtggaaagaagattatgacgcttcgttttga

SEQ ID NO: 5640 - DNA, 498 bp, Zea mays
  Peptide Sequence Number=SeqID_47419
atgagcgcttcacgcggcctagctctcccctcgtatggcttggccgcctcggccgccagcgcaggcgcgcagacggttttgccgccgcggctgctgcctggtgggcctaggggtgccatggtgcagctggcccattcggcgctccagcgcggctcgccccccccaccgcggttcgccctgtccccagctatctggcatggctcggcccgcccgcctgacgtggctcggcgcacgatcagcttggcgcgcaagcagcccgacacagacgtgcaacgaccccgacacggcatggcgccgagtggctcgcggcccagcgccccggcgtgctcgtgcagctccccgcacagtcactcacgctcttgcacgacgtgttcccacgcggcgcgtttgccgaaccacacgcactcggtagtccgaagcacgccctcacagcttgcacttgtattctcgtgcgcgcagcacatcgccaggttttcgtcgacattcgcctacccttag

SEQ ID NO: 5641 - DNA, 840 bp, Zea mays
  Peptide Sequence Number=SeqID_47420
atgctgcggcgccttgtcggcggagccgccgccgtgcgttcgccgctgccgccgccgttctgtcggctgcttcacaacggcggcggaggtggtgggtgtagctcgggggagccggagagcgtggcgtaccgcatgtcgatgctgcggcgcccctctaccgtcagcaagaaggggctcacctggaactggtgcagcctcatcggtcgcctcgccgcaccgctgaatggtgagctggcaaatgttggcctaaagcatctgaagcatgatgacctcgtttatgtatctggtcatctgggctcttatcataaagtcagtccaagtggtgaacggcacattgtctataagatttatgtcagagagctgaattatgttgttgatcaaaataagaagcctcagaatgatgcagactcaacaagtccaccatcaatgacatctgtcacccttcaaatgctaaaagagaatgaatgtataggcaggcttcgcttgtggcaggtcttctttgcgaacccatatgagtggtgggacaaccgacgatccaaaccatgggccaactaccctgatttcaagcacaaggacactcgtgagaaaatatggcttcgtccagatgaccctccttggtccgcagcagattttggtggtcagaagctccaaaaagctgaaacaaacagggtcactgtcaactcacagaagccctgccttcaaggtctaccggtgcagtttcactgctccagtgtccaacaacctaggagagtagtggttaaacctgtccacttgagacctgtcaatgtcgaagacatcatacagttactagcagagtataaaagaacgcttacacagtga

SEQ ID NO: 5642 - DNA, 1266 bp, Zea mays
  Peptide Sequence Number=SeqID_47421
atggccatgccatcgttcgccgtaacctcacctccgtcgcatggcactaccttatgggcgcctcatgctcgtcgtcctcaaagactgcacaagagacacgtgcgcagccaagtccgggcagtggcacaagcacagctgcagtaccagaagctgggggactcagacctcctcatcagtgaggtcactcttggaacgatgacttttggcgagcaaaacacggagaaggaagcacatgacattatcgcttattctttcgatcaaggtgtcaatatcctagacacagcggaaatttacccagttccaatgaacaaggaaactcaagggagaactgatctttatattggcaggtggatgcaatcaaaaccacgagacaagataattttggccaccaaagttgccggttattcagagcggtctacatttcttcgagacaatgcaaaagtggttcgtgttgatgctgccaatatcaaagaaagtattgaaaagagtcttaaacgcttgtctacagattacattgatttgcttcagatacactggtctgaggactcaggtctggaggctgaaggtgtctttttctattctatgcttcacataaggccagataggtatgtggcactatttggtgagtttagttataatccgaccaaatggaggccaagcatcccttttgaagaacaattgaaggctttacaggagttagttgacgaaggaaaggttcgctatatcggtgtttcaaacgagacctcatacggagtaatggagtttgtacatgctgcaaaggctcaaggccttccaaagatcgtgagcatccagaacagttacagtctacttgtgagatgccgctttgaagttgatcttgttgaagtttgccacccgaataactgcaacgttggactgcttgcatactccccgttggctggtggggttctcactgggaagtatcttgacgctaacgctgacatctcaaagagcaggctaaatctcttccctggatacatggcacgctacaatgactctttggctaaagaagcgacattagagtacgttaagcttgccaagaagcacgggctaactccagtccagcttgcccttggcttcgtgcgtgatcgtccattcaccgctagctccatcattggagcgaccaccatggagcaggtgaaggagaacatcgacgcgtttaccagcactccacggcctctaccacaggaagttcttgacggcattgaggatcttttcaagagatacaaagatccagcaatcctctag

SEQ ID NO: 5643 - DNA, 339 bp, Zea mays
  Peptide Sequence Number=SeqID_47422
atgtcgctaaaactgaatgtgcagttctctaactggaccgagaagggaactccggatgaattgcagaataaaagaaagagtaggggaggcgagtggaggagacgccgggcgcggcgatggaaattcctggtgatgaatgaagccgacgaggcggatgaagtggcctgccaacccgccacggggaacgcaaaagatgaagtcggcagcggcgctgatgccttatgggtgggtggtggatatgcgaagagcccaacggccaacgctcgtgaatgccagttaaggcccaggttgggtatcgagttatcgacatatgtggagactggttgttcacccgtgtga

SEQ ID NO: 5644 - DNA, 846 bp, Zea mays
  Peptide Sequence Number=SeqID_47423
atgtcttcgtctaactcgccctgtgccgcgtgtaagctgctgcgccgcaagtgcacgcagggatgcgtgttcgcgccctacttcccgcccgacaatccgggcaagttcgcgagcgtgcaccgcgtcttcggcgccagcaacgtctcgaagctcctcaacgacctggaccagctgcagcgggaggacgccgtaaactccctggcgtacgaggccgacgcgcgcatccgcgaccccgtctatggctgcgtggcctacatctccgtgctgcagatgaagatcaaacgggtccgcgacgagatcgccaacgcgcgcaaggagctggcggcttacattgggaccgcggcctttgcgccttacgtcgccacgccgcagtaccaccaccatcagtacgcggcaggcgccgtgcctctcgccgtcggcgtcgggccgcagcacggtcacccgcaccaccagcagcaacagatcatggtgcaccagcacctccaccaccagcagcagatggcagcggctgccgaggtgcagcagcagctcgctgtggccgtggaggtcgcgcgagagcaggatctcatgatgcggcaggccgcggtatacgcgcacgccgtgcccagcggcggccccacggtcgccgttgtgccgcccgacgcgctgccgtacgagggcggcttcctcttccagcagcagccgcccccttcgcaggcgcagaccgccgtggcgctcacgtaccagatggagcagtccccgccgtcgtcgtcctcgggccagtctcaccccgaggtgtcgcagcagcacaatacggatggcagcgacgagggcagcggtggcggtggtgtcgtgccgccggcctga

SEQ ID NO: 5645 - DNA, 606 bp, Zea mays
  Peptide Sequence Number=SeqID_47424
atgggcaagtacatgcgcaaggccaaggcttccagcgaggttgtcatcatggatgtcgccgccgctccgctcggagtccgcacccgagcgcgcgccctcgcgctgcagcgtctgcaggagcagcagacgcagtgggaggaaggtgctggcggcgagtacctggagctaaggaaccggaggctcgagaagctgccgccgcccgccggcgaccacgaggaggtcgggcggggaggaaagcggcagccgaggccgccgcaactaaggaggctgaggcgtcgtacggggagaacatgctcgagttggaggccatggagagatacatttgtttgtttgtttgttgctcgcaggattaccagggagacgacgccctgcagcttgattaacacccagatgactagcactcctgggtccacgagatccggccactcttgccaccgcagggtgaacgctcctccggtgcacgccgtcccaagttctagggagatgaatgagtacttcgctgccgaacagcgacggcaacagcaggatttcattgacaagtacaacttcgatcctgcaaacgactgccctctcccaggcaggtttgagtgggtgaagctagactga

SEQ ID NO: 5646 - DNA, 1173 bp, Zea mays
  Peptide Sequence Number=SeqID_47425
atggcacctctgtcagggccaacaagcaagagtaagaagagagctctccgacacgtcctcctcctctgcctcctcctcccatgtatctcccaaccactcccggctccttccccatctccaacggcggcgcctccggcgacgacgcttcccctctcgccgttcaacgatcgcctcgacgcggcgtacatcgcgctccaggcgtggaagcacgccatcatcgaggaccccaagaacctgaccgccgactggtgcgggcccttcgtgtgcaactacaccggcgtcttctgcacggcggcgcaggacgacccgcacatcctgaccgtcgccggaatcgacctcaaccacggccgcatcgccgggttcctccccgaccacatcggcctcctggccgacgtcgcgctcatccacctcaactccaaccgcttccacggcacgctgccgccgtccatgcagcacatgcgcctcctctacgagctcgacgccagcaacaacctcttctccggcgggttcccgtcgttcctcacctcgctgccgtcgctcaagtacctggacctgcgcttcaacagcttcgacggggacctgcccgacgccgtgttcgggcggcagctcaacctggacgcactgtttgccaacaacaaccgcttcaacgtgaccctgtcgtcgcagagcctgaccaactccacggcgtcggtcatcgtgctcgccaacaccgagctcaccggctgcctgccgccgagcatcggcgacatggccgacacgctggtggagctcatcctcctcaacaccagcatcagctcctgcatcccgccggagatcggcaagctcaagaagctcagggtgctggacctcagccacaacgagctcgccggggagctgccggagagcgtcggagacatggagagcctggaggtgctcaacgtggcctacaaccagctgtccggcgtggtgccggagagcatctgcctgctgccgaagctcaagaacctgaccgtcgccggcaactacttctgcggcgagccggtgtcgtgcctccacgtgcccctgcgcgacgaccggatgaactgcatccccgagtggccccaccagcgcacgcacgaggagtgcatcgccttcgagcaccgcccgccggtgcactgcggcgccaacggctgcattgttcatcacccgctgtga

SEQ ID NO: 5647 - DNA, 1422 bp, Zea mays
  Peptide Sequence Number=SeqID_47426
atgggcaaggcgggcaagtggctcagaagcttcctcccgggcagcaggaggggcagggacaacaaggccggggcgctcgcgccggcggcggagcccgacctggcgctggcgctgccgctgccgggagtcgccacgacgccggggtccacgcccggcgccaaggagaagcggaggtggagcttccgccgcccggccgcggcggcgtcgcccgggcccgggtcggcggcggcggccaaggacgtcgcgcggggccacctcgcgccctacggcttccttgagccgcgggtggacccggaccagcacgccatcgccgtcgccatcgccaccgccgccgcggccgaggcggccatggcggctaagcaggccgccgccgtcgccgccaggctctccatgtccgcgccggggtccaagcgcaccgtcatcggaatcgaggaggccgccgcgataaagatccaggccgtcttcagatcctacctggcgaggaaggcgctgtgcgcgctgcgcgggctcgtcaagctgcaggcgctggtgcgcggccacctggtgcggcgccaggccagccacaccctgcgctgcatgcaggcgctcgtcgcggcgcagaacagggcgcgcgtcgagcgcctccggatgctcgaggacgagaagcccgtccggacaccgcggacgacgccgggccggcgcagctcgccgcaccacccccggttccgccaccaccaccaggacacggcggaggacaacgtcaagatcgtggaggtggacaccggcgccggcggacccgaggcgcacggcacgccgcgcacgtcccggcgcagcagctgctacgcgacgccgctgtgccgcacgccgtccaagaacgacctgtaccagaagatctcgccgacgccgtccgcgctcaccgacgccagcgcgcgcacgtacagcggccggtacgacgacttctccttcgccaccgcgcgggccagcccgtaccgctacgcgccgtcgaggcagcagcagcagcagcaacagcacgacgacaagccctcggcggagtacgcgctgctcgtgcccagctacatggcgaacacggagtcgtcgcgagccaaggcgcggtcccagagcgcgccaaggcagcggctgtcagtgtcgtcggccgccgccgaggcggcctggcagcccagcgggcggcgcagggcgtctctagaggcgcaggcgcaggcgacgccggccccgcgcgggcaggcgccccgttacggtcccgcgcgcgtgcagcggtgcccgtcgcaggccagcgcgcccgcggcgtgcccctggggcgccaggctcgaccgctggagcgcgtcggtgcacgacagcgagtgcgggtccacaagcacggtgatgaccgccgccactaccacgtactgctggtcgttggccaccgacaccgccggcatggcttag

SEQ ID NO: 5648 - DNA, 483 bp, Zea mays
  Peptide Sequence Number=SeqID_47427
ccctcgctcggtccccgctcggcgcccatccccggctcccccgcccggcctacctcccgcggcctcgcccgccccttccccgcccgcggcggcggcgcccgccccttccccgaccccggcggcctcgcccgcccctcccccggcccgcggccggcgctcgcccgcccctccccggcccccggcggcctcccccttcccttccccgaccccggcagcctcgctcgccccccgcccgtcccccggccccgcggcggcgatcccgcccgcccctgctcgccggttcgcgtccccggcgcggcccccggcgcggccttcggccccggcgcggccccggccgactcggccgctcctggccggttcaaccgcccttccccccccccgttcggccgcccgttcccgtcccggcctcgcccgaccattctatcttgtgttgcgtcgtgcgcttcgtcgcgcgacgatccatttttgtttcaggttgtttaa

SEQ ID NO: 5649 - DNA, 303 bp, Zea mays
  Peptide Sequence Number=SeqID_47428
atgacccacagagtcgagcgcgaccagcgatcaagtagagacattgatgggctgaacaggtgctgcaagaagccgagcaacacaacatggcgagggacggcgctagcaggcttgcagcaagcagggagaaggacaaggcaccatcgacgatgcgcgcgcaagctccacgcgcatagcaagctatgcgatgccggaagcgacaggcaaagctctgggctgaggaggaaccggagcaggggaaggacgtcggctggcgggctgagcgagcaccagagaagggtagcggcggccagtaggatgtaa

SEQ ID NO: 5650 - DNA, 315 bp, Zea mays
  Peptide Sequence Number=SeqID_47429
atggccgcagcaagggggccgagaccgggggagaagggaagaggagggggcgagggggaagagggagagaggctcaccatggagggtgaggccggcgtcgagggggcggtcccggttggcgacgaggtggaggaggagggggaaacgagctgcacggggaagaaggagacgtgcgcgaggggtagaggggggagagagaggaaggctgtttggagagggggtggggctgatgagtgggccccaccaggggtggcggcggcggcgattccaactgaccgtgcgctgcgtgcgggagggacgcgtgggggcggctag

SEQ ID NO: 5651 - DNA, 966 bp, Zea mays
  Peptide Sequence Number=SeqID_47430
atgctcaaggagccgtgtccctatcatcaagggcccgtcaagcacacccttgaggagtgtgtcatgcttcgacgacacttccacaaggccgggccacccgcggagggtggcaaggctctcgacaacgctaagaaggaagatcacaaggcaggagagttccccgaggtccgcgactgcttcatgatttacggcgggcaagtggcaaatgcctcggctcggcaccgcaagcaagagcgtcgggaggtctactcggtaaaggtggcggcgccagtctacctagactggtccgacaagcccatcaccttcgaccaggccgaccattccgaccacgtgctgagcccggggaaatacccgctcgttgtcgaccccatcatcggcaacgtcaggctcaccaaggtcctcatggacggaggcagcagcctcaacatcatctacgccgagaccctcgggctcctgcggatcgatctgtcctcggtccggacgggcgctgcgcctttccacgggatcatccccgggaagcgcgtccaacccctcggacaactcgatctacccgtctgcttcgggacgccctccaactttcgaagggagaccctcacgttcgaagcggtcgggtttcgaggaacctaccatgcagtgttggggaggccatgctacgccaagttcatggccgtccccaactacacctacctcaagctcaagatgccgggccccaacggggtcatcaccgtcgggcccacgtaccgacacgcatacgaatgcgacatggagtgcgtggagtacgccgaggccctcgccgagtccgaggccctcatcgccgacctggagagcctctctagggaggcgccagacgtgaagcgccacgccggcaactttgagccagcggagacggtcaagtccgtccctcttgacccctgcaacgacgcctccaagcagatccggatcggctccgagctcgaccccaaatag

SEQ ID NO: 5652 - DNA, 1125 bp, Zea mays
  Peptide Sequence Number=SeqID_47431
atgggcagccggcaggcggcggcgttcctgctcggctgcgtcgccgcgctcaccgtcgtcgtgctgctgctgcagcgccgccccgaggagctcaccagcagggcaccactgctgcaagtcttcggaggcggaggggcagggccgtcgccgtcgccgtctcagtccagctcctcctcaccaccagcagatagcaataataccactgccgcagccggcgatccacgccttccgccgccgcccaaccatggcgaggacgaagacgaagacgaagacgaagaggagttccgcgggctcgcggcggcggtgtcgcgcgcggcgacggcggacgaccggacggtgatcatcacgtgcgtcaaccaggcgtgggcggcgcccggctcgctgctggacctgttcctggagagcttccgcgtgggcgacggcacggcgcccctgctgcgccacctgctcatcgtggccatggacgccgccgccatggcccggtgccgcgcgctccacccgcactgctacctctactccccggcccgcggcgtcgacttcgcgcccgccaagcccttcctgtccagggactacctggagctcgtctggagcaagctcaggctgcagcgccgcgtgctccgcctcggctacagcctcctcttcaccgacgccgacgtgctgtggctccgcaacccgctcaagcacgtcacggcgtacgccgacatgaccgtctcctgcgacgtcttcttcggcgacccggacggcgtcgacaacttccccaacacgggattcttccacgtcaggcccaacagccgcaccatcgccatggccgccgcgtggcaccgggcccgggacaggttcccgggcaagaacgagcagcccgtcttcaacgccatcaagaagggcctcgtcgccgacctcggcctccgcctgcagtacatagacccggccttcgtcgcgggcttctgcagctacggcagggacctcggcaaggtctgcaccatgcacgccaactgctgcgtcggcctccgcgccaagatcaccgacctccggaccctgctccacgactggaagaactacaccgccatgccgcactgggccaagcaccaggccaagtggaccgtccccggagcgtgcatccattga

SEQ ID NO: 5653 - DNA, 1737 bp, Zea mays
  Peptide Sequence Number=SeqID_47432
atgcgtcggggctcgctttcgctgctgctgcttgcggcggtggcggcggtagcggccaccgcggttcccgccgagccggcgtcgacgctgtccgggccgtcgcggccggtgacggtggcgatcggagacaggggccacgcggtggacctgccggacacggacccgcgggtgcagcgccgcgtcacgggctgggcgcccgagcagatcgccgtcgcgctctccgcctcgcccacctccgcctgggtctcctggatcacaggggactaccagatgggcggcgccgtggagccgctggaccccggcgcggtgggcagcgtcgtgcggtacggcctcgccgccgacgccctcgaccacgaggccaccggggagtcgctcgtgtacagccagctgtacccgttcgagggcctccagaactacacctccggcatcatccaccacgtccgcctccagggcctggagcctgggaccaggtacttgtaccggtgcggcgacccggccatcccggacgccatgagcgacgtgcacgcgttccgcacgatgccggccgtcgggccggggagctacccggggcggatcgccgtggtcggggacctcgggctcacctacaacaccacctcgacggtggaccacttggtgcgcaaccgccccgacctggtgctcctcctcggcgacgtctgctacgccaacctgtacctgaccaacggcaccggggcggactgctactcctgcgccttcgccaagtccacgcccatccacgagacgtaccagccgcgctgggattactggggaaggtacatggagcccgtgacgtcgagcatcccgatgatggtggtggagggcaaccatgagatcgagcagcagatccacaacaggacgttcgcggcctacagctcgcggttcgcgttcccgtcggaggagagcgggtcctcctcgccgttctactactcgttcgacgccggcggcatccacttcgtcatgcttgcgtcctacgccgactacagcagatcaggtgagattttagggcctgggcccgtcgactgctgtctcacaaagcagtgcagtgcaaatcatctgacagcaattaaaacaacttggagtgctcgctcaggtgcgcagtacaagtggctggaggcggacctggagaaggtggacaggtcggtgacgccatggctgatcgcgggctggcacgcgccctggtacaccacctacaaggctcactacagggaagccgagtgcatgagggtggagatggaggagctcctctacgcctacggtgtcgacgtcgtcttcaccggccacgtgcacgcgtacgagcggtcgaaccgggtgttcaactacacgctggacgcgtgcggccccgtgcacatctcggtgggcgacggcggcaaccgcgagaagatggcgacggcgcacgcggacgaggccggccactgcccggacccggcgtcgacgccggaccccttcatggggggccgcctctgcgccgccaacttcacgtcgggccccgccgcgggccgcttctgctgggaccgccagccggagtacagcgcgtacagggagagcagcttcgggcacggcgtcctggaggtcaggaacgacacgcacgcgctctggcggtggcaccgcaaccaggacctccatgccgccgccgccgccaacgtcgccgccgacgaggtctacatcgtcagggagcccgacaagtgcctcgccaagacggccagattgttggcctattga

SEQ ID NO: 5654 - DNA, 1728 bp, Zea mays
  Peptide Sequence Number=SeqID_47433
atggagaagaggatccaaggtgctacaaaactgctggatggtagtttggagcgctgctttgtggatggtctggaacaccgtgatgctaaagttatatacaactgtttgcgtgcttatgctgcaattgacaatacatcatcagccgaagagctttttcgtacaacagtggtgtctccattgatccagaaaatagttcctcaaaactatgcaagagctgttgctggggcatcatctgatgagctagaagaggattatcaacagataaaggcatgcgtagaaaaagattgcaaatttatattggaaatatcttcgtcagaaaactctggattgcatgtttttgattttctgggtaattcaatactcaaagaagtcctttctgcaatccagaaaggcaagcctggggccttttctcctggaaagcctaaagaattcttgaggaactacaaagtgagcttaggatttcttgattttcttgaaggctactgcttctccaagtctgctgtaacgaagttacgctatgagcctgcttacacagatttcatgcgacagtggaatgttggtgtctacttttcgttgcgatttcaggaaattgcgggtggccttgattctactcttacaaatacctttagtcctactggattgaatgaggctcaacagaaaccgttgctcttgaaacaaagtattaagctcttagaaagtttggattcatgttggagtgatgaggttcttgtattctctcactgcgataaattcctccgtctgtccttgcagcttatttcaaggtatacaacatggctttcatgtggtttatcagcacgtaaagcttctgacaggagcccaaattcacctgcagatgctgaatgggcactgtctattcctatagaagatttcatatattttatgcttagcttgaaatttctggagtttcgaagtagttataagatgactagttgcttcagaagtgctcaagagacatgtactggtgttggttcagtggaaaaagaactgcagtttgtactttgtagtccaatttgtggcaactctgagataatgcatgatgtgcatgctgtaattggtgagctttcagaatcaggcagctttattggacatgtgaatcagtcactagggtcatgccccattgaagtatttaatcttgtgaaaggaagtatattgcaagctgctgaacctttaaaggagctgttgcctgcaataatggatgtcatgattggaatcatagttaagaagtctaatgaggacctgaagcacctgaaaggaataacagcgacatataggatgacgagtaaacttccagtcaggcattctccatatgtatcagggattttacatccactgaaggtgtttcttgaaggggaccgtatgcactatctatcagaagatgataaaactaagttgtgtcgtgggtctgcaaataagattactgcaacctactatgacttggtctctgaagttgtcactgtggcaaggaaaaccgagtcttcattgcagagactgcgccaaggtgcacaaaggcgagtaggagctagtacagatgcctcagatagcatcatatctgatacagacaagatctgtatgcagctatttcttgatattcaggagtacgcacggaaccttcgtgcgataggaatagacgcgagagagattgattcctacagagctctatggcagtgtgttgccccaaaggacaggcacgagaacatccagttttga

SEQ ID NO: 5655 - DNA, 426 bp, Zea mays
  Peptide Sequence Number=SeqID_47434
atggccaggccagggggcgcgaggaggtgggggcgcgccacgccaggcgggctggccgcgccggccacgccgactgccaggggccgcgtccgcacgccaccggggccgcacgcccgcaccggctggccgcgggccaccgcgcactggcgatccgcaccgaggccacgcgctcgcgccgccggccaccgcgtaccacgagccgtcgcgacgccgtacactgcaggggggggagaaagaaggcacgatgtccagggggagagcacggaacgacggccagagaaaaagaaggacagggggagagaggggctacgcaggggcggttggggaagacgtgggaggcttgtgcgggagagatggttccctgggagggatgacgcgtgggacccgcacacaggcggcggtggctggggcgtgcccatgctctag

SEQ ID NO: 5656 - DNA, 219 bp, Zea mays
  Peptide Sequence Number=SeqID_47435
atggcggctgtcaccggagctacggatggacgggggaggatgggggtggagggggagggagcgtgcttgcctggacctttggagcggcggtggagggaactggagaccaaagcgactgtcgccggggccgtgggcaagcgggggcgggtggggtttgggagggaggatggagcgcgagatatttatcatttagctcatcgtaaaaagggagtcatctaa

SEQ ID NO: 5657 - DNA, 186 bp, Zea mays
  Peptide Sequence Number=SeqID_47436
atggctcttccccttcccccctcatccgtttttccttgctgccatttagggtttaggacatggatgcacccgattttacctgccctcttctatgcctgtgaaagagtcatcaggcaccccttctctataactctagcaccaggatataacgaactacttgactatgcatatccgcacgccgggtga

SEQ ID NO: 5658 - DNA, 417 bp, Zea mays
  Peptide Sequence Number=SeqID_47437
atggcgctggcagttctcaaagcaacgtcggatccaaatgaaagggcagaacagagagaagtggctgttgaaaggaagaagaatataccgctcacacgaagtaaaaaaaaagaggggctacgatctccaaaaatcgtaagtacgatgtacagttcctcttcatcttctaaaaaagaattatgttggcggtgcgcactcgttctggtcagggtcgcgcgctccatggcggagacgcgaccggggccgtcgaggccaggggccaccacgcgcgctccatggcggagacgcgaccgggaagccaagcccgggcaggggctacgcccacgctcgcgccgctgtgcgaggccgcgccgtgcgccggccgagcacgccgatctgacggcgggccgcgccgagcgccgtattggccgcgcctag

SEQ ID NO: 5659 - DNA, 1143 bp, Zea mays
  Peptide Sequence Number=SeqID_47438
atggctcttgacgacttccatttcctcctcctcctttcgctgctgctcctgcttgatttgagcagggattgcgggaagcaagtctacctaggtggttttgacactgcgcacgcagccgcgaggttagggagcgtttgcttgtttgaattcgcgtccatttgcatttctgtgatcgataggcgcgttgacacggtcaagtttggatcaagcagggcatacgatcgagctgcgatcaagttccgcggcctcgacgctgacatcaacttcagtctgagcgactacgaggatgatttgaagcagatgaggaattggaccaaggaggagttcgtgcacatactccggcgccagagcacggggttcgcgaggggaagctccaagtaccgtggcgtgacgctgcacaagtgcggccgctgggaagctaggatggggcaacttcttggcaagaagtacatctatcttgggctctttgacagcgaagttgaggcggcaagggcttatgacagggctgcccttcgcttcaatgggagggaagctgttactaactttgagcctagctcctacaatgcaggagataataacctgcgtgacaccgaaaccgaggtatctgaggtgtatctcatggttctctctacgttgtcagcaattgatgatggtgatgccattgatttggatttgcggatttcacagcctaatgtgcaagaccccaaaagggacaataccttagctggcctccagccaacatgtgattcccctgaatcttcaaatacgatggcttctcagaatcatgaaagattaatcatgctcgccgatatccaatcttggttgtttgttcgctctgtttcctgtgaacgacttaaaggtggaaacgttcactgtggtcaaaacctgacaaacaaagctcatgctcgtgctgctgcgatcctgcaggtccaggaaaggccggtggagcgaaggcctgagctgggcgcccagccattcccctcatgggcatggcaagcgcagggctcccctcacgtgccgttgcaccactctgcagcatcatcaggattctctaccgccgccggggccaacggcggcatgcccctgccgtctcacccgccggcgcagttcccgactactacaaacccgttcttcttcccctag

SEQ ID NO: 5660 - DNA, 192 bp, Zea mays
  Peptide Sequence Number=SeqID_47439
atgggaacaggccgagctgctgtgctgctgccgcctctttgggctttggctgtgttgctggtgctgctgaaacggtggagtggaaatgtggagtggactacgggaactatgggtgaaaaacaggtcttcttgaaagtgctgctggttgaattcacgggtagtattggagtatcagacaaaatagctcagtga

SEQ ID NO: 5661 - DNA, 138 bp, Zea mays
  Peptide Sequence Number=SeqID_47440
atggatcagctgaccaagctcgaactaccatcacctccaaaaaagtattggttttttgcaagcattagaagagctccagcactttttaatataaaagccttttgtgtacatatgaacccactgttggagcatttctaa

SEQ ID NO: 5662 - DNA, 486 bp, Zea mays
  Peptide Sequence Number=SeqID_47441
atggctcctcaataccaagctgcgaccttgattgcctctccatcttatccaagtgccattgcttggtcaagcgacaatcttgtggctgttgcatctggtcatattgtaactattctgaatccatctgcgcttgatggaccccgtggattggttggactttgtcgcagtgacccttttcctataggactggttaatagagaagcggcacaacaatcaagtgaagcgcaactcaagaggccaaggcgggcacaatactgctcaatgaggagtggtcgcctactcacctgttcagccattgaacagacaacagaggaggacattagcgcgctggaggggggtctctgtagactacatccgtcgcgtgatgcagggggcgcaattgctgctcgaggagagggccggacggcgggagaggagggcgcgacgatggagaaggggcggcgacacaagagaaggggtggcggcgctggggaagggtgctcgtga

SEQ ID NO: 5663 - DNA, 1350 bp, Zea mays
  Peptide Sequence Number=SeqID_47442
atggaccccgtggattggttggactttgtcgcagtgacccttttcctatatgactggttaatagagaagtgcgagatggtgtggatggaccttcattctggttggcacgactacttcaagagccgtcttcacggcctgcaaggcgagagctttccatacagacacatggacgtcacagcctcacagggcgtggcgcatgtcgtccacactcctacattgtgcactggtgccacgcctggaatatctggtcctaacaaccaacgtattcagggcccctcagaggagtcgcctgccggagttggtcagggaggagtgaaggagttgctggagttggtcaaggactggaggagcaggcgatctcttggagccatgtttattgtccacttccttagcgcgtgtttgctggctgtttgcactatggatggtcatgtgaagctttacaggtcaccaatttgggagctatgtgatgaatgggttgagaagaatacaaatactggggagacagaggttttaggatctgcttatgaattgcaagaatctctttatttcaggtgtcctggacagagaaaactaaagcgatcaagagttgatggttttatttatgacgtcaatgaagttgatttagatgcatcaaaggatgcagacttctcgatcgaaccatgttctaaatcaaagaagaaatatttgaaaaagactgtaaaacccaggcatgaagtagttgctgtaaatgaacgaaacaacacaggaaatattaaaggatcattgtcctccaatggagaaaacaaatcccttcctcttatcacggcaaaacagtatgcttgtcgtgctgcacatttgtcttcccttgtagtttcatggtctccagttgtgtcatcaagtgataaaacatcttgtttattgaggcattggtgcattattgctgttggctctaaatccggaaatctttctttttggaaactacctaagccagaatattacacaatagatgctggcgtggttaccagtgatccaatgctcatcggggttttgcaagctcacaaatcatgtgtcagtgtcatagcttggcaagttctttctgcgggctcttcaaaatcctcgttgcttttagctactggatgctcagatggaagtgttaagatatggttagggaatattgaagggttaaatcaatgtgcaagtggagaagtgccatttgcgttagttgctgtggtcgccactgatttatcatctccagtgtcatcaatctcattagccatacctgcccagtctcaacacgagcatcaaaacttgttcccgaacattgggttgattgaagccattggattgttgaaagttggagagtctaagtaa

SEQ ID NO: 5664 - DNA, 1452 bp, Zea mays
  Peptide Sequence Number=SeqID_47443
atgggcgggaccggcgcgagcagccggcggaggtgggcgcggcggtccttccggacggcgggtggtggaggaggaaggggaaccggtggggttgtcaggcggaccgtcgcggcgtcgacgaccatggctccgcggggtacccaagggtttgctcatgtggacaagcaacagcgtcatgttcatggagtattatcagatttcagatgcaacagtggatcaacagatcatctttctttgtatgtcgaggaatttaagcataagagctcacacagatcatctgttagatgtcttcctagtgcacagggaaatgtaacagaaatcagtcgcatgcaacctgttgcaaggaaagttcaggtagatatgaccttcaatgataaaggattgtgtcgtgctagcagaactgtttcaggaatgcgaattcaacctaaatattatatcagcagtcccaacaacaatttgaagaattctcctactgtgaagagttatagtgggatgagtgatttcaattatcaactggtcagaagtgctaaaagtgacagcattgatgatctgcaagtatcgtcttcaagtgacactagtgatagcttcaacttatcatctctgggtgtaatagatggtgatgaatggaatacgaccttcaagagggtgtactaccctcatgctgcatgcctagactctatatctgtcatatacgctaaagaaataggtcaggttagcccaatatctgttcttcagcctctatctgaagattgctcagattctgaaaacatcagacacgagcctgcagatccatatgatctccaactcagacttgagcttggcacatctgcaccaagggagactgctgcagaggcaagtaattttcgcggaactagtgtctgtttaacctccgaagtgcagtcaagcgatgagaaacccatacaactggttgaagacatccttgaagaatttgaagatgatgaggaaagggacttctcttacttgctggatatactgattgcttctggaattcatggaactgccgaggatcaaatgtacaaggtgtgtcagtctctcgaccaccctgctggtgatgacgtatttgagaagctggaaaagaagtacaacaaagttgttcagtggtcaagatcagacaggaagcttctattcgacatggccaacacaatactatcacagatccttgccccgtgcttgaacatgcaaccttgggtctataccactaggaacttggccccactttggggcccagatggtcttctggagaaagtcttgcagatgctagttcagagacgggaacaccttgcacccagtgagactaagccagagaagaaaggatttgatccgaagtggccaggtttagcagactgcatcgacagggcaggaagggacattgagagaatggtaaaagatgacctgttggaagagctggtcgttgagctactgtccagttag

SEQ ID NO: 5665 - DNA, 243 bp, Zea mays
  Peptide Sequence Number=SeqID_47444
atggggcgatatctaggttcctgcgaggaagaagatgatctacaaaaatcagtttgtatggtcggtttgaaagatctcaatgatgtctctctagaccacaacacaaggctgactaatttgtcagccactgagcatgaagactacatgaagaaggtggaagaagagttcaagcgacaacgagctcagaggcgcgagatggcggagaagtggtacctctcgcactttgggatagatcgccactag

SEQ ID NO: 5666 - DNA, 645 bp, Zea mays
  Peptide Sequence Number=SeqID_47445
atggcgcctcctgttgacgtggtcggtccgcgccctaggttgggcgatgtggaggctcctccaaggtcgaggttgagtctgtcttccgtggccgaggtcgagtctgagcctctgggtcgggcgaggcggagaccgtcggctgaggccagggctgagtccgagccctggggtcgggcgaagcggagttcgtcgtcttccggggctgagcccgagtccgagccctggggtcgggcggatcggagttcgccgtcttccggggctgagcccaagtccgagcccctgggtcgggcggagcggagttcgccgtcttccggggctgagcccgagtccgagccctgggtcgggcggagcggagttcgccgtcttctgggactgagcccgagtccgagccctgggtcgggcggagcggagtttcctaatgtgcctgaggccgggcctgactgcctgtcagcctcactctgtcaggtggcacagcagtcggagcggcgcaggcggcgctgtccttctgtcaggccggaggaggacggcggcggaggcgcgcggcacgtggagcggtgggagggctacgtggactggaggaaccggccggcgaccaggggccggcacggcggcatggccgccgcctccttcgtgctcggtacgtaa

SEQ ID NO: 5667 - DNA, 3378 bp, Zea mays
  Peptide Sequence Number=SeqID_47446
atggcccatcctgttcggcttctctgtctcctcgccttctttggcagcctgcatgtggccgccacatccaacgagagggaaaacgaccagcaagcactcctgtgcttcaagtcccagctttccggtacagtcggcactctctcctcatggagcagcaacacatccatggagttctgcagctggcacggggtcagctgcagcgagcattcacctcgccgtgtgatcgcgctggacctcgcatcagaaggcatcacaggtaccataccaccctgcatcgccaatctcacctctctcacaaggctgcagctggcaaacaacagcttccgcggcagcataccgccggagctcggactcctcagccagctccgcatcctgaacctgagcatgaactctctagaaggcaccatcccttccgaactctcttcgtgttcccagcttcaggcccttggactgtggaacaactcccttcgcggcgaggtaccacctgccctaggccagtgcgtccagctcgaggagatcgacctcagcaacaacgatctagaagggagcatcccctcccgtttcggggctcttccagagttgcggacactcgtcctcgctggcaacaggctcagtggcgccatacctccctcgttgggccgcagcagcctctccctcacgcacgttgaccttggggcaaacgctctcaccggcgggattccggagtccctggccggcagctcgtctctccaggtgcttaggctcatgaggaacagcctcggtggagaactgccacgggctctcttcaacacatcatcgctcatcgccatctgcctccaggaaaacaagtttgttggccctataccacctgccactgccgtcgtctctcccccggtaaaacaccttcacctgggagggaactttctctccggaacgataccggcctcgctggggaacctttcttccctgcttgaccttcgtcttactcggaacaggttgcatgggagaatcccagagagcataggctatctgccagcgctaagtttactgaacctgaatctgaacaacctgtctgggccagtgccactctccctgttcaacatgtcctccctgagagctctcgctatggggaacaactcgctcagcgggagactgccgtcaggcatcggctacacgctaccgagaattcagatcctcatcctcccgtccaacaggtttgacggtccaattccagcttctctcctccatgctcaccacatgcagtggctctacctcggacagaacagcctaaccgggcctgtgccgttcttcggaacgctgccgaatctggaagaactccaagtgtcgtataacctgctggacgcgggggactggggcttcgtctcttcgctgtcaggttgctctagactgactaggctctacctggccgggaacagtttccgaggggagctgccgagttctatcggcaatctttctagcagcctcgagatactgtggctacgggacaacaagatcagcgggcccataccgccggagctgggaaacctcaagaacctcagcacgctgtacatggatcacaaccgcttcactggtagcataccggcagcgatcgggaacctgaaaagactggtggttctgtccgctgcacggaacaggctctcaggcaccatccctgacgcgatcggcgacctcgtccagctgaccgatctgaaactggacgccaacaacttgagtggcaggatacccgcgagcataggacgctgtactcagctccagatactcaatcttgctcgtaatgcgctggacggtggtataccgagatcgatcctcgaaatatcctctctttctctagaacttgacctgtcgtacaaccgcctggctgggggcatcccggatgaaatcggcaacctcatcaacttgaacaaactcagcgtctcaaacaacatgctgtccggcagcatcccgtccgcgctcggccagtgcgtgcttctggagtaccttaagatgcagaacaatctctttacaggaagcgttccacagtcgtttgcaggactggtcgggatcagagagctggatgtctccaggaacaatctgtctgggaagatcccagggttcctcacgtccctgaactatctgaactatctcaatctatccttcaacgatttcgacggagcagttccggaaggcggcgtttttggcaacgctagtgcggtgtcaatcgaaggaaatggtcgcttgtgcgctgctgttccaacgagaggtgtcaccctttgttcagcgaggggccagagcaggcactatagcttggttctagctgcaaagatagtaacgccagttgttgttacaatcatgttgctttgcctggcggcaattttctggcggaagagaatgcaggcggcaaaaccgcatccgcagcaatccgatggcgaaatgaagaacgtcacatacgaagaaatcttgaaggcgacagatgcgttctctcctgctaacttgatcagctcaggctcatatggaaaggtttataagggtaccatgaagcttcacaaaggaccagtggccatcaagatttttaacctcggtatacatggagcgcatgggagcttcctcgcagaatgtgaggctctcagaaacgcccggcaccgaaatatcgtaaaagtaatcacagtatgctcttcagtggatcctgctggggctgacttcaaggccatagttttcccatacatgctgaacgggaacctggacatgtggctgaaccagaagacccatcaaaatagtcagagaaagactctgagcttaagccaaagaatcagtgtgtcactggatgtagcaaatgctgtggactatctccacaaccaatgcgcgtcgccattgatacactgcgacctgaagccaagcaatgttcttttggaccttgacatggtggcatatgtcggcgactttggcctagcaaggtttcaacgtgatacaccaactgcccatgaaggcagctcggcgagctttgctggcctaaaaggatccattggatatatcccaccagagtatggcatgagtgagggcatatcaaccgagggtgatgtctacagtttcggagtgctcttgttggagatgatgacaggccgccgtcccaccgatgaaaagttcagtgatggtacaaccctgcatgagtttgttggtagagcgtttcgaaataataataataatatggacgaggttgttgatccagttttgatacaaggcaacgaaaccgaagtgctgcgtgactgcataattcccttgattgaaatagggttgtcctgctcggtgacatcttccgaagaccgaccagggatggacagggtttctaccgagatccttgcaatcaagaaggttctctcaaacatacatgataaattgaaataa

SEQ ID NO: 5668 - DNA, 1134 bp, Zea mays
  Peptide Sequence Number=SeqID_47447
atgatgtacaggaggacacgagcacgatcgaggacatccatcgagaaggaggacacgagcacgaggcgggagatgatggagcagaagaagagcaagttgagcgggccgtgcacggcgacgaacccgatcgaccggtgctggcgatgccggcaggactgggcgacggaccgcaagcggctggcgcggtgcgccaaggggttcgggcgcaacaccaccggcgggctggccggcaagttctacgtggtgacggacggcaccgacgacgacgtggtgaacccgcggccgggcacgctgcggtggggcgtcatccagatcgagccgctgtggatcaccttcgccaagacgatgatcatcacgctcaaggaggagctcatcatccgcggcgacaagaccatcgacgggcgcggcgcgcaggtgcgcatcgccaacggcgcgcagctcacggtgcagttcgtgaacaacgtcatcatccacaacatccacatcaacgacatcgtctcgtccaacaagaacggcggctacgtccgcgactcggccgaccacttcggctggcgcatcgtctccgacggcgacggcgtcaccgtcttcggctccaccaacgtgtggctggaccacctctcgctctccaactgccaggacggcctcatcgacgtcatcgccaagtccaccggggtcaccatctccaactgccacctcaccaaccacaacgaccgtcatgctcttcagctccagcgacaagcaccccgaggaccagaggatgccgaggtgccgctggggcttcttccacgtggtcaacaacgagtcaacgactacacgcactggctcatgtacgccatcggcggcagcaaggcccccaccatcatcagccagggcaaccgctacatcgcgccgcccaacttcgcggccaagcaggtcaccaagcagcacgacgcgccggagtcggagtggaagaactgggcgtggcactcggagaacgacctcttcatggagggcgcctacttcaccgtcaccgccggccagatcaacaggcagttgaacaagaaggacctcatcaagcccaagcctgggtcatacgtcaccaggctcacgcgatacgccggctccctcgcctgccggcccggcgagccctgctag

SEQ ID NO: 5669 - DNA, 198 bp, Zea mays
  Peptide Sequence Number=SeqID_47448
atggcgccgagcttggtatcacatcagcgccacgacgtctgtttgtgccagcgcaacacgtacctcggcgccatagcctatgacgccgagcaaaggccgcagcaagccgcagcgaacaagccgttcgtctccttcctcgacgccacgatcgagaaatggcgctcgccgtcctaccttcatatacctagaaagatatag

SEQ ID NO: 5670 - DNA, 185 bp, Zea mays
  Peptide Sequence Number=SeqID_47449
atggcccccagcgtggcgagcctgagcacgttcctgagcagcacggcgagccagaggtggcccgaacttggtgctcagcaccatcatcggcatcagccggacgcggccaccacgcgggagacgcactccctcagggtcacgaacgccgcggtcagggatgcccagcgcaggtcacgagcacgaag

SEQ ID NO: 5671 - DNA, 246 bp, Zea mays
  Peptide Sequence Number=SeqID_47450
atggcgctggtgatacactctgctttcttcgccctcgctctgcactcgacgtctttggtcgcgaccccagggaatgaggcaaggcaaagactatccgagtatttacgctccaaggtaggggcgcatgcaccgaggaacccggcggccgttaggtggttgagtagtcgcgagaatcatggcatcaagcatcggatattcatggaggaggagttgctaaccgtcgaggtccacacgtcagcggcgtaa

SEQ ID NO: 5672 - DNA, 294 bp, Zea mays
  Peptide Sequence Number=SeqID_47451
atgcagcgtcttgacgagccctccccctgcttcctcgccagccccatcaaccgtcggatcgccgccaccttcctggtagccattttgggaaagagatgggaatgtggtactctagaagagtcaaacggagggctcgaggcgaaagcgaaggcggaagagatggaggacacgaggtacacctccgacgccatcacccgtaatgctgacccaaagttgcaccagtcggatgccatggtcatccccgccttcatcgctcatgtgccggctgaaagtcgcctagaggggggtggatag

SEQ ID NO: 5673 - DNA, 609 bp, Zea mays
  Peptide Sequence Number=SeqID_47452
atgaggtcttcagaggtgtcgtcgcggctcgtgcaggagctcgtgctatacgccgccagcgtcgcgctcagctgcctcgtcctcttcgctggcctccgccacctcgaccccaactgtgccgcttcccagaaggcgcagcagaagaagaaggagatcaccaagcgcctcggccggcccctcgtctccaccacgccctatgaggacgtgattgcgtgcgacatcatcaaccccgacagcatggcgttgttcgcgtcggcggcgtcaaccggtcgcgggtcgcgggtggagaaggtgaggaggatcttcgagcgcttcgacaccaatggggacggcgggctggaccgcaacaagatggccacccctcatcgtcgccatcaaccctcggggcaagttcagcgaggaccagatcttcgccatcctcgacgaggtgttccgcacctacatcgagttcatcctcctcgacggctgcgcgggggcggctgcgcggggaaaggaggtgggggcggctgcggtagcgggagtgggatcggacgggtgggggatggacgcaatcggacggttggaatacagcgagggcacgggttgtgccttgtctacactatcatctaa

SEQ ID NO: 5674 - DNA, 120 bp, Zea mays
  Peptide Sequence Number=SeqID_47453
atggccgctgcgccacgtcgccgacgcaagtgggcatggcatagggcgaacagtggcttcgagctcatccgcggtgaggatcttttcaccatgaagcgttatccgggcaacgggcattaa

SEQ ID NO: 5675 - DNA, 723 bp, Zea mays
  Peptide Sequence Number=SeqID_47454
atgggtcggcgcgagacggagcgcgaaggggggaagaagccggagggagacaggcgtaaaagggggaacccacggccttcgtgtttgtcccgcgcccaggtcggccctagattgggcgaggtggaggctcctctgaggtcgaggtcgagtctgtcttccaaggccgaggttgagtccgagcccctgggtcgggcgaggcggagaccgtcggctgaggccagggctgagtccgagccctggggtcgggtgaagcggagttcgtcgtcttctggggctgagcccgagtccgagccctggggtcgggcgatgcggagttcgtcgtcttccggggctgagcccgagtccgagccctggggtcgggcgaagcggagttcgtcgtcttccggggctgagcccgagtccgagccctcgggtcaggcgatgcggagttcatcgtcttccggggctgagcccgagtctgagccctggggtcgggcaaagcggagttcgtcgtctttcggggctgagcccgagtccgagccctggggtcgggcaatgcggagttcgtcgtcttccggggctgagcccgagtccgagccctgggtcgggcgaggcggagcttcctatggcgctcgtggccggacttggctgctgtcagccgcactttgccgagtggcgcagcagtcggagcggcgcaggcggcgctgtccttttgtcaggccggtcagaggagcgacgaagtga

SEQ ID NO: 5676 - DNA, 447 bp, Zea mays
  Peptide Sequence Number=SeqID_47455
atggccgcggagatcggacactgtgtctataacaccctggatttgaggtctgcgctcaccggagcaatatttgcgcaaccgaagtcccaccgccgtcgacctgaggctccatcgcacccccgccgttctccaagcgttcctgagttcgcactcgaggtgagcacccttcctatgcctttatttcgccaagaattgccccagctcccgcgtaattgctcgccggagttagctgcgccgccgcggaaccttttctactgcgatctgcattctctggtgcccctgtgccggttctgcgcccacggtcgggttcgccgtgttgcgctgaacttgtttgaccttttccttaagtcaccagagccccgccgtggccagccttctcgtctccggcgaactctcgccgcggggccgagcggcgccaccacgcccaagccagcccctggccgttag

SEQ ID NO: 5677 - DNA, 942 bp, Zea mays
  Peptide Sequence Number=SeqID_47456
atgcatatcacacgccgccgttaccgctgggtgaaggagtgggtcccgcaagatctggtcgtcaccggaggcccctgcacgctctacaagtgggtgcgagctacgaaggatgtgggaagacatttttttgatgtaggggctcttaagaagcacgctcatgtccatggggagaggcaatatatctgccactatgagaactgtggcaagaaattcttagatagctctaagttgaagagacattttcttatccatactggagagaagaattttgtgtgcccacatgaaggttgtgggagggcattttcgttggattttaatttaaaggcacacatgaaaacacattctgcagataactatcatgtgtgccagtacccagaatgtggccgaagatttacacaagaatcaaaactgagagctcatatcagggcacaacatgagaaaaatccaggtgcgtcatcaatgaaccacagtgcaattggaggtccgcaccagccccctaggccagcgaaggtctcagcagcacctccagctccctcagctgagcgcccttacgtctgcccctacgatggttgtgacaaggcatacatccatgagtacaagttgaacctccatctgaaaaaagagcatcccaaccactaccaggatggtggtccaaatggtgctgccgccccttcaaagcgcagcatctcgaagagttcccacaggagcaagctggacatcacctctaggatgccaccggccaacatccccaagcacagagggtatgcaacaccattgccagctgtggtgagcctccctgaggagcagcagttgctaaggaaagtggtgtacgaggatgacagcgaggagactgaagaagagggggataacaatggcgaggacagatggaactacaagagagctgctagcagcgacgacgaggaaaccgaagacgaagaatga

SEQ ID NO: 5678 - DNA, 344 bp, Zea mays
  Peptide Sequence Number=SeqID_47457
gtcgcgaggtgatctgctacgagagccctcggccgccggcggggatccaccgcgtggtgttcgtgctctaccagcagacggcgcgcggcgccgtcgaccagccgccgcttctccgccacaacttctgcacccgcagcttcgccgtcgaccacgggctgggcgcccccgtcgccgccgccttcttcacctgtcagcccgagggtggcaccggcggccgccgccacgtcctccgccagccagcaaggtcaccagcgcctatagatgtccaaacagtacgggccgtccgtttggcccgtgacccggcacgattttggcccggtccaagcacggtccggcacggttaa

SEQ ID NO: 5679 - DNA, 708 bp, Zea mays
  Peptide Sequence Number=SeqID_47458
atggggcatcgactaagctttataggggcgagcagagcaatccccaacggaattctgaagcttgcggcgagcggcagcaacaacccagcgcggaagctacgggggagatattccaggcgaggcgatgcgttcgtgtcggaggttctgttggtagggatagaattgactttaggggcccacacgaggaggtgggccggcagggaaggctttcagcccaagcagccatgcagagggggagagatgagtgggccaaaaggaatgaagtcagcccacgtgcagtttccacaaatacacaataaagtggcatcactaccgaaacagactactttgccgagtgccgccttagaaacactcggcaacgacatctttgccgattgccacctcttactccgcaaaaagaaaagtcactatgacgcaacaagtgacgacgataaagcctttgccgagtgcctgattgcctggcacttggcaaaggaagctctagtgggcccccacggtagcctctgtgatgagagtcacaagctagcactcggcaaaacgattttttgccgagtgcctgcctacttggcactcggcgaagggagcacctgtggacccctttgccagtctctatgcctagtgcgttggctggtactcgacaaaaggagcttctttatttttatattttttgtcgagtgcctgcctacttggcactcggcaaagagctag

SEQ ID NO: 5680 - DNA, 2526 bp, Zea mays
  Peptide Sequence Number=SeqID_47459
atgacgtcctcgtacgagaaggccacgtcgggtgtcctgaggaacgcggcggcgctgctcgacgaaatgcagctcatgggagaaacgcagggtgccaagaaggtgatcaactccgagctgtggcacgcgtgcgcggggccgctggtctgcttgccgcagcgggggagcctcgtctactacttcccccaggggcacagcgagcaggttgctgctaccactaaaaagatacccaactctcgcatcccaaactacccgagtctcccgtcgcagctgctatgtcaagtccacaacatcactttgcatgctgacaaagaaactgatgagatttatgcccagatgaccctgcaaccagtacactcggaaactgatgtgttcccaatcccaacgctcggtgcttataccaaaagcaagcaccccagtgaatatttctgcaagaatttgactgcaagtgatacaacttcagctcatacccatgttttcaaccctcaggattattcaatgcagcctcctaatcaggagcttatcgttcgagatctgcatgataacatgtggacattccgtcacatttatcgtggccagccaaagcgacatcttctaacaactggatggagtctttttgttggtgcgaaacggcttaaagctggtgactctgtcttatttatcagtgcaaagccaccaatgacagaaaaatgctggtgcagggatgagaagtcacagctccttgtgggtgttaggcgggccaccagacaacaaccggctttgtcatcatccgtcctgtctactgacagtatgcacattggtgttcttgctgctgcagctcatgcagcatcaagtggtggctcgtttactgtttactacaatcctcggacaagcccgtcgccatttgtgattcctctcgcaaggtacaatatggccacatatctgcaaccatcagttggaatgagattcgcgatgatgtttgagacggaggagtcaagcaagcgcagatgcacaggtacaattgtgggaattagcgactatgaaccgatgcgatggccaaactcaaaatggcgcaacttgcaggtagaatgggatgaacatgggtatggagaaagacctgaaagagttagtctatgggatatcgaaactccagagaacatggttttctcttccccattgaattcgaaaaggcaatgtcttcctagttatggagtttctggcctacatgtgtcatcaatttcaaagccacaaggaagtccttttggtaacttgcagcacatgccagggatcagttcagacattgctttgctgcttctcaatcaatctgcccagaacctcgggagttcaattgcttgtcaacaatcatcattttccagcattattcaaaatgctaagcaaagctatttccctccaacgacattaggtgcttccactggttggaatgaatctcagcagcagttaaacgcccttggtattcaaaaaggtgatcaagtaagctgtgatgttcagccaggtattgattcaatcactgcaccggagatgaatgttaaaccaagagtcccaagaagcacggattcatactcaagtcagagcatttcggatccaaacagcaagagtgaccctaaaacaaaaacgcgaaggagcaagaagagctcgtctcacaaaaccatttcggataaatctgagatttcttcagtaccttctcagatctgtgacaagcaaaggcatggttcagaaccaacatcggcagactttgaagcagaacaagctacctgtgggaacaatgaggattcatctggtgcactcacacgtggtgattttgctggagagctacaagttcagcaggttgaacaagatggtctacttccaccaccgaagttagagtcatcaaagtcacctgatggagggaagtccgtcagctcgttcccaaaccaagggtgtttctcacagttctttgagggtctggattggatgatcccgccttcctgctaccaagactccaatggcatccattcagttaccacatcggatagcatctttaatccgtctgaaggtataccaccttccacaatgaacgcggacggcatggacgcgttccaaacctcttgcctttccgagtgctttcctaattccatccaagaattcatcagcagtccagatataaacacactgacatttatgtcgcctgagatgcaacatctggatgcccaacacgacggcagcaacttgcagagcacgtccaactcctatgtgcagatgagcttctcggaggagagccagagtgcatccttaagtggcctacacatggaagctgtccatatcaacagctcctgccttcaaccactggcgacagggagctttgatgcagggacgttctcaaaactatcaaacataaaagaatgccaggccttgcctctgcaggagattcacaacagctccatgggaacaccttcgtgcagtatggatgcggcggcggtcgagtactgtatggatcgaagtgtgaagccactgaaaccaccggtccggacatatacaaaggtgcactga

SEQ ID NO: 5681 - DNA, 810 bp, Zea mays
  Peptide Sequence Number=SeqID_47460
atggccaccctgcgaaccgctcgccccgtcgcattaactccgcggcaggacaggcggcgcctcaggcgggagaagcaagtgatgcttcgacttcaccataatgactgcgtcgaaaaagggctcggactcgggctcagccccggaagacagcgaactccgcttcgcccgacccagggctcggactcgggctcagccccggaagacggcgaactccgctccgcccgacccagggctcggactcgggctcagccccggaagacggcgaactccgctccgcccaacccagggctcggactcgggctcagccccggaagacggcgaactccgctccgcccgacccagggctcggactcgggctcagccccggaagacggcgaactccgctccgcccaacctagggctcggactcgggctcagccccggaagacggcgaactccgtccgctcgacccagggctcggacacgggctcagtcctggaagacggcgaactccgctccgcccgacccagggctcggactcgggctcagccccggaagacggcgaactccgcttcgcccgaccccagggctcggactcgggctcagccccggaagacgacgaactcggcttcacccgaccccagggctcggacatgggttcaaccccggaagacgacgaactccgcttcgcccgaccctagggctcggactcagccctggcctcagccgacggtctccgcctcgcccgacccaagggctcggactcgaccacggccatggaagacagactcgacctcgacctcggaggagcctccacatcgcccaacctag

SEQ ID NO: 5682 - DNA, 267 bp, Zea mays
  Peptide Sequence Number=SeqID_47461
atgctcgtcgaccccgacgatctatctttcaattatgcgctacttgtgttgagctccgaagccctctgtcgagctcttccccttgaagtcgccttcgagcacaacccctgccaagtgttcgctgggaggtctgaaccaatactcatcatcgatccgcgattatcaaatcattttggtcacggtacgttaattaatcgcgtgatgcggaagacgatccaagtcgaccccaagcgcggactaattcgcaagatgatgctgatggattaa

SEQ ID NO: 5683 - DNA, 654 bp, Zea mays
  Peptide Sequence Number=SeqID_47462
atgtccggtgcaccagaagactccaactcaaactcgttaccttcgggaaattccagaggcaactccgctataattcaccggactgtctggtgctccaaggaagagcggcctcaggaactcgccagtctcgggaattcagaacggctgctccgctataattcaccggacatgtccggtgtacaccggactgtccggtgtaactgcggggcaacgactacttctggcgccaacgactacctgcgacgcattaaatgcgcgccagcgcgcgcagagtttcgccgtattcacccccctctaggcgactttcaggcggcgtgggcgcggtcggtgacgccacgccgggcgcgtgggggcgggcggcggaaggccggcggcggcgtgccgggcacgtggggcgggcggcgaccgggcgcgtgggcacgaccggcggcggcttgccgggagcgtgggggtgggcggcggtcgggcgtcagcggcgagccgggcgcgtgggccgggcgacggtcgggcggcggcgtgcggggcgggtggcagagaagagagaaggaagaaagtgaaaggagagaaggaaaggagaagagagaagagggtcgcgacggcggtttacttaccttctttgccgagtgcccgcgatccggcactcggcaaagataa

SEQ ID NO: 5684 - DNA, 1779 bp, Zea mays
  Peptide Sequence Number=SeqID_47463
atggcagcaaatccccttgccacgctcgccatcgcggtgttcttgatctgccttcttctccccacttcgtcttcttcgtcatcgatttgtgtcgcgaggacgcaggaccacgtgagaacggcgttccacttccagcccgccaagaactggcagaacgggcccgtgtactacaacggcatgtaccacctgttctaccagtacaacccgcacggcgcgctctgggacgtgggcaacctctcatggggcgactccgtctccggcgacctcgtgaactgggcggcactcggcaacgcgctcgacccgacggcgccattcgacgccaacggctgcgcgtcagggtctgtcaccatccttcccgacggcacgccggcgatcctctactccggcatcgacgcggaccgccggcaggtccagaacgtcgcgttccccaagaacccgcgcgacccgctcctccgcgagtgggccaagcccgcctacaaccccgtcgtcccgctccccgccgacgtgtcggcgaacgacttccgggaccccaccacggcgtgggtcggccgggacgggctgtggcggttcgccatctccgcggtggccgacggcgtgggcgccacgctcgtgtaccgcagcgcggacttcctgcgatgggagaggcgcgctgcgccgctccatgcgtctcaggacgccgtgatggccgagtgcccggacctgttccccgtggcggcgcgcggcgcggaggggctggacgcgtcggcgcgcggcgctggtgtgcggcacgtcctcaaggtgagcatgccggacacgctggaggactactacgcggtcgggacgtacgacgacgcggcggacacgttcacgccggacgaggactgcggcggcggcgactaccgcaggtggcggaggatcgaccgcggacacctgtacgcgtccaagacattcttggacgcgcgcaggatgcggcgggtgctgtgggcgtgggtgaacgagtccgacagcgaggccgacgacgtcgcccggggctggtccggcctgcagtcgttcccgcgggcgctgtggctggacggcggcgggaagcagctggtgcagtggcccgtggaggagatcgagacgctgaggacgaggcgcgcggcgccgctgcaggaggtggagcccggcggcggggtgcgcgaggtcaccggcatcgtgagctcgcaggcggacgtggacgtggtgttcgagatcccgagcctccggcgggccgagggactggaccccggccggctgcatgaccccgacgcgctgtgccgggagaagggcggctccctgacaggcggagtcggcccgttcgggctgctggtgatggcctccggagacatgcgcgagcacaccgccgtgttcttcagggttttcaggatcctgcacgagtacgctgttctcatgtgcacggacctcagcaggtcctccacgaaggcaggcgtgtacaagccaacgcatggagggttcgtcgacgtggacatcgagaaagacatgagcatatcgttaagaacattgatcgatcactcgatcgtggagagcttcggcggcggcgggaggacgtgcatgacggctagagtgtaccccgagcacgttgcagcaggcagcagcagccacctatacgtgttcaacaatgggtcagctgcagtgaaggtgtccaagctcgaggcatgggagcttgccagtgcgagtgtcaatgttgacgacgatggcggtctgatggctggtggatcgttcgcgaacatgtgccgcgctgaggagtacaattctagctag

SEQ ID NO: 5685 - DNA, 132 bp, Zea mays
  Peptide Sequence Number=SeqID_47464
atgctgactcccttgctgctccagctgcttggttgtccctcgcttccccttcgttcgcacagccctgctccggcactgctgaccaatgccatgcgtctcattggcaggaggtttagtgatgcctctgtctag

SEQ ID NO: 5686 - DNA, 633 bp, Zea mays
  Peptide Sequence Number=SeqID_47465
atggtcggagtgacccgatctacgtttctcggcggtcggagttcgtcggtcgtggtgttccggctagtcggcgttgctagggttcgattccttcggcgaaaaagcttctcaggtgccggggagatgattccccaagggaatttggctgggcatgactgtggaagcgggtccatgctcaccgacgaaactgttgctctagcgagggtgaattcggggttctggcgaggtggagctcttgttggggttcttgagagttctgaggagctcagatggacgggttggggctctggttggggtggcgtgtgtccggagatggtggctcaccataatcgagccttggcagcaatggcgacgacggtgctcttgctatcaggtggttggtatttttgtggaggaaccacccagattattccagcctatgtgcccaagtcccgccttagagcatttgagaacaagttcccaacattggtgcccacctccagtgtactcacttccacaaccttcgacaaagcttcgactttcgtcatgccgccgaagaagataacagcgccaggggctgcactgcagccactggacacaaaccaggagactctctctccaagaagctcgaagccagaagagaaaggccactag

SEQ ID NO: 5687 - DNA, 144 bp, Zea mays
  Peptide Sequence Number=SeqID_47466
atggagttctatagcgagaatcatctggcatctgtacaattatgggatattgattcgccagatctggacccaaagctcggcgtcatacgctatggcgccgaggtaacacatctcggcgtcatagcctatagcgtcgagctctaa

SEQ ID NO: 5688 - DNA, 411 bp, Zea mays
  Peptide Sequence Number=SeqID_47467
atgacgatggtggttctcagccccctacggaagcaaggagacgtcagcaagatcccagcagcgccaacaactgtgcttctacagggctcaggcacttctccgacggccaagttaccgcatacacagggctctagcacctctccaacagccatgttggcattaggaaaaaatgaagatggcgcctacaaaggaacaaccgaatacacacctctcgttgtcctcacagtgggtgacgacatcgtctatggcgcccctttcccactctttaatagtaatcgcggaagcttcagcattgggatggagaacttctcttataacaggacgagggaaaataaagagtgggcgacgaagctagaagccaaaggacttcagctgaacatgttgatgaagctcaagtatgataacgactga

SEQ ID NO: 5689 - DNA, 156 bp, Zea mays
  Peptide Sequence Number=SeqID_47468
atggcgagagtagtgtgtaccctctgtggcaagaggctggacggtggtgtatctgtgctctcagttggcgtgaacccgatccccagctgggtattaattgattcagatcgccgttacttctcagatatgaagacttggtcactgccctacacttag

SEQ ID NO: 5690 - DNA, 921 bp, Zea mays
  Peptide Sequence Number=SeqID_47469
atggcgatggaagcagaggaagacggaggtgggatagaaggggagctcatcccggggctgcccgacgacgtggccatggagtgcctggcgcgagtgccgagccggtcgcaccggcgcatgcgccgcgtgtgccgcagatggcgcgggaccgtcggtgcgcggccgcgggcgacgggcggcatgtcgcagtggtgggggggctgggacccggacacgctccgcccgaccagcgacgtccggttgctggacgtccccgccggcacgtggaggcgcggcccgaagatgccggacagccggagcttcttcggatgcgctgggggcggcggcaacgtctacgtcgccggcggacacgacgagtgcaagaacgctctccgctccgccttcgcgtacagcgtcgcggccgacgcctggcgcgcactcccggacatgttggaggagcgtgacgagccgcagctcgtcgtggcgaccccgggccgcgtcctcgccgccagcggctacccgaccgaagcccagggcgcgttcaaggataccgccgagtggtacaacgccggcggcggcgcgtggaccagcgagtgcgacgtggtacccgacggcgacacggctgggacgtgcctggcgtcggtgcgcgggacggtgtgggccgtcggggccgggaacggcggcgtgcgggaatgggacggcgccgcgcgcgcgtggaaggacgtggccgacgggccgccgggcatgaaggcctgcttgaaggcggttggcgttggcaacggcggggccgtgctcgtgttcggcacagtggcagacgcggcggcggagggcgtcaactactctgcgtgggtcatggaagcgagcagcggtgcatggaagcgagtgcccgtgccgtcaggattcggcgggttcgtttactcagccgcagccgtgcctgtttag

SEQ ID NO: 5691 - DNA, 891 bp, Zea mays
  Peptide Sequence Number=SeqID_47470
atggacggcgacagagaaggcgctgcggcggtgcaccaccacgcgcgctcccccgaggacgtcttccgcgatttccgcgcgcgccgcgccggcatcgtcaaggcactcaccacggatgtggagaagttctatcagcagtgcgatccagagaaagagaacttgtgcctttatggtttgccaaatgagacttgggaggttactcttccagctgaggaagtacctcctgagcttccagaaccagcactgggcataaactttgcccgtgatggaatggttgaaaaagactggttgtctctagttgcagttcatagtgatgcgtggctcctgtctgttgcattctactttggagctcgctttggatttgataaagatgcaagaggttctggaggcatcagttgctgtggggagatgcatatgttgcttccacaggttgtggaggcatcagatgctatcgtggaaactggacattggagagggatcgttgggttttgtgggcaagagagaaggctcttcaccatgattaataacctgcccactgtttatgaagttgtgaccggggttgctaagaagcaatcaaaagcccccaacggcagcagcaaaagcagcaaatctaactctaaaccatcaaaacagatcaattctaacagtaagcctgtgaagccagcccacccaaacgaagaggaggatagcggccgtgaggacgcagaggaggaccaggcgtacctgtgtgggtcctgtggggaaagctatgcgaatggggagttctggatctgctgcgatatctgcgagaagtggttccatggcaagtgtgtccgcatcacccctgcaaaggcagagcacatcaagcagtacaagtgtcccagctgcagcaccaagcggagccgggaatga

SEQ ID NO: 5692 - DNA, 627 bp, Zea mays
  Peptide Sequence Number=SeqID_47471
atgcacacgcgtgatgaggcagggtctgtggagatgtgcgcaagggaaaatgagcttatggtgccgagagtcgatggcgagcaggacacggatcagggggccgagaggagcagagatggcgcgggccaaccactagacaaccgtggcagcgaggaactcgccatggctgaggaagacgctgcgcggccgagtgccatggagatggcaggaccaagcgcgcagggagcacggcacagacagaggcccgcgtccggtgagctggagaccacggctgggcacgcgcaggaaagggagccgagcaggggcaagtgcgcagcgcccatggaagcagggaaggagctcgggcgagctgctcggcgggctggagcagaggagcgcggtgcggaggagaaaggagagcggctgagcgcgatgaaggggcttggctgggcgcagggaggagcgccgtcgagcaggaagcttcacgcacgcaaggattccatggcgccagaggagcaaaggccgagcagggagggggagaggacagagggagcaggggcgctcgccagggagctccgcgagagagagatgggcgctggagagagagcgcggcatgggaggaagaagagggagcagacgtgcgtgtga

SEQ ID NO: 5693 - DNA, 687 bp, Zea mays
  Peptide Sequence Number=SeqID_47472
atgactacatatggtggagagccttcaattcaagtctttgggaagcattacttccttcattggcagaagaagactattggtggtagggtgatccagtttgggagctgcactttcacactgaagaccagaaagacatgtggcaaagtgtatgaactcgtgtcgagtccaaagaacaggtgtggtagttggttcaagtcttggttttatgatgatcttggagagggtgtaccgggtgtggctcagccggcgggtagtgttatgatggcccatgactttgttgctttctcagacttcaaagttagggacaatgattctgacgatgttgtggttgtgagtcctaactttgctgttgagcttggcggacaagatggggtggctttcattagcgaggttgaagtggatgctattaaaattgttgggaaatactctgcgaaggggtcgaggtctccggatgaagcggagattgtgtctgaagattttgtgggcttgaacgctgaaacgactgaattcaccgagtatctagcagatactacgggtgaagccacgtcgcacgtgtctcttgtggcagcacatgcaagggcggccacagtcaccgaggcgttcatggagaaggattggaagtcgaaatccaagaaacggaaagaagtcatccgcattgtggacccgaggagatctgcgaaggcctag

SEQ ID NO: 5694 - DNA, 129 bp, Zea mays
  Peptide Sequence Number=SeqID_47473
atgccctggatatgggacagggtgaagtgtgttgctgtggaggaaggactctgctacttttgtgcaaaggtggttctcaagcaggaggaagaaccaaaaatagaagtgtgttgctgtggatggtgctaa

SEQ ID NO: 5695 - DNA, 345 bp, Zea mays
  Peptide Sequence Number=SeqID_47474
atggtgctagtctataatgatcttgaggattatgcccatgagctgcatgagcaagtccaccagctttactaccagctgcaccccaacgccgtgcctggagccgtagaggcagaaggtggtgtggtgttagctgatgggggtgagcctgatgctgacttagacatagaagcaactcctatgcttgtgctaggtggtgagtccccaagcgatagtgatgtttctgaggtagctactgatactgaggaagctaatctcaatcctcctccaccaccagtttcgcctacgctagcagacaccattgctgccctagtaaatgccacaacagataatgctaggattctgtga

SEQ ID NO: 5696 - DNA, 339 bp, Zea mays
  Peptide Sequence Number=SeqID_47475
atgggcgctcgacaccctgtgcccctgctcctcttccctggcggctgggcggagctcccctccatggacaagcctccgaccttcccctggtgcccctgcgagctctatggccgcgcgcgccaggccttcgccatctgtggagcttggcgttgcccccttcgccgcgtgctgctcattctctcccctctcccctccttgcagctcggcgatccgcctgatgcctcgtcagagcgagtggaggtcgcgacgtccaccaattcgggggtcattgcgtcgtatctggggcgatttctcgccggtgtgaagaatggccgctatgccgcactgtgctgtgggtag

SEQ ID NO: 5697 - DNA, 723 bp, Zea mays
  Peptide Sequence Number=SeqID_47476
atgggggaggctcaccggagaagacgaagttcgatggaaccgagaagaaaatcatcgattggcggtgaaccggcagtcggatcgatgaatcgaaagcaccgggacgaagctctcgacgagacgaagcagcggtactctcggattccaacaaagacacacagattgaaaaggactgattataatgagatggtcatcagatggtttctagctattgctgaaattgacattgaagaaaagaccatcgtcttaatgacagggcacatgagccttgatttgtatcatgaggacatttttgaggaatatgagcagtactatgagcgtgcaaggttagggatttgcaagagatttgatgagaccctaggacttaagcatcacccaacatttattaacaagattgccagggtaactatccttccaaaaagcggggataaaagcaagatcagagataagttctggaacataatccaccatgtgatgaatgcagatgcaacaggggtttcagacccacatggatggacagttctaggctctacaacatcatatggatgtcgctttcaaactctacaaactcatgtcaatgagcaatttagagaaatgtttgaggctgttgatgatcgctttagtgccataaactctgagttctctaagcttcatggtcatattcaagagtctgtccatgatcctataatgactagaatgaacaacatgcatcaaagcttttag

SEQ ID NO: 5698 - DNA, 219 bp, Zea mays
  Peptide Sequence Number=SeqID_47477
atggcgcagctgaccgtgactgggcgcgcccgcatgggggaaaatctcctctgttatagcagtgcgggccctcaccattggtgcgccgagtgcgtgagagagcagagcttggcgagaggaagagtcgagctcgctggcggtgttcatggctctggggcgtgcgcgaagggaagctgcttggcgccggggacccttgccattggcgccgacgatccttag

SEQ ID NO: 5699 - DNA, 153 bp, Zea mays
  Peptide Sequence Number=SeqID_47478
atgggagagcgagagagggatccgaggaggtcaaagatgatctaccgcaagtggtcactgctctcatcgacggtcgtcatctggtgcggcgtcgccaccgccggcctggccggtatcttcctcttgggcggcaagatggttaaatcactataa

SEQ ID NO: 5700 - DNA, 1365 bp, Zea mays
  Peptide Sequence Number=SeqID_47479
cagcagcagcagcagcaaagtcatagccagcagcagcagcttcagcaacctgcgctctctggacagcaatctcaaagttcaaaccagcttctccatcagcatggaaaaccaggagttgggagcttgcctattgatggaaacttgccaaactcttttggatttcctgaacaaggatcaaagaagagaaagaaacctgtctcatcctctggtagagctaatagttcaggaacagcgaacactgctgggccatctcctagctctgcaccctcaacaccatctactcacacgccaggagatgcaatgtccattccacagctgcagtataatggtggcccttcaaaaccattgatgatgtttggctctgatggcactggaagcttgacttctccagcaaacccgctgcaagataacaaaaactctcaccttcagggtgatgttgaacgtctgttggaagatggttccttggatgaaaatgtagaatcttttttatcgcaagatgacatggatcctcgagaaacaatgggacgctgcatggattctagtaaagggttgggttttactgaggttgcaaaagcccgtgcgagtacaaacaaagttgtttgttgccatttctcattggatgggaaacttcttgccaccggagggcatgataaaaaggtcgttttatggtttacagatgtgctaaaacgtaaatccgcattagaagagcactcttccctaattacagatgtccgattcagccctggcatgacccgccttgccacatcttcctttgacaaaaccgtgcgggtttgggacgctgacaatccagattattcgctacgcacttttacaggtcattcagcatctgtcatgtcacttgattttcatccgaacaaagaagacatcgtttgttcgtgtgatagtgatggtgaagtgcggtgttggagcataaataatggtagttgtgtgacctgcgttagggttttcaatggaggagctactcggttaagatttcaacctcgccagggtaaatatctggcagctgcctcagaaaagggaatatccatactggatgcggagacattacaagtttgtagaactcctttgcaggtatgcaacttagcggctattctaagttataacttcactggccacgtacagattattcagtcagtatgttgggatgccgcgggcaactatctggcgtctgtcagtgaagattctgtcaggtccctagagctttgggacataagggagaagaacacggtgacaatcagcaacgctcatgacggcatggttgctgccctagccgcgtcaagtgcatcggggctggttgcatcatgtcgtggcaaaagcgaaagggcagctgatctgatctcctag

SEQ ID NO: 5701 - DNA, 627 bp, Zea mays
  Peptide Sequence Number=SeqID_47480
atgctcccttccccacaaaatatccttcacccaaactacacctctctgcgcccgcgacatccacgccgcctcagccggctgtccgacgccctctctgtgcctccctccccacgctgcctcagccggcggcgcgcggcgtgcagcgcagccgccggggccaggcgccgtctatggtccaccggaggcggtaggggacgcagggtcgccgggcggtgtgcggaggaccggaggcgagggcgcgaggcgattggcgataggcaggaggggagcctctcgggaagggtaatgtaccaccgcgacgccgacaagaggatggagttccttcacctcacgccgctgccgcccacgcagctcgaggcggtggtaggatgctgcgtcgacggcgaactactggagatgctcttcatgttctctgtgagctcagattcttaccctccttttgctcattacattatacggaactggggtgtagttcgcttcgccgtcgtgccgttaatggggctcggtgtatgcggctcgctctgccaaggtggtgacaaggatgatgtttatgactatggtaatggtaaagaaggcgtcgaggcggatctccagaagttccaggacgtcgacgagttcgaggattag

SEQ ID NO: 5702 - DNA, 426 bp, Zea mays
  Peptide Sequence Number=SeqID_47481
atgctgctgccgctgcaggtagcggtcgtggtcaccatgctcgcgtccccggcgggggtgctgggcatcgccaccgacgaggactgcaggtgcttcatgtgcgtctgcgacctggacccgtatccgcccccgccggaggcgccgacccaccactcaccgccggcgcagccgcagccgcagccggtcccctcgccgcccccgcccccgcccccgccgccggcgccggcgctccccgcgtactacccgccgcagccgtacgggtacccgtggccgaccacgtacgggccaccggcgggggagatgtacccgcgggacgacaggaggagggagtccaagtccggtgcgcccccgcggcacggcggctgcgggcgcgccagcttggccctcgccagcaccagcttggctctgctgctgtggcttgagtga

SEQ ID NO: 5703 - DNA, 480 bp, Zea mays
  Peptide Sequence Number=SeqID_47482
atggaggaggggttcatcggggcgcgcaggaggagctgcaccggctaccagcggctgcgggcaccgccgccgacgactccgggcagaggcacctgcaggctcggacggcgagcggtcctcggctcgggaggctggaggttcgtccggctacgccgccgccgccgccgccgtgccagcgcgccgcggtggtcgtcgccgctgcagctgctcagccggatcctcgacacgtacatcacctccatgctgtcgcagccaccaccgaacatcttgaagccactgaacatgccgccgccgaagctgcgccgtgatgcttcaccggggacggggtcgtcgagacgccgcgatgcaggcgggagcgggagaggcgtcttgctcaacatctgcgtggccgaggtgctcctacggcggaccacgtcggaggtcaggcggtcgccgttgcagccaacgaaggacgcgcggcgccgcagcgtccgtgcatag

SEQ ID NO: 5704 - DNA, 273 bp, Zea mays
  Peptide Sequence Number=SeqID_47483
atgtcgcagactaactgggaggcggacaagatgctggacgtttacatatatgactattttatgaagagaaatttgcaggcaactgcaaaggccttccaagcagaaggaaaggtctctttcagatccagttggccatttgatgcacccggtggctttcttttcgagtggtggtcggttttctgggatatattcatagcaagaactaacgagaagcattcagatgttgcagcctcatatattgagccccttgcttggtccgaggcaggggtctag

SEQ ID NO: 5705 - DNA, 522 bp, Zea mays
  Peptide Sequence Number=SeqID_47484
atggcggtgttgaccaagggacttgatcattttcgctctggaattctgcagcagaagccatttatgcaatctccacagcaatttcagcagctccagtttctgaccccacagcagcagcagcagcttttgctgcacgctcagcaaaatctgtcgtcctcgatgtcaagcgatgttgataccaggagattaaggatgcttcttaacaacaggaatgtggtccttggacaggatgggcagacaaatagcggcggtgatgttatcccaaatattggttcgccagggcaaagtggtggatcgcgtaatgatatagatatactaataaagtttgttaaaggtcatatcaaataccatgccattagcttagtatacagagttgcatgccccatttgtgagatgatgagtaaggtggatggagacatcgagaccaagtcgacttctgctaatctgatttattgtaaaattcacatttgcttacttccatcagatcgtcatatcctggactttggaatgctgcaaatttaa

SEQ ID NO: 5706 - DNA, 348 bp, Zea mays
  Peptide Sequence Number=SeqID_47485
atggtcaccaatccgcggcggcccatcggccacggcgagcaattcgtcgtagctggtgactgtgcgcccaactttaaccttgcacccaattcaacaagatggctggacgacgccaggggcaaggagcggctgcggtggcactgtgatttcctacaacggaggcacgaccgggagaaggaaaaacgagctatggggcggcgcttggatgagatgcggagaaaaggccaacgtccttcggttcttataccccgaatcggagggaacggcctgcccgagcatcgcggtgatcctggctgggcggacgtggttccgtgggcgagatccacggagaagaaagtgcccagataa

SEQ ID NO: 5707 - DNA, 375 bp, Zea mays
  Peptide Sequence Number=SeqID_47486
atgacgtggcagggggcaccggactgtccgaaacaccaggggctcctgcgcaaagaccctaagactcagagaacagtccctgtggactgcgggttcattactaaatttttcaggggctctttagcgaaacgggcatggcgaaggggtatcagatcgtactggccgcacgatccattgtggacgacccagattaaatcggatcccacctcgaaacggaatcccgaaatcgacggcaggcggtcatcttcctccctggacagtcgcacagtggtcgatgtcagccgcggcgaggccaccgccgtggcacagccacaagacggccattacgtcaacccaacagtattggccagaggatcaatcgtggcccttccataa

SEQ ID NO: 5708 - DNA, 285 bp, Zea mays
  Peptide Sequence Number=SeqID_47487
atggcgacgaaatatcaggaatcggcgtttgctttttctgatgacactgtactatctgagtctgttgagcaagcagtggatatgcgactttacccaaacagaatcagatgcaacctcttgggtaaaacacacacaggaagaggtttaccacaagtggtcacgggagcgaatgaacaaactcctgcatctcagcagcagggaaaacagatctccattttgagagctaagcaattgtctctcaacactaaaaagctccaagacttcacctttacacaaaggacgtaa

SEQ ID NO: 5709 - DNA, 492 bp, Zea mays
  Peptide Sequence Number=SeqID_47488
atggcccccctgggacgtggtcggtccgagcctgaggtcgggcgaggtggaggctcctccgaggtcgaggctgagtccgggcctgggggtcgggcgaggcggagaccgttgtccgaggtcgaggctgagtccgagcccgggggtcgggcgaggcggagattgtcgtccgaggttgaggttgagtccgagccctggggtcgggcgaggcggagaccgccttctgaggtcgaggtggagtccaagccctggggtcgggcgaggcggagaccgccttccgaggtcagggtggagtccaagccctggggtcgggcgaggcggagaccgccttccgaggtcggggttgagtccgagccctgggatcgggcgaggcggagtccatcgtccagcgtcgaggttaagtccgagccctggggtcgggcgaggcggagtccgtcgtccggcgtcgaggttgagcctaagctctggggtcgggcgaggcggagtttcctatga

SEQ ID NO: 5710 - DNA, 822 bp, Zea mays
  Peptide Sequence Number=SeqID_47489
atgggatgggggtgcgtcgggtggcggtgggccccgctacggcgaccggctaccggctacgcagggtccccacgtggttacgccacacgaggcgcacctccgatgaaacctcacgcgtccgatgacacgtgggatccgcctcgcgtggggccgacacgtcggcgggcgcgggaagcgctcgtgtggccgcgtgccgcgtctagcagtttgcgccgccgtggcgtgggggccgcccacgtgcggagggatccggcactgccaccagggccacagggctgcgcgctcacgcgcctgggcctctgcgctcgcgccggccgcgccggccaggctgtggccacgttgccagggccgcagggctgcgcgctcacgcgcctgggccactgcgctcgcgtcggccgcgcccgcatgccgtcgcaaaacgtcgctgggaggctggccgcgccctggccgcccacgcgctacaggaggccgcgcgaggccgtgcgccgtcggggccgggccgccgtgccgagggtgggtccggccacgcccagaccgccgcggctgcgctgctggtgcctccgcccgcgcgagccgcgcctcgcgccgtcgggccggggctgccgcgcaagcgctagtcaggccgccacagccgcaccacaggagccgacgcccatgcgcgggctgggtcgccgtgccccgcgccgccggggctgccggggccgcgccgtcgccgtttggccgaggtcgcgcccgcgctgccagtgggccgcgccccacgacgccgcgttcgcgcctgcgcaagggctgcgctcgcatcgggcccgcgagcccgcgcagtag

SEQ ID NO: 5711 - DNA, 579 bp, Zea mays
  Peptide Sequence Number=SeqID_47490
atggcccccagcgcacgctcagcggtggccgcgcctccccccgcgttcccccccccccccccgcggcctcgtgcccctctcgcggccccagccaccccctgcgcgtgcgcccccgacggctcgtgccctccctcccccgtggtcgtgcccctccccgcggcccgcgcccctgccccgcggtcgtgcccttccccggcggtcgcgcccccgatggctcgccctcccccgcggccgtgccccagcggcgcgccctcctcccccccccgattgcgccctccccgacaggctcgtccccccgtcggctggtcccctcgatggctcgcccttccctggtggctcgcgcctccccggcagcggtgccccaccccctgcacgcgacccccatgccccgcggccccgcgccgtgccccagcggcggcccgtgctccccgcgcccctgtgcgcccctgtggagacgaggatgatggttatgcttatggtaagggtggagacgaggatgatggttatgcttatggtaagggagaagataaagtcgtggaggaggacttccaggaattccaagagtacgatgagttctag

SEQ ID NO: 5712 - DNA, 366 bp, Zea mays
  Peptide Sequence Number=SeqID_47491
atggggggggaagaagcagggccgcgctaccggggggcaccgggtgctgaggccgcacgtgggtggtggggaaccagtgctcgagggggggaaccaggtgctcgaccgacggccggccgccactgccacgtcgagggcaaggggcagggctgggcgtgcgggggagcaggggctcgggggcgttgcgaagtggtggggagagaggagcgggaggggactatggctacacaggaaaaacgaagtagaaagatgacgaacaatggagattacttaccgggggagaaggccctcaccggagccaacaatgaattcgtcgattgtcaaagattcggaggtccaatcgacgaactagacattgagacatag

SEQ ID NO: 5713 - DNA, 555 bp, Zea mays
  Peptide Sequence Number=SeqID_47492
atggaggaccgggaaaggggacattgtggaaaggatccttcctggcgaaggaagcgggccccgagccctcctactgatcaggggttcgaaggctggcccctcggaagggtttcgacagccgccccagagcactcggacttcaagcccattactgatcaggggttcgaaggctggcccctcggaagggaaaacggcgccgctcgctccgctctgactgccgtgtcagccaccccggcaacgactgacaacaagtcacgatcaaccaccgagtttagcctcgggcgcaacaggaagctctgcctcgcccgacctcatgctccggcctcgggaggaggtctccgcctcgcccgacctcaggctccggcctcgggaggaggtctccgcctcgcccgacccccggactcggcctcgaccccggtctcgggaggaatcgtgtcctcgcccgaccccggcctcggcctcaagagaagtctccgcctcgaccgaccctgggctcggaccgaccacgctaacaggggatacatcatttccctattcctagcctgctcaggctag

SEQ ID NO: 5714 - DNA, 555 bp, Zea mays
  Peptide Sequence Number=SeqID_47493
atgatcacgagctctgcctcgcccgaggtcccccttaggggtcttcccagaacttcgcctctcccgagcctgatctcggagggggcgtgtgctcgggagaatctctgtcctcaccgaggtcccctcatcctaggacatcaaagtttgcctcgcctgagcctgtctcgaacgagaaggacaaaacctggagcgaggctcgcccaaaggccactagaggacaacaacattgaatgcgcgtacctaccccactcagacctgcgggtgtatagggataacagaccatggggtacgggccagccctcgggcacaaactctgtctgcccaaagcacaactcgccctcgggcgcaaactccgcctcgcccgagctcggcctcgactactttctcccccgtgaatcccgtaggtggccataccttcaaactgtggcacatgactccgaatctcaggacagggtcggtcgtgacctcgagcggacttccgcctcgcccaagctcgactctgacctcgatatcagtgacgaaggaccccaatgtcaccagttatggtggagctga

SEQ ID NO: 5715 - DNA, 324 bp, Zea mays
  Peptide Sequence Number=SeqID_47494
atggagagcgtggacagcggcgaggaggaggggaccgaggaggtcatcaagtcaattatagctgggacgtggaatgttgtggaggacatggctgatgcctgcgtgtggtgcctgttcaggcagaacaggtgcgagaactacccatttctggagatggatagggagcacgacaacatcgtcaactgcaccgcccctaacttcactagttctaattgtagaggggatgaacttagtaagatgaaattaatattttgtgctttgatttatctcaatgaaagagatgaacatcatgaaaccagtgctggtgaaactggtgaaatatga

SEQ ID NO: 5716 - DNA, 435 bp, Zea mays
  Peptide Sequence Number=SeqID_47495
atgccaattgagttgtcccccgctcaagcaccgacagatgaggaggtgaaggcagttgaggaggacaataaggtggtggtcaagcaccacttcgtcatggagtcctccacgggcctccacgggtatgtgccaacgctgagaatgactatggcagagaagatggagaggacgaccgctcctcaccgacttcccaccacgcacctcgcctacgcctgccaggtgttcgacagggtgagcctatctaccctggacgctccccatgttccactacaacaactggaccttcacctgggcatggcggcacgtgacagcgtaaacgcctacctctgcgacgtgcgccccactgacatctattgcaccatcatgcgccaccgcgtcacctacatgtgtggtgtgcccatcgtcttcaacatcctcctcgatggcgtgagttaa

SEQ ID NO: 5717 - DNA, 264 bp, Zea mays
  Peptide Sequence Number=SeqID_47496
atggagttaccaactggggaggaaggggtgcacggggatggccggagccaggaagcagtcgaggacgacgatttcgtggactcgtggggacgatggcactgtgggcgatggcacaaactggtggtggcgagtgctgaccgaggagcgggcggcggcggagatgaacagagcgggcacggcgatgctcgagtagccgcacctcgtgggatgcgacggcgacaatggcgtgaagagaggctggcagccgctgccatgaagaagtga

SEQ ID NO: 5718 - DNA, 1755 bp, Zea mays
  Peptide Sequence Number=SeqID_47497
atggcgtgcgggtcactggacactgggtcagctgggctggaaaggcaaaacaaacagaatcatcagtgttacgtaataatccttggattttgcgctgtttaccatggtgttcccaaaaggcccctggcctttcttatagcccaagctacccccttcttcctcctctcatctctctcgggactttccccaatccactccactccaatccacttccctcctctgtcaaccctagccgcgccgccggcagtctgctcgggtggcgcatacatgacccacccttcctcgccgtcgtcctctgcgccgccaccgccgcccgccgcggcggcggcggcggcggcggccgaggccacctccctcgcgccgggtttccgcttccaccccaccgacgaggagctcgtgtcgtactacctcaagcgcaaggttctcggccgcccgctcaaggtcgacgccatcgccgaggtcgacctgtacaagctcgagccctgggacctgcccccgcgctcccgcctccgctcccgcgactcccagtggtacttcttcagccgcctcgaccgcaagcacgccaaccgcgctcgcaccaaccgcgccacgtcgggagggtactggaagaccaccggcaaggacagggaggtgcgccatgggcccagggtcgtcgggatgaagaagacgctcgtattccacgccgggcgcgcccccaagggcgagcgcaccaactgggtcatgcacgagtaccgcctcgagggcgacgccgccgtggagataccgcaggactcgtttgtggtgtgccggatattccagaaagctggcccaggtcctcagaatggggcacagtatggagcgccgttcgttgaggaggaatgggaggaggacgatgcagatgtcggtttgcttccagtggagggtgatgctgctgtcgaccctgaggttccccctggccctgtggagatccctggtgctttggagagaggctatcttcaaatgagtgatctcattcagggtttgggtgatcgaaatggaaatggtacacctagtttaccagtttctgatacttcacataacagcaaccattctgaagatgtagatggaaattctggggacattttaagtgacccaaaccttggctctaattttattcagtgtgttgaacctggggagcaaaatagcttaatgcttaatggaaatatcatatctaatgcaaatgctggagatttttttaataattccagccccagtgatgggttcctagagctgaaggattttgcagatgctgcagatctggatttccctttgggcaatggatcaaccatatggccttcagatggttgggcatggaaaacacctgactcagcggaagctgtaaatggagctaacgatgagattcctccactccctgatgaccagattttccagccagatgaactggaacaactgttgcagtcaatacaagaagattcccatttgggctcaactatcattgaccccatgcattcttccatgacaaattcagttctgcctgaggacgattatttgatgttctatgatgcacccttcgattccactatgtgtgatgggtatggacagaatggaattcttggctccgcagcagccaatctatctggcattggcatgatggaggatggtatggcatactttgatgcaatggatgataattcatttaatgatactctgggctccatacagcagtcagctggtagcagttcccatgcttttaatggcccagtccttacccaagag

SEQ ID NO: 5719 - DNA, 318 bp, Zea mays
  Peptide Sequence Number=SeqID_47498
atggggacgctgaagttgacggccggtcagactcgtcgttggagacggagctcgcgacggtgggtggattgcctagggttcggtcgccgcggtggagaagaacgagggctcggtctctgcggtggagaagaacgagggggcggcgccaccgcctccgcgattctgggtcccttccccggcgacggcgtctctgcggtggagaaggcgattccgggtctctgcgatggagaatgtgaatgcgacggcggtggaactacgggggagaatctctatgggttcggcggtcgcggtagagaagaagcccacggcggcgattaa

SEQ ID NO: 5720 - DNA, 385 bp, Zea mays
  Peptide Sequence Number=SeqID_47499
atgtcgggagatcacgccaagaaggagatgaagaccggcgacaagcccactacaagccacgggaaggcttcatcgaaagagtcccgcaacaaggggaaggggaaggagaagaagtccccttcccacaagtcgcatcggagtcgcgataagaaaaagaagatgaggaaggtggtctactacgagaccgatacttcatcgccttccacctccggctccgacgcgtcgtccattacttctaagcgccatgagcgcaagaagtttaagtttagtttaaggacttggcttaagctagacaagagtaggtcatctcttgagcaagtagcaaattggagtcttcgagtgctaaaggcaagacttagaaccgagaaaaactatgatttcggag

SEQ ID NO: 5721 - DNA, 693 bp, Zea mays
  Peptide Sequence Number=SeqID_47500
atggcgaggccggaggcaaccggaggaggaggtggtgccgtggtggtcggtctccgcgcccgcgcccgtgtgcgtggtgtttttgcgggcggtgggagcggcggcggtgtggggaggagagtcggggggagtcctgccgcagtgggacagcagaggcggggctggaggggctggcagcgccggacgggcggcgcaggagggaggacggcctggagcgcggcggcacgcagaggctctgaggcggggctggaggacggcctcgagagcagcggcctggagcggcctcgagagcagcgccctggagggaggacggcctggagagcagctgcctggagcggcggtggcctggagcagcggcacgcagaggcgggcctggcggcgccggacgggcggcgcaggagggttggagcagcggcagcggcggcctggaggctggagcgcgccctggagtgcggcggctgtcataaaaactttttgcagtttatgactgaaaatggtatgtctactggtgttatcttatatgatggcgtagaggattgtatgacaacagttactggaagagaaatgggtctaaactttctaaattacatttttaataaatttaaggaaagaaagtgctggagtgatggctgggaattaagtgatatggaaatagaaattgaggcaggaagaaagtttgtcattaccaagtag

SEQ ID NO: 5722 - DNA, 345 bp, Zea mays
  Peptide Sequence Number=SeqID_47501
atgccgggatcagacgacaccaccagcgagatcgcatcagctactacggccgtgccgaccaattccgccctcgaacaaaagattgacaccatgactaaggtgattgccgatctcgcggccaaggtgtcaagcttgtcgctgcacgttacagatattgacagccgcactgcccatatcgcggcacctatctccattcctctctacgggcttccaggctacggcagaattccggagcttccagcaacatcagcagcagcacagccaacgacatccaccgcaccgccactgcccacgactcaaccaccatctcgaccagtcagtggcggacctaggttttttacatag

SEQ ID NO: 5723 - DNA, 405 bp, Zea mays
  Peptide Sequence Number=SeqID_47502
atggatggagataaggatgaggtgcttaaaggatttgatccagtgaagcttttttctttgttcccgagctatagcactagttcactgctggagtgtggtgctcctcgagtctgcaagtctgtaaaaccctctccacagtcccttattctcttgcttcagctggtgagtgccaaccccctgagtggtgaactggtgaccacgccgttcgtcggacctgttgttccgccgccgtcgtcggtagcggtgttccggtgtctccacggtctaattgagcgcgtgcccgagttcttcgagggtcggggtggtgtgggcaccctcattgtcatttgcgacgggttgcgatgtcgaatccggtgccaggtcgccggcgttgagcacggcggggtcggggctgaggaattgtga

SEQ ID NO: 5724 - DNA, 408 bp, Zea mays
  Peptide Sequence Number=SeqID_47503
atggcccactttgccccctatggatccgctcctgaagacgaagtggcgggggccagcaccgagtgccggcagcttgccgcaaggctcggagaaggtgtggccgagctggatgaggtgcagcatgtcgacattggccttgagggtggcgccgacgggtcgacagaggaaggcagacttaggggaaatgccgaggtttacacagggtttgcaccaaaacgtggtttgtatttgatatattcccgagatggacaggagggtgcagaggaaacatgtgaagcatcagcagcaagagttttttgcattaagcctaacctgcatattacaactaaaggaacaatagatcgatcattgaaactacagacaaaatatcctgtgactgaaaaagaggaccttgtattcaacatataa

SEQ ID NO: 5725 - DNA, 207 bp, Zea mays
  Peptide Sequence Number=SeqID_47504
atggccgtgcagccgcgcgccccaaccacagtctgccttcattgccgctgttgctcggccgctgtgggcgagcccggccaccggtgccgcagcccctacatgatctgcccctttgctggcaacctccctcgcctagatgtctggcgcgtccgtcgctccaggaagaagaaagcctatgcgaagaccatctttctagttggaaactaa

SEQ ID NO: 5726 - DNA, 693 bp, Zea mays
  Peptide Sequence Number=SeqID_47505
atgcaaggcgacggcttcaccgcagatagcggcgtacagatcctttcgtgccctggtccctggggttccgcaacacgccggcacagccaagcaccaggcggtggcgcttctcgtgcaatcggacagcggcacatgtccatcttcctcaacgaccaacagatcaacgccgaccagcagatcaatgctgcccctcagaccctcagaatcgggcgctttgccgagtgtctgaagcactcggcaaaccctgaaaaaacactcggcaaagtttttgacgggtgtcgcactcggcaaaaagagttcaacgaacaatacatcgacaaaggcttctttgccaagtactttttatcgggcattcggcaaagactttgccgagtgccagacggtactcggcaaagaaaatcggtcgtcacgacgtcgtataacggagacgacgtgtcttctaatacacccggcaaagaagttacctctttgccgagtgcctgcgtacctgcactcggcaaaggatccgccagcagttccctttatcaagttctttgtcgagtgctctgtgcgacactcggcaaagcggggcctctttgccgagtgtcaaggccacaacactcggcaaagatgctataccggtgcccaggtattggttctttgccgagtgctatgtccctgacactcggcaaaacacgtctttgccgagtataa

SEQ ID NO: 5727 - DNA, 906 bp, Zea mays
  Peptide Sequence Number=SeqID_47506
atggacagcatggaggacgccgtctccggcactgcagcccagggcgacctcgccgaggttgtggcccgcgcaggtgcaatggccgccgcggcgagtcaccaccaccaccggcggccaccctctcccgcagcagcagatcacggccacatcgtgtctgctgcaagggccaccgccagatcacagatcatgctcgtccctgctgctgcttgctacgacgacgagacacggcctgctgctgcttgcggcgacgcggtgatgttcgacgcgccgtcgtcgtcgatggccgccgccgtcggtccataccaccacctgtcgtcttcgtctgcggcgctggcaccggcgcacggcgggtactggctgccgccgcaacagatctcccaggagcacgcccgcgacggcggcctcgacgagccgcccgtggtgacgaggatctcgccagtgacgactccaccgccgccttctcatcatcatcaaatcatgaacagcagaaagaatgaggtgaagaaggtggtgtgcatcccggcgctaccacctccggcgagcagccgcccaggaggaggagaggtgattccgtctgatctttgggcgtggaggaaatacggccagaagcctatcaagggttcgccttacccaagatctttttcttgccttctttttctgaaaaggattgcagtcttttttgttgcacagaggttactacagatgcagcagctcaaagggatgtatggcaaggaagcaagtagagcgcagtcgcagcgaccccaacatgctcgtgatcacctacacggcagaacacaaccacccttggccaatgcaacgcaatgtgctcgctggctactcccggcctcacactgctactcacatgtcgtccaactgcaagaagaagaagaacagctgcagcgttga

SEQ ID NO: 5728 - DNA, 1167 bp, Zea mays
  Peptide Sequence Number=SeqID_47507
atgggcgagacaatctcgttcgctcctcggaaggccatcaagtcccaggtcttggcggacttcgtagctgaatgggtcgacactcagctcccaacagctccgatccagccggagctctggaccatgttcttcgacgggtcgctgatgaagacaagagccggcgtaggcctactcttcatctcgcccctcgggaagcacctacgctatgtgctatgcctccatttcccggcgtccaacaatgtggccgagtatgaggctctggtcaacggattgcggatcgccatcgagctaggggtccgacgcctcgacgctcgcggtgactcgcagctcgtcatcgaccaagtcatgaagaactcccactgccgtgacccaaagatggaggcctattgcgatgaggtccggcgcctggaagacaagttctacgggctcgagcttaaccacatcgcccgacgctacaacgagactgcggacgagctggctaaaatagcctcggggcagacaacggttcccccggacgtcttctcccgagacctgcatcaaccctccgtcaagatcgacgacacgcccgagcccgaggcaccctcgggccagcccgaggcaccctcggttcagcccgaggtaccctcggcccccgagggtgaggcactgccgtcgaggaggagcgaagcggggtcacgcctaatcgaaactggcagaccccgtacctgcaatatctccaccgaggagagctacccctcgaccgagccgaagctcggcgattggcgcggcgcgccaagtcgtttgtcttgctgggagatgggaaggagctctaccaccgcaacccctcaggcatcctccagcgatgcatctccatcaccgaagaaggcacccgggggctacacgcacctgttggtcgccatcgacaaattctccaagtggatcgaggcggtggcgttcttcaccaacatcatccatcgtttcggggtcccgaactccatcatcaccgacaacggcacccagttcaccggcagaaagttcctagacttctacgaggatcaccacatccgggtggactgggccaccgtggctcatcccatgacgaatgggcaagtagagtatgccaacgacatgattctacaaggactcaagcctcggatctacaacgacctcaacaagttcggcaagtga

SEQ ID NO: 5729 - DNA, 767 bp, Zea mays
  Peptide Sequence Number=SeqID_47508
atggcgcccaccggagctacattgtctgcctgctcgacgccgcaagtggtggccagctccactgctctcaccgctagccgtctgcaggaatatgagccgtacacttgcgatggctctgttgacatcaacggcgacccagcgtcgaaaaagcacactgggaaatggagagcctgctactcgattcttggtggtgagttctgcgtctctttggcgtactacggtgtggggacgaacctggggatgcttgtactgacacttgcggcagcaagcattcatgcactggacatctctccccagggccaggacgccctgccttcccttggccttttcctggccgccctaggcctgggtggcgtgtggccatgcgtgcccacgtttggggccgaccagttcgacgacaccgacggagcggagaaggcgcagaaggagcggtactacaactggtactacttcgccgtcaatggcggctccctcgcgagcacgctcctcgtgtacgttcaggacagctggggctggggctgggggttcgggatacctgcgctgttttcggtggttggaatagctgggtttcttgccagcaccaagctttacaggtaccagaaaccgggagggagcgcactcaccagggtttgccaggttgtggttgccgccgtccggaaggcccatgtggacgtgccgagcgacagctctctcctgtatgaagtgccaggcaaggaggcggcggcggtcgtagggagcaggaagctggtgcacactcaagggctaag

SEQ ID NO: 5730 - DNA, 681 bp, Zea mays
  Peptide Sequence Number=SeqID_47509
atgaatgatccaggggaatatgtagactatggtgatgttgtgacctttgatacaacacccaaggaccatctatatgataagccactgggcatgtttattggagatcaagatcctgcaatgccaattgctctgcgaaatgatgatcataatattgtgaccggatgtggatctgcgttagaactagttccagttgggaaacaggtcgacaacagtaacatgcatcagttggtgtgtgatacaagttctccgttgcatgtatcacacgaccaaatcgaacagttgggtacatccacagaagctaagaagaggttggattttaatgtggatgttataaacctgggtatgctggatcgagcaaaaccaaaaggtcgaacaataaaaaatacagaagaaaggattctgaaactaggtgccaaaggagaaaaaaagaagaataggagatgccagctatgtggaattgcagatggacacaacaacatgacttgtttgtctctggaagagaacatagcaagactagccacactggcaaatcgaaaaagaggacgtccaccgggttcaagaatcaatagtaaaacaaatgttccacaatggaatgaaacctccacgacaaaaaacatcgtatggttgaagaagaagacaatgaatcaactggtgaacagatgggtatgggtgaagaattag

SEQ ID NO: 5731 - DNA, 1458 bp, Zea mays
  Peptide Sequence Number=SeqID_47510
atgaacgccgacttcggcgcgcccaaggagctcgcgggaggcctgcagcagcggcgggccctgtaccagccccgcctcccgccatgcctccagggaccgacggtaagggcggaggtgggcgtggtgttctctgggaggcagtcgccgggagggcacaacgtcgtctggggcctccatgacgcacttaaagcctacaatcctcagagcttgctctacggattcgtcggtggcacggagggactgtttgcaaacaagacgttggagatcacagacgatgttcttgcttcctataagaaccaaggtggtttcgatttgctcggtaggagtatcgatcagatccgcactactaagcaagtgaatgctgcaatgacaacatgccacagtctgaacttggatgggttggtcatcattggaggtgtgacctccaattcagatgctgcacagcttgcggagacccttattcagaataactgtaagaccaaggttgttggtgtgccagtttcattgaatggtgacctcaagaaccagtttgttgaaacaacagttggatttgatacagtatgtaaggttaattcacagcttgtaagcaatgtttgtcttgatgcgatctcagctggaaagtactattattttgttcgtctgatgggacgaaaagcatctcatgttgcctttgaatgtgcacttcagtcacacccaaacatgctcatcttaggcgaggaggtagcattgtcaaaactcacactgatggaaattataagcaagatatgtgatggagtacaagcaagggcagaattagggaaatatcatggtgtgcttgttattcccgaaggacttatagaaagcattccagaaatgtatgctcttattcaggaaatcaatatccttcacaacagtaatgttcctgtggctgagatgtcatcacaactgtctccgtgggcagctgctctgttccagttcttgccacccttcatcaggagagagctgctgctccaccaagaatcagataactctgcgcagttgtcccaagtttgtgattctgaatgcccaacaacaactcaatcaaaacttaatattgacacggagcaactgctggcccatctagtagaaacagaaatgataaagagaacgaaagaaggaaggtacaagggaaggaagttcagttcagtatgtcatttctttggatatcaggctcgaggatctacaccatcaaatttcgactgtgactatgcttatgctcttggacgtatctccctgcatatgattgcagttggattgactggctacatggcaactgtggctaatctgaaagaccctgttgacaaatggagatgtgctgctgctcctttaactgcgatgatgagtgtgaagaggcatttacgtggccctggagcaatccctatagggaggccttccattcacccttctccaattgacctgaaagggaaggcttatgagtaa

SEQ ID NO: 5732 - DNA, 318 bp, Zea mays
  Peptide Sequence Number=SeqID_47511
atgaagctccaaaatgctctatcaggctgtctgatggagttggccatggtacagtgctcgtgcagatcaaaccgccagcgcaaaatgttcaccgccagcgacctctttgcgccaaaattcgtgccgccgccgtccgggttcgtgcgcgataggaaatggatagagtcgaagttaaacggcgcatacgtggcaccgttccctgagtccagccggagacttcaccggcggccaccgagaccagtgaattccgccgcggtggcgctcatgccgaagttctcccgcactgtacctcctaccgacgtggtcggcatgcgctag

SEQ ID NO: 5733 - DNA, 3183 bp, Zea mays
  Peptide Sequence Number=SeqID_47512
atggagggcgagctggcggcggattacaccaactacacggtgcagatcccgcccacgcccgacaaccaaccgatgatggacccggcgtccgtggccatgaaggccgaggagcagtacgtctccaactcgctcttcaccggcgggttcaacagcgtcacgcgcgcccacctcatggacaaggtcatcgagtccgaggtgacgcacccgcagatggccggctccaagggctcccgctgcgccatgcccgcctgcgacggcaaggtcatgcgcaatgagcgcggcgaggacatcgacccctgcgagtgcagattcaagatctgccgcgactgctacctggacgcacagaaggaaggctgcctctgcccggggtgcaaggagcactacaagatcggcgagtacgccgacgacgaccccaacgacgcgtcctcggggaagcactacctgccagggccgggcggcggcatgatgaacaacagcaagtctctgctggcgcggaaccagaacggcgagttcgaccataatcggtggctcttcgagagctccggcacctacggctacggcaacgcgttctggcccaagggcggcatgtacgacgacgacctggacgacgagggcggccccggcggcggtggaggcgacggtatgctcccggagcagaagccgttcaagccgctgacccgcaagatacccatgccgacgtccatcatcagcccctaccggatcttcatcgtcatccggatgttcgtgctcatcttctacctcacgtggcgcgtccgcaaccccaacatggaggcgctctggctctggggcatgtccatcgtgtgcgagctctggttcgctttctcctggctgctggacatgctcccaaaggtgaaccccgtgaaccggagcacggacctcgccgtgctcaaggagaagttcgagacgccgtcgccgtccaacccgcacggccgctccgacctgccggggctggacgtgttcgtgtccacggccgacccggataaggagccggtgctcaccacggccaccaccatcctgtccatcctggccgctgactacccggtggagaagctggcgtgctacgtgtccgacgacggcggcgcgctgctcaccttcgaggccatggcggaggctgccagcttcgccaacatttgggtgcccttctgcaagaagcacgacatcgagccccgccagccggacagctacttcagcatcaagggcgacccgaccaagggcaagcggcggtcggacttcgtcaaggaccgccgcaaggtgaagcgggagttcgacgagttcaaggtgcgcatcaacggcctgcccgactccatccgccggcgctccgatgccttcaacgcccgcgaggacatgaagatgctcaagcacctgcgcgagaccggcgccgatccggccgagcagcccaaggtgatgctgaagcctccttctcccgaccctctgtacgggatgcacgacgaggagcagctgatcgacttcagcgacgtggacatccgtcttccgatgctggtgtacatgtcccgcgagaagcgtcccgggtacgaccacaacaagaaggctggcgccatgaacgccctggtgcgctgctccgccgtgatgtccaacgggcccttcatcctcaacttcgactgcgaccactacatcaactacgcgcaggccatccgcgaggccatgtgcttcgtgatggaccgcggcggcgagcgcatcgcgtacatccagttcccgcagcgcttcgagggcatcgacccctccgaccgctacgccaacaacaacaccgtcttcttcgacggcaacatgcgcgcgctggacggcctgcagggccccatgtacgtcggcacaggctgcatgttccgccgcttcgcgctctacggcttcgacccgccgcgcacaaccgagtacacgggctggctcttcaagaagaagaaggtgacgacgttcggcaaggcggaccagggcgagacggacacgcagtcgctcaacagcaagggggcggaggacttcgacgccgagctcacgtcgatgcttgtgcccaggcggttcggcaactcgtcggcgctgatggcgtccatccccgtggccgagttccaggcgcgaccgctggcggaccacccggccgtgctgcacgggcggccccccggctcgctgacggtgccccggccgccgctggacccgccgaccgtggcggaggccgtgtccgtcatctcctgctggtacgaggacaagacggagtggggggaccgcgtgggctggatctacggctccgtgacggaggacgtggtgagcggctaccgcatgcacaaccgcgggtggcgctccgtctactgcatccccaagcgcgacgcgttcctgggcacggcgcccatcaacctgacggaccgcctccaccaggtgctgcgctgggcgaccgggtcggtggagatattcttctcgcggaacaacgcgttcctggcgtcgcggaggctcatgttcttgcagcgggtggcctacctcaatgtcggcatctaccccttcacctccatcttcctgctggtctactgcttcatcccggcgctgtccctcttctcgggcttcttcatcgtgcagacgctcaatgtcgccttcctctgctacctgctgaccatcaccgtcaccctcatcgcgctcggcgtgctcgaggtcaagtggtcgggcatcgagctcgaggactggtggcgcaacgagcagttctggctcatctcgggaacaagcgcgcacctgtacgcggtggtgcaggggctgctcaaggtgatggccggcatcgagatctccttcaccctcacggccaaggcggccgtggacgacaacgaggacatctacgccgacctctacgtggtgaagtggtcgtcgctgctcatcccgcccattaccatcggcatgatcaacgtcatcgccatcgccttcgccttcgcgcgcaccgtctacagcgacaacccgcgctggggcaagttcatcggcggcggcttcttcagcttctgggtgctggcgcacctctaccccttcgccaaggggctcatgggccgccgcggcaagacacccaccatcgtcttcgtttggtcgggactcatctccatcaccatctccctgctctgggtcgccatcagcccgccggaggccagcgccggcggccgcggtgctggcttccagtttccttga

SEQ ID NO: 5734 - DNA, 255 bp, Zea mays
  Peptide Sequence Number=SeqID_47513
atggctccagcggaggcaggcgtagatgggagacgcgacgtcgactgcggcgaggatggctccattggcgtggaaggcggcctggggaagggcgctaggatttggggcgaggatggctctagtggaggcgcggtgttgatgggaggcgcgacagctgcgttgatggctcgggcgctgttggaggtggccgcgctgatggctcaggcgcagttggaggcgccacacgatggtggtggactggcgagggcatggtga

SEQ ID NO: 5735 - DNA, 186 bp, Zea mays
  Peptide Sequence Number=SeqID_47514
atggagagtcatgatctccgggcagaatgggaatcacggcttgtgggtggttatgagattgatggttttggttatgactatgatgctgggctggaacctgaaacctcttgtagagagaccatcgtgaatgatggcatgtacagccacctgcagatcatccaaacaatcagccgcaggcccaagtga

SEQ ID NO: 5736 - DNA, 288 bp, Zea mays
  Peptide Sequence Number=SeqID_47515
atgacgcccttctacgagaatgagggcggcgcggtcaggggaccctccctgagcgagttcccagctcgtggtgctttccgtgatgaagatgtccaggatacttatatgcagggggagggacacggaggttgcgaggaccccgattcttcccgtgatccacggcacaagccctcccggccaccacgcgactctgttggcgaaaaactcggtcatctgttgctaccgacctgggggttggggatggacctgacgcctgggccccgcatggaagaggcagtaattccatag

SEQ ID NO: 5737 - DNA, 2172 bp, Zea mays
  Peptide Sequence Number=SeqID_47516
atgccgttcggcttgaggaatgcgggcgcgacgtaccagcggtgcatgaaccatgtgttcggcgaacacattggccgcacggtcgaggcctacgtcgatgacatcgtagtcaagacgaggaaagcttccgacctcctttccgaccttgaagtaacattccgatgtctcaaggcgaaaggcgtcaagctcaatcctgagaagtgtgtcttcggggtgccccgaggcatgctcttggggttcatcgtctccgagcggggcatcgaagccaacccggagaagatcgcagccatcaccagcatggggcccatcaaggacttgaaaggcgtacagagggtcatgggatgtctcgcggctctgagccgcttcatctcacgcctcggcgaaagaggtctacctctgtaccgcctcttaaggaaggccgagtgcttcacttggacccctgaagccgaggaagctctcgggaacctgaaggcgctcctcacaaaggcgcctatcttggtgcccccagctgccggagaagccctcttggtctacgtcgccgcgaccactcaggtggttagcgccgcgattgtggtcgagaggcaagaagaggggcatgcattgcccgttcagaggccagtttactttgtcagcgaggtactgtccgaaaccaagatccgctacccacaagttcagaagctgctgtatgcagtgatcctgacacgacggaagttgcgacactacttcgagtctcatccggtaactgtggtgtcatccttccccctgggggagatcatccagtgccgagaggcctcgggtaggattgcaaagtgggtggtggaaatcatgggcgagacaatctcgttcgcccctcggaaggccatcaagtcccaggtcttggcggacttcgtggccgaatgggtcgacacccagctaccgacggctccgatccaaccggagctctggaccatgtttttcgacaggtcgttgatgaagacgggagccggcgcaggcctactcttcatctcgcccctcaggaaacacatacgctatgtgctacgcctccatttcccggcgtccaacaatgtggctgagtatgaggctctggtcaatgggttgcgggtcgccatcgagctaggggttcggcgcctcgacgcccgtggtgactcgcagctcgtcatcgaccaagtcatgaagaactcccactgccgcgacccgaagatggaggcctactgcgatgaggttcggcgcttggaagacaagttctacgggctcgagctcaaccacatcgctcggcgctacaacgagactgcggacgagctggctaaaatagcctcggggcgaacaacggttcccccggacgtcttctcctgggatctgcatcaaccctccgtcaagatcgacaacacgcccgagcctgaggcgccctcggcccagtccgagaaggcacccgggggctacacgcacctgctggtcgccgtcgacaaattctccaagtggatcgaggtccgacccctgaacagcatcaggtccgagcaggcggtggcgttcttcaccaacatcatccatcgcttcggggtcccgaactccatcatcaccgacaacggcacccagttcaccggcagaaagttcttggacttctgcgaagatcaccacatccgggtggactgggccgccgtggctcatcccatgtcaaatgggcaagtagagcgtgccaacggcatgattctacaagggctcaagcctcggatctacaacgacctcaacaagttcggcaagcgatggatgaaggaactcccctcggtggtctggagcctgaggacaacgccgagccgagccacgggcttcacgctgttcttcctagtctacgggaccgaggccgtcttgcccacagacctggaatacgactccccgaggacgagggcctacagcgatcaaagcaaccaagctagccgagaagactcgctggaccagctggaggaggctcgggacaaggccttactacactcagcgcggtaccagcagtccctgcgacgctaccacgcccgaggggtccggtcccgaggcctccaggagggaccgttcgtcatcgccaaggttctgaagcccggaacgtacaagctggccaacagtcaaggcgaggtctacgacaacgcttggaacatccaacagctacgtcgcttctacccttaa

SEQ ID NO: 5738 - DNA, 309 bp, Zea mays
  Peptide Sequence Number=SeqID_47517
atggcgtggaggtccaggatgagagatcgtgggtttgggaccaaagcgtggtgggtgaggggaaggcggcggcggagcgagaggaggaggaggaggttctgcggacccaaaattggagagggagcggcggacaaaactcgactgttcagggagcctgtggtcctgttcggcggagtgcgaagaggcgctggccctgtcctgttcctgacgtccggcggagtgcggagaggcgctggcctaggctgggacccacggaagagtgcgaacccgccgaatgcggggaggcgtccaaaaggcttcacattttaa

SEQ ID NO: 5739 - DNA, 1497 bp, Zea mays
  Peptide Sequence Number=SeqID_47518
atggagggtctggggcacctgctgctgttcgccttcctcttctggttctccaccttcatggtcgcaccggtgatgaccgacgtcaccatggcggcgctctgccccggccgcgacgagtgctccctcgccatctacctcaccgggctccagcaggcggtttcagggctgggggcgctggtcctgacgccggtggtcggcaacctgtccgacaggtacggccggaaggcactgctggcgctgcccgccacggcgtccatcgttcctctcggcatcctggcgtacggccggaccaagggttacttctacgcgtactacgtgaccaagacgctgacggcgatggtctgcgaaggcaccatgatgaccctctcgcttgcctacgtggtactcctactacctacctacactacataccaagctgccgccgtttgtccgtcaccatctgacagacgggtgcaagtttgtccccctggatccctccctcccgcgcaggccgacagggtgccggagacgaggcgcgcggcggccttcggcgtcttctccggcgtctgcagcgccggcttcgtcggcggcaccgtggcagcccgcttcctccccgtctcatccacgtttcaggtctcagcggtggcagccgtcgcgacggccgtctacatgaaggccttcctccaggagacggacggcggagcctccgtatcctcctcttcctcctcctcctccggcagcggcagcgacgaggaggcggcctgccgccggccgctctgcctcccctcctccagcagtagcgaggaggcggcgtcgctgccaaggctcccgccacttcggaaggcgccgtcgctgtcggagattgcagccgctcttaccagcagctcgaccttctgctgtgcggccgtcgtcacgtttttccacggcctcggtgagacgggcctactgagcgcactactgtacttcctcaaggcgaaattccactacagcaagaaccagtatgccaatctgctacttatcatcggcatcacaggaagcttctcgcagctaactgtgatgccactcctagtgcgaaagctaggtgagcagaagctacttgtcatatcactagtggcgagctgcgggcaggttaattcagcaaataactatttgattggctgcgacttcgatgtgcaggcattcctatacagcatctcatggtcgtcctgggtcccatatcttgccgcaagcagtgtaatattaagcatgctggtcacaccttgtataagaagcatcgtatcaaagaaagtgggaccttttgaacagggaatggtccaagggtgcatgactggaataagctcgaccgcaagtgtcgtatctcctctaatctttactcctctcacagcctggtgtctatcagaagctacgcctttctacttaaaaggtttcagcgttgcctgtgctgggtttgcaacgctggtagcgttggcgacgagcataagtatgaggccagctgaagtgcagccagataggaaatag

SEQ ID NO: 5740 - DNA, 345 bp, Zea mays
  Peptide Sequence Number=SeqID_47519
atggcgagcagggggaatggagaggaagggcttcaaccatggctttataggccaagacaaggcgagggggtgtcggggaagggcagagaaacggcggccggccatcatgccattgatggcgttcatcaatgggggagaaacgaacgatttgatgctccattaacgcgagaggcgaactgcgcgggctcggtcgggtcgcttgggctgctcggtgcggggctcgtcagggcgcgggcggctgcgcgcgcaggggcgtcgggggtcgcggtcgggcagggcgcggcggctagcagggagagaagggaggaggagggagtaggtggaggcggcgctgatgggaactag

SEQ ID NO: 5741 - DNA, 201 bp, Zea mays
  Peptide Sequence Number=SeqID_47520
atggcctcggaccgtagatctagagataaatggtccatattaggttatgtcataccagttcggatgggagcaatcctggccgccgtgtgccgatcggatggttctgatgggcgctgggacgagcaagccacagaggatctaggggttcagcaggtggagactgctgagcaggagctcgttgaagccaagttgtgcccttga

SEQ ID NO: 5742 - DNA, 366 bp, Zea mays
  Peptide Sequence Number=SeqID_47521
atggcaagaatggtggggtctcaccggacgacgagcagcgaggttgacagatcgacgaccagtggtgctgcacaaagagtagcgcggtccagagacaaggcgacagaccaagtgagggacgagctgcagaggggaagatggagggaggaggcatcggctggaggtgggtcgagactgagagacgatgaccgaatccgagcactgcaggggatgaggacacgggagtgtccagggcgagcaccgacgtgtgagacagggtcccgtgcgagcagttaccgacggcgtggacacaccagggaggcgcgactcaaggcaggaaaggcaggggcgagcagtgagataggagaagggcggccatggagatga

SEQ ID NO: 5743 - DNA, 165 bp, Zea mays
  Peptide Sequence Number=SeqID_47522
atggcgagagtagcgtgtaccctccgtggcaagaggctggacggtggtgtatctgtgctctcggttgacgtgaagaagcgacaaacttttgttgcttctgttctaaggtggtaccaagggaagagcaccaggaatgaagttgcgggaggaaaggatcctccataa

SEQ ID NO: 5744 - DNA, 321 bp, Zea mays
  Peptide Sequence Number=SeqID_47523
atgccgctctcgccgtcgctcgagctagacctgttccaccgcgcggcggccgcgggcacgggcgccgccgccgtacgctttcctttcggcaacatccccgttacgcactcgtactatttcttcgggcaggccgcagccgccgcggaagtagggtgtcgtgtgctcaagctggcgtcggcggtcaccgtggcgcagagcgactcagactgttcttcggtagtggatctgtcgccgtcgccaccggccgctgtgtcggcgaggaagcccgtcgtgttcgatattgacctgaactgctcaccgccgacggaggcgggagcatag

SEQ ID NO: 5745 - DNA, 192 bp, Zea mays
  Peptide Sequence Number=SeqID_47524
atgacgcgcggcgggtcggagggaccaggagttaccagtgtgcgattagtgtccggttaccgtggccatctccccggcgatggacagaaggttaaagcgggtcacggcgacgcgatggaggtgccagggcacgtgcacaaggccggaaaggcggcagtcacagcgagcttatccaaagttgtttactgcact

SEQ ID NO: 5746 - DNA, 333 bp, Zea mays
  Peptide Sequence Number=SeqID_47525
atggctagacgtggagggggatgccttgtccgcgacgtgcgcatggttggcggagggggcggtttgggagggatgacgggtgggcccggcgacacagcggcggcggcggcggcagctgggcaagcgcgcgcaggcggctgggcgtacgcgcagcagcgcgctagggcaaacgcgcgcagcggcgcgggagtgggccgagcaggctgcggctggaccggggagctctgggccgcgcgggagagcgcagggggggctaggtgggccacgcgagagctgggctgcggggaggcgtgctgggccacgaagggggggcggagtgggccgcgctgctga

SEQ ID NO: 5747 - DNA, 642 bp, Zea mays
  Peptide Sequence Number=SeqID_47526
atggctagacgtggagggggatgccttgtccgcgacgtgcgcgtggttggcggagggggcggtttgggagggatgacgggtgggcccggcgacacagcggcggcggcggcagctgggcaagcgcgcgcaggcggctgggcgtacgcgcagcagcgcgctagggcaaacgcgcgcagcggcgcgggagtgggccgagcaggctgcggctgggccggggagctctgggccgcgcgggagagcgcagggggggggctaggtgggccacgcgagagctgggctgcggggaggcgtgctgggccgcgaagggggggcggagtgggccgcgctgctgatgggctgagggaggacgagttcgacgggaacgaggcggggagggccgagggaaacggcgcggcggcgggcttctgcgcacagtgcagtggggagcgcgcatatgcgcatgtcacgctgggcagggccgttggctgtaccggcaggggaacccaccggagcagaggcgccgcaccacggggcgagcctcatccgcggctggcacgcgacaccgagacgccggagttgggcgagaacggacgagatgagcatgcttttgggggggttctagcgaagatgggcgcgaggggaaggggctcggcccctcactga

SEQ ID NO: 5748 - DNA, 115 bp, Zea mays
  Peptide Sequence Number=SeqID_47527
atggggagggcgccgtgctgcgagaagtgggctcagcgaggagtgacgcgagagacagtacttgccactacattgcgagcacggcgagggtcctggagtcgctgccaaaatgcaa

SEQ ID NO: 5749 - DNA, 246 bp, Zea mays
  Peptide Sequence Number=SeqID_47528
atggggagggcgccgtgctgcgagaaggtggggctcaagcgagggaggtggacggcggaagaggaccagttacttgccaactacattgcggagcacggcgaggggtcctggaggtcgctgcccaagaaatgcagctgccggctccggtggatcaactaccttcgggcggacgtcaagagggggaacatctccaaggaggaagaagacatcatcatcaagctccacgccaccctcggcaacaggtaa

SEQ ID NO: 5750 - DNA, 252 bp, Zea mays
  Peptide Sequence Number=SeqID_47529
atggggagggcgccgtgctgcgagaaggtggggctcaagcgagggaggtggacggcggaagaggaccagttacttgccaactacattgcggagcacggcgaggggtcctggaggtcgctgcccaagaatgcaggcctgctccggtgcggcaagagctgccggctccggtggatctactaccttcgggcgacgtcagaggagacatctccaagaggagagacacctcttcatctcgcgcaccctcggcaacag

SEQ ID NO: 5751 - DNA, 285 bp, Zea mays
  Peptide Sequence Number=SeqID_47530
atggggagggcgccgtgctgcgagaaggtggggctcaagcgagggaggtggacggcggaagaggaccagttacttgccaactacattgcggagcacggcgaggggtcctggaggtcgctgcccaagaatgcagttaggacgcgcatgcaggcctgctccggtgcggcaagagctgccggctccggtggatcaactaccttcgggcggacgtcaagagggggaacatctccaaaggaggaagaagacatcatcatcaagctccacgccaccctcggcaacaggtaa

SEQ ID NO: 5752 - DNA, 333 bp, Zea mays
  Peptide Sequence Number=SeqID_47531
atggctgcgccaacagggtacatgcccaatctgcaagcaccagagacactgacattcatcaccccccttgagcaagatctaattaaggaacatgagctgaaacttcaagccgagagccaaaccctcatgctggaagtcactcaagggagggcaaagatttctggtgggtactcattctctggtttgtcatttcggtctcttctttttatttcttactttgcatcatgcagagctcgagggcagtctagcctaggaggcgttgaagtctcaaggcctaaagcaggaggtcgactagatctgggagtccatggcgaaggagtgcaacgagcatga

SEQ ID NO: 5753 - DNA, 528 bp, Zea mays
  Peptide Sequence Number=SeqID_47532
atggccgaagacaagaggagtgaggaccccgcacaggctagactttacaaagctatggagaggaccaatgctgagaaaataatcgatgagattttagctgggttgtctgaagattctggagacaacaaagatattgatgttgacagcgataatgataatgacgagcagctaggcgcagacaggagtgagcacgacgtggacatcgatgggcgcggagatgacagcatcgagcgaggcaccagtgagtggcacagcagcaggcggcagggacaacggcgagcagcaacgaagggaccaaagctccggcgacaggacatgcagctcgacaccgactgggggagcttcggcgacgatgacgctagtggcaaggcacgagcagcaactttgtgtgagagaggagcagggaacaggctcgacgaagaggtgttgtatctcgacgcggtggccggtgggcgactgcagcaagcggcgcggcagcaacgtgacaacaacagtgcacggggaggtggaactgaggcaaggaattaa

SEQ ID NO: 5754 - DNA, 582 bp, Zea mays
  Peptide Sequence Number=SeqID_47533
atggaagtgagcgtgctgagcgagagggagaggccgcggggtcggttgactggtgagcgggtcccacaggcagcgcttctggtctggtgcctggacgcggctgggacgctggtgaccagggcccaccgatgcacaaacaaaaatcccaatatgatgcacaatttaatggcttttattaatcctttgtttttaaatgaggtgttcacttgtgataggatacagtccttcaaatgcagggttaccctaagtcttaggttgctccacctcatcaagatggatttagggtgttacatttttctccttgagcgtaacatctcagttccaattagagggagcctgagacggagcgctctagtcaacgcaaaggagttgcagccccgaaaagggcccttgaccaacatcccgcatataaaacaacatcctatgtcagcctttgttagacaaggagaggggaatcaggatgtacttgcgctacctcccactgttgagacggatgctggcgcacccgacttgccacgcttacgtcattatctgctcctcgctcttctgcaacagctcgacacagaagaagtaccaccataa

SEQ ID NO: 5755 - DNA, 300 bp, Zea mays
  Peptide Sequence Number=SeqID_47534
atggacatggtgaccactgaccaagactggaagacagctatcaggtcaggaaggaccggacccatctacagtgagcaaagagatgaactctctcaaccatcatggatgctcaccttcactcgagtcgagtctcgagtagttgctccagaacagaagcaatggtcctgcggcgtccttactgctttggtgaggctccgtgtcttccgaaagcctactccactaatattgttggttccaggatcgagtgcttcattgcgcagttgtcttgtctccaaacaatgctgcaggattgaacaataa

SEQ ID NO: 5756 - DNA, 180 bp, Zea mays
  Peptide Sequence Number=SeqID_47535
atgggtttaacgggcttagaggcccgcatagaaccaggtcgtgccgagcttggaccagacccaaacaacggccttcgtgtcgggctcacgggcctcatgcttattggacatctatacgcgaggctctgtctggtggatcccggaaagccacagttcatgagccagactgccacacggtga

SEQ ID NO: 5757 - DNA, 156 bp, Zea mays
  Peptide Sequence Number=SeqID_47536
atggccggggatgcggagttgcctctcgaagaggcggaggccgcgatgagatccgccgacgacgacagcgtcacggccacggtgctggcacctcccttcgtcaataaaccatatttcctgtacgaggctggccgttgtcatgtttatgttcctcat

SEQ ID NO: 5758 - DNA, 1077 bp, Zea mays
  Peptide Sequence Number=SeqID_47537
atggcgggggatcggctgagctgggcggggctgctcaaatggagcctctcctacgtcgacggggcgggaccctctcgcgccgtcagagaggaggagcggcggtggctggcggacgcggtggagcagcacatgatgatggacgtggtgagccggatgagggagattgcgctgctcatgagcaccccgcccgccgtcctggaggcgcagggcatcacccacgacgacatcgaagttatcaagtacctcagaaattctaatgctcgtatccgagcgaaggcagctgatgtggtaacaacagtggttcagaacaatccgaccagccagcagttggtcatggaagctagtgggtttgaacctctcttatccaatttcagatcagatcctgaccttactgctcggataaaagctcttggtgcactatcttctctgattcgaaacaacaaaccaggagtttctgcatttcgtttagccaacggatatagtggactaagagatgcattgaattcagaaagtgcaaggtttcagaggaaagcattgagtctgactcactatctgctcagcgaaagccattcagattgttcagtatttgcacagttaggtttcccccaccttatgatgcgtttggcatccagcgatgactccggtgttcgagaggcagcattagggggcttgcttgagcttgcaagggacacgacacttggaaataggaatctactagcagaacatgacaggttacgaaggcttctccgtggacgtatggaaagcataaggacgatgactcctgaagatttggatgctgcacgagaagagcggcagcttgttgactcactttggatcacatgctaccatgaaccctccatgctccgcaatgaagggctccttgttctgcctggggaggaatcctttgagcaacctcctgatgtggctggtagattgttcgagccaatgcgccgagcttctgctaggagggcaccccctgctgagagatcagacccaagggatgaaactgggggaggaatggttttgcttttaggtggtccagcacaagatggtagatcaaactcccccaatcactga

SEQ ID NO: 5759 - DNA, 1290 bp, Zea mays
  Peptide Sequence Number=SeqID_47538
atgaagcagctgatgaacgcttcccggcaaggccgccacggccgcgtcctccaccttctcttcacccacctacgacgcggcgacaggggcgtggtagagctgcaccgcgcggccgtccccacggcactccgcgcctgcgcgcgcctcggaaacgcctcttccggccgcctaatccacgcgctcgtcctcacccggttcccgtccctcgcctccgacgccgtcgccgccaccgcgcttctcgacatgtacgccaaatgtggccttgtcgcgagtgcccagagggtgttcgacgaaatgccgagtagggatgacctcgtcgcctggaacgcgctggtcgcatgctacgcgcgccacgccctcccggagcgcgcactggtgctggctatcaaaatgcggggccagtgcctgtgccccgacctggtgacatggaacgccgtcgtctccggttttgcactggccggcgacgaccaaatggccacaaaattggtcggcgccatggaggtggacgggttccagccggacgtggtcacttggacatcgcttgtatccggctcggtgctgaacttccacatcctgcctgcgttcgccaatgttgctgacgtgaagcgtggcaaggaagtccacgcctacgccgtggtgaccggcgtcgaacaggagctcaatgtgagcagtgctctagtagatatgtacacgaagagcgggtttgtggtcgaagcccgcaggctgtttgacaagatgtcggaaagaagcacggtgacatggaattccatgatcttcgggctggcgaattccggtcactgccaagaagccatcggtctcttcaaccggatgctgtgcgacggagcaaggccggatcacctgacgttcaccgccgctctgacggtttgcagctacgccggcatggtggagctcgggaagggcctgtaccgcgccatgcaggaagaacacggcatcgagccgaggctggagcattgtgcatgcatggtgcatttgcttggccgagccggctggctcgccgaggcttatgatttcatcaaagccatgcccctggggcctgactgcttcgtttggggggcgttgctgggggcatgccggagccatggcgacatcaagcttgccgagctggctgcgtcccacctgctaaccgtcgagccggccaatgcagcaagttgcctcctactctcggactcgctggcaagtgtaggcagacaagatgatgttatgaagatgaagaggctggcaaagagacggcgcatgaagaagctgcatggctgcagctggttagagtga

SEQ ID NO: 5760 - DNA, 378 bp, Zea mays
  Peptide Sequence Number=SeqID_47539
atgtcgggagatcacgccaagaaggagatggtgaccggcgagaagcccgccacaagccatgggaagggtccatccggggagtccggcaacaaggtgaagggatccccttcacacgacaagtcgcgtcggagcgacgagaagaaaaagaagatgaataaagtggtctactacgagaccgactcttcatcgccatccacctctggctctaacacgccgtccgtcacttctaagcgccatgagcgcaagaagtttagctccaagaagatcatcgagcaaggcgcctcctcctccgtacccgaagcacaacctgttgcattcaaggcaacggaggagaagaaagaagactctacaccgagtagggtcctgtcggcgttttga

SEQ ID NO: 5761 - DNA, 492 bp, Zea mays
  Peptide Sequence Number=SeqID_47540
atggcggatccgcggcggtctgtagacaacggcgagcaattcctgtcgggtagtacaagtccaggggccgaggaacccgtggacaccaccgggacgacgtcgcgatcaccccagatcaagcaccgaggcacgtatgccggtgaatctactggtcgacaacgacggacagtggcctactctcacgggtgttacgatggtgagggcaaaggggaagcggggcctcggttcttatacccgagcgccggcgaggtccgagtccgcgcttgcggagaagacggacctgcccaggggtcccaccagcagcggaagaagggaaggaggagggcgcgcccgcgaccgacatgggtggcccgcatggaagtgagcgtgctgagcgagagggagaggccgcggggtcggttgactggtgagcgggtcccacaggcagcgcttctggtctggtgcctggacgcggctgggacgctggtgaccagggcccaccggtcagcgtag

SEQ ID NO: 5762 - DNA, 621 bp, Zea mays
  Peptide Sequence Number=SeqID_47541
atggaatcggtgtgggaggagaccacactgaggccgacagcgcccgacggcaggggaagaggaggccgcgtcggggagcgcacgcggcagggagaaggccggctggggaccagcggtcgacagaggagagctggaggaggaggtcacgaaagtcggcgacggggcagagatgcggaggggccagacgtggcgggatcccggcgaggagaggccgggcgcagcgggatccgacacagggcggccgcggggatccagcagggcggtcgcggactggggggcgagaccggtagagagggcgcgcggtggcagggcgcctgggcgcggctcgggacagagaggcagaggagccggcgttggtcctcctgcgcgcgtcgagggagggcggctcggctgctgctgctcgagaggagggagagggcgctgtgccgggaggccgcgctcgcgccctgcaggggccgcgccctgcgccgccatggtcggggccagggccggggacgccgcgcccgcgccgccggggagacgctccaccaccagggctgccggctgcttgggaaggggaggagccgcgtgccgccggtggaagggtcgggcagaggcggctgcaggcaggccgacgactag

SEQ ID NO: 5763 - DNA, 219 bp, Zea mays
  Peptide Sequence Number=SeqID_47542
atggctatggaccagataacgacggggttggtggcagatcccgacacacgcggcgtggaatcagatttggttaggattctgtttgagttgcgctcgatgggaagaagaactgactgccgagggggcccaccagtcagcaacagagggagatacgcacgggtgagcgcagttgacggggtggtctcacccgtcggcgccgagggagaagagttggcgtaa

SEQ ID NO: 5764 - DNA, 447 bp, Zea mays
  Peptide Sequence Number=SeqID_47543
atgggcaagagcaagaaaggcggaagctcctcgcaccattccggcgacaagcggaagcgcgagccgactcctccttcggaggactttggcgattccgagtactcggaggaggagttctcctccaaatccgagggatcgccggtccatgcctctcccccggcattgtctgacgactcagacgattcccaggggattactgcagaagtgtggacctacattcgggccgtcgagcgcgctgggctcgagggctcggatgagtcggaggtctcctcggacgaggggggctcctctgaatcgtccgaggaggggagcgacggtgacgacggcggcgagggtgacggcggcgacggtgatggcagtgacgatggcagcaagggcaacgacaagggcgacggcggcagcggcaacgacaagggcggcagcggcagcggcaaggccagtggctag

SEQ ID NO: 5765 - DNA, 3698 bp, Zea mays
  Peptide Sequence Number=SeqID_47544
gagctcttgagtaccatcgagtcacaaatcagctgtcaagtattgatacattgctccagcaggaaacagatcaccttaaaatggcagtcgcaaagattgtagctcaaagacccaacttgcttttggttgagaattcagtttctcgatatgctcaagatttgcttctagaaaagaacatatcgttggttttaaatatcaagcagcccctcttgcaacgtattgctcgttgcacaggtgctcagatagttccttctattgatctcctaccatctcagaagcttggttactgtgagttatttcatgtagataaatacgatgaacagtctgttagctcggttaacgtgtcaaagaaaatggtgaagaccatgatgttctttgaaggatgcccaaaaccattgggttgcactgttctgctaaagggtggtagcatggatgagctcaagaaaattaagcatgtggtccagtatggtatttttgcagcatatcacttggcgttggaaacatctttccttgcagatgaaggtgcaaccctaccagaacttccattgttgtctccattgactgtagccttgccagataaacgatctactgcagacagctccatttcagcagtgccaggcttcacaattaatgtttcaattagccagcaaactgatagttttgaccacattggtaccgactacatcatgtcaacccaaccaggtgaaaatgctgtggctgaagcaccagtatccagcgaatgctttagttctcagaatacctactctcattctcttggaccttggtgtgctaataacagcaatttcaataacggcactggtgatggagatggattagctaatgtcactgcaactccaaattctgtttccatatcttctttgtctacatctggtgcactcacaaaccatacttctagatattctagtgtagagaaaaacagtatgcattttggtgattatcatgatggttcaatgaggttacatggtaagacggtgacaatagattcaaccagcacagcaagccattatcaccagagcacagtcaaagctagcactaatatcaatgtcaatgagtcattagaaggtccatatgctttggctaatgtgaaaaccatcaacgagaacaattctattgtagtccaaccagtgtctactgctgctgtacaataccaagagaccagtcaaggagatgatagcacatcaaataaggatgaagtgctgttacgcatcaagtattatggtaactttgataagccccttggaagatttttgcgggattacttgtttgatcagaaaggccaaccggacattcttgagatcaataggctgcgaagacagttactcttccattcatacttgtgggataaaagactggaaagtatttatggagggaatcacactggagttgatgtgggtactgtcaattcgaatcatgtccatcaaatggctacaggcgaattggattcgcttcagagagacatcaaagctcctctatacagcagtgttagtgtaaatggtgagtcgattcccttggaaccagatcttgttgctcgacgcaccctttcagaaggtcagtttcctagtgtattggatgtgactaatgcacttgaagcgaaatggaccggtaaagatgatcctgtttctagcaaggtaaccatgccagaatctacagcatcttcagaggactcagaagaacatatgggtgataatacaccttcatacgcctctatattgctgagcaagctaggggacagtgcagcagatcattctaattggatagagatgcctttcttactattttaccgttccctcaataagcaatggaatcgatcaaaccgatttgatgcactcaacgaatatagtcccgaatatgttcctttcttaagggaagtggagcgtcatattggacctaaatttttctttcctataggaatcagtgatactgttgttggagtttatgatgacgaacctactagcattatctcttatgcgctggcctcccatgaatatcatcttcagatgtcagatgaactggaacgagaaatgacagacacttcactcccactatgtgactcaagaagtgtctcgttaactgaactggatgaatgtacttctgaacttctaagaagtgttgtctctacagaggacattatcctctccatgtctggaagaaagaacccacttgcttcagattcacttgtgcctcgaaaagtaagtcacataaaagtgaattttggggatgaaggtcctctaggacaggtgaagtacactgtgatttgttactatgccaaacaatttgatgctctgaggagattatgctgtccatcagagcgtgattttgtcaggtcccttagtcgttgcaagaaatggggtgctcaaggaggcaagagcaatgtattctttgcaaaaacaatggatgatcggttcataattaaacaggttaccaaaactgaattggagtctttcatgaagtttgctccagattacttcaaatatgtatcagagtcgatttgtactggaagtcctacttgcatcgcaaaaattcttggtatttatcagtccatcgatgtaatggattactctttacttgttggtgttgatgagaaaaggcatgaacttgtaatgggtattatagatttcataaggcaatatacgtgggacaaacacctagagacatgggtgaaagcttcagggatactaggtggaccaaagaatgtgtcgccaacagtaatttcaccaaagcaatacaagaagcggtttaggaaagccatgtcggcctactttcttgtcgtcccagaccagtggtcgcctccagtggtcatccccagcaagcaagctgagagtggtcaagacagggacgaacaggttgtcttgacagaattgctcggcggccacccatattcctccctcggcaccggcaaactcctctgtttctgccccgctggtcgctcaaaggctcagcggtggagcgatgatggagattcctcctttggtgtctcgccggagcctcttcaggtgcaagcttcctacaaggacgtcctaatctcatcaggggagcttgttcatcccgcttcttctcgggaagaggaaggcagctgggttaaggttctcggtcgtcgtgatcgtaggcggcgctcccagtcctcccccctagtttggctcttgtggacttgcgtgggaggtgcttcaactgcttctcgccatctcatcgggttgctgagtgtcggcggcaggtgtggcgccccgtcgtccaagtggcagcgccgatggaagcccctagaggccgtatggaggatcatgcaaggtgtgccgggggaggctctgctgatggcggacgaaggcgtactcgccgtgggccgaggaagaggcggggacggagctctggtggtcatggtgatcgtgatgccgccgatgccccctctccctctttcgcattcagataccactgttgatctggagggttctggtggcgccacggaggtcttgatcgcactaagcttgagttttaaccttgatgctgatgtgatcgacctacgcatggtcgcaccaaattcctccatcgctctatttccgaatgttgggatggatgatcaggttctatctggaggacaatctttgtatgtgccccccattcggttgatcatcaagcgctggtctcgtcaggcaatggtatccggtggtggcgctgctggatattaa

SEQ ID NO: 5766 - DNA, 297 bp, Zea mays
  Peptide Sequence Number=SeqID_47545
atgagagaaggtttggaatgctgggaccgtgaaacacgtgaatatgttgccataaaagttgttcgcagtacccgcaagtaccgtgatgctgcaataattgagatagatgtgctcaatcgtctggcaaaaaatgaaaaatatagatctctatcattcgtattgtatccttcctcggattgcttcttttgttctactacaaatatgctcaacatgacagggagaggtctcgaggtcaagcctggacccactgtcaagtgtgtgcttggacatgactttatcctgcactttctagtgtaa

SEQ ID NO: 5767 - DNA, 267 bp, Zea mays
  Peptide Sequence Number=SeqID_47546
atggggtcgggtgctgctcgccacgcgactagagatagccgcgtgggcaccacgccttcataccgtagtagggggtacccctatttcagggaaccggcacccaagcagtacgactcgtgggtccaggcccccgtgtcagcgactgggtcgttgtttttggtggagatgaaggggcgcactaccgcgggcgacggtttgctcctcgtggcggttcgccttcttcgcacccagagaccgatgcccaaggagtatgactcgtgggcctag

SEQ ID NO: 5768 - DNA, 894 bp, Zea mays
  Peptide Sequence Number=SeqID_47547
atggcgcctccccagacaaggccgtggcatccggcagcggagggccgctcacgctccacactggtggtggggtcgcacatatcctggcagcggagggttcttgcctcgtgctcctcagcacaatggagatggatgcctaggaaggaggaagcagccatctatggtgcgagggagttgcaacccaaactgtctcagcaaaagataccagaattctcttgcaaagacacaagtcagacccctgtacctccactgcaaagggctgctgatgtaactccagtgttcaaccagatattgatgaatgatcaagaagaagaatatgatggcccccctcaaaaggaaattccttctttaattgtctggacccttggaggaaagaatgtatatgttgaaggatcatgggataactggaaatcaagaaaagccatgcaaaaatctgggaaagatcactctcttttgctggtactcccgtcaggagtttaccgatacagatttgttgtagatggagaaaggagatgccttcctgaccttccctgtgaaactgatgcaatgggcaatgcggttaaccttcttgatgttaatgattttgtcccagaaagtgttgagagcgtggtagaatttgagccaccgctttctccagactctagctacagtttccaggcacctgaggacaaggacttcgccaaggagccacctgctcttccagctcaactccatctcggcgtccttaactcacagaactcggaagaaagctgcgcgcggccgcagcacatagtcctcaatcacctcttcatagagaagggctggggcgcccaccccctggtggctctcggcctaacccacaggttcgagtccaaatatgtaaccctcgtcctgtacaaacccatcgaacgatag

SEQ ID NO: 5769 - DNA, 297 bp, Zea mays
  Peptide Sequence Number=SeqID_47548
atggatggaaggccacggtctcttcctcattcacgcccgacgtccaaggctcgacgaacttccatggagacggccctagatgcgatcgggagatcgcctcctgcctctcgcccggatccgcgaaggtctgcaatgctaccaggtgctgcggctcctcagtcgatccaagcacaggcacttcgtcatcgaacgatggcaactaatgtcaatctccattcatcatccagggcaccggctatataccagcaagatcccttggggactgctgatgattacagtgaatttcccaatgaatga

SEQ ID NO: 5770 - DNA, 906 bp, Zea mays
  Peptide Sequence Number=SeqID_47549
atgggcctggaggagtccgcgccgtcctcgcccgccgcgacgctgctgcggccagtcgtcccgagtcgtccgcctccgccgccgccggcggcggcgccggagacagccgcggagaagcggcggaagctgctgggcgcgctggagaagtgcgacgaggacctcaagacgcttcgccggatcatcgcggccgtccgcgccgcggagatgcgcgcggcctccgcgtccgaggtctgcccggctgcagcgaagacgacggcgcatgcgggcaagggcgccacggggacgttcgcccgcgacaacgaacacgtcgaacagtcgccgtcgccgtccccatcgccgccgacgcagcagcagcagcaccccagcccggactcggtgctggacgccatcagctccccgaggttcccatgcaggaagcggccgtctccatgcacggatctcgatgtgggtggcaaggggggcgcttgcggtgccgtcggatcgaagatcgtgaagccctcccgaacccttgttttctccggcgactactgcaagatcaaaccaggcggtgagctgccgctgcacgccgtccattactacccggtgccgctggcggtgggcatgccgaggtcggccggggcggagagctggcggcaccaccggcggcggtgggagcaggaggccgcggcggcggggcgggtgatcagccgcgcgatggcggagagcgtcggggaggcaataatgtgggtgcggcagcagcaggcaggcgcgggcgacgacgagcgcggcagggtcgcggccgcgctggagcgtgccatcgtgcaggacctggtgggcgacctcgttgccgagatgatgcagcagcagcaggcgcaggccgggcacggggccggcggcggcgggtgcaggaagagactgtgcttctga

SEQ ID NO: 5771 - DNA, 588 bp, Zea mays
  Peptide Sequence Number=SeqID_47550
atggccggcggcggcgcccgggggctgtcgcagctggagcgccggtgctccggcgcgatcgtcgggctccgcggcgcgtcgcaggagcgccgccgccgaacagcggtcgtcatcagctgctgcaccgtcggcttcgtcggagaagccgcgggcgaagctgaaggctgctgggccgccgccttctttctgggcgacgacgaggacggcgggggtggcggtgcttgggaggccccgcgctgctggcgcgttcttggcggtgaggcgcttccggtggtggctccggtgccgagcgggagcagcgaagcacggcgtgtgggggcgtgccgcggcattataattggaggcgcgcgtggagggcgcaatataatgacggcatcgcccctgtcgctccggccctccccgcggcgatggcaagggcagctcagggtttcatctcgtgcgagctttgctaggggaggcgacaaaagctgtggactggtggtggtggggtggggcagtatccgagttgaactgcacactccgctgcgcgcgctgcggtggccgctagccgcgtgccttcctgtactactgctgctgccttctggctga

SEQ ID NO: 5772 - DNA, 279 bp, Zea mays
  Peptide Sequence Number=SeqID_47551
atgaagacttttctagcgggtacgagtaacccaacgggtaaaattacccacgcgggtatgggtatggataagattctatacctgcgacattatacgggtaactcgacagagacaaccgatcaagccaaggatggaggcaagaagagtttcaaggtaccgagtgcacgggagaagatcaaggagaccaggaacccaaagccaggggtgaagaagaagacttgcaaagtcaaggttgatcgagttaagatgagttatgatgcaccaaggatcactacataa

SEQ ID NO: 5773 - DNA, 420 bp, Zea mays
  Peptide Sequence Number=SeqID_47552
atgcccagctataacttcgccaagcgcctcaacttcaccctcaatatgatcaaaggtgcttggcaggaaaacaacactatttaccccattccgactactgtgccaaccaccagggtaagactaacaaccgtgagtcacggcctctcccgagttcagcctcgggcgcaacaggggtctccgcctcgcccgaccccaggcctcgacctcagcctcggcctcggaaggaggtcttcgcctcgcccgaccccaggcctcggcctcagcctcggcctcggaaggaggtctccgcctcgcccgaccccagacctcggcctcagcctcggcctcgggaggaggtctccgcctcacccgacctcggcctcggcctcaggagaagtcaccgcctcgcccgacctcggcctcggaccgactacgctatag

SEQ ID NO: 5774 - DNA, 138 bp, Zea mays
  Peptide Sequence Number=SeqID_47553
atgcagcccggcgaggttgaagaagaggggcacgatctggagcggctgggaagattgcgggtggccgagcggatgagagcgagggaaacggcggcggctacgaaaaatcagaggaagggtgagaacgatgacgcgtag

SEQ ID NO: 5775 - DNA, 1023 bp, Zea mays
  Peptide Sequence Number=SeqID_47554
atggcgcttcctgttgacatggctggcctgcgccctaggttgggtgacgtggaggctcctccgaagccgaggtcgagtctgtcttccatggccgaggccgagtccgagcccctgggtcgggcgaggcggaggtcgtcggtagaggccagggcggtgtccgagccctggggtcgggcgaagcggagttcgtcgtcttctggggctgagcccgagccctggggtcgggcgaagcgaagttcgtcgtcttccggcccgagtccgagccctgggtcgggcggagcggagttcgccgtcttccgggtcttagcccgagtccgagccctgggtcgggcggagcggagttcgccgtcttccggggcctggcttcctgtcagcatcactccgtcaagtggcgctgcagtcggagtggcgcaggcggcgctgtccttctgtcagaccggtcagtggagcggcgaagtgacggcgctttatgctgatgggggttaccagctgagaattaggagtcttgaggggtcaaaattacccctacctctccctggatttgttcgtctctctgctggaaacgatctctgcgttcttctcggcttttctctcgccgagcgtggcggacggcttctacgacctcgaggagcgccaggcaggatccgccaccgtgccgggcaggagagccgccaccgcgccgggcagggcagctgccaccgcgccgggcagagctgcaaccgcgccgggcagggccgccatcgctccgggcacgacgccggcgccgcgctcctcgcccccgccgaccacgaggtgtggcacgactgcctccccgtaatcgctgagacggacgcctgcttctcccctgacgccatggccacaaactcctctccaatgtccgcgacgatggacgcgcccaacctggagacgccaacgtcggacagcaagctccacaagtcaggaactgtcaagtcttgtttggagttttcagaagcgcgtaaatggacagatgcaggctgcagctggctttttggcggttattaa

SEQ ID NO: 5776 - DNA, 174 bp, Zea mays
  Peptide Sequence Number=SeqID_47555
ggggtcgcgccggggcacgcaggggaccgtgccgcggtgccgcgccacggggcagcgccggggggccgcgccgggggcgttacaccagccaaggatggaaggggacacgtcaagtgggtaaagatggaaggggcaagctactcaatgacgaagatggaaggggcgctgggctag

SEQ ID NO: 5777 - DNA, 420 bp, Zea mays
  Peptide Sequence Number=SeqID_47556
atggcagtggcgatcagaccacgagcaccggcccccgtccccgtccccgtcctcctcctcttcttcccccttcctagcggcacggcaccaggcccgccctggtggcatctccgtaatttcgcgcctcttcgccgccaaggggtggggccgtgggggtggcaagaggaagaggtatgggcaacgccagcggccgcgaggaggacgctgcagctgttgacggcgacgggcgccgacgtggaggacggcggaggggactcgtcggtccgctcgtcggagcgcgcctttccgccgtacggcagcgtaggagccaaccacgtgcggcgcgcgtgctcggtgggtgtcgtaggtggcggtggaggcgccggatcgccacccgggagtcctggccactcgctctcgccgcggatgttcgtgccccag

SEQ ID NO: 5778 - DNA, 855 bp, Zea mays
  Peptide Sequence Number=SeqID_47557
atgccagctcctgccactcttgagccttccaccacacctgttgcgcccactgcctccaccacactagcttccactactcctgctctcgcttctgctccacctattcctccacctcgcttccgggagcgtgacgagaccgagtatgttgaggactgggtccgagtcttctatgctacaatatggatcgaccctgaccatcagtggatgaggttccggttcgagcgtgaggatatcactttgcatactactcagatccaggagttatttggattccctaagtcaacgacgaggcttcatagcttgtgctatggcacctcagaccctcctcgtcgtcctcacggcagagtagctcccgacaccgctcacgttgctgctctcttccgtcctctattcttagacggctctcggggctctcctgcagacttcaccccagcggcaaaattcctctatgagttgatgaggcgcaccccacaaccgaggatgggatatagggaggccaccactcatattcagctatggctcctcggtgcatcggccacccttgatgcctctagacttcagttcggattctaccacctagctcctaaggacatagctatggcttcagtagatccgctagcaccaaacttcagagatgaggatgatgctatccatcgatttgaggatcagtatgccgctactgaaacttctttagatgatgatgatctagggattccgccaccacctcatgtgccacctcattcccatgatcatgaggttggtggctccagtgctgctcctccagcgattgacccagctttggccgccatacttcagtctctcactcagcagcaggctcacctagcagtagagtag

SEQ ID NO: 5779 - DNA, 315 bp, Zea mays
  Peptide Sequence Number=SeqID_47558
atgaagatcactttatgggcagatcaggcaataatgttcactcttcatgacgtctacgatgcaaatacaaataaaccaattcttgtgctcttcgtcgagtgcttaccaaaattttacaaaggtgtctacctaagtggtggtcctgcctgtagatggtacttcaatccagcaattccagaggcagaaccttatcttaccagtgcaaacaagagtaatatcaatagcccagaaaaagatgatggcgataaggataccgcacaggatgtcattgttggaacttgctctcctgggcgagtcaatccaaccggggaatga

SEQ ID NO: 5780 - DNA, 516 bp, Zea mays
  Peptide Sequence Number=SeqID_47559
atgaagataaatagtgaccatgctgcagtttatcgacgtcgcccagatcgactccattgcctctcaccatctccaaaatttgtggccgagcgctcgccaacaccagagctgcaggggttcctcgccgcctcaaccacccacatctttctccatcggcgcgacggcttcagagccttctccaaaatctgtggtagagcgctcaccgatgccagagccacagtgcttcctggccgcctcagccacccacaccctcctcctccatcggtgcacgactgcccacctgatgtggactctatactagcgattgaagtcgagcctctggatgacaaaaaaaaagaaagttactggtgtgaccttgtcgagactgaagtaaggagggatagagctaaaaactctcttgacaagctcatcagtatcatggaggtcgccgccaagttggccgaagggcggttcgaggtcgtgctgctccccgagtttgctgatgaggaccatttgttgtacctcgctgagtggtga

SEQ ID NO: 5781 - DNA, 258 bp, Zea mays
  Peptide Sequence Number=SeqID_47560
atggacgagctattcagtaagctcaagtccactgagattgaccaccagatccggtccaagattaagaaccctgaggagcaggtggagagcctcgaggatgatgagctagggcttatggctagtcggttcacgcggttccacaacaatcgccagaaccagcgtcgggtggaggcctcccctcacaaccaccactctggtcgacgcaagggcaagcgggagcacacctctagcaaacacaagtctagtgggaggttgtaa

SEQ ID NO: 5782 - DNA, 273 bp, Zea mays
  Peptide Sequence Number=SeqID_47561
atgaaggggttgaataaagacaaagaacaaaaggtccacgcgttgctactatgttccatggaccttgtcgattacatgaggcacagggatgatgttgtagaggtggggcctcatgtcatggatccaaagactaagagccaaaggattgtagaaaagcacttctgctgcatcgaggggaccaatgacatcggcggtgccaaagtcatggcactagtgagtagtgagcatgattatatgagggatcctattggaacctttgtgtttggaggttga

SEQ ID NO: 5783 - DNA, 294 bp, Zea mays
  Peptide Sequence Number=SeqID_47562
atggcgcgagggactggatggttccgctgcgtccacctcttggtttcttggttcgtcagggtcggcgaggccgagtgccctgtgggggtggggaagaagtcaagggtgccaaacttgatgtggctcccagaggtgaatgctgatgaacttgccatcggagtgaaggatgtcgcttggcacgctaacggtccccctacctggcgcgccaactgtcgtggtttctggaaccggaggacaataagatttgtgttcgacatgggtgttagcgtggactcactccgaatggtgagctag

SEQ ID NO: 5784 - DNA, 183 bp, Zea mays
  Peptide Sequence Number=SeqID_47563
atggagcctggcggagggacagctgtcggagcggttgagtccttgctgacgtcctcttgcttccggcatgggttcaaaccccacctcctggccgacatgacgtgcctgggccagagttgtggccggctggcgtctggcccgtaccggaccgccgtttggccatctatgaggggttatttttaa

SEQ ID NO: 5785 - DNA, 837 bp, Zea mays
  Peptide Sequence Number=SeqID_47564
atgcctgcgctctccgacgtcgcgcttcaggctgccatcgccggcaacctccgcctcctgaagctggtggcgagcaagatgaatctgcgcgaagcgaaggacgccgctgggcggaacgcgctccacctggccgcggagatgggccgtcttgaggtttgcaggttcctggtggaggaatcgggcttcgaggtgaacttcgcctgcgccgaaggcgggtcgccggtccactgcgccgcggccgggggcagcgagagcgtcttgggctaccttctcgaccacggtggcgaccctgtgatgccggactccatgggctccactccactgcatgatgcggcagaggaagggcattgtgcggctgtgaggatgctgctgtccaagggtgtcgatgtggatccacacggctgtcgtgggacgccgctgcacttggcctgctccaatgaccgggatcaggttgttaggatcctgctggaacatggcgcagatgatgcagctgtggtggaaaaaaagatagctgatgcgaagtcacaagggaaggaagctttcgcaaggggagagtaccctgcagcagtatacttctataccatggtactagagaacgaccttgatgctactgcgtttgccaaccggagcctgtgctggttgcggctgagggagggggccaaggctctgttagatgctcaacagtgcaaaatgatacggcctcgttggtcgaaggcatggtatcgcgagggcgcggctctcagcttgctgaaggactaccaaggggcagtcaacgcgttcacggaagcattgaaactggatcctgcaagtttagagatcaagaaagccttaaggtaa

SEQ ID NO: 5786 - DNA, 438 bp, Zea mays
  Peptide Sequence Number=SeqID_47565
atggccacgccttatgaggcgccgccgccgctcgctcttcggggttgcccgcactcgcccgccttagggccctggggtcgccaccgctcgccccctcggtgccccgccaccgctcgccctctgggttggggagtcgccgccaccatgcttccgaatctgggaaccgccaccacgacttcagatcgagaaaccgccaccaccgcacgtctgaatcggggtgacacctccgccatgccttcggatcggggagccgccaccaccgcgcttccgaatctgggaaccgtcgtcgctactacagatcgagaaactgctgccgccgcgtgtgtgaatcggggagccaccgctgtcgtgcctccggatcagggagccaccaccaccgtcccgggggtccaccgtcgcgcacgctcttgggcaaccgccgtcgtcgcacgtgcctag

SEQ ID NO: 5787 - DNA, 150 bp, Zea mays
  Peptide Sequence Number=SeqID_47566
aagcaaattaataagattgggaaggaatatgttgtgcaagttgatattgagtcattgacaatggagtctgttggggaccttcggcatccgaaggtcggcatcacagcagaccagaataatacgaaggtcggtacagcgccgaaggtgtaa

SEQ ID NO: 5788 - DNA, 111 bp, Zea mays
  Peptide Sequence Number=SeqID_47567
atgccgcttccgagttccgacgctcccggctccccgctgggctctctgtcgtgccgccaaaatttttgccgcctcgtctctcgtctcgggcagatgtgtgatgttttctaa

SEQ ID NO: 5789 - DNA, 552 bp, Zea mays
  Peptide Sequence Number=SeqID_47568
atgccgatttgtcggtatcctcgatatgggataccactcctgctatgtccaggatcagggcgggtgcactccgacaccgacctaaggatttcccctccaacatttggcgcgcaaggtagggagcaagctctagatcctggccccttgattgatatgacatcccgctcaccttctagcaagcacgaccaaggcgatcttgccgacatctggcgcaaggtgaagaagcgacgcctcaagcggctcaccattgatctcaagcagcgccttaacaggcgcgctgctgccatcatacgacgggcgacagaggccttacccatggcgtttgaggttgctttctttggcaccccgccaggctccactgcgctcgaggtcgccaccattggcctccagccgcacacagtcgcattcgaggtcgctgtcatcggccaacaaccaagcatgggtgaggttaaccccaccagctggccactaggttccatggtacatggagccgtcacccccaatccagggagtgacttcttctacctgccaatgggtttcaggaagccatga

SEQ ID NO: 5790 - DNA, 1653 bp, Zea mays
  Peptide Sequence Number=SeqID_47569
atggcgctgagcttggacagctccagcttctactacggctgcggccacggccacggccacgaccaaggcgggtacctgcagccaatgcagtgcgcggtgatgcccggctcgggcgggcacgacgtgtacggcggcgggcacgcgcagatggtggacgagcagtccgccgcggcaatggcggcgagctggttctccgcccgcggcaatggcggctacgacgtcgacggcgccggcgccggcgccatcgtgccgttgcagggccacccgcacccgctcgccctctccatgagctccgggacggggtcccagtccagcagcgtcaccatgcaagtcggcagcgcccacgccgacgccgtcaccgagtacatcgccatggacgggagcaagaagcgcggcgccggcaacggcgctagtgccgggcagaagcagcccaccatccaccgcaagaccatcgacacattcgggcagcgcacgtcgcagtaccgcggcgtcaccaggtatcctcccaactcccgaccgtccgtacgccgtcgctgtcgcaggcgcgcgcgacccgcagcatccggcgcccgtgcgatcgagtcgctcactggccgcgtggtttcccaccgtgcaaaagcaggcataggtggacggggaggcgggtatgacgtggaggagaaggccgcgagggcatatgacctggcggcgctcaagtactgggggacgtccacgcacgtgaatttcccggtggaggactacagggaagagctggaggagatgaagaacatgaccagacaggagtacgtcgctcacctgagaaggaaaagcagcggcttctcgcgcggcgcttcgatctaccggggagtcaccaggcatcaccagcacgggcggtggcaggcgcgcatcggccgcgtctcgggcaacaaggacctctacctcggaacgttcagtatgtgttcgtctttcaccttctcacgcttccaggtcgatcggtatcagtgctggagaagcctgcgatgcaagctcaactcctatctatcacgcatcatggtcaccgccggcacccaggaggaggcggcggaggcgtacgacgtggccgcgatcaagttccgcggcctcagcgcggtcaccaacttcgacatcacgcggtacgacgtggacaagatcatggagagcagcacgctgctcccgggcgagcaggtccggcgcaggaaggaaggcgccgacgccgcggtctcggaggccgccgccgcgctggtgcaggccggcaactgcatgacggacacctggaagatccaggcggcgctgccggctgccgcgcgggccgacgagcgcggcgccggccagcagcagcgtcaggacttgctgtcgagcgaggccttctcgctgctccacgacatcgtgtccgtcgacgccgctgctggtacagggacagggggcatgtcgaacgcgtcctcgtcgctggcccccagcgtgagcaactcccgggagcagagcccggaccggggcggcgccagcctcgccatgctcttcgccaagcccgccgcggcgcccaagctggcttgcccgctgccgctggggtcctgggtgtcgccgtccgcggtgtccgccaggccgcccggcgtgtcaatcgcgcacctgccggtgttcgccgcgtggaccgacgcatga

SEQ ID NO: 5791 - DNA, 2415 bp, Zea mays
  Peptide Sequence Number=SeqID_47570
aagcagctccggagggaggccgaactgcaggcacagcttgagtccacccatgaggacctgaagaaggccaaggatcaactggcattcatcctcggagagagggaccgtcttgtcggggagctcaacgaggccaagagagtcgctgatgagactcacgagaagctccaggatgccctcatggccaagaggtgggccgaggaggccactgagatcgagaagttccgcgcggatgagctggagcaggcaggcatcgatgaggcacagaggcgggaggaggagtggcagagggagattgagtgcgtgcatggccagcacgccgcggacttggagacgttggtcaacacaacggaggagctggagaggctcagacgtgatctttccatggtgaacgacgccaagaaagctgcacttggccatgcagatgatgcaatgaagatcgctgaggccaatgcggagaaggtggagatcctctcaaatgaagctgctcgcttgaaaggcttgcttgattcgagtgctgccagcgaagagagtaaaagccgtgaagctgagcttcttgttaagaatctgaggtccgaggtttcatctctgaaaggcaaacttgagaaggcaatagtccttgaagagaggttggctgaagcagaaaaaatcattgaggagcttaaatcagagatagctgatgcgcagaaggtcaaagctgacatctgtctgcagttagaagaatggaaggagaagtcaggatcacttgagatgaaattggtgggagttactctatctgagaagttaaaaagtgactcacttgcctccacgactgaagagctggacaaggtcaagtcgatattgcaagatagagaattggaaattgatgttcttaaaggaaagataactgccatggaaattgaggtggcaaggcttttagcggatgtaactgattcaaatgagcatctggatgcatcacagcaagaggtgtttgggctgcagactacaatagatgttctgaggaacaagcttgatgctgcagaactagctgcctcagaggctttggacaatgagaggactgctatcacaaagattgaaggcctagctgaggagaaaatcaaactcattagtgagctggatgatgctagagacagagaggagagagagaaaatggcaattgaggatcttactgctgcattggataaggcatcttgtgaagcacaggaagcacatgataggtttcagaagaaagaagatgattatgaacatgctcttgcgcagataggtgatctgaagatgtccgcgaagactatggaagagtgttatagtgtaatgcttgatgaggcaaaacacgacataactggcctacgggaaactgtggagaagctagaagctgaagtgagcaagtgcagagaagaatgtgaatgtaaggagcttgaccttatcacggctagcaagcagtctgaacaagaaattgctgctcttaaagaagaagcccagcatttatctgcatcactgcaagttgcagagcacgagcttgaagcagtcaatgaagagagagaaaggtttcaggagaaactggcgtgcacagaatcagcagttgctgaagccaaccacgctgtgcaggaggcaaaggccgagaaggagaggcttcaagagaagcttgcacacacggaatcagaggttgctgtggccaacatggctgcacatgaatctaagattgagttcgacaggcttcaagagaaacttacatacacagagttggtggttgctgaagccaacaaggctgtgcaggaggcaaaggctgagagttcgcatctgaaggagcggttacttgacaaagagaatgcattgcagagcataacccaggagaatgatgaattcaggatgcgagaagctgacgccatgaagaaaatagacgagctgtctgctctgcttgctgaagccatgacaaagaagcatcctgaggaggaagaaaagctggtggttgttgatgaggcacacaattctatgcgtgatgaagttatctgttctgttgcagaaaatggagatacggaagaaactgatgataaaaaaccaaagcttgaagttgaagcagtcgatatgaagtccaatggtcaatccaagcatgaagagaaagatgacagcaaggtggaacaagaggaactgaaaactgagctcagcttgcaagagagcaagaaagttagcttcgacaaggacacatggacaaaaaacaaaaaacaagaaactgaatcgcccaatgatgagttaggctcgaagaaggttagcagcagcaccgagaacgcaagcagggccattataccagaggatacggcgactaaagtgtcagcctctccaacgaaaccacagcatcagaaaaagaataagcctctgctgaagaagtttgggagcttactgaaaaagaaaaacagcaagtag

SEQ ID NO: 5792 - DNA, 672 bp, Zea mays
  Peptide Sequence Number=SeqID_47571
atggtgagctcagcctcgggtgatgtctccgcctcgcctgagctcagcttcggctacctgcctcactgcttttacccataccgaagccctattacaacaactacagtatgggtgacccctcccctgggggctcggatgtacgaccaacccctgagcctcgacctcggctctccagctatgcttgtaatccctactgcaggcacctcagtactcggaacagtgatcaggttcgggagcctaaagttcatgtcactcggcataaagtatgacatggtactcctcccgcctgtccctctcgagcgctcgagcacccgtcaccgtccttcttatcgcaagaggcaaagacagaacaaccacaaccatgccacccatggcaccctgttccctgatgataccctcaggatggtcaatggcatagactccctgtcaagggacctagccaacatcagcatcgtgcccggagcgccgactgcagcacctgcatcaactttcctggtaccacctcctccggcatgggaagcaccatctccccacgccgttgagcgagcaataccggcaacgcagaacctcccacccgctgggggagaatcgtccgtgttcagccctataccctttcagctaagtttcgacaccagctctgtcatcaggatgtatgccggacttcctttttga

SEQ ID NO: 5793 - DNA, 336 bp, Zea mays
  Peptide Sequence Number=SeqID_47572
atggcgtgccaagccatggtcgcgctggggcttgcctgtgcctgcgcgtggcgtggccagtgctccatgtcgcgctggggtggcgccatgcccgcgccaaggccatgtatcccacgcgcactaggccgcattgtggccgtgggtggccaggggcacacctgcccacgcttgggccgggtcgcgcagcgcggttgctgtgcatggccagggccggccagcctgcccacaccgtggctagggcatcccacgcccgcgtgtcgaggcgacgtcggagccacgcacccatgccttgctgtgacggtcggtgctcacaacgtcgtgaccgcgatggtcctg

SEQ ID NO: 5794 - DNA, 489 bp, Zea mays
  Peptide Sequence Number=SeqID_47573
atgatgatccccaaagagcaatcaccttcggagatgagaatcaagcccttcgatcgcgcctcgacggtgccacgaagcctctcacccagcctattcgttcgtcgacttaacgcgaagcttccatccccgactaaatgccacaacgtcgtcgcccgccatcctcccctgcgcaacttcgcgaccctgtccccccaccctccctcccgagtcccgactgaggcagtgctcgccgagctgtcagccgcgctgcggcaactgggtgagggatgccgaggcagtggggaaagaggggcgctgacggagttggagaaccagcgcgtcacagaggacgcggatgccatcgatgtcgaggtcgcgggggttgggcaaagggtcagggagtcagtcagggagctcgaggtggcaagggcgtcagaggtcacggccatggcgaggctccgggccgccgtcgaggccgcgagcccgcgacgctggccagggctgccatga

SEQ ID NO: 5795 - DNA, 1296 bp, Zea mays
  Peptide Sequence Number=SeqID_47574
atggagacgccgctgtcttccaggaggatcacccgctcgctcgccgccgcatctgcccagaagagcgccgccgccgggccggactccgccgccctcttctcccgcgccaagaacgccgccgctggggagacccagcctcgcgccgccctgcacgacatcaccaacgactcccccatcgtcgggctcgcggcgggcgccctccacgccaccgataccacccccgcctccaccgccgccaagacccgccgcagggccccgcgtcgcacgcccggctccggggaggcgctcctgcgcggccaggtcaaggcgctcctccacaaggtcgaagaggagcagggctgcgccgccgcggccatcgtcaggcccgcgcgcatccaggcgctgctcggtgtatccaggtcgccggcccagcttcttgcgccgacgccagccaacacgccgcagatcgagcccgtccccactcccagggaaggtctcctcctgcttgatggcgctacggtcgtgccctgcgtcctagacgaagaggaactgctgattcctaagcttcaggtcattgcagcttccctacctccacctcatcaggcagaggagaagctcggggactgccagctgaaccgtgcgctggtgttcgatgactcccctgagaaatgtgaagagtccagtggatcagccgtctcgtcaaccttctccctccaggagagcagcaccggcagctacgtggacaagtcatcatcacctgaggacgacagctcctctgcctggtccattcaggtccatgccagctctgagaagggcgacgaagaagagctgggcgtggaggagctggcagcagagtacactgacgaagaggaggaggaggaggaggaggactgggacgaagacagcgatgacgactgctacgatgatctgtgcgaggagatgagcaggatgaccgtgttggaggaggaggagaagaagaagaccgtgctgccgcagttcgaggggaagcacaccaggttcatctacaacagtgacgacgagatcgagcgggtggaggaggcggatgcagctgaggcgacggcggagcttcgcgcattgatgctcaggggcctgctggacgaggacgcggagccgttgtcgaagtgctgtggtgagggtatggtcaaggaatctgtcaaggacgtcggagaagacaagctgcacaagtcgcgggctggtgcggcacgcgggaaggcccgcaacgcactagaggacgttgtggtgacggtggcactaaaaaactctatagacgaaggcgtgatacgtcgaggcagatga

SEQ ID NO: 5796 - DNA, 291 bp, Zea mays
  Peptide Sequence Number=SeqID_47575
atggggagtcatgatcctcgggcagattgggaatcacggctcgtaggtttgcccttaaatctgggtgtgacaggtgtcgggctattaacacagggggaggagccggggcaagggatagtgcgtctcagctctacatcttgcttgacgtgccatcacaacgcagaggatgtcggatgccctatcgagcgtgcagacgagcttgggcatggagcgggagagcgtcgtcggggtcgtggtccaggtccacaaggatcttcgccaagtagatgtttccatcacacgtcgctctga

SEQ ID NO: 5797 - DNA, 1932 bp, Zea mays
  Peptide Sequence Number=SeqID_47576
atgtccgtttccgaggccgcttatccaccgccgcccccgtcctcatgggcacaacagatccgcgcggccgctgccgagggccacttctgcgacgctgtctccctcttcctccggatgcgcgcctccgccgcgccacgctcgtctgtcccggcctcactcccggccgcgctcaagtcctgtgccgccctaggcctgagcgccctcggcgcctccctccatgcgctggccatccgctccggtgcattcgccgaccgttttaccgccaatgccctcctcaacctctactgcaaggtcccgtgttcgtatctcgactccactggtgtggccatagtggatgtacccggatcatcaaccgcatttgagagcgtgcggaaggtgttcgacgaaatgatcgagagggacgtggtgtcctggaacactttggtgctgggctgcgcggaggaagggaggcaccatgaagcactggggtttgtcaggaagatgtgcagggaagggtttaggcctgactcgttcaccttatccactgtgctcccaatcttcgcggagtgtgctgatgtcaagagaggcttggaggtgcatggttttgccttcaggaatgggtttgatagcgatgtgttcgttggcagtagcctgatcgatatgtatgcgaattgtacaaggacggattattctgtcaaagtgtttgacaacctcccggtacgagaccatattctgtggaactccctgcttgcaggttgtgcacaaaatggttcagttgaggaggcccttggaatattccgtcggatgctgcaggctggtgttagacctgtgcccgtgactttctcgagcctcatacctgtctgtggtaatttggcatcattgcgcttcgggaagcagctgcacgcctatgtgatctgtggtgggtttgaagataacgtgtttatatctagctccctgattgacatgtactgcaaatgtggggagattagcattgcccattgcatatttgacaagatgagttcaccagacgttgtatcgtggactgcgatgatcatggggtatgcattgcatggtccagcaagagaggcacttgtgctgtttgagagaatggaactgggaaatgcaaagcctaaccatatcacctttcttgcggttctgactgcatgtagtcatgctggcttagtggataagggctggaaatatttcaagagtatgtcaaatcattatggaattgttcctactctagagcattttgcagcgcttgctgacacccttggtcgtgcaggagagttagacgaagcatataattttatatcgaagatgcaaataaaaccaactgcgagtgtctggtccacattgttaagggcttgcagggtccataaaaataccatgttagctgaggaagtagccaagaaaataatggagcttgaacctaggagcattgggtctcatgtagtattgtcaaatatgtattcagcttctgggagatggaatgaagcagcacacctacgagaatccatgagaaaaaagggtatgaagaaggatccagcttgtagttggattgaagtgaagagcaaactgcatgtctttgtagctcatgataggtcccacccttggtatgacaggattattgatgcactgaatgctttctcagagcagatggcacgcgaaggtcatgtacccaatacagaggatgttttccaggatattgaagaagagcacaagtcatatgtgttatgtggtcacagtgagaaacttgctatagtgtttggtattataagcacgcctgctggaacaaaaattcgtgtgatgaagaatctccgagtctgtattgattgccacacagtaactaaatttatttcaaagttagctgatagggagattgtggtgcgtgatgcaaaccgtttccaccactttaaggatggaaactgttcctgcggggacttttggtga

SEQ ID NO: 5798 - DNA, 1233 bp, Zea mays
  Peptide Sequence Number=SeqID_47577
atggcgctcatcatcaagagctttcaccaaatcctcaagcaaaggagggggaaagactacaagtcccgctccaagaaggtttgctacaaatgtggtaagcccgatcattttatcgctaaatgccctttgtctagtgatagtgacagggataacgacaagaaggaaaagaggagagaaaataagaggtactacaagaagaagggcggcgatgcccatgtttgccgggagtgggactacgacgaaagctccactgactcctcctccgacgaggacgccgccaacatcgccgtcaccaaaggacttctcttccccaacgtcgaccacaagtgcctcatggcaaaggacgacaagaagaaaaaggtaaaatctaaatcctccactaagtatgcaacatctagtgatgaggctagctctagtgatgatgaggatgatttattaacactttttgccgacctaaacatgcaacaaaaggagaaattaaatgagttaattagtgctattcatgagaaggatgaactcttggacacccaagaggacttcctaattaaagaaaacaaaaagcatgttaaggttaaaaatgcttatgctctagaggtagaaaaatgtgaaaaattatctagtgagctaagcacttgccatgatgttatttccaaccttagaaatgaaaatgccaaattaattgctaaggttgagaaatcaaatgtttgtgatgattcaattgacaagcttagaaatgataatgctagttcaattgctaagattgaaaaattgaatgcctctcttgctagccttagaaatgagaatgaaaaattaattgctaaggctaaggaattagatgtttgcaatacttccatctccaatcttagagatgagaatgccattttacatgctaagattgttgaactaaattcttgcaaaccctctacatctaccatggagcatgttactatttgcactagatgtagagatgttaacattgatgctattcatgatcacattgctattattaaacaacaaaatgatcatatagcaaaattagatgctaaaattgccgagcatgagttagaaaatgaaaaatttaaatttgctcgtagtatgctctatagtgggagacgccctggcattaaggatggcattggcttccaacagggaggcaatgtcaaactcaatgcccctcctaaaagattatctaactttgttaagggcaaggctcgatcccatgcctcaggataa

SEQ ID NO: 5799 - DNA, 273 bp, Zea mays
  Peptide Sequence Number=SeqID_47578
atgtcgagtgctcccccacacgtacggagttgttccaaagactcctgtacttcccctgcaagcctcggcggtgaccatcatcgatctatggacctcggtgagtggaggtcacggatctactccaccggtgtcgacgagttcagactgcagaggttcaacaacagcaggcttagggtctggttctcaaatacaatcgtcaagtcttgcgagcatttctttgagcctcattctctaccaatgaagcactttcctgtcactagaactgaactatag

SEQ ID NO: 5800 - DNA, 1209 bp, Zea mays
  Peptide Sequence Number=SeqID_47579
atggcggccaccaccagccaggcgagcctcctcctgcagaagcagctcagagatctcgccaagcacccggtggatgggttctcggctgggctggtcgacgatagtaacgtattcgagtggcaggtcaccatcatcggcccgcccgataccctatatgatggagggtacttcaatgcaataatgagcttcccagaaaattacccaaacagcccgccatcagtcagatttacctctgaaatgtggcatccaaatgatgggctggtgtgtatctctattcttcatccacctggtgaagatccaagtggttatgagctcgcaagtgagcgttggacacctgtgcatacagttgaaagcatagttctgagcattatatcaatgctctctagtccaaatgacgagtctgcagcaaacattgaggcagctaaggaatggagggataagagggaggatttcaagaaaagggtcaggcgcatccgtctgttcattggtgcaccagaaatgcattgggacgtggtgtatcgtgtggcctgggctctactaatgtttgacaatcctgaagtgccaccagtggtgaacctgccaaggccggcctcgggcgtcataggaaactccgcctcgcccgaccctagggctcggactcgggctcagccccggaagacggcgaactccgctccgcccgacccagggctcggactcgggttcagccccggaagacggcgaactccactccgcccgacccagggctcagactcgggctcagccccggaagacggcgaactccgctccgcccgacccagggctcgggctcgggctcagccccggaagatggcgaactccgctccgcccgacccagggcttggactcgggctcagccccggaagacgacgaactccgcctcgcccgaccccagggctcggacatgggctcaaccccagaagacgacgaactccgctccgcccgacccagggctcggacttgggctcagccccagaagacgacgaactccgctccgcccgacccagggctcggacttgggctcagccccaggagacgacggactccgcttcgcccgaccctagggctcggactcagccctggcctcagccgacggtctccgcctcgcccgacccaggggctcggactcgaccacggccacggaagacagactcgacctcgacctcggaggagcctccacatcgcccaacctag

SEQ ID NO: 5801 - DNA, 312 bp, Zea mays
  Peptide Sequence Number=SeqID_47580
atggagtcttcgctacctgctcagagggaccctccagcgggcactcttgaggcctctcgcctccactttggctcctaccgtccaacccttgaggacccagtgtcagtacctgatccagtgacagacattcaggcaaaggatgtgacattccatcagttcgagactcacggcacagcagttcctgatgatgatgatgatgatttttggattccgcctccgcctctgcctcctatgcctccacgctcacatgatcatgaggtcgggagttctagtgctgcccctgctgccctcctgccgtggaccctactctag

SEQ ID NO: 5802 - DNA, 468 bp, Zea mays
  Peptide Sequence Number=SeqID_47581
atgggcgcaattcaggtcaacgctccgtccactcaagggacacgatctcgcctcgcccaagcccagcctcgggcaggaacagtagacccagacggattcacgcctcgccagagggcctcctcaagcaacgggcgcaccttcgactcgcccgaggccccagctcgggaaaacagcgccgcctgccttgctccgactgctgtgccacccgccagggtgaggctgacagcagccgagtccacctcaggcaccataggaagctccgcctcgcccgaccccagggctcggcccctgcctcgacctcagaagacggtcttcgcctcgcccgaccctagggctcggcccccgcctcgacctcggaagacggtctccgcctcgcccgaccccagggctcggcctcaacctcgacctcggcagacggtctccgcctcgcccgaccccagggctcggcccctgcctcgacctcggtag

SEQ ID NO: 5803 - DNA, 189 bp, Zea mays
  Peptide Sequence Number=SeqID_47582
atggcggcggactggatgagacgcctgggagtgacgcccgcgcgactcgagagagggaagaagaagcagtgcggcgcggccaggtgggtgaggctggaatgggggccccacatggcggtgtaccagggcacggaagcagcggcgtgggctgcgcagagctatggaattgggccgagattgcagccgtag

SEQ ID NO: 5804 - DNA, 324 bp, Zea mays
  Peptide Sequence Number=SeqID_47583
atgggcggcaagggcggcagcggcgggggtggtggcaagggcggaggtggcggtggcaagagcggcggcgggggtggtggcaagggcggaggaggtggcaagggcggaggaggtgttggtggcaagaccggcggcggcaagtcagcaggcggcggcggtgggggctatggtggtgcagggaagtcaggctccggcggcagtggcggcgacggaatgatgaaggcgcccggcggcggcggcgagtacatctcccgctccgtcttcgaggccagcccgcaggagttcttccatggcctccaccagggaggaggcaacaacaagtag

SEQ ID NO: 5805 - DNA, 543 bp, Zea mays
  Peptide Sequence Number=SeqID_47584
atggctgagactagggttttcagtggcgacgattgcgcgacacgagagagcgcggcgaagccagcacgaccgcggcggacaagcgtccccaaagacgagatcaatggcggatcgcctcccagtcattgttccagagtgccggtgctacatctccagactgcccctgctccacgcagacccactctccaacgcgactgcacgactgttgttcctaccggcggcggtgttccgtggcgcgacagcaaaatcgacgatcacaggaacacgctcgacattgactctccaagcgccgccaaccgcatcgtccctcgtgaggacgcccctcgtgtgccaaccgctgtgtctacggcgacttggcctcccctccaccgactagatccacaccgcaaatgggctcattgtcgactcgccgctcagttcaggccaggagttcgtcatcccactcccctattaggtggaacaagtggaggagcagttctaatcttggccgatgtcgtgttgtcggcgtttcgagaccggggggtccctcaggctgacgagtga

SEQ ID NO: 5806 - DNA, 228 bp, Zea mays
  Peptide Sequence Number=SeqID_47585
atggcgacgcgaccggaggcatcggtagtatcgatgggtggcggggtccacgaggacggagggcgggacccccgcgcaggcaggcagttgggcggtgggttcgtcaagaagaatgatttagctatcgatgattattttgatctaataatggctaatattgatgaagtgactgacaagagaatggtggctctgagggagatcgagaaagataatatcttggttgattaa

SEQ ID NO: 5807 - DNA, 423 bp, Zea mays
  Peptide Sequence Number=SeqID_47586
atgaccgacactgtagattccattctttgtgtgtacaccaaggtgctcaaaccattagttggactgaggaacacggagcagcagcaacaatatcgtaaggagagtgcagaagttggacaaatgcttttgttatttctgccatatgatacacactgttttgtgaacaaccctaacttatgtggtcctgacaccacaaaaccttgtcctgatgctcctcccttttctccacctcctccatacaaccctacaaccccgatgcaatcaccaggaagtagctcttccactactggagcaattgctggtggagtggttgctggcgcagccttgctatttgctgttcctgctatcagttttgcctattggcggcacaggaaaccacaagagcattttttcaatgtatatggcttcaaagttagtctttga

SEQ ID NO: 5808 - DNA, 246 bp, Zea mays
  Peptide Sequence Number=SeqID_47587
atgagagaccggcggaagttgcgggtggcactcttcaattcagcaaaggagaacaccctcaggttagatgggcggtcagtgaagctggggtactgtgtcctccttatcgactcggcgctcatgtcggaaacattcaaggaggtgaagtctgaaccggagcggacatcacgctccgttgatatgcagaaagtggagataaattggcgtgactatcaatacttcacatgtgaacgagagctcaagtga

SEQ ID NO: 5809 - DNA, 501 bp, Zea mays
  Peptide Sequence Number=SeqID_47588
atggctctccctacacgcagcgtcgtgccgctttccgcaatccgtgccttaatccccttccttcgcgcagcacccttccatccatggctcgcttccagaaatccccctacctacggcgcagcgtcgcagtccggaatccacccccaaaatcactacccactctgcggcgatggaagggaatcgaaacgcgtgcttcccccttccatcctcggcgttgcgcggattgcatggccatcgtttcgcgcccccaatccgtcgatgcaaggaacacgtgcttcccccttccatcctcgacgctgcgcgaattgcagattgcgaattgcatggtcatcgtttcgccccagttcattgcccgcatcagatggaagggcgccccgatctgcctcacctccatgcaagtacctgatctgctgcgcccaatctcttgccgatttcttcctcatgcttcctcgtgtcctctccagtctcaccggttttccatggagattgttccagggttag

SEQ ID NO: 5810 - DNA, 1038 bp, Zea mays
  Peptide Sequence Number=SeqID_47589
atggaacaaaaagagggagatgctcaaatataccctgatatgcctgcataccattgtattgctgttactcttggtcgagctggtcttctgaaggagttaatcaagattattgagtatatgagacagaagccctcaaaactagtaatgaagatgcggcgcaaggattgggatccttcattggagcctgatgtacttgtttataactcggtgctcaatgcatgtgttctgtcacagcagtggaaaggtgtattttgggtgttccagcaaatgagaattggtggtttaccacctacaggagcaacatatgggttggccatggaagttatgttgaaagccaagaagtatgactttgtccagaagttctatgagaagatgcagaaaaatggcgtaccaccaagagcaataacttacaaagtgcttgtaagatctttttgggagcaggataaaattaatgaagctgttgaagcagtcaatgacatggaacaaagaggagttgttggagcagcaagtgtttactatgaattagcttgctgtctctgcaataatggaaggtggagagatgctatgttacaggttgagaagctgaaacagcttcccctcacgaaaccactggagtacgcatttactggaatgatcttagcctcatttaatggtggatatatctatgattgcatctcaatatttgaattaatgaaggaccactgcatgccaaatattgggactgtgaatgtcatgttaaaagtttatggacattgtgatatgtttgggaaggcaaaggacttgtttgaaaccaccaaggcttgtttcttaaattctcagacatatatccacgagcattcgtcattcaaagcagacacatatacatacaactctatgcttgaagcatctgcctctgcccaacagtgggaatacttcgaatatgtgtatagagagatggctctgtctcatcactgtctagatcaaagcaaatattcatggttgctcatcaaggcatgcagagctggaaaggttcgtgtccgtgctttgccacagaaataa

SEQ ID NO: 5811 - DNA, 447 bp, Zea mays
  Peptide Sequence Number=SeqID_47590
atggctggctggatccccctccacctggtgtccggagtggcctccacggggtcgacgcgagaggcggagcgaggagaacgtggggacggtggtggagatgacagaagcagttgccatggagaagatgtgaacacacaaatggaggcagtagttgtggggagggacgtcgatggtggctggcgcggcattcagcggcgtgggcaaaagcgcgatgatttcggtgcgagtggagtggggttggatggaggtgggggcgggggtggcgtttgtgcgtggccagaatcgtcggaggagagctcgggcgcatcgttcactcaagcgaaccgcgaggcaggcagcggcgtagcagaggagagcccgtgcgcatcgtccgctccggcaaacgtcgaggtaggcgacggcgtatgcgtgcgggctcagacaacggacatcaagtggcgggtgtga

SEQ ID NO: 5812 - DNA, 2580 bp, Zea mays
  Peptide Sequence Number=SeqID_47591
atgggttcacgatcaaagaacgaagatgacaaggctcttgtcttgtgccaggaaagaaaacgatttgttagagaagctcttgacgggagatgtgcttttgcagctactcatttcgcttatattcagtcactgaggcacacgggatttgctctgagaaaattcgtagagcctgaagtgccgacagattcgtcactgttcacatcaacatctgccactccagagcctcctacaatcatgcagaaaccgatgaccatatctccatccctttcacatcatgctagtgactctttctccccagttccctcaccattatcttcaggacgtttccatgttaatcatatgaaagctgggggcaattcagtgacaactgttaaggagaaggtgattgaacctgtgaccgcaactctcgaaacatcatcccctgtgcgtggacaagctatccatgacctggatgacagttcaacgtttgaagctccccctggaacaccaccatgggactactttggccttttccaacctgttgagagccagatgtcattccatgatgacaaggaacttggtcatgactttgagaatgatgatgatatcaggcgtcttcgggagaaagagggaatcccagaacttgaagaggaactggagaagtctcctgcttatcctgattatctaaagcggcgcctaggacaggagaaacctccagatctcaaagatgttgagaaatctcctatgaatggtggagaggatgatcttgcattgtcagaagatgattttgacaatccaacatctgaatctttagtgcggatgttcaagaatcgcaatgatacacccgttgcacatattgcaacagatcattcatccacatcgcttcctaaagatgacttagtttcagaaacgattgattctcagcctgaaagaccaaaagatgacagagcagttgattctcagactgaaagactaaaagatgtcacgccagatgatcctcagactgaaaaaccaaaagatcatgccggagttgattctcctactgaaaaaacaaaagatcatcctggagttgattctcctgctgaaaaaccaaaacatgacatgagggtactggacattagcatgtatgaaagtgacgaaacgcctgttacaagtcctccgaaagaaatttcatcttcaactgctgcgtttcaagttaatgggaaattcaagaaacctttacatgatgtaaggaatgtggcgagggatttaaactcttgcattaaggagattgagatcttgtttatcaaggcatctgattctgggaaagaagtcccaaggatgcttgaagcagacaaagtcaatttccgccctttactaccagaagaaaaaggttgtattttagtaggtttctttacattactgttccataattcacgcattgggagttttgattcaaaaagaaagatggaaagtagaaagcgccgggatcaacagcatcaggcttttttgcaacattatttgcttgttgcagagaggaagtccctcttcctcaactataatatggttgaagttgaaatagctagaattcctcttgggacaacatcgaaggaagacactgacggtctcaatggaaatatctttggtggtgtatacatgaattcaggcagtcatgcctccacactggacaggttgtatgcatgggagagaaagctttatgatgaagtcaaggcaagcagtgtagtttgcaggcaatatgatgagaaatgtaggcagctaagacaccaggaatcaagaggagaaagccaaatgagtattgacaaaacccgtgctgttgtgaaggatttgcactccagaattttagtggccattcagagaatcgacatgatttcgaagaacatagaggatctaagagacaaagagcttcaaccacaactagaggaattaattggaagtttgactcgcatgtgggcaacaatgcttgagtgtcaccggcatcaacacgatatcattaaactagtatccagcactcgcaacatgaagacctcaattcggtcagaatcacagttccaagcaactctactccttcaggttgagctgaacacattatgttcaaactttcagaaatggatagcatcccacaaagcatatttgcagagcctaaattcatggctactcaagtgtgtgaaggcactacaaaggaagaggaagagttccaggaaaaagaacatcaaagctgatccaataacaaagtatgctgttgcgcccatatttaaaacctgtgagagctggataaatttgttggatgatttaccaacggatttggaggatgctattaaggaccttgctgctgatataaaccgttacgtgccacatcaagagaagcaacgaggcggttcaaagctaactctctcgttgtcccgtagtggaaggtcaaacggcgagatgggtgaagtccacaggagttatacccctatggatttacaatcaagtttggagacatttctagggaagcttgaaatgttctctgatgtttcattgcagaagtacatgaagctcaaagaggatattgatgaggcgaaggagaggtatgaggaggcgcaggcagcccagcggatttaa

SEQ ID NO: 5813 - DNA, 417 bp, Zea mays
  Peptide Sequence Number=SeqID_47592
atgggcaagaacaacaagcgcaagcgcgagccaactcctccggaggagtttggtgacttagagtactcagaggaggagttcccctctgagtccgaggggtctccggctcccatccccctgcgtgagtcgtctgacgactcagacgactcccaggggcttgcggcggaggtctggacgtacatccgggccgtcgatcgctccgggctcgagggctcggatgagtcggagtactcctcggatgaggaggactcggacggcggtggcgaggacgaggacgacgacgacgacgacggcgatgacaacgacgatggcgacggtggcggtagcggcaggggcagcggcggcggcagcaaggacggcgatggcggcggcagtaggggcagcaaccatggcggcagcagcagggccagtggctag

SEQ ID NO: 5814 - DNA, 423 bp, Zea mays
  Peptide Sequence Number=SeqID_47593
atggctatgtggagaacccggaccacggcaagggagcggcttggcggcagagaagaaagcacggtgagcaattcgtcgtcaacccggactccagaccctcgacggttgcaacaatcgggttccaggcacgtcggcaagccaccaacaccgggccttgctggcgcggcggcgctaccggcgtggttcgtcagcggcggcttcactctcgtgcggaagcggcggcggcgactttggctagtacccagagtagaggtggctgcgatttggcttaaagagtcccaaggcaggccgaccacgcttatatcccttctcaggagagcgcgcccgggtcaacgctggggccccggatcacggtcagcagcgccattttcgcggaatcgttgcggcaaccacgcgcccacaacgaagggaaggtcctactga

SEQ ID NO: 5815 - DNA, 627 bp, Zea mays
  Peptide Sequence Number=SeqID_47594
atgaggagagcggaggatcttcgagttccttttgaaaggtttggccctgttcgggatgtttacattccaaaggactattactctggggagcctcgaggatttgcctttgtagagtttgttgatccttacgatgcctctgaagcccagtatcacatgaatcgccaagttttctttggtcgggaaatagctgttgttcttgctgctgagtcacgaaaaaggccagaagaaatgcgcagcagaactagattctatgcctctgttcctattatgtactcatttgaaatgaccttttgtgattgctgtgcagaggttactctggtcatgaaggtcgccggtcttcttactatggtcggtctcgttctcgctctcctcgctatcggggccgtcctcggtcgagatcatactctcctgctccaaggcgggggaatgactactctgcctctccaaggagacaggaagcccatcgctcatctcctcccaggcgcctgccaaaggagcatgatgaagataagaagcggaggtcctactctcctgccagtagagatgatgctgacaatgtttatgagaagtgttgctgcagactccaaattcacttttacatgttcgaagcacagctatgtattgtag

SEQ ID NO: 5816 - DNA, 300 bp, Zea mays
  Peptide Sequence Number=SeqID_47595
atgcccgcccacgcgcccagctcccttcttagagccccgacagtgccccgcgcacacccctcgcctcattttgctcagcttcaccctctctcgcgctctgcccacgccgtcagccgccgccaaagacccacgctcgcgttctcggccatccagctcgccggagaccgcttcaagcgtccccaagctccgccccgagacaacgagcagtccaaggttcctgagtgtgttgttggagacctccctgagcaaccacctagtgaaggcaagtgtcctctgacctattatgtcctacatacttaa

SEQ ID NO: 5817 - DNA, 444 bp, Zea mays
  Peptide Sequence Number=SeqID_47596
atgacgtcggattgctctcaacctcctacggaagcaagacaacgtcagcaggatccatgccacaccgacagctgtgctactacagggctcaaggcacttctccgacagccatggctcggactcaacctcgacctcggacgacggactccgcctcgaccaacccctgagctcggactcagcctcgacctcggaagacggtctccgcctcgcccgaccctagggctcggactcaacctcgacctcggaagacggactccgcctcgcccgatccctgagctcggactcagcctcgactccggaaggcggtctccgcctcgcccgacccccggggctcagactcaacctcgacctcgggcgacggtctccgcctcgcccgaccccagggctcgggctcaacctcaacctcggaggagtcacagggggccatcattaccctactcctag

SEQ ID NO: 5818 - DNA, 246 bp, Zea mays
  Peptide Sequence Number=SeqID_47597
atgtcccgtgtcgtgttcggggcgtcgttggcctcgacgctcgcttatatatgtgccgccacagtgctgctcgtcggggagcttaggaccggctgtgacctatatgaggtcgtcggccctccatcggtcttactggacaaaggtacgaaggagatgctggagtactatgataatgcgtcgagccacgttgttcataggttgtccgtgggcgatatcgtccgtagcgctcctaatccaacattgtag

SEQ ID NO: 5819 - DNA, 519 bp, Zea mays
  Peptide Sequence Number=SeqID_47598
atgagaactaggacaaggctacccgaggcaggcatctggttttaccataaacggggccagcaaagcggcacgagcgagaagagaatccaggccggccggggaagaccccgcagcgcagcaccccttggattttccgcggtgactgaggatgaggaggagggggcgtctaccgccgtgccccacccccatctcaaccgcgctggtgcacagattaaccgtgccacggcggcgacgctcgtgccccagggccgccacgcatcggacgatcgcgacgcgagctcttcgaatgacgatgacgatggagatgtaacgacaggagaagaggaactagaaggaggcttcgagaagaggcctctccgagagatcttggacgacaacccgccggcgcccaagaaggctcggctcgaactgatcagctcattgtcgttggtggcgcagacgccaccgaacagttcggaatcgaacttagcgtcctcggtgcgagcggggaactccttgggcgatgagaaggcgtgttag

SEQ ID NO: 5820 - DNA, 324 bp, Zea mays
  Peptide Sequence Number=SeqID_47599
atgccccgcgctctgggcgccaaccgtgttccaagggatagacagagaggggaagtaagccacggccgccaccctggattcacgggatacgaactgcgtggcctcaatttggggccggggcactgcgcggtgtcgcggggtcgtccagattcctcgccgcccctcctcatcgccgtgaagccgccgcagtcacttcgtccgctcgtcgccgtggggagcttcactaccgccactatatctggtatggattgcgctcctaggttcaccaattcatccgcttcgagtaggatctatcaaagccgagaatcacgcatcggggtatag

SEQ ID NO: 5821 - DNA, 228 bp, Zea mays
  Peptide Sequence Number=SeqID_47600
atggcggccgcggatctggacgggatccgcgacggcggccgcgaggttggacgacgcacggcagccgcgatggcagccggagaggtcccgcaacggcgaccggggagggccgcgacggcggcgcaagatgaacccgcggccacgacggcgaccaggagccgcgacggcggcggaagaagagctcgcagccgcgacggcgggcaggaggaagggggagggccgcgatag

SEQ ID NO: 5822 - DNA, 393 bp, Zea mays
  Peptide Sequence Number=SeqID_47601
atggataagggcaagagaggtcgaggctcgcctcatcgtgccgacgacaagcagaagcgcgatccaagtcctccctcggaggacttcggcgactctgagtactcggaggaggaggtttcctccgagtccgaagggtcactggccctcgcctctccctcggcgtcgtccgatgactcgaacgactcccaggggatagttgcggaggggtcggatgagtcgaaagtctcttttgatgaggaggactccttcggctcgtccgaggagcggagcggcaacgacagagacgatgagggcagtggtggaggaggcgacaacgacggcggcaggggcggtgaaggcgacgacggcagcaacggcggcagtggcggcggcggcaaggcaccactggtttaa

SEQ ID NO: 5823 - DNA, 321 bp, Zea mays
  Peptide Sequence Number=SeqID_47602
atgaagatgactggcttgtcgtccaccttgggaagtgcttcgacgaagtccaatccgatgcctacccacaacatggttggaatagagaacgacaaaaggaggttggatgggtggcgaatttgcaatagtaccctagaggaggttgtggacaagccgaacgtggaagcaactagtcctgcaaagctttggaccttggttggatccatgcatggtgaggatgatgtgaacatggcagatcagtcaatccacatcttgctaaaaatgaggatgtcgtcgaagacgaggacgaagtgtcggagggtgtcattcatcaaggcctag

SEQ ID NO: 5824 - DNA, 735 bp, Zea mays
  Peptide Sequence Number=SeqID_47603
atggtgagctccgcactgaggcgctgtctcccctgccatgcctctctctgtcatgccttccctccccatccgctgctggccgctgccggcgtcttccgtcgttcattccagtccggtgagcatccaaccctcttctgtccctgttccttcctggcctcccatgagtggtatctcttgaaacaaaagataccacacatgggaggggatggtgagactatggacgaattcgaagaacggttgtttgggggcaaggacacagacaaaggatcactctacgagaagctcgatagggctgagaacactggtaggagatacaatatgggctctgggatgggtggtttgactgggttaagtgacaagagcagatctgggttgtccaagggtggtttcacttggttaagtgacagtagcagctctggtttccctgggtttcctgcatctggcgacaggagcaattcaggatggatggatggttatgattcttttaatgatggcttaaatgatacgattgctaatgcggcacgcaacatccaaatggaggaggacgaggacgtcgacggtgactgggaagatgactttgagttcaggcctgatgtgcggtttaggcaaggttcaacgtattctgttcgggaccttgaccttagaaaacctgcagccgcaaagaaccctcctagacgacagtttgaaacaactacagcggaggtactgaagaaggctgattttaggggctgctag

SEQ ID NO: 5825 - DNA, 246 bp, Zea mays
  Peptide Sequence Number=SeqID_47604
atgggacctccaccgtttcccctcctcagcgcgctccatgctgagctcccgcaggtcacaactgatctccgtggccgccggccaccggacagaggcgcaatccctctcccgtggacctccaaccccgccgagccatctcagatggtttgccgtttgcctatgctttatagggctaaattcatatctgttattcacgtgctccaaatgtcatggaagttttatggaggctattcatgtgatacttaa

SEQ ID NO: 5826 - DNA, 252 bp, Zea mays
  Peptide Sequence Number=SeqID_47605
atggcccactggtcaggctcttctgacgcgcgtgctcgtatcactctcaccggctggtggggtatcgcagtcagggactcggtgccgcactttggcgtccgcatgagccgcgatttccctgcggtcccgtcgttgcggttgttgggggtcaaccgtatcctcgggcatccggttgcatgccgcagttgccgccttggagctcgctgtggccgttgcggccaaccccgcaagcccgtccttcctccgctataa

SEQ ID NO: 5827 - DNA, 1305 bp, Zea mays
  Peptide Sequence Number=SeqID_47606
atggatccccaccccagcgctccctccctccccctctccttcacgttggacgccggcgcagacgcctggcttggcgcggccgccgccggcctcgacacgcgcgtcaccgtggcctcacgccccaacgcgaccgtcgtcgcgtccctgcccacgagcgccaccaccgcgtacgccaccatcggcgcggccccgggcgtgaccccctcctcggtcgagctgcacacagccctacgcaccaccggcgacctcaacccctccttgggcacgggcccctcctcgatcgatctgcacgcaaccctaggcgagcgcccgtccttcgccgactcgctccgtcttccccacggtacgtcgatccgcagcgacctcgttgttgggggagccccctacatcgccggcctcaggccccctccccgacgcgactgtcactgctcaacagcgtcgcagttcccctctggccttccccgcccttgctgctcctacatggaccgaggtcgtcgcttcctcgtcggcttcctcaacgttgattacgactatcgccaccatccaaggtcgttgctgcctccccggaccgagcgcgtcgcgactctcaccttgggggcaagagtgtgccatgggcgcagctctaaccaccagatggccaccgcgcagcgcctcatcctaggccattctccagtcatccatgaggctcctccgctcactcccgaggcccccctcgcctctggactcgacgacgaccacatcgccgcactccacgctcaggccgctaggctgcacaagatccggaccatagtgtccattgtgttggacccggcgtcctcccatagcccactaccctcgttgacagggtcaggcgccttccggggggcagacccctcgtcctccttcgaccggggcccctacctaccctcctcccgtgacccctgcatctcctcgtccggcttccaccgccaaaggaggtcgtcgcccccgcaagggcggccacggggttgcgactccacccgaggtggtccctccaaccggggtggcagccaggcatggtcgtcattctacagcccgagtgcctcccatcctccgacgtcggccctcctgacagtgtcccccaacgccgtgcatctggcgcctccctacgacgtgccaccgacgtcgcctgctccgccccagctcccgccgacgaggacccccacctcgactccttggtccccactggctggaggatgggaccacgcctccctcaccgccgcagttagcaccatggcgatggccccaccctcctctgactgggtcattgaccccaccctcctctga

SEQ ID NO: 5828 - DNA, 1263 bp, Zea mays
  Peptide Sequence Number=SeqID_47607
atggccatgaggagagcggcgcagcaggcggcacggttcgccatgggaccacacgtccctcacgttattgcgcccgctgagaggagccttcatgcgtccgccgcgagcaagaagatcgtgggcgtgttatacaagggcggcgagtacgccgacaggaaccccagcttcgtcggctgcgccgagcacgccctcggcatccgcggctggctcgagtcgcagggccaccagtacgtcgtcaccgacgacaaggacggccccaactgcggtaagcgtgctgtacgtgctcgtgcgcacgtcactatcactaccgagcagcaagcagtatgtagagtggtgctaactcgctgtcgcgctggcaacccgcgcgcagagctggagaagcacatcgcggacgcgcacgtgctcatcaccacgccgttccacccggcgtacgtgaccgcggaccgcatcgcgcgggccaagaacctggagctgctcctcacggcggggatcggctccgaccacgtggacctggccgccgccgccgccgcggggctcacggtcgccgaggtcacgggcagcaacacggtgtcggtggcggaggaccagctcatgcgcgtcctcgtcctcacgcgcaacttcctgccgggccaccgccaggccgtcggcggggggtgggacgtggccgccgtcgcgcaccgggcgtacgacctggaggggaagacggtgggcaccgccggcgccggccggatcggccgcctgctgctgcagcgcctcaagcccttcaactgcaggctgctctaccacgacaggctccgcatcgacccggcgctggaggcggagatcggcgcccagttcgaggcggacctcgacgccatgctgcccaagtgcgacgtcgtcgtgatcaacatgccgctcaccgagaaaacaagaggcatgttcgacaaggagaggatcgcgaggatgaagaaaggcgtgatcatcgtgaacaacgctcgaggcgcgatcatggacacgcaagccgtggcggacgcttgcgccaccggacacatcgcgggatacggcggcgatgtgtggcaccctcagcctgcgcccaaggaccacccgtggcgctacatgcccaacaacgccatgacccctcacatctccggcaccaccattgatggccagttgaggtatgcggccggggtgaaggacatgctagagaggtacttcaagggccaggatttcccagtgcagaattacatcgtcaaggaaggcaagctcgcgggccagtaccagtga

SEQ ID NO: 5829 - DNA, 768 bp, Zea mays
  Peptide Sequence Number=SeqID_47608
atggcgtcggcggccccggtggaggagccgacggcggcggccgaggcgaaggggcggctgaccggtgactccttcatccggcgccacctcaggaccctcgccccgtatcagcccatcctgccctttgaggacataatcaagttggatgcaaatgagaatccatatggtccacccccggaggtcgctgcagcactaggtagtctcaagttcccctatgtgtaccctgatcctgaaagccgccaattgcgtgctgcccttgctgaagattctggacttgaatctgattacatacttgctggatgtggcgcagatgaactaattgatttaattatgagatgtgtgcttgaaccaggcgacaaaattgttgattgccctccaacattcacaatgtatgagttcgacgcttcagtcaatggtgcacttgttatcaaggatgttgatctcattgtcgaagtggttgaacaggaaatgccaaaatgcatatttctgacatccccaaataatccagatggcagtgtaatcaatgatgaggatcttttaaagatacttgatctcccaatacttgtagtgctggatgaagcttatattgagttttcaagccttcagtcaagaatggcatgggttaagaagcatgataatttgattgttctccgaacatttagcaaacgggcagaagtttcagcatgtgcagctttacagaatccaacttatctggaggaatgtttggaagagtatgcaatttgcagcattactcacatgttttattga

SEQ ID NO: 5830 - DNA, 504 bp, Zea mays
  Peptide Sequence Number=SeqID_47609
atgtcgtcgtgcgccggcgagaccggcctggtggtgtggtgctgctgtccgtgcctggtgttgcaggtcaccgtcttcctcctcgtccggctacccaggaaggtggtcgtgaagaccaagaggatcatcctgaggagacggcacaggaggaggccgccggcgccatcaaacgcggccgccgggctgaagatggacgacctgctggacctggatgacgacggctttggagccgcgtttggggtcggagaggaggacgtcggcggcggcggcggcggcgacggcgacggcgacgacagcgccaacgattggaaagggaggtggtgtttcgctgtcgtcagagacgacggcgtgtgggaggcgatcattgagcaagaagggctcttctggttcgggagcttttggggccagcgggagcaggagcggtcggctcctgaaggcgaggatcggatgggtggaagcttcaggctgcctgtggcgttagagcggtcaaatgcatgtacgtaa

SEQ ID NO: 5831 - DNA, 504 bp, Zea mays
  Peptide Sequence Number=SeqID_47610
atgacgtcggattactctcaacctctacggaagcaagacaacgtcagcaggatccatgtcgcaccgacagctgtgcttctacagggctcgaggcacttctccgacggccacaagtgctcaaggcttttcaagttctctcgtagaaaaaaaggtgatcagtcatcagaagtaccagcagaaaagaatataccttttggcgcaagacttgaggaagcaacacagagcgatggagattatgagccaactccggtctatgagatagcccatgattgttttgatgcagaggatgtgctcccttctgacggtggaattagggagaacgaagagtatgaaaggcatgacgatgatgctcatttggagtcttctgttggtgtagcagataacagtgtgtatattcacggtactcagtcgtttgatggaactaatgacatggcggttcaagcaactattgcctctgttgatcaaaatgtcaaggattctgcagacccttctgaagcagcctaa

SEQ ID NO: 5832 - DNA, 411 bp, Zea mays
  Peptide Sequence Number=SeqID_47611
atggaggccgcgaggcgcgccggtgctcgtgacttggggaagaaccagggccagtccgcggtcgcagtgccggagggaggaggaaggagtgagcagcggagtcgccggacctgggcgccattgaagagcagcgcggcgagcagggagctgctgccccggggaaagggctcggtcgtgggagaagaatggagaggagagagaggagacatgttctgttttcggagcttgcgatacggggaagaggggtctgacgccgaggccccacgcagcagtggcgcatgcgcgttcaaggagtacccagactggcggagcccacatgcaagtggcgggtgtcggtttgcgcgtggttgggccagcaaaatgggaaaggagcagagagagatgggccgagcgactccgaattcggcccag

SEQ ID NO: 5833 - DNA, 1503 bp, Zea mays
  Peptide Sequence Number=SeqID_47612
atggccatctactccttcctttctgttcgcaagcgcccagttgttgtcgtcgccgccgtcaccctcttcattgtcgtatcctctctcttcctcctcttcagccccgcaccgacagcgctcccgtttttctcctcctcctcttcccacctctcctctcaagcttcaattgctgccgtctcctctaacgcatttccacctgagaccccaacctctgttgtctccaactgggtcagcagcaacacttctgctgatcgcgtctctgctgacgcatctccgcccgtagtcggaaccgccatcgcgtctgatgcggtcagcaacagcacggctgacccgcctaggccagataccaccgccgctgctggcgacgcgaaggctgatgtgtcccaaccagatcacggcatgccccctgccgccactgaagcgagtggatcggcaggcaacggtgagacagccgcgggagtctcgagcgagagggatgaggaggggcaaggcggcggcggcgccgtggaggagctaccatcgtgggagctgtgcaaggtggggaagggggtggcggccgcggactacatcccctgcctcgacaacgtgaaggcggtcaaggcactcaagtcgctgcggcacatggagcaccgggagaggcactgcccgacagatccgaggccgaggtgcctcgtgccgctgcccgagaggtaccggcgtccggtgccgtggccacgcagccgtgacatgatttggtataataatgttcctcatccaaagttagtggaatacaagaaggaccagaactgggtcaggaagtctggtaactattttgttttccctggaggtgggactcaattcaaaaatggcgtggcttcatacattaaattcattgaacagattttaccaaacattcaatggggaatccatacaagaactgtccttgatgttggatgtggtgtggccagctttggtggatatttgcttgataggaatgtcattaccatgtctgttgcacccaaagatgagcatgaagctcagatacagtttgcactggagcgtgggattccagcatttttggcagtgattggaacacaaaagcttcctttccctgataattcatttgatgtcatccactgtgcaaggtgtagggtccactggtatgctgatggcaagtattttggaacacttatattctcatgtggaaaaccattgttggagctcaatagagtactcaggcctggagggtattacatttggtctgcaacacctgtctatcgcaaaaacccaagagatatagatgattggaatggtataaacctctcgatagttgcctctttcctgcagttccgagttcagtttcctcaagaaaaaattgattctgatacaagttattggaaggaccttgtttcagaaatatatctcaacgaatttgcagttaattggtctagtgttcgcaatgttatggacatgaatgcgggttttggaggatgtgtcagacagtcactcaatcagaatcactaa

SEQ ID NO: 5834 - DNA, 1227 bp, Zea mays
  Peptide Sequence Number=SeqID_47613
atgctctggagggcggcggcggcggagggcgaggaccacttcgaccgggtgcccgactccctcgtgctgctcatcttcaacaagctggccgacgcgcggtcgctggggcgctgctccgcggtgtcgcgccgcttcagcgcgctggtcccgctcgtggacgacgcctgcctgcgcatcgaccgcgtcatccccgccgacgccgccgacgcgggggcgccgcgcccgcgcgccgcgctctcgcacctcctcgagtccgtgctgctcgccgtgctcaagcccttcgcgcactgcgacgccaagtccgcgtcgccgcaaaagcacgcgcagcagcagcagcagcaccactcgcccgcccaggtgctgaggaacttcagcagcatccgcagcctccggatggagctcccggtctccgacgtgggcaccgacgacggcgtcgtgctcaggtggaaggccgtgttcggcagcacgctgcagagctgcgtcatcctcgacggcaccagggtggaccgcgccgcggccgcgggaccgccgcacgccccctcctccgctccccccgcgggcgacgacgacggcggcagcatcccggagtccctgtacaccaacggcggcctcaagctgcgcgccgtctggaccatcagctccctcatcgccgcggccaccaggcactacctcctccgcgagatcgtcaaggagcaccccaccctggagcgggtggcgctgacggacgccgacgggcccatgaaggaggccgtggccacgctcggcaagcgccacgcctacctgctcgagatgaacggcttctacggagcaacggctacttcgcgcgcaatggtcgactgcaacgcatttaatgcgcgcctgcgcgcgcagaggacagagcacacgcagttggcgcaccggacagtctacaggacctgtctggtgcaccaccggacagcccagaggccccacaagtcagagctccaacggtcgaaccccaacggctggctgacgtggctggcgcaccggacagtgtccgggttcttgcctgaccgccatcgcagcaaaatcaaccaaggacctccctacactgaccactcccctactgcccttgcccttttcgggtaccaggatgatcttcagatgactcgtgacctcacgctagtcagggtcctatttgcaaagcgcaagccgaaggggtatctcgcgctaacagtcgtccgatcaacatccgacgatgaggattag

SEQ ID NO: 5835 - DNA, 1944 bp, Zea mays
  Peptide Sequence Number=SeqID_47614
atggcggagaacggcgaggagaagctgctcgccacggtgcagcacatcgtccagacccttggccgcaccgacaccatgacggaggatatactcaaggtcttctccaactatgacggccgcctctcgcttgacaagctatacgccacgcgcgccgctgctgcggcggccgcggtcggaggggctggggagcgctccgtgccagcctcgccgcccatgccgccccctccagtggcgccgtcggctgccgcggccatgcccccggtgacgtcgctggagcggaccgtgcgcacgctggaccggcagatctcgcagttcgtcgccatggataggctcatatgggcggactcagcggacgcggacgcgttcctagaggcggtggacgacctcatcggaaccgtgcaggagctggatgccgccgggaccaaccgcgggctgctcgaccgcgccgacgagctgctgagccggtgcatggcccggctggaggacgaatttcgggctctcatcgagcgccccgacgacgcggcgcctcaggttaccggtgggttcgggtccgatgaaagcgaggaggatgagtacgacgcggatgacggctttggcgacgagccaatcccaatcgcgaggccggtctcggacttcgacatcgttatagatgctcttccgccgggctcggtctctgatgttcaccagattgcccggcggatggtggacgctggctttggccgcgagtgcgccgaggcatacgcggccgcacgccgcggtttcatcgacgagagcgtcgctcgccttggcatccgttcccgtacggtcgacgaggtccactccttaccatgggaggagctcgagtttgacattgctcgctggatcccagccttcaagatggtgtttcgcatcctaatccccagcgagcgccgcctctgtgatcgtgtcttcgaaggccttgctccgtacggcgaccttgcctttgttgctgccgtgcgcacccaggcgcttcagcttatttcattcggagatgcagttgctgctgccagccgcgcgccagaacggctcttccgtgttattgacatgtatgaagcagtacgagacctcctttctgacctcgatcctgtcttctctgatccctactctgcagctctacgtgctgaggtatcagctgtatgcaacactcttggctcctcaatcaagggtatattcatggagctggaaaatctcatccgccgtgacccagcccgtgttgctgtgcctggtggtggtatacatcctatcactcggtatgtcatgaactatctccgtgctgcttgtggttcacggcaaacattggaagaggtgatggaaggtgacttgggtgctgttggcacagcggctattgctgtcgaccctgatcgccctacttcgtcgctagctgtgcacatagcttggatcatggatgtgcttcacaaaaatttggagaccaaatcaaagatatacagggatccaccacttgcttccatattcttgatgaataatgggaaatacattattcacaaggtcaatgacagtgagcttggggttttgcttggtgatgaatggatgaagcagataatgagcagggtgcgcaggtggagtgtggagtaccagcgtggggcctgggcaaaagtcatatcagtgctgcagaccggaggtcctggcgttggcagtatcactgcaaaatccatgcttcagaagatgcagatgttcaacagctacctggaggagatttgcgcggtgcagtcagattgggtgattgcagatgagcagctacgagcagatgttaagtcagcgatagtggattctgttatgcctgcatatagaggcttaattgggagattgagatcatctcctgaagctgcccgagacttgttcatcaaatacaccccagaggatgttcaggaacgcatccaacatctatttgaaggggtggccaagtga

SEQ ID NO: 5836 - DNA, 1643 bp, Zea mays
  Peptide Sequence Number=SeqID_47615
cattagtgattggcatggatgaaaccctgcaagcactcgatgatctgatctcccagttcctgagcctggaccggtccctctggtccagttctgacgatgccgaggccttcttagaagccgtggacgaactgacttccaccatccatggcctcgagagcacctcagcggaccatgcgctccttgagagctttgacctccttctagagcgatgttccgcgaggctcaaggatgagttccagcgtctggtgggcacatccggcttcagcgacgacgaccatggtgaccgcagttccaagagaagccagaatgaagacgccaacgaccacacctttgtagcccagccagtcagaaactttgacatcatcgtcgatgccttgccggagggcgtagtcaccgaggcaaaccgagtcgcgagaaggatgattgctgccggttttggcgatacgtgtgcggagacctacgcctctgcacgccgcagcttcattgacgagagcattgctcgacttggggttgacgctcattgggaagaagaagaattgtgcaataagtcaacaacagcatgggaggagctcgagactcggatcatgcgctggatacctgcaacacgcgttgtgttccacatcttgatcccgagcgagcgtcacctgtgcgactgcatcttcgaaggattcacatcctacgctgaccttgccttcgccaccgcatgcagacctttcctccaacccctgtccttcgctgaagctatcgctgctgctgccggacataggccggagagtctcttccgcatggtcgacatgtacgatgccttaaccgatatccttcctgtccttgacgaagccttggatcacgaggtcgtggctgctcctcgtgaacgtcttggactgtcaatcaagggcatatttgtggctctagaaaagctgatacgcggtgacccgtgcgagtcttcgccgccagatggtggactgcatccgataaccaggtacgtgatgaactacctcatggcagcctgcgtgtctcgccacactctggaggaagtgatgctcgtggagttcggtcgtgctgatgaaacatgtccagtcgaccctgaccgtcccacgtcgtcactggcgatctgctttgcttggatcgtggacgtgctgatagcgaatctcgagtccaaatccaggatctatggtcacgctcctcttggctgtgtcttcctgatcaacaacgggatctacataatcaagaaagtcagtggatgcgagcttaagatcttgctgggcgaggattggaccagggtgatgtctgcgaaggttcaccagtgggtgctggagtaccgccgggctacctggggcagggccgtagcaatacttgagactgacagaagacctggcagtagttcgagtagtgttatgctagagaaactgaaccgcttccatacctttctggaagccatctgccaggtgcagtcacggtgggtactggtggataagcagcaggcagtggatctgagcgttatggttgaggagctggttgctccggtctacagggacacagttgagatgttgaaggcaacagaggatgtaggggtttcgtatgtgcgacctgaggacgtgaagtcacggattcagaggttgttcaaagcaatggccaagtcatag

SEQ ID NO: 5837 - DNA, 799 bp, Zea mays
  Peptide Sequence Number=SeqID_47616
atgggtcggcgcgagacggagcgcgaaggggggaaaccagagggagacaggcgtaaaggggaaacccgcggccttcgtgtttgtcccgcgcccaggtcaggcgtaaggagagggcccagccgaggccgagttcgagccctagggtcgggcgaggcggagttcgtcgtcttccggggccgaggccgagtccgagccctggggtcgggcgaggcggagttcgtcgtcttccggggccgaggccgagtccgagccctggggtcgggcgaggcggagttcgtcgtcttccggggccgaggccgagccctggggtcgggcgaggcggagttcgtcgtcttccggggccgaggccgagtccgagccctggggtcgggcgaggcggagcttcctatggcgcccgaggccgaacttggctgctgtcaacctcactctgtccagtggcacagcagtcggagcggcgcaggcggcgctgtcctctcgtcaggccggtcagtggagcggcgaagtgactgcggtcacttcggctctgtcgactggagggcgtgcatcaggataaggtgtcaggacatcttcgcattaaatgcttctgcggtacggtcggtcggtgtggcgatctggccaaggttgcttcttggcgaagactgggcctcgggcgagccgaagctttgtgctgatgggggttaccagctgagattaggagtcttggggacactgtccggtggtgcaccggacagtccggtgaattatagcggagcgcctctgagaattcccgaaggtgttgagttcgacttggagttccctg

SEQ ID NO: 5838 - DNA, 681 bp, Zea mays
  Peptide Sequence Number=SeqID_47617
atgaggctcgtccccggcctctccagtcccctcccccctctctgcagatctgggcatctgatctcactcgccttctcgctcacgtcatggatggacggtgccactgccacggtggaccggacagtgaggctgacagcagccaagtccggcctcgggcgccataggaaacttcgcctcgcccgaccccaaggctcggactcggcctcggccccggaagacgacgaactccgcctcgcccgaccccagggctcggactcggcctcggctccggaagacgacgaactccgcctcgcccgaccccagggctcggactcggcctcggccccggaagacgacgaactccgcctcgcccgaccccagggctcggacccggcctcggccccagaagacgacgaactccgcctcgcccgaccccagggctcggactcggcctcggccccggaagacgacgaactccgcctcgcccgaccccagggctcggactcggcctcggccccggaagacgacgatcggccctggcctcagccgacggtctccgcctcgcccgacccagggggctcggactcgacctcgacctcggaagacagactcgacctcgaccttggaggagcctccgtctcgcccgacccagggctcggaccgaccacgtcgcaggaggggccatcattgccctacccctag

SEQ ID NO: 5839 - DNA, 1581 bp, Zea mays
  Peptide Sequence Number=SeqID_47618
atggcgggaggtggcacgggcatcaggaaatacatgggggctcttaaggacaccacaacagtcagcatagcaaaagtaaacagcgattacaaggagctggacattgctattgtgaaggccacaaaccatgtcgagaatccaacaaaggagaaatacgtgagagatatcttttaccatctttcacccggaaggcctcgggcagatgtcgcctactgcatccgcgcccttggtagacgtctttcaaagacacgcaattgggcggttgctatgaagacattaattgtcatacaccgtgctcttcgggaagttgatcctgctttccgtgaagagcttattagttatggaagatctagctcccatatgctctatctgtcatactttaaggacgattctagcgcagaagcttgggattactctgcttgggtgcgcaattatgctttatatttggaggagaaacttgaatcattccgtgtactgaactatgatgttgaaaaggatccgttgcaaattcgggatcttgatacaaatggattgctcgatcagttgccagctttacagcagcttcttttccgactacttggttgccagccacaaggggcgtcatcttataacgtcataattcagcatgcactttcaatggttgctctagagagtgttaggatccaaacagccatcaatgacgggatactcaatcttgttgacaagttctttgagatgcagagagatgacgcaataagggcactgggcatgtatagaagagcaatcgagcagccgcctgcatccttcttggcgactatggaggaatatgtgagcaatgctccccttgcttcaacagttcaaagaaatcaggctgtactggccatagaggacagcaaaaaatcagaagttgaagaatcacaaccaacgctgcctcctccccactctccagctcaagaatctgggcctgagccagttcaacaagtcccacctgcagctgatccaacagatttactgggaatcaatgaaccaacccctgccacatctgaaatagatcaaaagaatgcgggggccttggccatggttccacaggataatgcgccaaaagcacctgcttctactaccagttctggaagtgtggagactagctgggagctggccttggtcactgcacccagttcaaatgggactgctgtcactccaagcaaattggccggtgggctggacttgcttacactcgacagcttgtacaacgaggcgcaccgaagagcgcagcagaacgcaagctacaacccttgggagaccaatccagcgtcaggcccagtgatgcagcagcaaatgtacgacccgttctacgcctccaatcaccccgtggccgcagcccgcaacgtccagatggctgccatggagcagcagcagcaacaacaacatgccttcgtgctccagcagcagcagcagcagcagatgattgtgatgatgatggcacagcagcagcagcagcaagcttcttccaatccgttgtatacggccgccgccgcccacacgtatggtgcaggggtgcagctccacgcgggcaacgcgtactctggagctgggatgatgtaa

SEQ ID NO: 5840 - DNA, 1621 bp, Zea mays
  Peptide Sequence Number=SeqID_47619
atggcgctccgccgcatcacaccgcggaggagacccgttctccccgtcccccgtgccttctcctcgagtccgccgtttcctccacccccgcctccggcgaacgaccccgaccccgacgccgcccaacccccatcctcttctccgccccctaattccggcgcgccgcggaacccggagtcctcgttcttccaggacatcaaagatcgcctccgttcgtctcccacgtctccgtctccgcgccggatcccgacgaccctgccccgccccgaccctgcgcgcggcgctccttcttcgggaccgcccattggagacatccgccggatgctccagaacttccgcttaaccggctcaaccagcgacgcgccctccacctccgctcccggatccaacccctccttcatggacctgctcaagaaccacttggaccagggtgccaacgcccggcaggcggagctcggcttcaatgccatcggagagagcctcaagcgcccccgtccgccgaagccttttataaccccttcgtcgagaaacatcttctgccgggagctagagaggacctcgaaggctttaggtgcgcggcaggaagagaatggctctgccattgagcttaaggggagctacagctacgaagagcttgggaagagactaggggagctgcggccggcgggtgcaggtaaagacggtaaggagtggttctcgctcaaggagctgcaggggcgtatcgccaagctcgcggagcaggagagccagcttgccgggccgttttcggaaatgcggcggggcattaggaacctgcagaaacaaggaaaaccgggtcggcctgtaaacatccaagcactgctgaaccctgtcggtcagccgacgccagactacatgagtgggcctccgcaggtggaattgttagagaagtacttccatccagatcatatgtcatccgaagagaagatgaaattggagctccaaagggtgagggacgaattcaagatgtccgagaatgactgtggttctgcacgagttcaaattgcccagctgactctgaaaatcaagcatctgtcaactgttctacacaagaaggataaacattctagaaaggggcttcaggagatggtccaaaggaggaagaaatacctgaaatacttgcgaaggacggactgggactcttactgtcttgttctgtcaaagctggggcttcgcgatgtgcccgagtacaaagctcctgactacaagagcaaagcaaccaccaaggccaaatctaagaagagcaagagcaagggcaagaagaggaaggccgcgacccgacctgcggtcctcggccagcggctggttggctgtgccctggttcctcgtcctcctagtcaccacgcaaccagtaaaaacattcccccaatcccgaacccctccgccgccgccgccgccgccgccgccgtggccaaggagcaagaaagggacacggcctatcccttggtcgcggcgccagatctcgccgctgctcgcctctcatccatggaggcgagatcctcgtcgtccgcggccgcagtgccgccgcccctctccataccttcgtccagcgaccagtgcgtctgggctgacgcctcgccgctcctcgccgccgcgtgccgtg

SEQ ID NO: 5841 - DNA, 738 bp, Zea mays
  Peptide Sequence Number=SeqID_47620
atgtacgacaccggcgacgctcgccagccctcctgcgccccgttcgcgaagaacgcgtcggccatgttcggtttctcgcaaggctgcctgccgctgcgtagatgggacgagctcaacgccttcttccagagaaccggtgttcgtgcaggaaacgaactgagcggcagcggagtcggagctcgggtcgacgcagaccagtacgcagcagacgtgatcgcgctgaaacgcatcatcgacagcacctaccaccagagcagcagcccggcaaagcctctggtgctcgcgccaggaggcttcttcgacgcggcctggttcacggagctcgtcggcaagacgaagccggagcagatggacgtgatcactcaccacatctacaatctaggccccggggtcgacgatcatctggtccagaagatccttgacccttcttacctcgacggcgaggccagcacgttcagcgatcttgaggggatactgaggtctgcagggtcaacgcatctggtgagtctggacgcgcagcaaccaaacacgcggcttgtgactgatgcgtttgtgttcagcttctgcgctctactgtggcaccgcctcatgggcaccaaggtcctctctgcgacgttcaacggcacgaacaagatccgcgcctacgcacactgcgcgaagagatcggtaaaggagcgggcacagaactccgtttgtattgtatcttcctggcaacaacagctcgtagcgagtgtctga

SEQ ID NO: 5842 - DNA, 321 bp, Zea mays
  Peptide Sequence Number=SeqID_47621
atggacgggatgctcactgctaaggccaaagagcgctgcagcatcctcccggaggtcatcctcatcgtcgtctccggccaacccacacaaccgtcgctcctcgttgcagtcgatctcaacagtttcatcgtcggagacggccatcgacccacctcaggctcggagtcccggttcctcaacggagtaagccggagcaccagagctaggagagaggaggggatgaccggtccggccaaccggttcctccacggatttgaatccggagcaccagagctaggagagaccggagctaggagagaccggagcaccagaagaagatag

SEQ ID NO: 5843 - DNA, 177 bp, Zea mays
  Peptide Sequence Number=SeqID_47622
atggcgctcgctgccggtgatggtcaagaggatgcgaggagtggagaggtcgtggctaggtcccttatgccgaggtgggcggaggtcaagttggtgttgtcatcaaggataatgggtattggtgttaccacaactagggacatagttgagataggtgtgggtacatggggtaggtag

SEQ ID NO: 5844 - DNA, 525 bp, Zea mays
  Peptide Sequence Number=SeqID_47623
atggcagctccccaatcccctactcgttattctgctgctgtcgctagtgggtgggtcctagatgtcagggtcatccccaacctttggtctgttccaacaagcgccaagatctccgggccgatcccctctaggcgaagtccgaggcttcgacaatataaaggggggcgcatcacgaccagcccatccacccgatggccgtggaccgtctcgggcgagcacgatcaaggagctgagctaactgagtgcatccatgggaagagagaagcaccgccgcgggcaaaatcgtcgaacacagtcgctcctacgccgacgtgtagctttggagcatcaacgggatgtcgaggaatcagcggtggcgataggtggcatggggattgctcgaagtcgttcaaaaccggccgcgggccgccaatcaccgcgtcggaccctctctccatctcctccaccggtaaggacccctctgttgggttcgctatcgcctctgcattgcgtagaagctttcggattgggggatttgtgctctag

SEQ ID NO: 5845 - DNA, 195 bp, Zea mays
  Peptide Sequence Number=SeqID_47624
atggtggatcttgattcatctgaagttctgattctattcatatccttccttgtcgatgttgatcttctcttctcaggtcttgatgtcttcaaccagggcactactgtcagggtggagtatggtgatgatgcaattgcatctgactcgtcaggccctcatgtgatcagccatgtgttccctcacacctatgggtag

SEQ ID NO: 5846 - DNA, 321 bp, Zea mays
  Peptide Sequence Number=SeqID_47625
atggccctcaccttcggctcgagggaggacctagcaggttggcggtgcgaggagttgggaccggtggagctaggcgagcggctttctagcaggtaccgagccgaggcagagctcgacaggatcaggtctccggtgtgcgccatgctagatccagtggccacggtgggcaagggggcaagggtgcggtctccggtgggtggggaaggggagctatggtggggaagggagaggtctccggtggggaagggcttggacgggggagggaatggcgtcgcgctagtgatggctggggaatggcttcgacgcggcaaccttccttga

SEQ ID NO: 5847 - DNA, 1026 bp, Zea mays
  Peptide Sequence Number=SeqID_47626
atgaagttcttcacttgcgttagattccctgctgctgtgctgcacagatctttagctgaatggttgctccaggaagggcggcatcttcccgtagtgctagtcctccacacagatgacaagctcgaagctctccagaatctccactcccggagtgagttccccaccaccgtctccaaagtccaaatgtcccgtcaccaccacttcgccgccgccatcgctgtcgtgctcatcctcttcgcgccgcctccttgcgccggcgaccctaacgacgagcgttgcctgacccacctccaccagtccctctccaatccctccggcggtctcaactggaccaaggcggcgatctccgcgccgtgcgatggtttcttctcgcacctccagggcgtgacctgcaacaacgggcgcgtgtacaagctagccctcccggagctctcgctcgggggcaccgtcccgccggagctctccaactgcaccaacctccagtcgctggacctctccgccaacgcgctgtccggcgccatcccgacggagctctccgcgctgctgaacctcgccgtgctcaacctgtccgcgaatgcgctgtccggcgccatcccgcgggagctcgccagctgcgcctacctcaacgtcatagatctccatggcaaccagctgtccggtcccatccccgacgagctcggcctcctcgtccggctctcagccttcgacgtctcccacaaccgcctctcgggccccatccccgtgctccttgccaaccgcaccggcgccggcacggcagccgtcgggacggcgaggttcaatgccagctccttcgtagggaacaagggcttgtatgggtacccgctgccgccgatgcggacgcgggggctctccgtgctcgccatcgctggcatcggccttggcagcgggctgctcagccttgtgctcagcttctccgccgtgtgtctgtggctccgtgccacggaccggacggccaccatctctggagaggagggcaagatctcccagctcatgccggactactga

SEQ ID NO: 5848 - DNA, 405 bp, Zea mays
  Peptide Sequence Number=SeqID_47627
atggcggggttcagctttgtccctacggactcgaggcgtggtcggtccgagcccaaggccgggcaaggtggtgactcctccgaggtcgaggttgagtccgggccctggggtcgggcgaggcggagaccgtcttccgaggtcgaggttgagtccgggccctggggtcaggcgaggcggagaccgtcttccgaggtcgaggcggaggccgagccccggggtcgggcgtggcggagcttcctatggcgcctgaggctggactcggctactgtcagcctcaccctggcaggtggcacagcagtcggagcagggcaggcggcgctgttttcctatcatgtcagtcagtggaggggtgaagtgattgcggtcacttcggccctgtcaactgaggaacgcgcgtcaggataa

SEQ ID NO: 5849 - DNA, 303 bp, Zea mays
  Peptide Sequence Number=SeqID_47628
atgcagacggcatgcaactgcaccataggggcgcaccctttcgacttcgacgcgtccaacatgaaggcccaggcccacacgtcatgtaaccggcgcgccggttactacgagcgaaaaacggcaccgcctattgcgctagtaccgcgccttctcgactacggaaccggtgctgcgactcgaggcaaccctacgcatggcccaacagtgccaaaccaagcacatcagtcacggggaccgagaaaggggatactccgaaagggatccttctccacgaaggaagcgggccccgagccctcctactga

SEQ ID NO: 5850 - DNA, 735 bp, Zea mays
  Peptide Sequence Number=SeqID_47629
atggagagcgggcgcgggctgggcggcggcggccaccgcggccattggttcggcctcgtcgccgactgcggctgcgcggcctcgctggcggaatcgccctgccgcagcggctcgtctacggtggagcgggacagcgacatccccgcagaggcgacgcagcgggagtgggacggcgatgaggtcgagagcgacgacggcgaggtgcagagcccgtacaagggctcctccttcgacaccatggacgtgctccaggaggccctgcccttcaggaaaagggggtaccccaaagtttttacaaatgggggagtctggatctactgcaaaagcttcaaagaccttccgggaacccagaaacacccatcccctagggaagcgcaaaaggccttcttcccattcagtttcaaaatgggacaaaagaggtataccccgatgggtgacgcaatcaaaagccccacaaactgcaggaggatgactacatcgcctgctgccacaagcagctcaacaagcaacagtggcagcgatgatgaacataaccgctctcagaagctgtcttcccgtcgcccgctcagaatgcccatcaatgccctgggtgtttttgcttctccgcctggacctcgtccaccccagccgttctcagctcacatgagatctcaatcaatgcttgatgtgcaggatgtgacagagacagactcagccgccatggtcactcccagggacaagcgcatgaagaagtag

SEQ ID NO: 5851 - DNA, 369 bp, Zea mays
  Peptide Sequence Number=SeqID_47630
atggctggaggtggccgcgtccggcagcaccgcgggccccctctcctgctcccctggcacgtccgcatctcgcgcccacgatcgcacgcgcggctgctagcgacgctcgccccaggtcgcgggccgtgtggctcgcccctcttcccccgtgtcgcagccatgaaccctctactccggcgtatcctctctccccctctccttcgcccggctcccggccagctaaccgtcgcgaccctgggcaccagcaccgccgccgccaccatgggcgcatatctgcccgccagcgctttgggcaccgtcaccgttgcctctctggtgggtttcccctgcgggtctcctcctggggacctccagctccgatgggcataa

SEQ ID NO: 5852 - DNA, 279 bp, Zea mays
  Peptide Sequence Number=SeqID_47631
atggacaggagggcagcgccgcagttggggagatccggcggccatgagaacatggaggtggtgtcaggctccaaggaaggctcctgtgtgctgggaagcagagaaggggtctggtggtgtgaggtgccagggaaagggagggaaagtggcggctggggtggtggccggccccgagaggaaaggatgagcctcccggggacgacggcgcaggagcagatggtggatgttggaggtaggagaaagggtggcagctgctggagatataactatgacaactaa

SEQ ID NO: 5853 - DNA, 1362 bp, Zea mays
  Peptide Sequence Number=SeqID_47632
atggtggacacgggcggggggaggctctaccagcgccgtggcgcggtcgctttcgtcgcggccaacaaggcgctgctcgccgctgcgtgggtcgtcgggttcgcgctcgtgttcctatggcagagcgcctccatgtccttcggcagcgccggcggcggagggtacctcaggctcctgtcggtgccgcctccgccgccgcgccccgcgccgcggctccgccccacggcgtacaacatcacggacttcggcgccgtcggggacggccgggcggtcaacaccgcggcgttcgagcgtgctgtcgaggccatcgcggcgctcgcggagcgaggcggcgggcagctcaatgtgccacccgggcgctggctcacggcacccttcaacctcaccagccacatgacgctgtttcttgccgagggcgcggaaatccttggcattacggatgagaagtactggccattgatgccagcattaccgtcatatgggtatgggcgggagcgcaaaggaccacgatttgggagcctcattcatggacagaatttgagagatgtagtcattacagctttcgagtacatcattcatgttttaaacgctttggcactgtaccaaacacttgaagtaccagtagatatacacccatttttctataacatcctgtctatactaactcttgcactagttacagattcttgtcaggatgtgcttattgagaattgctacatatcggttggcgatgatgcaatagctataaagagtggttgggatcagtatggtattgcatacggtcgtccatcttctgacattttaattcgcaatgtaaccgcccgttctcttgtgagtgctggaatttcaataggcagtgagatgtctggcggagttgcaaatgttactgtggagaatgtgcgcatctgggaatcaaggagaggtgtgaggataaagactgccacaggaagaggcggctacatccgtaacatctcataccgcaacataactttcgacaatgtccgtgctgggattgtgataaaggttgactacaacgagcacgctgatgatggatacgaccggactgccttcccagacatcacaagcatatcattcaagggaatccatgggcagggtgttcgggtgcctgtccgagctcatggcagcgacgtcatccccatcaaggacatcagcttccaggacatgtcggtaggcatcagctacaagaagaagcacatcttccagtgctcctacctcgaggggcgtgtcatcaggcctgtgttcccgaaaccatgtgagaacctggacgtctatgatgagcaagggcagcttgtgaagcgggcagtggccctaaacagcacagaacttgactacgatatatga

SEQ ID NO: 5854 - DNA, 846 bp, Zea mays
  Peptide Sequence Number=SeqID_47633
atggctggtcatacaaggcgtccacaaccccatgttctgccgcgcgccccccgctccgtcccgcatcccgtccgcggccgcaccccgccccgcatcctgccgccctctcgcgctccttccatcctccgccctcatcctgccgctcacgtcccttccatcctcgctcgcgctctaccaatccaccccgtcctccccggtcgtgatccccgcctccaatcgatgtctgcaccggtcgtaacccccacaagatgcccaccccgcacatcccccgtgatgcccatggacgagatgagggagatggattcagtgacggacgcccaccacgtcgcgtggctccagcacgacctcctcggcctccttgtgctccgccaactccaccccatccgcccaagcatctgcctccacctccacggggacgctaccgtccgtcatcctatcatgggtggcgcgcgtggccacgggggacaactactactacccgaggcggcctccgcacgcaggttctttgcgggcgccagggaccagaggctcttcttctatgaccacaccatgggggaggggaggggtctgacgctaccgagcgccgcagcctggccgttctcaggaggagggccaccagcggcttcctgcgagcccccacaggtgcagcgccagctcaccctcccaccccaccgctccctcaacccgcatcccgctggtttgctctatctagcccagctccaacctttggtcagcttgactccaatcacctcggccggcccctcgtctccaccatgccctacgaggtctggaactctgaaccctgacggtctcaactccttcctgtgtctggtcggctacgtgtaa

SEQ ID NO: 5855 - DNA, 468 bp, Zea mays
  Peptide Sequence Number=SeqID_47634
atgcaaatagaagaaaacatcaatgtgggccttatgcagcacctggagcaatccatccctgaccctgcatatgaggactacttggctagaaagtgtctcaactcctgggctgatattttcccctgcaactcagaccttgtcactgttccaaaggtgtgggctgcttttttcatgggcctgttgttgaggtcgaattcctttgactgggccaaaaaattcttaacgtcaggtgctatctctgctcttgtggagcccagcatggaaactgtctcgcttaagattcccccaaagtgtctgcctcctcctagccaggagctgcatgtggaaccacagtcccccactgctgcagaagccgtatccaagcataagcaaccaattatggttgaactgaagttagaaggagtgccagacttcgggagaaggctaggggcttcaagaactgctcaaggattggaaaaatgttcttga

SEQ ID NO: 5856 - DNA, 3789 bp, Zea mays
  Peptide Sequence Number=SeqID_47635
atgagctcgccggagaatggcgccgccccggaggccagcgggaagaagaagaagaaggcggaagaggaggaggtggtggccaaggtgccgttcctgaagctgttctcgttcgcggaccggtgggactgcgtgctgatggcggtgggctcgctgggcgcgtgcgcgcacggcgcctccgtcccggtcttcttcatcttcttcggcaagctcatcaacatcatcggcctcgcctacctcttccccaccaccgtctccggccgcgtcgccaagtactcgctggacttcgtgtacctcggcatcgtcatattcttctcgtcgtggaccgaggtggcgtgctggatgcacacgggcgagcggcaggcggcgaagatgcggctggcctacctgcgcgcgatgctggaccaggacatcgccgtcttcgacacggaggcgtccaccggcgaggtcatcaacgccatcaccagcgacatcctcgtcgtccaggacgccatctccgagaaggtgggcaacttcatgcactacatcagccggttcctggccggcttcgccatcggcttctcgcaggtgtggcagatcagcctcgtcaccctcgccatcgttccgctcatcgccatcgccggcggcacctacgcctacgtcaccatcggcctcatggcccgcgtgcgcaagtcctacgtcaaggctggcgagatcgccgaggaggtgatcggcaacgtgcggacggtgcaggcgttcgtcggcgaggagaaggccgtgaggtcgtaccgggaggcgcttctgaggacgtacaagtacggcaagaggggcggcctcgccaagggcctcggcctcggctccatgcactctgtgcttttcctctcgtgggcgctgctcatctggttcaccagcgtcgtcgtccacaagcggatatccaatggcggcgagtccttcaccaccatgctcaacgtcgtcatcgctggcctgtcgctcggccaggcggcgccgaacatttcgacgttcctgcgggcgaggacggcggcgtaccccatcttccagatgatcgagaggagcaccgtgaacacggcgagctccaggacgggccgcacgctgccggtggtcgacgggcacatccagttccgcaacgtcgacttcagctacccgtcacggccggacgttgtcatcctcgataggttcagcctgaacttccctgccggcaagatcgtcgctctcgtcggcggcagcgggtccggcaagagcaccgttgtctcgctcatcgagcgcttctatgagccgctgtccggctccattctgctcgatgggcacgacatcaaagagctcgacgtcaagtggctccgccgccagatcgggctggtcaaccaggagccggccctgttcgcgacgagcatccgggagaacatactctacggcaaaggcgacgctaccgcggaggagatcaaccacgcggcgaagctgtcggaggcgatcacgttcatcaaccacctccctgatcggtacgagacgcaggtcggcgagcgcgggatacagctgtccggcggccagaagcagcgcatcgcgatctcgagggcgatactgaagaacccgtcgatactgctcctagacgaggcgacgagcgcgctggacgccgagtccgagaagagcgtgcaggaggcgctggaccgcgtcatggtcggccgcaccaccgtggtgatcgcgcaccgcctgtcgaccatccggaacgccgatacgatcgcggtcgtcgacggaggcaggatcgtcgagacaggcacgcacgagcagctcatggcgaacccgtacagtgcctactcctcgctgatccaactccaagaggctgcccagctccaacacaagccttctttgtctgacagcgcaagcattaccaggccactaagtttcaagtattcaagggagttgtccgggaggacgagcatgggcgccagcttccgctccgacaaggactcaatcagccggtacggcggcgccggagaggcgcatgacgaggtgcgcaaggggaagcccgtgtccatgaagaagctctactccatggtgcgcccggactggttcttcggcctgtcgggcaccatcagtgccttcgtggccggctcccagatgccgctcttcgcgcttggcgtcacgcaggcactggtgtcctactacatgggctgggagaccacgaagctggaggtgcgaaagattgccgtgctcttctgctgcggcgcggtgctgacggtcgtgttccacgtgatcgagcatctcagcttcggcatcatgggcgagcggctcaccctgcgcgtccgggagaagatgttctcggcgatactgcggaacgagatcggctggttcgatgataccagcaacacgagcgccatgctgtcgtcgcggctcgaggctgacgcgacgcttgtgcgcaccatcgtcgtcgaccgctccaccatcctgctccagaacgtcggtatgatcgtgacgtcgctcatcatcgctttcatactcaactggagaatcacgctggtcgtccttgccacctatcccctcatggtcagcggccacatcagcgagaaaatgttcatgaaaggctacggcggcaacctcggcaagtcctatctgaaggccaacatgctcgccgcggaggcagtgagcaacatccggacggtggctgccttctgctccgaggagaaggtgataaagctctacgcggacgagctcagggagccttctaagaggtccttccggcgaggccagggcgccggcctcttttacggagtctcccagttcttcctcttctcatcctacgcactggcgttatggtatggttcagtgctgatgagcaaggaattggccagcttcaagtccgtgatgaagtccttcatggtgctcatagtgacggcgctggccatgggggagacactggcaatggcacctgatatcatcaaagggaaccagatggcgtcctcggtgttcgagatcctggaccgtaagaccgacgtccggatcgacacaggtgaggacatcaagagggtcgaggggctgatcgagctgcgcggcatcgagttccggtacccgtcgaggcccgacgtgaccgtgttcaagggacttgacctgctgatgaaggctggcaagagcatggcgcttgtcggcatgagcggctccggcaagagtaccgtgctgtcgctcatcctccgcttctacgacccgatcgccggaagagtcttgatcgatgggaaggacgtcaagaagcttaagctcaagtgtctcaggaaacacatcggcctggtccagcaagagccggcgctgttcgcgacgacgatctacgacaacatcctgtatggcaaggacggggccacggaggccgaggtcgtcgaggcggccaagctggcgaacgcgcactcgttcatcagctcgctgccggaggggtacaagaccaaggtcggggagcgcggcgtgcagctgtcgggcgggcagaagcagcgcatcgcgatcgcgcgcgccatcgtgaaggacccggccatcctgctgctggacgaggcgacgagcgcgctggacgtggagtcggagcgcgtcgtgcagcaggcgctgaacagggtgatgaggaaccggaccaccgtgatggtggcgcaccggctgtccacggtcaagaacgccgacgtcatctcggtgctgcaggacggcaagatcatagagcagggggcgcaccagcacctgatcgaggacaagaacggcgcctaccacaagctcgtcagcttgcagcagcagcaacagatgcagacgcagcagagctcatcagaagacatttga

SEQ ID NO: 5857 - DNA, 258 bp, Zea mays
  Peptide Sequence Number=SeqID_47636
atgaagatccagacgatcagaaccttggtcgcacggtccgccataggccccaaagactacaacgaggacttcgcttggacggcaaggcgaggcccgggtggtgtgctcagtgggcacaagggttatactggttcgggcaggatgtccctacttccattttttggttgctcgcactaccgacatttgattgcttgtagtagagattacaagcaagcgagagcgggaaggactccaagtctctatatgttgtttttctaa

SEQ ID NO: 5858 - DNA, 1608 bp, Zea mays
  Peptide Sequence Number=SeqID_47637
atggcggagcaggacgacgccgcggggcagagcccgctcgactccgttccgatcgacgaaacttgtgatgctgaagatatgcattctcctttgtccttttcttacagaagtcagcctaaatctgtgataataaggatgggttttgttctttctgtgcccttaaagaacatgttgatgaatcaattcaaagagttatcttcggatttttggccaggacagcaagaagatgcacatgaatttctacgttgcttgcttgataacttgcacaagtgtactcttgatcccatgtcaaagggcaagggctcatcctttgacgaagaaagtatagtcaacgagatttttggaggacaactgaaaagccatttatcttgctgcgagtgtggtcacagctcagagacgtttgagcccttcctggatctaagcttggagattgatcaggttgatcatctggtagatgctttgcaatcttttaccaaggtagaacagattggggactctgaaaacaagctcacctgcgaaagttgcaatgctcaagtttctaagaacaagcagcttacacttcatagagcaccagatgttattgcatttcatctcaagcgttttacaacccttgacaattctgttgaaaagattgacaaacatgtggtgtaccctctggaggttgatttgaagccatttcatagcaatccagacacagtggggggactgaaatatgatctttatggtgttgttgagcattctggattacccaactatggccattatacctgcaccattcgttcttcaccaagcacatggtacttcatgaatgactccaaagttgattcttgtactgattcaagtgcattaaaccaggaagcatatattttgttctatgttaggcagggcaaatttccatggttctcgagtttgctagaaggcaaggatgccctgcaagctgaaaatacctgtggctcatctcctgtgtcagttttggaaaatatagatgcaaactgttcaacgtcttttgcaggaggcagtggcagtagttctggtgataagttagagaaaaatgaagccagccaattagaggagacggagaaagatgaaatgggtcggtacaaaccatcattccttcctgaggagccatctacgagaagttcccttggcgcttccaacagcaataatacaatcgatgaaaacaatccacccagggcttctctccaaaatgatgtggctacatgtctccgctgtgtagaaactaccaatctggataagccctctaccccaccgcgctccaaacgacttgcctttgataacgagtttagtgtgtttgagtttgaggactttggtgaggaagatgaaactttatttccaaatttgaaacttacaccgaaggccaagaaagctaaggctgcatctgcatctaaagctgagaagggtccttgcattgatcagaacgcagtacgtttgatgaggggcatgacatcgacacgaagaaaaggtttaatggactgcatagcacagcaaactgcaaagcacgagtctagcagataccctgcaagtgaccctctggacaaaaagaaaagaaagccggttcttcaatactatgtaaacgtgaaaaattga

SEQ ID NO: 5859 - DNA, 4995 bp, Zea mays
  Peptide Sequence Number=SeqID_47638
atggcaggagcggaggatccgagcgtggccgcggcgattgcagcgcaatccaaatctatcgagacccaatcgaagacgatcgcgactcaatccaagttgcttcagcagctatgcgatcgcctggagacacaggatgcccgttggacccagctggagaaagcggtcagcgcgaacaccaacaacatctcggctatatcgacgaagttggacaccagcgaaggccacccaagttttctcaccacgcaggtcgacgctcaggtggcggcgattgagacagtggcgatggagcgcttggatgcgatggcagcggcggcttccaccagggttacggctttggagaacgccacacaggcgtttgaatcatggaaaccacgcatcgaatcttctgtcgatgctatgcggtcggagctcaccaaactcacccgtcttctggagcgaggggcgttcgaggatcgcggcaccaagccagggattctcggccactactcgtctacacaagatcgtcctcctccagttcagcaggtggggacgcatggcgaggcccatcggcatcgagatcaaggtggaggaacttcgatcgggcctaaccatcatcaggctcctggtatgaacgattggatttcttctcatgatcatccatcgttcgacacatttgctgctcacaatcaccctccacctagagatgtgggtcgatcctttgagtcatcatccagtcagtatttgggaaatctaccaaagctccaggttccatcatttgatggtgaacatcccaaattgtggcagtcgcgctgtcaggcttattttcgcatgtatgatgtggattatagcatgtggatcaaggtgtcatccatgcagtttacagggcctgcggccaggtggttgcagtctattgaacccaagctgccttatctgtcttgggaagaatttggcaccttgattcaggaacgtttcgccaagaatcaacaccagtttcttttgaggcaactatttcatatcagacagttgtcctcggtttcagcttatgttgaagaattttcacaactggtcgaccaattgactgcctatcagaatcaatcagacccattgtactatacattgaagtttattgatggtcttaaggacgacatcaaggcagtggtgatgttacaaagacctcaggattttgattctgctgcagtgttggcacagttacaggaggaggctgcggatttattaagaaagagggactcacggcgtgcatactctggagtttcgtctgctgctagagactctaaaccacccttgaacagcaagcaggaggatcagaaacctggtaacaccagcactgaggccaaattggcttcgctatatgcatatcgcaaggcacagggtctttgttacaagtgtgggctgcagtattcaagaggacataaatgtgctgacacagtacaactgcatctagtggaagaattgtggaacatggtgcctgtagccgaaccagaattgattacctcagatgatgaacaagaggctaagttgtgcatgctgaccctgtctcaaacagcagtcgagaatggcaactctcctcgcaccatgcgattcatgggtcatatagcaggaatggagattttagccttgttggactcagggagttctcattctttcctcagtgaagcagtggcagcacagttggctggcgttacactgatggacaaacctgtcaacgtacaggtagccaatggctcaaagttatcttgtgcttatgaattggtgaatgccaaatggtcaatcagtggagtatcattttcttcgacattgaaggtgttgccattacctacttatgatctcattataggcatggattggttagaggctcatagccctatggtagtgcattggtcacagaagtggcttcgcatatccttgccaacatctatggtaacactgagtggtttggcttcatcagtgctccacagctcagttattcaggtctgcagtttgttggagttaccagacaaagaacaattgattcttcagggccttcctgcagatattcaggaccttattcagcactatgcgccagtctttgaattacccactggcatgcctcctgccagagattgtgaccaccagattgagttgttaccaggcgctagtccggtccagatgcgaccttatcgatatgccccagccttgaaggatgaaatagaaaaacagatttcagagatgttacaatctggtattgtgcagcccagcaagagtgcattcgcttcatctgttattcttgtcaagaaaaaagataacacttaccggttttgtgtggactatcgacatttgaatgctcttacagtcaaaaccaagtttcctgtaccagttattgatgagtttctggatgagctacatggagcaacctggttttcgacattggacttgcgagctggattccaccaaatccgcatgaaccctcgagatcaacataagacggcttttcaaactcaccatggccattttgaatttagagtcatggcgtttgggttgtctggagctccggcaacgtttcaaggggcaatgaattccacattggcaccactattgaggaaatgtgcactagtctttttcgatgatatattagtgtacagtcggacttggacagaccatctccttcatttgtcccaggtattacagctgctgcaaaaggaccagtggcatattaagctctctaagtgtgccttcgcccagcaacagatatcttaccttggtcatgttatcagtactcaaggtgttgctactgatccagcaaaggtgaaggcggttcaagcatggccagtacctactaattgcaaagagcttcgaggatttttaggtctcgcgggatattacagaaaattcgtaaggaattttggccttattgccaagccattgaccaatcttctgaaaaaaggggaattatttgtttggacccatattcatgagcaggcattctctgcgttgaaacagtccctaacgacggcaccagttttggcattacccaattttgataagccttttgccatcgaggcagatgcgtcgggaacaggcattggagctgtgttgttacagcaagaacatcccttggcctttgtcagcaaagcattgggtcctcgaaatcaaggtctgtccacctacgaaaaagagtatttagctatcattttagctgtggatcagtggcggcagtatcttcagcattctgaatttgttatatattcagaccaccgtagcctgtcacatctcacagagcagaagctgagtactccatggcaacagagaatgttttcaaagttgcttggtcttcaataccgcgtggtgtacaaaaagggggtggaaaatggggcagcagatgctttatcacgaagaccacctgcttcggacgatattctgttcagcctgtcgtcctgcaagcctcaatggctgctccaagtggtcgacagctacacaaatgatgaccaggcacagaaattacttgctcagcttgctcttcacaagtccagcacagggccatacaccttacattccggcctccttcgttataaagggagagtgtggattggtgctgattcacgtctacagactacaatcgtttcgtcgctgcatgacagtccaatggggggccattctggatttccagtaacctacagaagaatcaagcagttgttcgcctggtctgggatgaaagctcagattaagtcatatgttgcttgttgctcagtgtgccaacaagctaaggctgacaggagtcgatacccggggctgttgcaaccccttccggtgccggagcagtcttggcaagtcattggtctcgactttattgaaggacttcccaaatcagctaatgttgatacgatactggtggtgattgacaccttttccaaatatgcccactttctaccattgtcccatcccttcacagcctttaaggtggcacaattattcttggattcagtttacaaacttcatggcatgcccacatccattatttcggatcgggacagggtgtttacaagtcatttgtggcaagatttgttcaggctttcaggcaccactttgaagatgagctcctcctaccatccacaaacagatggacagactgagcgtattaatcaatgccttgagacatttcttcgcagtttcgtccatgcttgcccatccaagtggtcatcgtggttatctttggcggaatattggtataatactagcttccactcttcattgggacgttctccatttgaagtgctttatggccatcctccacgccactttggaattacagtggcagatgcttcagtgtcggttgatctccagacttggctgacagacagagagcttatggttaaggtcattcgccagcatctgctgcgggcgcaacaacgtatcaaacatcaggctgataagggcaggtccgaacgcgagtttcaagtgggtgattcagttttcttgaaacttcagccttatgtccaaacctcggtggcaacaagggctaaccataaattgagcttcaagtattttggtccctatactgtcgttcaacacattggcaaggtggcctacaagttgcagctgcctgctactgctgcgatacatccagtttttcatgtgtctcaactcaagcgtgctttgggggtgcctccacctttggtcagtggtactcttcctgatgatctgggccatctccaggtgcctgtgcagattttaaatcggcgtgtggtgttccgcggtgggcgacaagtaccacaagttcacgtccgctggtcacagtctgatgaagctttggccacttgggaagatgaagactccttgcatgctcgttttccagcagctgccgcttggggtcaagcggcctctcaagggagggggactgtcagcgaccctgttcgtcgctcgactgaagatgaggcagcgcttcaggaatcaaggcagccattgggccgacgggtgcgtaggcccaatatccgtgtgacagggaaagagtgggccgcctga

SEQ ID NO: 5860 - DNA, 213 bp, Zea mays
  Peptide Sequence Number=SeqID_47639
atggcgctggggcccataggtgtatgggcgcctatcgtgggccttttgattttccgcctcgcagagttgctcggcgatacctggtcggccaagatgggtcggcatgagttatgggcttactttgggtacaccattcccgggtacctgtcagcaaccctcaagccttcatacaactccttggagttgttcgatgagcccccgagtaatccgtga

SEQ ID NO: 5861 - DNA, 255 bp, Zea mays
  Peptide Sequence Number=SeqID_47640
atggctggcccactcgagcacagggagcgaaggatgaaactccgtcacaacgggtgcatcccggtcatcgccgtcgtgacagctgatgacggcaaaactctggcctacaaccgccatggtagactgcttggcaaaggtcgtctctgccgcctcagagcgagtcgtttatgcacgacactcatctaccagcgccgtttgaggacagttggagggcaagcaatcgaccaccttctctttccccaaacaacagattaa

SEQ ID NO: 5862 - DNA, 999 bp, Zea mays
  Peptide Sequence Number=SeqID_47641
atgccggctctagtgggcgcgccgcccggcgacgccaccgtgctcgtctacgacaccttcaacgccgccagcttcctcttggacactgccgcgttctgcgacggcgccggcattattgccgtcgccccggcgtccgcgaaccagcagcagcatgcgccgccggagcgggaggcgccgactagggccaggaagcggcggcggcgggcgcggaactgcaagtccagggaggaggccgagacccagcggatgacgcacatcgccgtcgagcgcaaccgccgccgccagatgaacgagtacctcgccgcgctccgctccaccatgccggaggcctacgtccagaggggggaccaagcttccatcgtgggaggggcaatcgtgttcgtgagggagctggagcagcagctgcagtgcctcgaggcgcagaagcggaagctgctgcacgttccggcggcggcgaagcctgacgcgacgccagcgcacgccagcagcagcagcaccaagatccgcgtggattccgcggcggcgtcgacgagcaactgcagcagcagcagcagcgtgacggaggacgcggcgggccacgcgcggccggccccgttcgcgcggttcttcacgtacccgcagtacctgtggtgccactcggcgcgcggtgctgctgcggcggcggcagcggaggaggaggaggacggccggcggttgggggtggccgacgtcgaggtggccttggtggaggcgcacggtagcatccgcgtgatgacggcgcggaggcccgggcagctcgtctgcctggtcaccgcgctccaggcgctccgcctcgccgtgctccacctcagcgtcaccacgctggacgcccttgtcctctactccatcagcgtcaaggtggaggaagggtgcggcctggcgacggcggacgacgtcgcggccgctgtgcaccacgtgctttgcatcgtcgacgccgaggccaccgaccagcagctgctcgcggcagcgcggccgcaatag

SEQ ID NO: 5863 - DNA, 201 bp, Zea mays
  Peptide Sequence Number=SeqID_47642
atgcctaggacggtggcggacgaggccaactggcgacaaccgcacataggtcatagggcgagctcgtctatggtctatctgcagcgtgagaagccaactgttctctgcgtagaagggtgctatgccgttgatgcaccagacatgttcgatgagtataagactcgagatacaaatgtccggtgccacatcaaacatgtctag

SEQ ID NO: 5864 - DNA, 456 bp, Zea mays
  Peptide Sequence Number=SeqID_47643
atggcgatagatcacgcgacccctctcgggctgaagcggagaggcgccatgggcggaggcggcgagtgcgacgacggcagtgatacccggcggtggccgccgtggctgaggccgctgctgtccgcgagcttcttcgtccaatgcagggtccacgccgacgcgcacaagagcgagtgcaacatgtactgcctcgactgcatgggcggcgcgctctgcgcgctctgcctcgccgcgcgccaccgcgaccaccactccatccagctcatgggcatgcgctgccgtcacgggctgtccgttcttccatcagaaggagaggtggtcgtaccaggcaaagatcgaggagtaggagacacagaacggtctacacatcccggcgtgcagacgcacatcatcaacagtgcgccacttgatagaaggcaagaatggcctttgaagttggccgggcacggctcctag

SEQ ID NO: 5865 - DNA, 411 bp, Zea mays
  Peptide Sequence Number=SeqID_47644
atggcgccgctgcccttcctgctgggtttcctcctcggcgccctggcgctggcggctgtcgaggcggcggcgatccttctgctgctccgccgcctccgccgcagtcaggctgcggcgggggacgcgctaccagccgccgacgagctgcccggggaacgccccttcccctacgagaagcagggttttctgtggatactggagccagaaaaaatgccaaaactcagtaatgaccgcttatcggctggaggtcctagagagacaaaagacaagaagaatattgtggaagtttttcctgcaaagaagatggctaaaatcaagggaaactctctttgtttgtctggtcctgatggctcccaagcaaccattgagcttttgaactgcacgttaactgtcaagggcgttggttcctaa

SEQ ID NO: 5866 - DNA, 660 bp, Zea mays
  Peptide Sequence Number=SeqID_47645
atgcccctgctaggattgcttgtcgccatctccctcaacgtcgttgccaccacctctcccaagcacggtggggagttcgggcatgggcgtggggtgcgggttcggactggcgctgtacaccatgagctctgtcctcgtcttcaccacgtgggcactggtcggcacggtgccgtgccaggacctggcgtccgcggccaccggcccccagtcgcgccgccgaagcaggcacagtgggtggcgcccatgtccacgctccaggagcggatcgcggaggagtggaggcgcaaggaaaagaagggatcttgctccggctccgcgaccacgtcggggcacctcgcggagatgcatgccgtggagcgcgccgcgcgcgagctcaatagcgtgctcgaggagatcgccgaggaggaagaggaggaggaggacgaggggcggcggcggcaggggatcgtggacgaggagcgcgcgagggacgtgacggagcgcgccgaggagctggcggcggcttgccggacgctcgaggagacctgcagcgccctgtggagaccggcgctgtgcgacccctgctggacctcattgccgacccagagggagcgcgggattcgagggtgggagatccgcgaggatggaagggagcgttggggatccacccgtcaaagctaa

SEQ ID NO: 5867 - DNA, 936 bp, Zea mays
  Peptide Sequence Number=SeqID_47646
atgttggttttagtactgatcaataagatattgggaccgagatgtggatactctgctggaggcgaggaacaagtgaaatggagaagaaatcttttagactggagatcaggatttggagggtatgctccgaagttgggaatgatagatcaatccagagaaagagaatatgtgcatcaaggatttgaaacagatgtctacgacttttgctgcaaccctgacgcaaatgctgggagccctgaggattgtcaagtgacttgcttcaacagttgcagctgcagtgcttacacatataacgacactgactgttttgtttggcatggagacctggtcaacctccaagaacagcacactagcgatggaggaggaaccctcttattcactcaggcatgccgatccgagctgccagctgctgcagtgcacaaggctacgctcattggtatagttgctagtggagttgttgcagttttgctaatccttcccgtgctaactcgaaggagatgctgctgccgccaagagagcgttcttctggtatttgagaataccactgcgaggttgaccaccttccggcacaacgatctgcagcgcgccactgacaacttctcggtgaagttgggagaaggcgcctttggctcggtgttcaaaggtcaacttcctgcaggctcaagctcaactccaattgcagtgaaaaggctagatgggtttcaacatggggacaagcagttccgtgccgaggtgtccactgtcggaatgatcaatcatgtgatgaacttggtacgccttcttggcttctgtgctgaaaagaccagcaggctccttgactacgaaagtgataccggttccttgtttccatgttgggcagcaatccaacaagtttattcctggattctattggagggaacagaacaaccaagttcacagtttaacttcataccataa

SEQ ID NO: 5868 - DNA, 2001 bp, Zea mays
  Peptide Sequence Number=SeqID_47647
atgataccaggttgtcaagggcgttggttcctaagggccaagaggttcccagtaaaattagaaagcaaggacaatgagatttataatggaagcaaggtgtgctatctttatacagacacttcctgggagaaggaatcatggtgtaaagcactccgtattgcagctactgctgacaaggaaaaattaaattggcatgccaagctgagcgaaaaattcctcaattacatatcatcattaaattctgaatacccatgttttctaaagcctccaatactctctggtgaggatcatgaggttatggacaagacatcaaagactgatgggtcttcaaaagtacgtcttttcctcaagaagttggcgaagaaggcatctacgaaggctgccttagagagcaaaacaagttcaggaatgtcagtgcaaggtgaaaaaaagatacttgataaattgcgcagctatcagggtgcaccatttattgaagcattaataggtccacaagaggacaagcttggtggcaattcatcgcaagatactgtaaaagccactgccccgcctgctgcattgaatcaaattggacagctttcaacttcacctgatgtgaatgcggatgaccgagttgcggatgaaggcacactttgttggaacctcctgtcatcacggttgtttttcgatgctaaaatgagtgatgagataaacaaggccatcaaagcacgcattcagaggactttgtcaaatatgaggacccccacctacgtgggtgaaattacacttacggactttagccttggagaacttccaccttatgtgcatgcgatgagagtccttccgctggatcttaatgaattatgggcctttgaagttgactttgagtattcgggtgggatactgctgcacattgaaacaaggcttgaggttcaggaaccagagttgcaaaaggacatcatgaaaagtaattttggagcagatgctaatggagatgttgattctgatcttcttgagagtattgaacagtatggtaaccaatttaaaggctcgcacaattcagcttcttcaattggggagaatgatgaagcagatgcttcaagtcagtcaaagagcattggatggacttcagcatatatatcaagatggaaaactatcctgcactcaatagccgaccatgtctcacaggttcctctttctctggcaataaggatttcatctgttcgaggtatcttgcggatacaaatgaagccccctccttctgatcaaatttggtatggatttacgtcaatgcctgatctagaatgggatttggaatcttctgttggggataggaaaatcaccaacagtcatatcgctgcacttattggtaacagattcaaggcttcgcttcgagatagcttagtgcttccgaattgtgaaagcatctccatgccgtggatgttggctgaaaaggatgattgggtacctcgcaaggatgctccttttatttggctaaatcatgagcccactgagatgagaatccatgccacagctacagcatcaactcagtccgaggaaggtggcttgaaggatggtgggagtgaggaatcatcgagagtagtggcatccattgacgaggcaaaacaagagcccaaggcagaggcatcattgcacggccagtcttcatctgctccaggcagtgaatctgcccacagcgatgcaaatgatgagctgaggaaaccgctgttgatcacagagaaactccaggaagaagcttcagaaggtatagccatgtctcccatgtccacatctcggagggcggtgataccagcaggggagcagccgcaggtgtcagcatcacccattggagaggacgcgaagcgaaaaagcgggaggcgagctcggatgatggatttcgggaagaggatgggggacaagctggaggagaagaggcggaccatcgaagagaaagggaggcacatcgtggagaagatgcgagagaatgctaggaccaacagcatggagaggaccagtagctag

SEQ ID NO: 5869 - DNA, 129 bp, Zea mays
  Peptide Sequence Number=SeqID_47648
atggagctgacggttggcgagcaatgcgcagcgacgtgggcacagcgtaaggcggcagtcggcgacagcaggaccatgcgcgtggtggttagggttgaacgcgacgtgcgtgagggcttgaggtcgtga

SEQ ID NO: 5870 - DNA, 195 bp, Zea mays
  Peptide Sequence Number=SeqID_47649
atgaagttcaagagcctgtgcagtcaagagctgctcttgtgcagtttcatgcccttgctctccttcaccaagatagataggcatatctataatgtcatcaacctcaaatgcaccaagcctaaacgtgtgacaatttcatttaaaaacaacagtaataataagcggaaagatgtcgttgtacagaggacaaaataa

SEQ ID NO: 5871 - DNA, 402 bp, Zea mays
  Peptide Sequence Number=SeqID_47650
atggcgctccacgacgtctcccccgcggcggtctcctccccgttgcgcgccctctcacgcagcctcccccagcgcccagttttgatgcatgccactattgaagaaatcgaagcagagaaatccttcatcgaagaccaagctaaagaaaagatggagaaggcaatcgaaatagtccaagctaacttcaacactgtgaggacaggacgtgcaaacccggccatgcttgaccgaattgaggttgagtactacagaactctagtaaacttgaagagcattgcacagataagcactccagatgcaacttctcttcttaatcaaccatatgataagtcaagccacagggctttaaatgcaccgccactatatcacgactcatacaagatagcaaatggtggtttctag

SEQ ID NO: 5872 - DNA, 1317 bp, Zea mays
  Peptide Sequence Number=SeqID_47651
atggacgggagggagtccacggtggcgtcggggcccaacttctcatcgttctacacgcagcaccggggcatcggggcgccgggtgtccccggccactcggcggtgctccatgacccgccgcccgccgggtaccggcagcatcttgatgctgtctctgctgggtacgcattccagaccccgcaggttgggggttcccacattggacaggggtaccaccatgtcgaggcctcaccccatgtggcgcaatacagctccggtggcggcaccagctccggcggtgatatggacattggcatgggttcggctgtgtgcaccaatgttaagggggagctggggagcgggcctgcccaagatgagcaggtgaagaagaagcggggtaggccaaggaagtataagcctgatggggcggtgactctcgggttatcaccctcttcatcattaacacctcactcggccagcttggggatgggaaccatgattagtgctccaggttctggatttgggtcggagggatcaggggcttcaggcttgggtgcgccatcagagaagcgtggcagggggcggccacctggctctggaaagatgcaacagttggcttcgcttgtaatgcttcttgggtatgtatatgatctgactgtggcagccttctgggctgtgttattcacctattgccctctggaatccaggagagtgtatattgttagctctggtaccataggggtgtcgattatagctgtcctgtctgtgcaggacgttgctgccagaataatggccttctcacaacaaggcccaagggcagtgtgcatcatttcagcaactggagctgtttctgcagcaacccttcaccaggattcagaatctggcagtgtggttacatatgagtacaaacatttgcccactatgcaaattaaacaaaagggtcggtttgagatcctgtgcctttctgggtcatacttggtggtagatgaaggtggcggcgcacggacccgaagtggagggctttgcatagctttgtgtggtcctgacaacagggttattggtgggagtgtaggtggagtcctgatggcagctggagcggttcaggtgatagtggggagcttcatgtacggaggaggttcaaagaagaacaaggtgaaagccgagttggacgcggagcctgaggaggcgaacgccggcgaccaagaggtggcacttgcggagcacagcagcatggcccctcatcctgccatgagtggtggtggcgggtgggcatctggcatgatgaggcagatggagtcgagaactcccaacatcgatatcaactccatccgcgagtag

SEQ ID NO: 5873 - DNA, 719 bp, Zea mays
  Peptide Sequence Number=SeqID_47652
atggcgccgtcgcgcccgctcatgcgggggatccgcccgccgcgcgtcttcccgacccgcggcggccgcgcctcgccgtacgctgtcgccctcacggccctgctcctcgtctccgccgccctcctcgcgctcatcgccttcggcgtcttctcgctccccgtgtcagcgccgaacgccgccgccaccaccacagccggaggggagaccgaatccgccgacacccgccccgcgcgcccccgcgcccgccgggacctgggggaggggctgggagagcgcggcgcgcagtggaccgaggtcatctcgtgggagccaagggcattcgtctaccacaacttcctgtctaaggaagagtgtgaatacctaattggattggccaagcctcacatggtaaaatcaacagttgtcgacagcactactgatcatggagagggactccaagtactgcattatgaagtcgggcagaagtatgagcctcactttgattattttcttgatgagtttaacaccaagaatggtggtcagaggatggctactcttctgatatcagatgttgaagaagggggcgagactattttccctgatgcaaatgtgaacgtcagttctttaccatggtacaatgagctttcagaaattgttaaaactgatttggcgctctactttctcctgcagatggatctctatgcatgtgacttggggctgtctactgggttgacacccat

SEQ ID NO: 5874 - DNA, 303 bp, Zea mays
  Peptide Sequence Number=SeqID_47653
atggcggtcctggggatccacgagaggaccacactatccatctgccgccaggataggttagtgagggagacagtgttggggcgaccactagagcgctgggagggtctcgatgcaggaggagccgagcaggtgaccctcagcattggtctgctatcgagcgagtgcatccgtcgtggtgcgtttgtgcccctaagcaagggcagcaacatgttcccgatcccgagcagcagcaaacaccgtcttggcagcaatgggggctatggccaaggtggagtgagcgaaagcgacatcagggggaagtaa

SEQ ID NO: 5875 - DNA, 444 bp, Zea mays
  Peptide Sequence Number=SeqID_47654
atggtgccaattgcgctgccaaccatttttctgccagcagctcttagctcaagtaatctggacaagtttctcatctccattgggaagcaaccagcatatgtggacttggaggctgcaccagctgtgggtaaggataatcctcctgatctagcacatttggttccaactggtgtgccaaattcttcagaacaaccagttgagaacacggcacctactaatgttcttaaagagacagcacctcaacgctatcaatcatgggctggaaaccggcagcagattgaccagagatctcccagagctatcctatttggtcactgcctgcctcacgatcatgacaacttgatatcagtatccagcgatcctccgatgggttctgttatggatcagttcaagatacaaatgcttgtcagtttaggaagggcactgtgggtcatatatagctaa

SEQ ID NO: 5876 - DNA, 267 bp, Zea mays
  Peptide Sequence Number=SeqID_47655
atgacgcccggtggccttctcttcctccatgagctcatctctggtgctgccgccgggcaggaggccggcacggacgtggcggcagatgagggagtagagcgtgaaggtgccgccctccccaccatccccgccgtagagcaccccgaggctctgaaaaacacagcttcgtctacacatagcctggcatgcaacggagaggagattgactccatggaaagctgccttaaaacatgtagctccatgagagcctccctccacattgcataa

SEQ ID NO: 5877 - DNA, 789 bp, Zea mays
  Peptide Sequence Number=SeqID_47656
atggtgaagggcgcccagctccaggacgcggcggccgacgccgcccgcaatgcggcggcggcggcggcgaggcagcagggctgtggtggcggcggcccggcgggctgcggcaagaggcagtacaagggcgtgcggatgcggagctggggctcctgggtgtcggagatcagggcgcccaaccagaagacccggatatggctcggctcctactccaccgccgaggccgccgcgcgcgcctacgacgccgccctgctctgcctcaagggctccgccgccgacctcaacttccccgtgcacctccccttccacatccccgccgccgccatgtcgcccaagtccatccagcgcgtcgccgccgccgccgcggccaatgccacctgcggcagcccgctgcaggccggcgccggcgccgccgccgccgcgccccactactactcctactcctcctccgccgcctccacgatggccgccgacggcgccacccctccgtgcagctacggcgacgcgtcgtcgggcgtgagctccccggagacggccgggaacactgatgacctgtgctacggcgtggcgcacgacgacgacgtggacatggtggcgggcgacgcggacctcgccgcgctcgcggacatcgagtccttcttccggtcgcccaagtgcatggagtacgctatgatggacccatgcagcacgttcttcgcgccagcgcccatggcgacggacgcggccagcgagtgggagtgggaggaggaaggcgagatcgacctctggagcttctcgtccctcaactga

SEQ ID NO: 5878 - DNA, 291 bp, Zea mays
  Peptide Sequence Number=SeqID_47657
ccagttgtgcctgttgtgaaagctgagccacttaaaaatcagtgggctgatgaagatgttgtagaagatgatgtaaaagaatcatgggaagaagaggaggaggaggaggtgggcagaggttgccgaggtaaatgcggcatcgtcgatggaagcgcgtttatggtaggcgcgattaagggtggaaggagggaggcgacgcgaggatggaaggagcgggtgctcggatccgcgcggctgcgggatacgcgcgtgggcttggggcggcagcgggatttctgctcggagatgtga

SEQ ID NO: 5879 - DNA, 348 bp, Zea mays
  Peptide Sequence Number=SeqID_47658
atgcacaatgggagagagcaagacaatggtgaacagacagatgtacgtagctcgaagccggaggaaggagggcacaaggtgaaccgtggaggatttgggagtatacaggagagaagaggacaagaacctagatccgaggaccagagtcgaagtcacggagataaggactacggtggagatgactcaatgtcctccaatggaggaggcaaagggtggaaccatggaggcgtgcaggggcgaagccgtgaagagaaaggcatttatggtgtagaattgaagcaactgagcgaggcactgaacgagccattggggcgctccggcagatgtgatgtagtgcgggggccatga

SEQ ID NO: 5880 - DNA, 1125 bp, Zea mays
  Peptide Sequence Number=SeqID_47659
atgtgcggcggcgcgatccttgccgagctccgcgagccggcgccgcgccggctcacggagcgggacatctggcagcagaagaagaagcccaagaggggcggcgccggcgggaggcgctcgttcgcggcggaagacgatgaggacttcgaggccgacttcgaggactttgaagccgactccggtgattcggatttggagctcggggaaggggctgacgacgacgtcatcgagatcaagcccttcgccgccaagagtactttctccagagaggcaatgttactaaggtttgattctttcctgcttgcagatggcttaagcaccatgactactgctggttatgatgcccctgcagcaaggttggccaaaaggaagaggaagaatcaatacaggggtatccgccagcgcccttggggtaagtgggctgctgagatcagagatccccagaagggcgttcgtgtttggcttggtactttcaatagtccggaggaagctgcaagagcttatgatgctgaagcgcgcaggattcgtggcaagaaggccaaggttaactttcctgatgcaccagcagttggtcagaagtgccgttctagttcagcttctgctaaagcactcaagtcatgtgttgaacagaagccaattgtcaaaacagatatgaacatccttgccaacacaaatgcacccttctaccaatctgttaactacgcatccaacaatccatttgttccagcaatgaactctactgtttcttttgaggatcctatcatgaatctgcactctgaccagggaagtaactcccttggctgctcagacttgggctgggagaatgatactaagacaccagacatcacatccattgctcccattcccactattgctgaaggcgatgagtctgtatttgtcaactccaattcaaacagctcgatggtgcctcctgtcctggagaacaatgctgttgatctcactgatgggctgacagatttggaatcctatatgaggtttcttatggatggcggtgcaagtgattcaattgatagccttctgaaccttgatggatcacaggatcttggtagcaatatggacctctggaccttcgatgacatgcccatcgctggcgatttcttctga

SEQ ID NO: 5881 - DNA, 1113 bp, Zea mays
  Peptide Sequence Number=SeqID_47660
atgggcatagggcagcggaggacagtgacgcgcgtcgaggtcaacaggggatctacagcaccacctaatctggctaacggcgacggcgaatttggacaccctagatctacagcggcgcacgggcccgtaccccggtggcgctgctggagaagcggaggcggcgcactcacctggttaacggcgaagcgccggccgcagccccgcgccgtcctcggggtgcgtcgctccgtcgcggcagatccggtcgcccgcgctgctcgtcgaagagccggttcgagccgtccagatcgcggcacgaccctcggggcagccgtagaccaagccatgccctctgcccaccgccacgacggtcgtcctcgcgcgcggacgctgatgcgtcgccactggaggccgtgtcgcagagacgacatggacgttccgggtacggccgctcagtcgcggtgtgggctcactggtggagagagtcgcggttggaagccatcgcacggaatcactgggggagagaagacggctcagtcgcggtgtcctcccagccgcgcccactgcgggcccacatgtaccgtgacgcacgcgtcggtgcgtaggcggcggaggtcgcgggaaacgctctccgagcagcaataccgtgagccaccgtacagcacgctcggtcagctcaacgaccgcgactccgtcgtgcctccgatccctctgatgaccacgttctgccgtctggcctctggcgctgctgaggtcgtgtttttttttacttctccggctaattaccgtcccacccaattcgcttttgactgggctgccaatgccaatgccatagagagacgagcgtcgaacacgacggcgaacgaattgcaacccatcaagaaccgtcatgcactttttgtatgtttaccgggagaactgatcggctcaagctggatgacatcgccgtcggcgtccagtcacatgactcctctgtcggctgtcgcgccgtacgtgcgcgtcgtgggcggcgcccgtaaaaagctgcagcgcgcgccgcgccctactgtcgaccaccatacggccggctccaccgacttctacagccaaaaggctgaagctagattctactccttcccaaataaaagaaaatga

SEQ ID NO: 5882 - DNA, 210 bp, Zea mays
  Peptide Sequence Number=SeqID_47661
atgagcagcggggttcccgacctgggctggggcgccggcggcatggtggctagcgacctggctgtggagtacggcagttccgtgcttactccgatgtggcgctgtccagttgtcgtcgtcgcatgcactcatcagcacatggacgctcgacgcttcctcgtcggccgagacgcggacggggttgtggcggtgcaaccacctaaaacctga

SEQ ID NO: 5883 - DNA, 594 bp, Zea mays
  Peptide Sequence Number=SeqID_47662
atggactatcggttagacgatgggttggcggcgatggcaggcgagccacaagttagcgacgatgcagcatccgcgaagctcccccccacaccgcctgacctgacgacccacggggcgggcgtctgcgcgtgctgcctgcgggagcgcctgtcccacctgtcgctgccgccgtccgtcgtgcgcggctgcggcgaggaggagggatacaggcacagcagataccacgaggaggaggcatcgtcctcatgctccgaggtgtccacggcctactcctcggagggctccagcgtggcgtcggcgtcggagtgcgccagcccggcgcccggtgagccgaggttccacgacgaggtgaggcgcgcggcgcgggtgtcgttgctgatgcggcacgagcgggtcgtcggggacgccgacgccgtggcggcgttcctcctggcgaggaggaggaggaggacggcggccacgagcttctgggccaagctgctgcacgcggcgcgggcaggaggagggaagaaggatcgagggtgctcgctggccgcgcccggcaccaagacgctcgaggagagggccgccgcggccaagtgggtcctcttctga

SEQ ID NO: 5884 - DNA, 1248 bp, Zea mays
  Peptide Sequence Number=SeqID_47663
atgcctcgccacggccacacgctgctcgccgcgctgctcgcgtccgcgctcgcagcagccagcgcgcagccgagctacgatgacaacggccaggtgcacgtcagcacggccatgatcgcgctcctggccgccgtcatcgccgtgttcgtcttcatcgccttcttcaccgtctacctccgccactgcaccggcagctacgcggccaggccggacgactacgaccaccgcgccatgcccaacttcgacgccttcatctcgcggtcgcggaggcagcggcggccgcgcggcctcgacgccgacgtggtcgaggccttccccaccatgaagtacgccgaggccaaggcgctgcgggtcggcaagggctgcagcgcgctcgagtgcgcggtgtgcctcagcgagttcgaggacgaggagcgcctcaggctcttgcccaggtgcagccacgcattccacccggactgcatcggcgagtggctcgccagccacgtgacctgccccgtctgccgccgcaacctcgacccttacaaggataccagcagcgacgaagaccccgctagcttcgtcccgccgattccagtggccagcagcatctccagcgagactactgcggtgttagggcagggacgaccgctaccggtcgccgtggtgatcgatgtcatcacccagcaggaggaagaggcgcggaggcaggaggcactggagctgcagcagatagggacccagcggcgagccatgcggcggtcgcggtcggggcgcaagccggttccgacgcagctcgcccggtcgcactctacgggccactccctcgccgtccggctggaccgcgacctggagcgcttcacgctgcggctgccggagcacgtgcgtagggagatggtcgccgccgcgggcgagcacagccacagcatgcagttgcgtcgcgggcgaagagccggggaaggaagcagccgcggcggacgaagcgccccgctcggccggacgcccagatggcagttgcttctcgcgaggacgctctccgggaagctgtccttcttttcggcgtccagggtaacggtaagctccgaactgggagaagtgtcgtcctggtcctcgatcacgagggcgagagggaaccgcgtggccgccgttgaagccgacgacgttcctgctaaggggatcggcggcgggtctggcgctgcgtcccgcgaggtggcggcagcggcggacgaggagaagaagaaggcagctacgcagcaggttcgcacgtag

SEQ ID NO: 5885 - DNA, 351 bp, Zea mays
  Peptide Sequence Number=SeqID_47664
atggcccagcctgcctggccaatgcaagtagtacgtgtgagtatgcgcgctgtccagccgcgtagctgccgccactcggctagtgggccagtggccgcgtgcgcagccaaaccgctcgagacggcaagcaaagggccagcaacatttgctcgcgcctcgcgcggacctggtaaaacaaaacccgtctgggacacggaccgcgagagggactcgtccccgcgcacgtcggcgtggacgcgcgcatgcgcggacgacttgtcgtgggggccccccaagccggcgtgccgcctcgtcctcgtcctcgtcccggcgtgccgcctcgacctcgacggtgccagttgcttgccgtaa

SEQ ID NO: 5886 - DNA, 225 bp, Zea mays
  Peptide Sequence Number=SeqID_47665
atggagacggaggacttcttctactcgacgctcccttcggtttctcttctcgtcgactctcccacccatcctcttcccatttggctgttcttcaaggaaaccctaaaccctgcgagtaacagtgattctcttcttcccagagcaattcctgatgctgggacaaattggttaatgtttgagctgctgtggagagatttcttcaggtttagaacttgcatattatga

SEQ ID NO: 5887 - DNA, 474 bp, Zea mays
  Peptide Sequence Number=SeqID_47666
atgatggatggcccgcccagccgcggccgcccaacaggacccgggaaccaggcggccgcccaacaggacccgcgccttctgttccgtccgtcactgcctcccggctcctactactcggcgcggcacagccccagccccaacccctgtgcaagggggcatgtctcccactgctgttgctctacgtccaccggatctggatcccgcgggagcgagtggcgcggcggtggcgatgacgttgggggaggggcggtggaggcaaagggaggaggggaggcggagagaggtcgcgtcggcggtggaggcagggggcgggcaacgcgacagagagtgcgggggaggttagggattgggtggtcacgcggtggagaaggatggagtgtgggagacgcagacatacgatgcgatatcgacggtctagatccatggacggcagaacggcagaacgagggaggcagactactcttgctctcttaa

SEQ ID NO: 5888 - DNA, 1830 bp, Zea mays
  Peptide Sequence Number=SeqID_47667
atggcgacgctcaaggatctcctaccggcgcccaagacgtcagcgtccaccttctacgaccacagcagcgacccctggttcaaggagcggtacggtggggagtcggcgcaggcggccgcggcgacgaggcccgcggccgccgcccggcccgtgccaccttacggaaagcggacggggttcgtgccgcgacggccggaggacttcggggatggcggcgcctttccggagatccacgtcgcgcagtatccgctcggcatgggacgccgtgatgataagggcggatccaagatccttgcgctcaccgtcgacgcacacggcagcgtcgccttcgacgccgtcgtcaagcagggggagaacgcaggcaagatcgtctactctaagcatagcgacctcgtgccgaagatagccactgccgattcccaggcgacgtcggacgacgacgaggagcagaagcagatcgaggagacaactgaacggaccaaggccgccttggagaaggttgtcaacgtccgcctctctgcagctcagcccaagaatgtgccgactcatgattctgagtccaagttcatcaagtataagccgtcacagcaatccgcggccttcaattcaggtgcaaaggagaggatcattaggatgtcagagatggcggtggatcctcttgagccaccaaagttcaagcacaagcgtgtgccccgggcgtctgggtcaccacctgtaccagtgatgcactcgccgccacggccagttacagtgaaggaccagcaggattggaagatcccaccttgtatttcaaattggaaaaatccaaagggttacacgattccgcttgataagaggttggcggctgatgggaggggtctgcaggaggtgcagatcaatgataactttgcaaagctttctgaagcattgtacgtggcagagcagaaggcgagggaggcagtgcagatgcgctccaaggttcagagggaacttatgctgaaggagaaggagagaaaggagcaagagctaagggcacttgcacagagggcacgtatggagaggactggtgccccacctgcaccatcaggtgtgcctgctggtggtggcaggggagcaattcaggatgttgatgaagttatggatatggagcaaccgcgtgaaccacgggaatcacgtgagcagcgcagggagtctagagaagagagggaaggaaggattgagcgtgatagaatccgtgaggagcgcagacgcgagagggagagggagaggaggcttgaagccaaggatgctgcaatgggcaagaagagtaagatcacaagggacagggatcgtgatatcagtgagaagattgctcttggtatggcaagcactggtggtgcaaaaggtggtgaggttatgtatgaccagcgtctgttcaaccaggacaagggaatggactctggttttgccacagatgatcagtacaatatctactctaagggtctcttcacagcgcagtccacgatgtccacgctatacaggcctaagaaggatggggattctgatgtatatggtgatgcagatgaacagttggagaaggttatgaagactgagaggttcaagcctgacaagggatttactggtgcttcagagaggactggcaagcgagacaggcctgtggagttcgataagcaggaagaaaatgatccatttggtctggatcagttcttgactgaggtgaagaagggtaagaaagctgtggagaagattggaggtggaggaaccatgaaggcgagtggtgggtcctcaatgagggatgattatgatggtggatctgggaggtcccgcatcaactttgaaagggggcgctga

SEQ ID NO: 5889 - DNA, 306 bp, Zea mays
  Peptide Sequence Number=SeqID_47668
atggtggactcgtctctgcgcccgcagcagcaggattctttggaagcacaagtgccgcctgctgatgctggtgcattggagagcgctgctgtccctgaaggctacgagagcaacactccggatcggaaatccgattcaacagatgagcgtcctccgagcaagcgggaagctcttttgggaagcaaaaaaatggaggatgcggtggagctgaggagctcacaggagttcgaagaaaaacagtacgaagagaaacttgtattaatgaatacaagtggcggcggcttcaatgacccacggacggaatga

SEQ ID NO: 5890 - DNA, 450 bp, Zea mays
  Peptide Sequence Number=SeqID_47669
atgggagcgccgaatgaggaggtccaggtccagcccagcccagccacgcccacggaggcactccccttgcctgccggtgccggcaatgcgatgcgaggtccacgaactgtggaggacgacgaggacgaggacgacgggctcatcctcatcatcatgcgcttccatcgagccgataacggaatcatggctcgctcgaccagtgccccgggaggcacagactcggtctgggttcacagaaggaaacagtacatttggaacggacattctgcaatagacagttctctcagagcttctgcctggatttggtttggattttgccttcgtccagcaaatgccaagcaggagcttgtcggcagcatgaccgggggccagggtgctggatctatagcaacagcagtagttgcgagctggtccggacatttgtctgggactgtcgcagaacgaaactga

SEQ ID NO: 5891 - DNA, 876 bp, Zea mays
  Peptide Sequence Number=SeqID_47670
atgcggtgggatcaggcgccgtcccccgcgtggctaggagacgtcgtatgggtgcgacatcttcatgctgtagaagagagtatccctgatttaggcaagcacggccggctgcagtctgtaaatggagaaaggcggctgcaggctgcagccgcagccgaagtgccgaacagggttgacgccgtcacgcgtctctcctcacgctgcctagcggcagtcaaacgccgatccagcagcgcacgcgcttccgaagctctcgcgtgcgacgggtggctggcgccgctgagcaggcgaagcggagaaaatggcgtcggcgtcggcgtcgggacaggcagacgagggggggagttgcagttgcagctctgccggcccgcgcaattcgggatgggcacgccactgcggtgcggagatgaggactactcgctggcggtcttggggccgttggatcggctcgaggcagcgtcgctatccgctggatcggcgccctgcatggacccgcccgcctgtgttcagttcggaaccccgacaggaggtcgtcgatgggtgggtgtgggtgggtgcgagagctttggtggatggatgcatcggtcgttccacacttcccttccttccactcgaggtagcggcatggcaggggcatcatcctttggacttggttggagtcttggaccagccacgtacggcctcgggaaagtcggtcggggtcgccgtcgctctcccacgggtgcacaccgcgatgccaagtggcctggagggcatgcacgcacgctcgcacgctccgttctgttggtgccgtgccttgtcgtgcgaggcacaggcaggtcagcagggctcccgctcccggtggcggtgtggctctatataggcgctgtggtgtag

SEQ ID NO: 5892 - DNA, 255 bp, Zea mays
  Peptide Sequence Number=SeqID_47671
atgcctgcttttgactctatgttgaacattgaagtgactccgattttaatcctcactggatctggtgcctttgttgctttatggatcctatcttctgttgtttctgcagttgattcagtccccctgctcccaaaattgctggaattagtaggaactggttactcaatttggttcaccgcacggcatctccttttcaaggaaagcagagatggcatgtttgcaaagttcaaggatatcaaagagaggatcatttga

SEQ ID NO: 5893 - DNA, 438 bp, Zea mays
  Peptide Sequence Number=SeqID_47672
atgaacgtatgtgagctcactcttgctgtctcacacccccccacaggtcaagaacaggattttggcgattctaagttattggaggagcggttctcctccgagggcgaggagtccctgccaccggtccccctttcgccatcgtccgattactcggacaactcgatggggttatcggtagcggagcgggcctatgtccaattcgtcaagcgagcagggctcgaggggtcggatgactcgaaggaggaagactcatcaaaggactctgaggaggaagacttcgaggaggagggcagtggcagcgacgacgagagtggctacgagggcagtgacgagggtggcaacgacgacaatgggaacaaaagggcagcgacggcgcaagcgacgacgacgagagtggcaacaacagggggcagtggcaacgtcggtggtgtggtttga

SEQ ID NO: 5894 - DNA, 1763 bp, Zea mays
  Peptide Sequence Number=SeqID_47673
cgatgccgccgaagcccagtattctggctctcgttctggtctctcttctttgctcggggtacctgtgcggggcggctgatggcgcggaggcgtggaagaggaggaaggcggcgtcgagtccggtgatcggcatcaacctgggcaccacgtactcgtgcgtcggggtgtaccggaacgggcacgtggacatcgtcgccaacgaccagggcaaccggatcacgccgtcctgggtggcgttcaccgacgacgagcgcctcgtcggcgaggccgccaagaaccaggcgccgctcaacccgcagcgcaccatcttcgatatcaagcgcctcatcggccggaggttcgacgacgaggaggtgcagcgggacgtcaggtacctaccgtacaaggtggtgaacaagggcggcaagccgtacgtggaggtgccgatgaagggcggcgagcggagggcgttcagccccgaggagatcagcgccatgatcctgtccaagatgcgggagacggccgagtcctacctcggccagcgcgtcgccgacgccgtcttcaccgtgccggcccacttcaacgacgcgcagcggctggcaaccaaggaagccggcaccatcgcggggctcaacgtgctgcggatcatcaacgagcccatggccgcggcgatcgcgtacgggctggacagggagggcgcggaggtgaacgtgctcgtgtacgacctcggcggcagcaccttcgacgtcaccgtgctcagcatcgacggcggcgtcttcgaggtgctggccaccagcggcgacacgcacctcggcggcgaggacttcgaccagcgcgtcatggaccatttcatccgcctcatcaggcggaagcacggcagggacatcagcaaggacggccgcgcgctgggcaagctgcggcgcgagtgcgagcgtgcccaggacgcgctcagaagccagcaccaggtgcgcgtcgaggtcgagtccctattcgacggcgtcgacttcgcggagcagctgaccagggccaagttcgaggagctcaacgtggacctgttcaggaagacgctgggccccgtcaacaaggccatcggcgacgccaagctcaataagtctgacatcgacgagattctgctcgtcggcggcagcaccaggatccccaaggtgcaggagctccttagggagatgttcgacggcaaggagcctagcaagggcatcaaccccgacgaggccgtggcctacggagccgccgtccagggcagcatcttcagcgacgagagaggcgccgagaccgaagacaccctgttcgacttcgacatgggacggacacggatgacgctgggggtcgagacggctggcggcgtgatgacgaagctgatcccgcggaacacgttgatcccagtgaagaagtcgcaggtgttcacgacctccgaggaccaccagacgactgtctcgatcaaggtgttcgagagcgagcgcagcctgaccaaggactgccgcgagctggggcggttcaacctgacgggcatcccgcccgcaccccgcggcgtgccgcagattgaggtgaccttcgagttggacgagaaccacatcctccacgtgacggcggcggacaaggcgggcgggcggtccaggtcgatcgccatcaccaacgacatggggcggctcagcaacagccaggaggagatcgaccggatggtgcgcgaggccgaggggttcgcggaggataaccgccgcgtccgggagctcgtcgacgagcggaactgttggctacgcctattctaa

SEQ ID NO: 5895 - DNA, 1353 bp, Zea mays
  Peptide Sequence Number=SeqID_47674
atgtcgtcgagcaggttctcgccggcgctgcaggcgtccgacctcaacgacttcatcgccccatcgcaggactgcatcatctccctcaacaagaacacctcctcctcctcccgccgcccccagttcatcatctacagcctttccagcaaacccttgcccatattcctgacacagaaattttacagaacaaacagaaagaaactacatggttgtataacatcggcagagacggttatgctggagaagcaaagcttgggtgacttcattgatcgtataaactctgataaagctgttattgtatctgtatctccccagtcaagagcatcactagctgcattctttggtctttctcagtcacaggttctcagaaaactgacttctttgttcaagtcgattggtgtaaaggctgtttttgacacaagctcgagtcgagatctatctcttattgaagcatgcaatgaatttgtttcacggtatcagagaagtcaaccatctagtggccaagaagctggagccaatcttccactgatttcatctgcatgtccgggttggatatgctatgctgaaaagactcttggttcatacatactaccttacatatcatctgtaaagagcccacaacaggcaattggtgcagccattaagcaccatgtggctgagagacttggtctaaagccgtatcatgtatatcatgtcactgtgatgccctgctacgacaagaagctagaggccgtccgggatgatttcactttctcagtagatggtaaagaagttacagaggtggattcagtactaacaactggtgaagtgttaacaaatgttgatgaggaaggccatctatatggggtttctggaggttctgggggctatgcagaaacaatctttcgctatgtagcacatgtaatttacaagagagaaatagagggtcctcttgacttcagaatcctccgaaattcagattttcgtgaaattacactggaggtggagggcaaacctgttttgaagtttgcactttgttatggattcaggaacctgcagaatgttgttaggaagattaagatgggaaaatgtgaataccacttcattgaagttatggcgtgcccttcaggttgtttgaacgggggaggtcaattaaagcctgttgaaggccaatctgccaaggaacttatccagcaattggagagtgtgtacacacaagatatattaatatctgatcctttccgtaaccctatcgcgaaaaaactatatgacgaatggctggggcaacctggttcagagaatgcaaagaagtatttgcacacagaatatcacccagtggtgaagagtgtggcctcacagttacagaactggtga

SEQ ID NO: 5896 - DNA, 840 bp, Zea mays
  Peptide Sequence Number=SeqID_47675
atgggaaagcgggcggtgcggacggtgcgggtgcggaacatctcagatctggcgacggagcgggaggtgcgcgagttcttctccttttctggcgaaatcgagcacgtcgacatcagatttgatacagtgtcgtcggggaggacggcctacgtcacattcaaagatcccaaggcgctcgagattgcgcttctcctgtcgggagcaacaattgtggaccaaattgtgaacataacccctgctgaagattacatctacatccctgttactgaacaacaacttatggtccatgaggtgacaagtagaagttcagcttctaatgcagaattggagtactcctcagaggccaatgtcagtcccaatagccgtgtctatgtgagcaaggcccatgatgtcatgacaaatgtgattgcaaagggttcagcaatgagacaagacgcagtgaacaaggctaaagcatttgatgagaaacatcaatttagggctaatgcatcagcgaggatcaattcctttgataaacgtgttggcctttcggagaagataaacaatgggatatccgttgtcaatgaaagggtgaaatcagtagaccaaagattgcatgtttctgataaaacaatggctgcattgctggctgcagagcgcaagctaaatgatacaggctctgctgtgaaaaccaacaggtatgtgtctgctggaacaagctggctgaatggtgcttttagcaaggtcgccaaggctggtcatgttgctggctcaagaaccagggagaagttccagttggctgtgtcaaatctaacagccaaatcaggaaagcattaccagggccctgctgttgttgcctga

SEQ ID NO: 5897 - DNA, 1395 bp, Zea mays
  Peptide Sequence Number=SeqID_47676
atggcgacggaggcagcgccggagtggcttgacaagggcgacaacgcatggcagctggcggcggcgactctggtgggtctgcagagcgtgccggggctggtcatcctctacggcagcatcgtcaagaagaagtgggccgtcaactcggccttcatggcgctctacgccttcgccgccaccttcgtctgctggtgcttctgggccttccgcatgtcgttcggcgaccgcctcctccccttcgtcggccgccccgacctcgccgcgctcgaccaggccttcctcacccagcagggcttcgccggcgcctacccggccgcgacgctcctcttcttccagttcgtcttcgccgccatcacgctcatcctcgccgccggctcgcttcttggccgcgtcaacttccgggcgtggatgctcttcgtgccgctctggctcaccttctcctataccatcggggcgttcagcctctggagccccaacgggttccttttcaaggccggcgttatggacttcgccggcggatacgtcatccacctttcctccggcatcgccggcttcaccgccgcctactgggtgggtccgaggacggccaaggacagggaggcgttcccgccgaacaacatcctcctgacgctcgccggcgcgggtctcgtgtggatgggttggacgggcttcaacggcggcgcgccgtacgccgccaacatcgacgcgtccctcgcggtcgtgaacacgcacctgtgcgcggccaccagcctcctggtctggctctgcctcgactgcctcgtgttcgggcgcccctccgtcatcggcgccgtccagggcatgatcaccggcctggtgtgcatcacccccgccgcggggctggtgcagggctgggccgcgatgctcatgggcgtcgcctccgggagcgtgccgtggtgcaccatgatggtgctgcacaagcgcagccggttcctgaagcgcgtcgacgacacgcttgccgtgctccacacgcacggcgtggcgggcagcctcggcggcgtcctcacgggggtcctcgcggagccgcggctcagccgcctcttcttcggcgacgacccccggtacgtgggcctcgtgtacgccgtcaaggacggccgcactgccgcggggctccggcaggtgggcatgcagctggccgggatcgccttcgtcgcggcgctcaacgtcgccgtgacgagcgcggtgtgcctggtcgtcgggctgctcgtgccgctacggctcagcgaggagcagctggccgccggagacgacgccatccacggggaggacgcgtacgcggtgtggggcgacggcgagacgtacgagcagtctgtgcacggaaaccattcgtatcccatgacgtccaatcccatgtccaaagccgacgagatgatatga

SEQ ID NO: 5898 - DNA, 1758 bp, Zea mays
  Peptide Sequence Number=SeqID_47677
atggcgctgctcacggcgccggcggtggccgcgctgctgctcttcttctggtccgcggccgcgcagggcgtgccgccgtacaaggacgccagcaaggacgtggaggtccgcgtcagggacctcctggcccggatgacgctggccgagaaggtcggccagatgacgcagatcgagcggctcgttgcgtcgccgcaggtgctcagggactactacatcggcagcctgctgagcggcggcgggagcgtgccgcggaagcaggccacggcggcggagtgggtcgccatggtcggcgacttccagagggcctgcctgtccacgcgcctcggcatcccgatgatctacggcatagacgccgtgcacggccacaacaacgtggatcctaatctggtgaagaggatcggcgccgccaccgcgcttgaagtgagggccaccggcatccagtacgcgttcgctccttgcattgctgtgtgccgtgatccgaggtggggccggtgctacgagagctacagcgaggaccgccgtctcgtgcagaacatgactgagctcatcccgggactgcagggcgacgtcccgcagaatttcaccagcggcatgcccttcgccgccggaaagaacaaggtggcggcgtgcgccaagcacttcgtcggcgacggtggcacccacgacggcatcaacgagaacaacaccatcatcgaccgcaagggcctgatgagcatccatatgccggcctacctggacgcgctccgcaagggcgtctccacggtcatgatctcctactccagctggaacgggctcaagatgcacgccaaccacaacctcatcacaggcttcctcaagggcgagcacaagttccagggcttcacgatctcggactgggaaggcatcgacaggatcaccagccctccaggggcgaactactcctactctgtgcaggcttcaattcttgctggcattgacatgatcatggtgccaaacaactaccaagacttcatcaccatcctgaccggtcacgtgaacagcggcctgatcccgatgagcaggatcgacgacgccgtgacgaggattctgcgcgtcaagttcaccatgggcctgttcgagaaccccatgccggaccctagcctcgccgaccagctggggaagcaggagcacagggacctggcgcgggaggcggtgaggaagtcgctggtgctcctcaagaacggcaagcctggcgacgcgccgctgctgcccctgcccaagaaggccgccaagatcctggtcgccgggagccacgccgacaacctggggtaccagtgcggcgggtggacgatcgagtggcagggcgacacgggccgcatcaccgtcggcaccacgctcctggacgccgtgaaggcggccgtggacccgtcgacggcggtgcacccgtacacggagaccaagggcgatagcatgaacctgacgatcccggagcccgggccgagcaccatccagacggtgtgcggcgccgtgccctgcgcgaccgtgctcatcagcggccgccccgtggtgatacagccgttccttggcaccgtgcacgcgctcgtggcggcctggctgccgggaagcgaaggccagggcatcaccgacgtgctcttcggggactacggcttcacggggacgctgccgcggacgtggttcaagtcggtggaccagctgccgatgaactacggcgacgagcactacgacccgctgttcccgctcgggttcgggctcaccacacagggcaagaaggggtgctag

SEQ ID NO: 5899 - DNA, 480 bp, Zea mays
  Peptide Sequence Number=SeqID_47678
atggagaatcacaacaagtctctgcctgctcgttctgaaaggcaacctgatgtccggatgtcaagttggatagatgccttaattgactctaaggttgtaggttctgcttcaacattgaagcaagataaacactggaacatccttgttgagagtgccaaggagcgaaactgcttattcaaggtccccaagccattcaccgcattctttgcagagggtaacccgaagactatgaaggtggaaaggcatcgtctgccagagccgaatgctcgagtgctagaagagatcaaccaagaagttgtaaggcaagagaccatgaatgtcgatgatgccgccgaccatgcagacgtaggggacgacgacgatgatgaggtgacaaatatgtcccttatgtctgttttccgtggttcacacttcacagttaaattgatgggactggagcctggaggtgcaccagctccagtatttgacttcacggattga

SEQ ID NO: 5900 - DNA, 372 bp, Zea mays
  Peptide Sequence Number=SeqID_47679
atgagtgagaaggcatcgggcacttgcaggctgcaacaggaagggagcgtaggcgtctggcgcttgaaggctggaggcccatcaacaggccaacaggcaacagccatacgcccatacctacaggacaggctacaacaaagcacaccagaaaacagggaagctctgaatctggattctggagactggagacagtacctgcaggccggctgctggcgccgccgcgccggggatggaggaggggacgatgccgccgtatcccctgtcaccgcttctgctcacgtggtgggaattgggaaaaagaagctgggctgggccgctgggcaagtgaagtgggcaactgggccgaaatttcaatccagccagccaggctga

SEQ ID NO: 5901 - DNA, 2475 bp, Zea mays
  Peptide Sequence Number=SeqID_47680
atggcggtggagaagtccagcagcggcacatcaactccctccaccacctccaccatggaccggtttcagaagattgtcctaagctgggattacctccgtctcatcgctgaatccaagggcggcaagcaggccaaggtgctgcagcatgtgaagaacacatacgtctcggtggctgagtaccttggtgtctttgagccactgctctttgaggaggtcaaggcacagatcatccagggacgcagtaacgacgaggaagaatctgggatggactggaggaggggagcagtggggtcgtgcacggagtctgaggggttccacaagctctctgtggcggtggaagacaattttcaggataatgtgtcagagaatgatctactgcttatctccaaggagaaatttgaggagggatcgacccctaatgcatatgcatttgcattagtggagcagcgaggtggtggcatacatatttcacttagaacttttgtggcaggtgaaattcaaaatctgaatgttgcaaagcctgtgaagtctacaaggctgcaacattttgcttccattattgcaagtcaaaacagcttgctgtggatactgaaggtctgcagcttgtctacaataatgcgggagttcacagctatgcattccgtagcttctctaccttttaaggatttgattctttcagctaccgaggcgcacaaggatggtgatgatcaaagtcgtgcgtggaatgtccctgagccacttatggattatctcaaagtgaatcttaatgattcccagctagaagcagttaatgcaggtctttcacgcagatcctttgttcttattcagggccctccaggaacaggaaagacacaaactattcttggactccttagtgccgttctccattctgctcctgcaagaatgcagatcaaaggaggatttgatgttctaaaacatgggccagaactggacattgatggcaagcgtgcacactggataaaggcatctccttggttacttggtgcaaatcctcgagatctgattatgcctgttgatggtgatgatggattttacccaacgggaaatgaactggttcttggactatttaccccttacatggaaaagaaaaaaatctttatagaaacccgaaatcgaattcgagatgaaaataacaacacttataaccctaaaattgtgcgcattggagtgaaggcccttcattctgttaaagcagtttctatggattatcttattcaacaaaaactttctggtgtagatcgcacattagatggtgggagacgaggtgctggtgaatatgatcggattagagcttcaatactggacgaagcagccattgtacatcttcttattaattataaatgttcattgattatacctattacagtattctcactgccaagtaaaatttgcaggatgacccgtgcttttgatgttgttataattgatgaagctgcacaagcggtggaacctgcaactcttattcctttgatccatggctgcagacaaatttttcttgttggtgacccagttcagttgcctgcaactgtcatttcacagactgcacagaagttgggatatggaacgagcttgttcaaaagatttcaagctgccggttttccagtgcaaatgcttaaaatccaatatcgcatgcatccagagattagtacattcccttcaaaagaattttatgaaggggtactacaagatggggagggcctgagcaggaaacgtccatggcattcctacagctgcttcggaccattttgtttctttgacgttgatggcattgaatcccaaccatctggaagtggttcttgggtaaaccaggatgaagtggaattcataactctcctgtaccaccaattggcattgcgctatccagagctcaaatctagtcctgaagtgggtgttatatcaccatacaggcatcaagtaaaactattgaaggacagttttcgatcaacctttggggatcaatcaagggaattgatagatgtaagcacagttgatggattccagggacgtgaaaaagaaatagtcattttttcatgtgtaagatgcaataaggaacaaaagattggctttgtttctgattttcgacgaatgaatgttgccattacaagagcaaaatctgctgtactgaagggcaggcctggtgtagtggttgtaggttctgcttcaacattgaagcaagataaacactggaacaaccttgttgagagtgccaaggagcgaaactgcttattcaaggtccccaagccattgaccgcattctttgcagaggataacctgaagactatgaaggtggaaaggcgtcctccgccagagctgaatgctcgagtactggaagagatcaaccaagaagttgtaaggcaggagctcatgaatgtcgatgatgctgccgaccatgcagacgcaggggacgacgatgatgctgatatggatgctgacgatggaggcggcgatgattga

SEQ ID NO: 5902 - DNA, 210 bp, Zea mays
  Peptide Sequence Number=SeqID_47681
atgggaagaagaggaggaggaggagaattccagccagttgtgcctgttgtgaaagctgagccacttaaaaatcagtgggctgatgaagatgttgtagaagatgatgtaaaagaatcatgggaagaagaggaggaggaggagtgtaggtctgatttcttgttcacactaccattctatttgcatacctatcttggcatctgtatctgctag

SEQ ID NO: 5903 - DNA, 1089 bp, Zea mays
  Peptide Sequence Number=SeqID_47682
atggaggttgagttgagagcattttgctcaaagcattctgcagttggttacaccagttctgtagagaacagtaaccttgcttccgaactgaatcctagaaaatctggcccagacaataccaccctcaattctggaaaaattccaatactaaggttcacgcgcaaaaacaaggataaattcaccaattgtggaaccagtacctctagttctggtaacctgatcagagtcaagactatagagcaaggtgctttagctaacacagttagaaatgcaaatactcaacctattcaaatctgggaaagaggtactggtcatccctctgttggtggggatcatatgggaagttctggtgatattgctgtagtgcttagaaagctaattgacagcggaaaaattagtgttagtgatatagcatctgaagtcggcatttcttcggaatccttggaagctgctctcgtgggtgaaactaccactttttcccatggtttgacgctgaaaattatgaagtggctccaaaattatgtgcaaatgcatagtgctcaaggagatgtttgtaaagggagctcagaggtggtgcaagagagcaaatcagacagattggtcaccacagatactgtcgatgtgaaaaatccattggtcctagatgatgacaagggtgtaggtgtacttgttgatttgctggattcctctgtaactgaacctgcacaaacaagatctgaaagcaatagtaagattttgaatgaaaatagtgcaacatgtgcaactggtgtgactattttgcaaaatggcaaaaagaacatggttaaagaaggttataatcctgagtgttctgctaaagaatttgcaaacgaatctactcaggacttctccccaatcagcaacaagtatgttttaaaggatgaacatggaatattgcattatcaactctaccaattttttgaacttgtcgcgctccaatttatcttgcgtgagatactgaacgccacctctggaaacaaagaatttggtacttccacagagataccaaatgaaaaccaaggttgtggggtttttatttggaaaaaaacagcgaaagggcctctagcctag

SEQ ID NO: 5904 - DNA, 1911 bp, Zea mays
  Peptide Sequence Number=SeqID_47683
atgccgttcggcttgaggaatgcgggcgcgacgtaccagcggtgcatgaaccatgtgttcggcgaacacattggccggacggtcaaggcctacgtcgatgacatcgtagtcaagacgaggaaagcctccgacctcctttccgaccttgaagtgacatttcgatgtctcaaggcgaaaggcgtgaagctcaatcccgaaaagtgtgtcttcggggtaccccgaggcatgctcttagggttcatcgtctccgagcggggcatcgaagccaacccggagaagatcgcagccatcgtcagcatggggcccatcaaggacttgaaaggcgtgcagagggtcatgggatgtcttgcggctctgagccgcttcatctcacgcctcggtgaaagaggtctgcctctataccgcctcctaaggaaggccgagtgcttcacttggacccccgaggccgaggaagccctcgggaacctgaaggcgtttctcacgaatgcgcctatcttggtgcccccagctgccggagaagccctcttgatctacgtcgccgcgaccactcaggccatcaagtcccaggtcttggcggacttcgtggctgaatgggtcgacacccagctaccaacagctccgatccaaccagagctctggaccatgttcttcgacgggtcactgatgaagacaggagccggcgcaggcctactcttcatctcgcccctcgggaagcacctacgctacgtgctacgcctccatttcccggcgtccaacaatgtggctgagtacgaggctctggtcaacgggttgcggatcgccatcgagctaggggtccgacgcctcgacgctagcggtgactcgcagctcgtcatcgaccaagtcatgaagaactcccactgccgcgacccgaagatggaggcctactgcgatgaggttcggcgcctggaagacaagttctacgggctcgagctcaaccacatcgcccggcgctacaacgagactgcggacgagctggctaaaatagcctcggggcggacaacggttcccccggacgtcttctcccgagatctacatcaaccctccgtcaagatcgacgacacgcccgagcctgaggccccctcggcccatcccgagaaggcacccgggggctacacgcacctgttggtcgccatcgacaaattctccaagtggatcgaggtccgacccctaaacagcatcgggtccgagcaggcggtggcgttcttcaccaacatcatccatcgtttcggggtcccgaactccatcatcactgacaacggcacccagttcaccggcagaaaattcctggacttctgcgaggatcaccacatccgggtggactgggccgccgtggctcaccccatgtcgaatgggcaagtagagcgtgccaacggcatgattctacaaggactcaagcctcggatctacaacgacctcaacaagttcggcaagcgatggatgaaggaactcccctcggtagtctggagcctgaggacaacgtcgagccgggccacgggcttcacgccgttctttctagtctatggggccgaggccatcttgcccacagacttagaatacggttccccgaggacgagggcctatgctgaccaaagcaaccaagttagtcgagaagactcgctggaccagctggaggaggctcgggataaggccttgctgcactcggcgcggtaccagcagtccctacgacgctaccacgcccgaggggtccggtcccgagacctccaggtgggcgacctggtgcttcggctgcgacaagatgcccgagggcggcacaagctcacgcccccctgggaggggccgttcgtcatcgccaaagttctgaagcctggaacgtacaagctggccaacagtcaaggcaaggtctacaacaacgcttggaacatccaatag

SEQ ID NO: 5905 - DNA, 504 bp, Zea mays
  Peptide Sequence Number=SeqID_47684
atggcgcacagagatctcttcattcattatgcggataacctgttcggacgtgtcttgtgtcccaaattgtcggtttgtgcttgtctcggtgtgtacttgtatgctgatcttgttgctgtcgtcgacgtgctaacccccttggcgagggcccgagaggaagaagctgccgccaaagcagagtccgcgaccgttaaggcgagcttaaaggagaagaaggcgaaggccgatcgggagaggcagagggcgaagtttgctaaggccgaggtcgccttcttgagaaaggagctggagacggccatgaacaagttgttcgttgagcgcttgcgctcagcgggcttcgcccacagcgtgcaggtgtatgtctgggttgtgttcaatgacttcaggcagcccaatgctgtttctcaaaagcctgaaggcttctttgctctgaactccccattaccaatgctgtttctgaagtactcaacattgaaaaagagctactatactagtagtggatag

SEQ ID NO: 5906 - DNA, 411 bp, Zea mays
  Peptide Sequence Number=SeqID_47685
atgggcaagaacaagaaaggtcgagtactcggaggaggagttctcctccgagtctgggggtcgccagtctacgcctctcccccggtgtcgtccgatgattcggacgattcccaggggattgccgtcgatgtgtggatgtacatccgggccatcgagcactccgggctcgagggctcggatgaggcggaggtctcctcggacgaggagaactcttccgactcgtccgaggaggagagcagcagtgatgacgacgacgagtacgacgacggcgatgatagtgacgacgacgacaagggcggtgaaggcgacggcggcaagggcgacggcggcagcgacgacaagggcgacgacaacggtggcaagggcagcggcggcggcagcaaggccagtggcaaagcgccactggcttaa

SEQ ID NO: 5907 - DNA, 378 bp, Zea mays
  Peptide Sequence Number=SeqID_47686
atggcgacgcagaccatgtggaggacacactgggcggcgtacccacaaatgcagaaacagagcggcatggaggagctctcgtcgtggctgagcacgagcacaacggcggatacgaggataaaggcgatgttccagaagaagtcaagcgttaccacgaggcgggagtccagctactccgccgcagcttcctgcaccagtagcgaggttcccgcatcgctctatgcccgccccaccgcagtagccgcgccgtggagcgacggtcgtcacagcgagcaccgtgatggcgacgcgctcttggactcttcgtcgctcctcggcgatgtcgggtggcgcggagggggctcggggaacgcggtgtcgccatcatgggaaccctag

SEQ ID NO: 5908 - DNA, 390 bp, Zea mays
  Peptide Sequence Number=SeqID_47687
atggacagcagagggaaacctgggggagctcgacccacaaggttgctggccgaccacggagaagacgacttcctgctgcagccgctcgccaggaggaggagcaaggagggcgctcggctgctgctgtgcgaggaagaaggagcagggggcgtcgcgccatggctggccgaggggaaggagctcctgcgcgctggctgctactgccgtggagcagggaggaagaagctggcggctgggaaaaattggaggggtgggagtgcaaaaatgcctccagttgctaggagagggctcctatttatagaaggggcactaggcttagggttttctcatgggccaaatgggacgggctggaatgggcttggcccaaaacatgtaatcgggctgcgctaa

SEQ ID NO: 5909 - DNA, 456 bp, Zea mays
  Peptide Sequence Number=SeqID_47688
atgacgacggggctgcgcaaaaacagcaaacaaccggcgagtgtcgacggcgtgttgttcactgcgcttcacaatacagcgaacaggcagcgcgcgaggacgtcagggctgctgcacatttcgtcgagcaccttgcgcacattggaaaggagcaagggaaggggctgtcctaggaaggcgacaaggtgctgcaacaaggagaggagcacggggaggaaggggaagatttgcaggggcaccatggaagggagggggctgctgcttggcgccatggacatcagagagaggaagggcgccatggagcaggggaaaatggagaggggcacccgggcttcttgctgctggaggtacaagaaagggtgggggcgagccaatatgggagcagggaggaagcttgtccatttcttggttgtccctgctgcaaagcctgaagggggcgctgcgcacagggagtag

SEQ ID NO: 5910 - DNA, 2502 bp, Zea mays
  Peptide Sequence Number=SeqID_47689
atgccgtttggtttgaggaatgcgggtgcaacgtaccaacggtgcatgaaccacgtgttcggcgaacacattggtcgaacggtcgaggcctacgtcgatgacatcgtagtcaagacgaggaaagcctccgacctcctttctgaccttgaaacgacattccggtgtctcaaggcgaaaggcgtaaagctcaatcccgagaagtgcgtcttcggggtcccccgaggcatgctcttggggttcatcatctccgagcggggcatcgaggccaacccggagaaaatcacggccatcaccgacatggggcccatcaaggacttgaaaggcgtacagagggtcacgggatgccttgcggctctgagccgtttcatccgtttcatctcgcgcctcggcaaaagaggcctgcctctgtaccgcctcttaagaaagaccgagtgcttcacttggacccctgaggccgaggaagccctcgggaacctgaaggcgctcctcacgaacgcgcccatcttggtgccccccgctgccggagaagccctcttgatctacgtcgccgctaccactcaggtggtcagcgccgcgatcgtggttgagagacgagaagaggggcatgcattgcccgtccagaggccagtctacttcatcagtgaggtactgtccgagaccaagatccgctacccgcaaattcagaagctgctgtacgcggtgatcctgacgcggcggaagttgcgacactacttcgagtctcatccggtgattgtggtgtcatccttccccctgggggagatcatccagtgccgagaggcctcgggaaggattgcgaagtgggcggtggaaatcatgggcgatacaatctcgttcgcccctcggaaggccatcaagtctcaagtcttggcggactttgtggcagaatgggtcgatacccagctcccgatagctccgatccaaccggaactctggaccatgtttttcgacgggtcgctgatgaagacaggggcaggcgcggacctgctcttcatctcgcccctcgggaagcacctacgctacgtgctacgcctccacttcccggcgtccaacaatgtggctgagtacgaggctctggtcaatcggttgcgcatcgccatcgagctaggggtccgacgcctcgacgctcgtggtgactcgcagctcgtcatcgaccaagtcatgaagaactcccactaccgcgacccgaagatggaagcctactgcgatgaggttcggcgcttggaagacaagttctacgggctcaagctcaaccacatcgcccgacgctacaacgagactgcggacgagctggctaagatagcctcggggcgaacaacggttcccccggacgtcttctcccgagacctacatcagccctcaatcaagaccgacgacaggcccgaggcaccctcggctcagcccgaggcaccctcggctcagcccgaggcaccctcggcccccgagggtgaggcactacgcgtcgaggaggagcggagcggggtcacgcctaatcaaaactggtttctactggccgaccgcggtggcgacgccactagaattgtccgcacctgccaagggtgtcaattctacgcaaggcagacccacctacccgctcaggctctgcagacgatacccatcacctggtcgtttgctgtgtggggtctggacctcgtcggtcccttgcagaaggcactcgggggctacacgcacctgctggtcaccatcgacaaattctccaagtggatcgaggtccgacccctaagcagcatcaggtccgaacaggcggtggcgttcttcaccaacatcatccaccgctttggggtcctgaactctatcatcaccgacaacagcacccagttcaccggcagaaagttcctggacttctgcgaggatcaccacatccgggtggactgggccgccgtggctcaccccatgacgaatgggcaagtagagcgtgccaatgacatgattctgcaaggactcaagtcgcggatctacaacgacctcaacaagttcggcaagcgatggataaaggaactcccctcggtggtctggagtctgaggacaacgccaagtcgagccatgggcttcacaccgttctttctagtctatggggtcgaggccatcttgcccacagacttagaatatggttcctcgaggacgagggcctacgacgaccaaagcaatcaagctaaccgagaagactcactggaccagctggaagaggctcgagacatggccttactacactcggcgcggtaccagcagtccctgcgacgctaccacgcccgaggggtttggtcccgagacctccaggtgggcgacttggtgcttcggctacggcaagacgcccgagggcggcacaagctcacgcctccctgggaagggccgttcatcatcgccaaggttctgaagcccgggacgtacaagctggccaacagtcaaggcgaggtctacaacaacgcttggaacatccgacagctacgtcgcttctacccttaa

SEQ ID NO: 5911 - DNA, 249 bp, Zea mays
  Peptide Sequence Number=SeqID_47690
atggcagaacgctacgggtgggacatgggaatggcgccacgggtgggacatgggaatggcgccacgggacatgggaatcggaatggcaacgctacggcgaccagcgacgcaacaacttccgttccgtccccggcgccggttccggcggaagccgtcctctgcgtgactgcgtcggctgcggtggagatggcttcctcgtcggcgtcttcgaggcaccaggtcaccatcaccctcggccgcagcggtcag

SEQ ID NO: 5912 - DNA, 339 bp, Zea mays
  Peptide Sequence Number=SeqID_47691
atggagcacgcgatctacctcccatgcagaacagacattgcgcttcgttacgagcaattcaagcatataggaaaaaaccaatcgaggtatgaccaccatggagaggcggtccccatgatactcgatgatgccttcctcgtctggtaccatagcgtgctagaggcccaccgcctcttgatcaactcgtaccaggaccaggagcgtccattcatggtagttgatacacaaaaagagaacaagcatcgcgaccaacgccctacaagcacgcacatgccgcgtgttggttgtgtcatgccacaacctgcgaacaaggtgcaacacttctccacctctgcatga

SEQ ID NO: 5913 - DNA, 705 bp, Zea mays
  Peptide Sequence Number=SeqID_47692
atggctaagcatcacatggtggaccttgctaaggttactggcaccgggacgtacgatcgaattatgccgataggtattgaggcggctgttgaaatccaggcaaagtctctgcccgctcttggtggtgttcatgggtattacagtcttgtagaagataagtatgaaatactatgtgcacgttctttgataggggatgaatttgcatgcggtgaactgcaggcggaggtgcatggagatggaggtgggactgtggggaggccggacggacttcaggggtgggtgatgattaaaagagggcccctctctgcccctgccatgccgtctgccgagcctctttcgcaagtcgccaccggcacaaaaatcttcttcagttcgttgccccggccgccttcctatcactatcacaagcgacagacaccgcccgggcgcgcgaacggcggcgctggccgtgccggatgtgcgtacgcattcgtcctgcccgtggctggtctggtattgcgatacgtacgcaaagatttcccggtcgggctgtgtcgggtcacaatctcacagggtcaagccgaagccgctgccccccatcaagttgacgacacacgggccgcaggctgcgtgtgcattgactctgccctaccacccagacggacggcagggcagtcagagagagcgcagatgcagccagccttacgcccgcggcccgcccactag

SEQ ID NO: 5914 - DNA, 989 bp, Zea mays
  Peptide Sequence Number=SeqID_47693
acgaggcggagtggaacgaggctgaggccgggatcgcggccccgggcgcgggcgtggctcctccagcgcccggaggcggcgaggaaaccaagaggaagagggggaggcccaaaggtagcctcgacacgtataagaggcggaggcggaggcggcgcaccggcgacctggtgtcggcggtgcccgcggctagcctcggggatatgggccactcatgtggctgcattcccgctcccccactccctcccccctgcactgtgtacactgtacgcgacggcggcgtggcaatcacccctcaatccatggaggacgaagcggagggggtcgaggctgagtccgggaatgcgggcgcggcctccgccgccagagacggcgaggaaaccaagcggaagaggggaagtcccgaaggtagcttgaatgagaggaacaaggacaggacgcctaagcccaaggccaaggggaggcggaggcggcgcaccgacgaccagaccttgtcggtgtccgcggtgagcctcggggatctagggctcggggtagcggcggggaccaggtcgatcagagagaggaggccggcgcccaatgcgttcttcgacgtgggcagcgacagcgatactgagcatgatgatgatgatgatgaggagcaaactacgattgatcaggccaatcacgagagtgctaaaacaggtgattctgtaaagaagggaggaagacccaggaaaatggaagcgggccaattgcatactaggacgcagatttccaatggtaaaagcaacggccatacaaatgggaatcctgctgggaagaagaggggaaggggaagacccaagaaactgacagtagaacaagcgattactaggtgccagttctccaatggtgaaacaaacaagaatcaaatcctcaacttgactacctcagacaaaatcttcctctatggtgttatcaactgctccctctaccagacccctgtaagacacctggaatgggagctgtga

SEQ ID NO: 5915 - DNA, 1194 bp, Zea mays
  Peptide Sequence Number=SeqID_47694
atggcgctgctccgcgccgccgtatccgagctccgccgccggggccgcggggctcttacccctctcccggcgctgtcatctctcctctcctcgctgtctccccggagcccagcctccacccgccccgagcctaataacccccacgccgaccggcgtcacgtcatcgcgctccgccggtgcccgccgctcccggcgtcggccgtcctcgcccccgagctgctccacgccaggggtctcctcccgaggcactggtcgcacgcctcaccgctctccacctcctcctcctcttccagacccgcggacaaggcgcagctcacgtgggtggacaagtggatcccggaggcggcgcggccgtacgccatgctcgcccgcctcgacaaacccattgggacctggctcctcgcctggccctgcatgtggtcgatcacaatagcagcaatgccaggggatttgccagacttgaaaatgctggcactcttcggatgtggagctgtccttctcaggggggctggttgcacggtgaatgatcttctggatcgcgacattgataataagggagtgggcttccttggaattcagcttctattgggactgggcattcttctacaattgaataactacagtcgtattctgggggcgtcttcacttgttctggtcttctcgtatcccctgatgaagaggttcacattttggcctcaggcttatcttggcctgacattcaactggggagctttactagggtgggctgctattaaggaaagcatagaccctgcaatcatccttccattgtatacagctggtatttgttggacgctggtgtatgatactatatatgcgcatcaggacaaagaagatgacctgaaagtaggagtcaagtccacagcattaagatttggagatttgaccaaatactggatcagtggctttggcgcggcatgcgtcggcagcttagcactcagtggttacaatgctgaccttgggtggccctactatccattcatagcagctgcagctgcccagttagcgtggcaggtttcgaccgtggatctgtctagccgctcagattgcaacaagaacaaatgcggcgtggtacaggagtggagtggactttgtaagctgcttgatctttcaccgtcatcaaaccttggctatttaacgagcatatcaatcaatcatggtggtggtctgatgtag

SEQ ID NO: 5916 - DNA, 2607 bp, Zea mays
  Peptide Sequence Number=SeqID_47695
atggacatatctaagactagccacagtgtactcgaagctgaaaaaagatctggtatgccatctcaggctgatgctaggaacattctatcgacacgatgttcagcattgatgttgctagtgtatattgaaccaagacatcagagctattcccttccctacctgcttcttcaagtcattgatgccattaatgtccagcgaatccagctctttaacaagcaccgatgcatgcacttgacctggaagttagccttttcaattcagcatttgatgtacaatgagttccatcaggttagcaacttctttcttttgcagagtggtgccgaggcagcaaggagcaaacagtcaaggaatcgtaggatttcacagaatgcaaagaagcggaaaagagatgaagggaaggagtctatgacaaaaaagttgaacaaacggagtaagatgttgactggggaaaatgccctcatgtgccaccagtgccagaggaaggacaaaccacgggttgtccggtgtcagtcatgcaaaaaaaagcgattctgtctgccatgcatagaacaatggtatcctaatttgccagaagatgaatttgctgtgaagtgcccatattgtcgcaagaactgtaattgcaaggcatgcctaaggatgaggggagttgaagagcctccaaaaaaggagatctctaaagaaaatgaaattcgctatgcttttcatattgtaaccatgctgcttccctggatgagagaactgcgacaagaacagttggaggagaaggaagtagaggctaatatacaaggtatggagcttcgcaaaggtgagatcccaggaggagaagaggtggaatatgtgccacctgaacctaaaggtaggagttattcttttggcaagattcatctactgaaggatgctgatagaagtaagaactcctcaaatggcgagtcttacaacggcatgcctgctgttgggaactccaataatggtctgttgctctggaaagcaaaaagtaatggtagcataccttgtccaccaaaggaagtaggaggctgtggtagtacacttctggacctcaagtgtttgtttccagagaagatgtttgccgagctagaatatagagctgacaaagttctcaggagtgggacattagctaaagcaatggtggaaattaacatacataggttcttttcgggatatacaacaggcagaactcatgctaggactcactggcctcagatgcttaagctaaaagactggcctccttctagttcctttgacaagcgattgccgcggcatggtgccgaatttattagcgcattgccatttcgtgagtatactgatccacgatatggcccgctaaatcttgcagccaagcttcctgctggtgtcttgaagccagatcttggacccaaaagttacattgcttatgggttctacaaagaattgggcaggggcgattctgtgaccaagcttcactgtgacatgtctgatgcagtaaatatcttaacacacacagctgaagtcacttgtcagactgatattggcttaattgaaaaaatccaaaaagacatgagagagcaagatctgcaggaactatatgggggtctaaattcccgctctgagctcaagttgtcaccagctccaactgaatgcagggatgaatctgttgatgaaggattgaagacctcatatagtagagaaggcaattgtgtaaatagagacaattataatggtttggacatcaatgcattaccacctgatgacgatggagatattgcaaaggataaagaatcatctcctggatcagagtggcaaagtgaactaggtcagagttcagatcacaacaatggggtcaacacaactgatgagatgtacaatggagctcattacatttcacacaatcaaaaaagcactggcaggaaagttggcattaaacctcaagaagagaaatctgaaaaggctgattgcagtggcacatgtgcttatctaaaaggaagttctgaagataatccggaaatgcctattgtggagagctcagaggagcagagcaccggtggtgctctatgggatatcttccgcagacaggattctgataaattgcaagattatcttaggaagcattgctctgaattccggcatatttactgcaatccagtcaaaaaggtattccacccaattcatgatcagtccttttacttaactgaggagcataagagaaagctcaaggaagaatatggtattgaaccctggacgtttgaacagaagcttggtgaagctgttttcattcctgctggatgtcctcaccaagtgagaaatttgaagtcctgcatcaaagttgcgcttgattttgtttccccagaaaatgttggtgagtgtgttaagctgacggaggagtttagacgacttccatctttccacaaggctaaagaagacaaactagagatcaagaagatggctgttcatgccctgaacgaagctgtaaacttcctggatcctcgttcctcagaagagttgaaaattggggttggtgagaacatctgtgaggatgaatctgtagatgagaaggagctgccgcctagaagaggagttgaagtgtcaggcgttgatgagaagcctaaatag

SEQ ID NO: 5917 - DNA, 384 bp, Zea mays
  Peptide Sequence Number=SeqID_47696
atggatgagggttgcactcaaccccattcaagtgatccaaagatcaaattgaataccatggttctctttatctcaagtttatccctttgtgaggaatctccacaagttggagcctctcacccttacaagattgatcacaatgaaaccacaagattattcttcctcaaagcaatactaaaatcttttgcagaatcaactaggctccgtgtcaactaccaaaaatccaacatatatccaatcattgtaccagctgacaagatgatcatactagcaaaaacattcaactgcaacattgggagcctccccttcacatacctgggtctacctatggggatgaccaagccaaacctgtcctcattcatgccactaattcaaaaaatttga

SEQ ID NO: 5918 - DNA, 1674 bp, Zea mays
  Peptide Sequence Number=SeqID_47697
atggcctccgcctcgcgcctcgtgtccttcgccgcgctctgcctgtgcctgggggcggcgctccaggcggcccggggcgccgacgcggccgcccgcgccttcttcgtcttcggcgactccctcgtcgacaacggcaacaacaactacctgctcacggaggcgcgcgccgactcgccgccctacggcatcgacacgcccgaccaccgcgccacgggccggttcagcaacggcaagaacgccaacatcatccatatctccaagcagctgcgctacttcgagcagtaccagaggcgcctggccgcgctgatcggcccggaggcggcgtcccgcgtggtgcgcggcgcgctggtgctcatcacgctgggcggcaacgacttcgtgaacaactactacctggtgccctactcggcgcggtcgcgggagttctcgctgccggactacgtcacctacctgctgtcggagtacgcgcaggtgctggaccgcctctacgacctcggcgcgcggcgggtgctggtgcagggggtggggcccatcggctgcgtccccgcggagctggcgctgcacagcctcgacggcacctgcgacgccgagctgcagcgcgccgccgagatgtacaacccgcggctcatggcgctgctggaggagctcaacgcgcgccacggcggcggcgaccccgtgttcgtcggcgtcaacatgcagcgcatccacaacgacttcatcgacgaccccaaggcgtacggcttccagaccgccaccgacgcgtgctgcggccagggccgcttcaacggcatggggctctgcaccatggtgtccagcctctgcgccgaccgcgacacctacgtgttctgggacgccttccaccccacggagcgcgccaaccgcctcatcgtgcagcagttcatgtccggctccaccgactacatcacgcccatgaacctcagcaccgtcctcgccgtcgacctccagaagcagcagctgcccgaagccatccgatacgggagggcccatccagcggcccaggtcacgctctcacgccacgcacgcatgctcccccgcctgctcaacgggccccaccgcctgctccttggcgggccccacgcctcgggcgccgcgcccctccaccgccgccgcgtcctcgccggccgccgggccatgtccgcctccgcctcgcccgcgtccgggccgaggcgtccgctgcgcggggtggtcttcgacatggacggcaccctcacggtgccagtcatcgatttcccggccatgtaccgcgaggtgctcggcggggacgccgcctacgccgcggcgcgcggctcggggggaggctccgtcgacatcctccactgcatcgaggactgggcgcccgacaagcagcgccacgcgtacgaggtcatcgcgcgcttcgagcgggagggcctcgaccgcctccagatcatgcccggggcctcggagctgtgtggcttcctggacgcgaagcagatcagaagaggtttgatcacccgtaatgtgaaggacacagttgatttgttccaccaaagatttggtatgacgttcactcctgcactgagcagagaatttcgcccctataaaccaaatcctgctccactgcttcacatatgctccgcttggaacattccaccacacgaagtgatcatggttggcgacagtctcaaggatgat

SEQ ID NO: 5919 - DNA, 1977 bp, Zea mays
  Peptide Sequence Number=SeqID_47698
cggcgctcttctcgcttcgcctcgctgccaatctcgtcgccgatccccgggtccggcgccgccacgagcttccagatccaccgcccgggcaatgctgtagcgcctcgcgccgagatgggcggcgtcggcgccgcctcgcttgccctgctgccgctccccctcctcctcctcctgctcgtccgcgcggaggcctccgctctccacggaactatattgcctaacccagcaccgagtccatctagcccccctgaagcgagatcgtttggacctcgaatttccccttcatatcctccaagggcactgtctccaggatctcctgacattgatgtgcgctctcattcgcacaagcccccacaccatagagagtcaaatcagggcccttcaccatcctcagcagaagctccttacctactgttcatgagcatagctgagttagaagttgaagttgcagctgggacatttcttaaacaaagccaagtgaagatcatggctgcagttgcaagtatccaggatgaccagaagacacgggtgaccatttatttggtgccactaagagaagagtttgatacttatacggcatccctaatatctgataggttcagggataaaaaggtccagataaattcatctatatttggagattataaagttatcaatgtcagctatcatggtgctagatcaactttgtcaaccggcatggtgagctctgcgtcagcatcagcgttttcaacagtggctacttgcacaacatctgtaaagacattttcactaggccaacttcagaaggccacagatggttttgattcgagaagagttttgggtcaaggtggctttgggtgtgtctaccatgggacaatagaggatggaaacgaaattgctgttaaattgcttacaagggaggacaggagtggtgaccgtgagtttattgcggaggtggaaatgctcagtcgactgcaccaccgtaatcttgtcaaattgattggtatttgcgttgatcggagcaaaagatgtcttgtgtatgagctcatacgcaacggaagtgtggaatctcatcttcatggcgctgacaaggctaagggtaagctgaactgggatgttaggatgaaaattgctcttggggctgctcgaggcttagcatacctgcatgaagattcaaaccctcatgtcatacaccgtgacttcaaggccagcaatatcttgttagaggaagatttcactcccaaagttactgattttggtttagcaagggaagcatccaatgcaactcaacctatatctaccagggtaatgggcactttcggttatgttgctccagaatatgcaatgacgggtcatcttcttgtgaagagcgacgtctacagttacggggttgtcttgctggaacttctatcaggaaggaagcccgtaagcatctccgagtcgaaggatcccgagaaccttgtgacctgggcccgtcctctgctaagccacaaggagggcctggagaagttgatcgacccttctctggaagggaacttcaacttcgacaacgtggctaaggtggcgtccatcgcttccatgtgcgtgcacgcggacccatcgcagaggccgttcatgggcgaagccgtccaggcactgaagctcatctacagtgatccggacgaggcctgcgacgattcctacagcccgaggaactcatccgaccaagacggtggctacgacggagacctggtcttcgggagcgggagctgggggtttggggcctctggctctgggtgcctggactaccggaactccctgccgtttgttaccatggactacagttccggccgaatagaagggccgcgcgaccctcgcgcggcgttgtcggcgggctcccatgcccagccaccggtgctgcagaatagatcaggccccttgcgggtgaagaagaagctggccgcctcctaccgctctagaggcagtgttagcgagcatgggcacctgccgcgccattga

SEQ ID NO: 5920 - DNA, 1215 bp, Zea mays
  Peptide Sequence Number=SeqID_47699
atggaggaggtgctccgtctggtgcggggtttcgtcgacgtccttgtccttgccggcggccgcacctcgtccggcgccgctgctacttggagcgccgacgagatcaagaaggccctccggtgggcgctcttcttcgaggagattttcaaggacctgctcgactcgggccagtacgaggattctgcaagagaactcgatgcggcactccttgagctcacttcaagtcccgagttccctaagggtcttgctgctgtacgttcagatttgctatccatggcaagggtgttggttatgcgacattttctgaaaccaaacacaatgagcgtggaaaacttttgtgctcttcttgaagcggttgctggcatggatattgatggcatttgtgctagtggtgcgcacaacgcatgccaagagtatgctgagtcaatattgaatatgaatacatcatgttttgcgcagaccatgaatgcttgtgatggtggacttcccactagttcttatgatctgcgggctgaatccacgggccattcatggattatagttaaagaatttcagaagacgctggattcggcatcgtgtggacggttggctgatagaggactggaaacgtttttgaacagtgtgaaaaggaacatcttggaaaatggtagtaataagccttgtgtcccagcaattccgaaaacatcgcaaatgatcgacgagtttctaatgtggaagcaatggagagcaaagtgtttgtcatatttgcttgatcaacggaccattcgagttctgtctggagctagtttgatttttaaagctcctaaagagcagtggatgaaagtgtttgagcccttaaaaagtatagaagaaacatgtcatagtggtcttgttgaaaccatggtcttcggtgcacttgctgtaactgtgtttacacatgaaaaggatattcttgactatgcaagacagacattagagaggaaaccatccgtactatggcttctacctccagttcttaccgccgcagcaattccaccgcagtcaagcttgttccagatatacctagctcaaatcgataagcaaattcatgaagctgctcctgcagatcgaaagtgtagttgcagaggagatgaaatagatcggcatgttaactgtgagattactgaaaggattcaatgtctatatgcattccttattcagcaactttcatataacggttccacaagattacactga

SEQ ID NO: 5921 - DNA, 336 bp, Zea mays
  Peptide Sequence Number=SeqID_47700
atggcgatcattctctactgggtatacacagttaccttctcgcccatcgtgctgtactgggtgtacactgacggctaccagctgatccttcacccgcttgagcggtacaggctccacacactggacgaggaggaggagaacttcgttagcctctgcaccgttgtatgtggcatactcctacatcatcttgtgcatgccatccacgtgatggtcttattcatgttgcctcgtgtgatggagaatgatgttattgctcgctattacggacaaggcaaggggattgttgttaaggctatatacgatcgcgaggcaacgccctacaacttctctgtgtag

SEQ ID NO: 5922 - DNA, 813 bp, Zea mays
  Peptide Sequence Number=SeqID_47701
atgccggcgccgccaggcaacgtggacgggtcgtccccgtcgcacctgcttgaggtgaccgtcatctcggcgcaggacctgcagcggcggcggctgggccggcgcgtgcgcgcgtacgccgtggcgtgggcggacgcgaggcagaagctgcgcacgggcgtggaccacgcgggcggcgccgcgcccacgtggaacgaccggttcctgttccgcgtcgacggcgccttcctgcgctccgagacggcggcggtgaccgtggaggtgcgcggcgcgggggtcctgggcggggacacggtgctgggcgtcacgcgcatcgtggtgagcacgttcgtgcgccccgccggaggcgcgcaggtggcggcgctgcagctgcggcggccgcgctcgctccgcccgcaggggatcgtcaacgtggccgtcgcgctgctggacgccgcccgcgcgccgccgctcgacggcgtgcctggctcgcccgacgccgtcgccgtcaaggacctcgtgatgcggcgcccggcggcgccgccgctgcgcaaggtgggcgaggccagcgaggccagcgatgagccggagatgggcgtggacgatgggccagcgcaaggcgaccaagaggcgcgaaacaacccggagctggtcggtcagtccgggcacctggaccccaggggcaccgccgtggagcagaggaagctggagctgacgctggcgaagtggaaggcggagatgtggcctggcctcaaggaaggccggcgcagcggcaggcggaggcggcgccgggcggcgttctgctttcggggcagcggcgactgggacaggtag

SEQ ID NO: 5923 - DNA, 849 bp, Zea mays
  Peptide Sequence Number=SeqID_47702
atggaggaggtgggcggggacatgcctctcccgaaacagaagctctccgctgcaccgtacagggacggaggtggcgtcgtgctcgtggccactgggagctttaaccctcccacctacatgcacctgcgcatgtttgagctggcaaaggatgaactcgagctgcgaggttattctgtgttgggcggctacatgtctccggtgaatgatgcatataagaagaaggacctcttaccggctgctcaccgaattcgcttttgtgaacttgcgtccaaaagctcatcttttgtgatggttgatccgtgggaggcaatgcagaatggttatcagcgcactttgaccgttctttcgagaatacgaaactcactatgcaaggatggtgtagctgaccaaggtagcctcaaggtaatgcttttatgtggctctgacttgctcgagtcattcaccactccaggtgtttggatcctagaccaggtcagaaccatatgccaggactttggtgtcgtatgcatacggcgagaaggaaaggatgttggaaaattgatagacaacagcgatatattgcaagaatgcagggataacattatttcggttgatgagattgtgccaaatcagatcagttcatccagagtaagagactgcataagaagatctctatcgataaagtatctcactagtgatgaagtaattgaatacatcagagaacacaagctgtttatggaaaggcaatggcggcgacatagcattgctgtaatagaggtatttggagattttcactatcatgcagaatcaagtgctacatacaacatgaattctgacaaccatataaatgccaaggttattctgacatag

SEQ ID NO: 5924 - DNA, 504 bp, Zea mays
  Peptide Sequence Number=SeqID_47703
atggcgagggggtgcacagtgccgaggctgcctttgtttggcgaaaccaagcccccctcgggcgccggcggtcacctcctcgtgaagaccccatcgcggcacgacgcggagcggatggtcaccaaggggtgcgcgatgttctgggtcggggaggaaggggaggccccgcggcgggtggcggtgcccgtggcgcgcctgggccacccgcgaatgctggagctgctcggggaggccagggaggagtacggcttcgcgcaccagggcgccgtcgtcgtcctagtgcgccgtcgagcggttcatgcgggcgatggaggcctcggcgtcggtggggaacaggcacgagcaccaccgccatggacaccatcaccaccactttttgcctgcctcatattcacatcgcccggtgaattttcctcgtcagtgagtggggaggacgaggggggccgtgagtcgtcgactgggaaacatgagcaggcctgtggtcgatggggccgtatttcatag

SEQ ID NO: 5925 - DNA, 261 bp, Zea mays
  Peptide Sequence Number=SeqID_47704
atggcccatggcagtgatttggaagggtggggtgtttggctagcttcgactttcctcgaggtagaccaccttggatcacttctctaccccattctcctagtattccttcccgacatactcgggcttcttgcgtactccaaggcgaagcgtccaactccaaataaggatgtcataaggacaaatgcgcccaccatctggttgtcaaggaagaaagagttggttaatgttggtggaaaaggagatatactcataagcagttaa

SEQ ID NO: 5926 - DNA, 339 bp, Zea mays
  Peptide Sequence Number=SeqID_47705
atgggcgcgcagacgatcagctcttatttcattactgcggggaggcggttgggacgtccgcaggcatcggcggagctgcggcaatggcggcgattcggtcaaggagaccctgcacttcacgcggccacatgcgatgcccccccggatcatttacgagcgccggctgaggatcccctggtctggcggcggccggtccggagatcaggcagaatctcaacaacccagcgcccaggcggcttccggttcaacagggaagaggacccgacaggtgggccccacccggcattgagtgcgcaagcttggtacgagacgcagtcttgtgggccccatgagcagtga

SEQ ID NO: 5927 - DNA, 1716 bp, Zea mays
  Peptide Sequence Number=SeqID_47706
atgaagctcatgaggctcggcacgcggccggactccttcttcacttccgggcccgtcaggctctgtgcgcgggctccgacgccgcccgagctgccggggcttcccggggcggcgcagaggcgttcgaggcctgcgcccaagttctgctacggcgtggccatcacggtcggcgcgcacaacgtcgtgcccctgcgctgcgcggcggcgcgcctcggcatgacggaggccgccgaccgcggcaacctcgccgccaagctcgacgcgttcctcgcctcctgcctcctccgccggtggaaggacgcgctcgccgtgctccgctccgccgccggccgccacgccgccgagtgcgaggagctcggcgtcacgtccccggtgcgtcgaggccgtcgcgacgctcgtcgtctcggacccccgggcggcggcgacgccgccgccgcgccgtccagctccgcgtcgccgtggtgggcgcgcgacgtctccgacctcggcgtagacctcttctggcgcgtcatggtggccgtcaaggcggccggcaccgtcaaggggagagccgtcggcgacgcgctcaagacctacgcgcgccggtggctgccggccgttgccaagagcgggtacctggtgctggagcaaaccgacatcagcacagccgagtggaacagccgggcttcttgtcgaaaagatggcttctttctcaagcttctcaaggcagccagcgtcctgggcgcctctcccgcgtccaaggcagagctcacgaggagggtggcgctgcagctggaagacgccagcgtgagcgacctcctgataccgtcgtcgtgcgcgggcgagacgctgtacgacgtggacgccgtgacggccatccttgaagagctggcgctgcggcaagcggcggcggcgggggtcccggaggcaagcccgccgcacgcgcgcggacacaggcggtcgcggtccgccgagagctcggagtacgagggagcgcgtcggtccgcgtccgccccggcgtcgcacggcgcgatggtcaggatcgggaggctggtcgatggattcctgatggaggtcgccaaggatcccaacctgcccctggacaagctgatcgccattgccgaggcagtgccggactgcgcccgcccggagcacgaccatctgtaccgagccgtcgacacttacctcagagtgcacccggagatagacaagggttcgaggaagaagctgtgcagggttctcaactgcaggaagctctccgagacggcgtctatgcacgccgcccggaacgagctgctgccgctccgggtggtcgtgcaggtgctcttcttcgagaacgcacgcgcggcggcgctgtccgtccgcggggctaacggccgcgccgccgccggtggcgtcaaggcgctgcttgccaagacaaggagggaggagacagacggcgaggagaaaaggctccggggcctcgccgtcgccggcgcgcctggcgacgacggcaacgactggagcgtggaggggctgaagcgcgcggcgtcgagggtgtcgaccctgaggatgaggctggaggaggacgcggacgacgaggcgttcgtgcacagggcgcgcgcgggggcggggctggtccggagcgcgtccgcccgcgtcagggcgctctgcgcgatcccggccgggaagcccaggcggatgctgagcaggctgtggccgtcgagctccagcagcgccgtcactgagaggcgttga

SEQ ID NO: 5928 - DNA, 291 bp, Zea mays
  Peptide Sequence Number=SeqID_47707
atggcgcggctgcagatgcagcacggcgtgaacggcggtggcagcggaggtgtgggcgcgtgtgagggagagggagagggaaatggggtgctggggcaaatggaaccgtcgtgggggagtcatgcgtggagggcggtttcggagaagataaacaggaggtggggcgtggggcagattgggtgttacacgcacgatccaatcgcgccgccctttctccccccctccaatgtcggccggccacccatcacgttcctctcacgcgccccggtgccctcgcttcctaaaccctaa

SEQ ID NO: 5929 - DNA, 211 bp, Zea mays
  Peptide Sequence Number=SeqID_47708
atggcgcggctgcagatgcagcacggcgtgaacggcggtggcagcggaggtgtgggcgcgtgtgagggagagggagagggaaatggggtgctggggcaaatggaaccgtcgtggggagtcatgcgtgagggcgattcggagaagataaacaggagtgggcgtggggcagattggtggagtggggggcccacgcgcaggacgataggatgcg

SEQ ID NO: 5930 - DNA, 552 bp, Zea mays
  Peptide Sequence Number=SeqID_47709
atgaaaccagcggaggcaaagacgcgggatccggtcgccgacgtggagaagcagcagccgttgctgctgccgccttccacggcggccaaggagaatgcgccgtcgggagacgcctgcggctgcgaggcgctcccccgcgcctcgccaacggcggcgcgcacgctggcgctggtggtcctggtggcaggcgcggccttcgcggcgcagctggcggcgcgcgaggagtacgtgctcctggccgtcttcgcgtcgcagctggccagcttctgcctgttcacgtcgctgctggcgctgtgcgccctcccggagggcgccgggcgccgccgccgcgcgaggtgggcggccagggcggccgggcaggtgctgcagtggtccgtcgccatggcggtccccacgagcatggcgtgctgggtggtccagagcgcgccgcccgccgtcggtgccgcgctgctggggctcgccctggccgccgtcctagcctgcaacgcggagctcgtgcgcgccctgtggcctgtgcgtgcagggacctcgcctcacaccgacggcctatag

SEQ ID NO: 5931 - DNA, 1575 bp, Zea mays
  Peptide Sequence Number=SeqID_47710
atggcgccgcccacctcccccgccgccgtggcggcggccgcccgcgcgtctccgacgccggccgctgcgctcgcgctcttcaagtcggcgctttccgcagaccgtgctctgtgcccgctttccgtgctcccgcacctctccgcgtccccgtcgctgccgcacctcctcctcaccgcctccgccgccgcgcgcccccacgccacctcactccgcctctacgcgcagctcaagtcgctctccgtccccatccccgtcgcctcgctccacccgctgctctcctccctcccctccgcccccgccttcgccctcttcgccgacatctaccgcctccgcctaccgctctgcaccaccaccttcaacatcatgctccgccacctctgcgccacgggtaagcccgtgcgcgcgctcgagctgctccgccagatgccccgcccaaacgccgtcacctacaacaccgtcatagccgggttctgcgcgcgcggccgtgtccaggccgcgctggaggtcatgcgcgagatgcgggagcgcggagggattgctcctgacaagtacacctatgccacactgatctccgggtggtgcaagatcggccgaatggaggacgccgtgaaggtgttcgacgaaatgctgaccaagggagaggtggcaccatctgcggtgatgtacaacgcattgatcggtggctactgtgacgtgggcaaactggatgtggctctgcaataccgggaggatatggtacagcgagggattgccatgacagttgctacatacaatttgcttatgcatgcgttgttcatggatgcacgtgcatcagatgcttatgctgtgcttgaggagatgcagaagaatggtttttccccagacgtgttcacgtataacatactaatcaatgggtattgcaaagagggcaatgagaagaaagcactggaggtgtttgaggagatgtctcagaaaggggtgcgtgcaactgcagtgacctacacgtcattgatatatgttttttccaggaaagggcaagttcaggagacggataggttgtttaacgtggctgtgaagaagggcatcaggcctgacgttgtcatgtacaatgctctgatcaatagccactgcacaggtggtgatatggaaagagcatatgagatcatggcagagatggagaagaagagaatccccccagatgatatgacatacaatacgctgatgagggggttttgcttgcttgggcgacttgatgaagctcgcacgctcattgacgagatgacaaagaggggtattcaaccggaccttgtcagctataacacgctgatcagtggctatagcatgaagggtgacataaaggacgctttgagagtccgggatgagatgatggataaggggttcaatccaacacttatgacatataatgcgcttatacaggggctgtgcaagattagacagggagatgacgccgagaacctgatgaaagagatggtggcgaagggtatcaccccagatgacagcacatatatctccctgattgagggacttaccactgaagatgaacgaatggctgcagcagatgctgcaaaagcttga

SEQ ID NO: 5932 - DNA, 831 bp, Zea mays
  Peptide Sequence Number=SeqID_47711
atggaggcaccggactgtccggtgtgcaccggacatgtccggtgcgccaacggctccaagactgccaacggtcggcttcaacacagaaggaaagaaatcgggcaccggacagtgtccggcgacatccagatcctgttcccgggtcaaagggaactttcactcgcccacggcaccttcgccaaggtgtaccacgcccgccatgccgacgacaccggcgagaccatcgccatcaaggtgctcgacaaggagaaggccctacgcaatggcctcgtcctacacatcaagcgcgagatcgccatcctccgccgcatgcgccgccccaacatcgtccgcctcttcgaggtcatggccaccaggtccaagatctacttcgccatggagttcgtccgcagcggggagctcttcgcgtgcgttgccaagggccgcctcaaggaggacaccgcgcgcaggtatggtgccatgatcatggaagctcttttggaattgaatgagccgaatggttcagatattgctgcaatcttcggcttcatagaggtctccgacttcggcctctcggcggtcgccgacaagttccaccccgacggcctcctccacaccttctgtggcacaccttcctacgtcgctccgaagtctgtgtcgttccagatagcttcaagggggctacagcagagggcgcggtcatcatggcgcttgggtcaattgggcgcatgctcaacgggtcgtaggccgagctggttcctggtgctgcagccactccgcctcgccatcgagaccaagcacgtcaagctcgtcgaggcccatgaatccactccgcctccacataagtactaa

SEQ ID NO: 5933 - DNA, 453 bp, Zea mays
  Peptide Sequence Number=SeqID_47712
atggaggatttggagctgttcaatgatgcagacataggcatatctgaaaatccaggtcccgtgatgtcttcaccaccgccttgttcaagttccttaccgctagttgcattaggtgcaaataatgttaatgaggaaaatgaaaaggtacaagacaaatcgaggaagaggaagccaagaaagaatacgacgaaaaattggatcccgaaagagttgcggacttctacatctcaaactagtgctcctaacgaagaaacaactattgtacctcaaactgctcaaactatggatgtagaaacagttgtaatagaccatggtagccatgaaaacgtcagtgctgatgcagcactagtccgtgtggaaactcctcctacttctccggcaaggagtgtcaagtggcttgttaagaaaattactgcgaggaaaaacttgaagcgtgcttcgacaagggagtag

SEQ ID NO: 5934 - DNA, 1599 bp, Zea mays
  Peptide Sequence Number=SeqID_47713
atgagtagcgccgcttcgtccccgtgccaccggctccgccgcgtcgcgctgctgctgctcgttgccgcggtcctcgccggtggaaccgaggggaaggcgcacgactacggggacgcgctgcgcaagagcctgctctacttcgaggcgcagcgctcgggccgcctcccgcacagccagcgcgtcgcatggcgccaccactccggcctcaccgacgggctcgagcaaggggtggacttggtgggaggatactacgacgccggggaccacgtcaagttcggcctgcccatggcgttcaccgtcaccatgctgtcgtggagcctgatcgagtacggcggcgacgtcgcggacgccggcgagctcggccacgcgctcgaggccgtcaagtggggcaccgactacttcatcaaggcgcacaccaggcccgacgagctctgggctgaggtgggcgacggcgacacggaccactactgctggcagcggccggaggacatgacgacgtcgcggcaggcgtacaaggtcgaccgggaccacccgggctccgacgtcgccggcgagaccgcggcggccatggcggccgcgtccatcgtcttccgcggctccaacccgcactacgcgcacctcctcctgcaccacgcccagcagctgttcgagttcgccgacaagtacagggggacatacgacagcagcatcgcggaggtgaagagctactacgcgtcggtgagcgggtacaaggacgagctactgtgggccgccctgtggctccaccgcgccaccggcagagatgactacctcgactacgtcgtcgacaacgccgacagcttcggcggcaccggctgggccatcaacgagttcagctgggacgtcaagtacgccggcgtccagatcctagcggcaaggctgctgctgagaggggagcacgcgccgcgccaccggagcacgctggagcggtacagggccaaggcggagcggtacgtgtgcgcgtgcctgggccggaacacggagggcggcgcggacgccaacgtggagcgcagccccggcgggatgctctacgtccggcagtggaacaacatgcagtacgtgaccggcgccgcgctccttctctccgcctactccgactacctggcggccgccgaggccggcggcgccgcccgggccgtgtcgtgcgcggcggcggccgaggaggtgttcgcgctcgccagggcgcaggcggactacgtgctgggcaccaacccccggggcgccagctacctcgtcggctacggctccaggtaccccggccgggtgcaccaccgcgccgcgtccatcgtgccgtacaagcacagcagggagttcatcggctgcacgcaggggttcgaccactggttcggccggcggggctccaaccccaatttgctcgtcggcgcgatcgtcggcgggccggacaggcgcgacaggttcagggacagccgcgacaactacatgcagacggaggcctgcacgtacaatacggccccgatggtcggcgtattcgctaagctgcgccggatggcgtggctggagcgggaacaggggtccacgtcggtgcccgtcaccgtcacgtccacggcggccgaggtgtaa

SEQ ID NO: 5935 - DNA, 1176 bp, Zea mays
  Peptide Sequence Number=SeqID_47714
atggcgatcgcgtggacgtggttgacggtgaccccgaactgctcctgcagcatcctggccctctcctcgcacatgctgacgaggcgctcctcggcgcggtccatgctctcccggcgcatggtccagtgcatcaccgcggagcaagccaccgcgactagcacccacgcggccgctgccagccccctccatctcctcttcgtcatcgccgcgcagtacttgttgccccccatccccgcctctgcgcccacaaatctattgccgctcctcctcctccttcccccgcccaatgcccaccatatgctcgccgacacgcgccgcgctagccgcccacccgaacttgaaggcgctgggatccctatcgccagcagcagcagcaagaggcgcgggagagtgagagactggaagcctggaggtggagcggggaagagcgggctgcgggcgggacgaggtcgtggtgcggagcttctcaaaagagctttcccttttgttgcctccccactcttcggccgcaacaggtcgatccacttccactccgctagcgcccagcggcgccacgaggcgagccgaggccgcccgagcccgacggggaggaaccccgaacccgcgcttttggcagcagccgatattcgagacaggcgggcgtcaattaaaacggcgataggccgtcagaccggcaggaggcaggtgcggaacgggacgggacgtgccaaggagggccgatctggagcagcggacgccgcgctgctgtgtactccgtggacccggaccatgggcccgcctctgcgccctgagcgggccgtgccggaatcaagtggtggagcttccccctatcctcgcaaccgccggcaccagcttgggcccaccggcttctcttccctgggtatatatccagagtcggacacctccttctccccttgttcgccaggattccctcgcgggcgtcgaaagaaagaggaaggatcggagtcgtggctgtgggcaagacacgatcgaaatcgctcactgtcgcttgacatcgcctcggttccaccccacgctgtggacccgctccatcacaacaaatccacgggaattggtcactggagcccctctggcatcggtttgccacggttcgccgtggcggagagcgccgacggcctgctccaccatgggggctcggcggcgccacccggttag

SEQ ID NO: 5936 - DNA, 159 bp, Zea mays
  Peptide Sequence Number=SeqID_47715
atgcagatgctctcgtactctactcagatgctctcgtactctactctacctagtactactacttccatgtgcgatgtgctgctcgaggtaggcctgacctggcagggtgacgcatcatgcaggcaggccctgacctggcagaagcatgcacggaattga

SEQ ID NO: 5937 - DNA, 384 bp, Zea mays
  Peptide Sequence Number=SeqID_47716
atggcggcgactcgcttggggggcgcggtcgtggatggagcggagggggcacagggggcgcagatctcgtacgagggcgtgtcagcgtctagagcgggggcagcgagcgcagtcgtggatggatcggagggagggggcacaggggcgtggcggcagctcgagcaagaaaggggcgggccggcgggggacgacgagcgcggtcagatggagagggagcaagggagtccgccggtggtggttaggaaatcaggatgtggagaagagacaaatgaaggaagtagggaaggtacaggacaaggtcgtggcctgacctcgctgtcagacagtgagggtggacttgttccatacaggggcgctggagttggtgtccggaagctagagtag

SEQ ID NO: 5938 - DNA, 234 bp, Zea mays
  Peptide Sequence Number=SeqID_47717
atggcgaagcatgggtcgcgaagacgggaccgaggcaggcagacggtggaggaggacctcgtgcagaccggagaccactccgacgagcaatacccgtcgcgatgggggacaatccggcgcaccgaggccgacatgagcttagatgaggggtggttggctgatccagttgctttggccttaatttctccccctttggcattaagcaccaaaacgagatcatttttggccctttaa

SEQ ID NO: 5939 - DNA, 363 bp, Zea mays
  Peptide Sequence Number=SeqID_47718
atggccggatggagaggacggcggctcctgcatcgtgcgtcctgcctcctggcggctatgggtgggaggctaggctgggagcgtcttgagtgggatagggacataggcggcggaggcggcgtcagggaggccgcgccggcgtcggctacctctgccgagttcctctacatggggacgctggcgagcagagccggcgagaggagcagcgacacgacgtcgtccgacgacgaggtgtcccggagctcgcccgagctccgcccgcttccgccgctggcgcggcagtgcgcaccagcgccgtcgaggagccccgacggggcctccccgtcgttcggagagtgttggggacttgttctcaaatgctaa

SEQ ID NO: 5940 - DNA, 171 bp, Zea mays
  Peptide Sequence Number=SeqID_47719
atgtcccagcatcaccagccttgcttgcgcgtgggctcgcatctctgtgctccatccaccgccagtcgtgcccgcatctcctgcatgctcaccgacccctgctcacagtcgaggaggagacagggagatgagagggggaggcggcggcgcaccgacctactgtgggactga

SEQ ID NO: 5941 - DNA, 1275 bp, Zea mays
  Peptide Sequence Number=SeqID_47720
atggcggcgcccaccacctcccgccgcggccccggcggcgcgcgcaacatggacgatgaaaacctcaccttcgagacctccccgggggtcgaggtcgtcagcagcttcgaccagatgggcatcaaggacgacctcctccgcggcatctacggctacggcttcgaaaagccctccgccatccagcagcgcgccgtcctccccatcatcaacggccgcgacgtcatcgcgcaggcccagtccggcaccggcaagacatccatgatctccctcaccgtatgccagatcgtcgacaccgccgtgcgcgaggtgcaggctttgattctctcgcctactagggagcttgcttcccaaacagagagagttatgctggctattggtgaccacctcaacgtccaagtacatgcttgcattggtggaaaaagtatcggtgaggatatcaggaggctcgagaatggggtgcatgttgtctcgggaactccaggcagagtctgtgatatgatcaagaggaggaccttgcgaacaagagccatcaagcttctagttctggatgaagctgatgagatgttgagtagaggttttaaggatcagatttatgatgtctacagatatctcccgccagaacttcaggtggttttgatctctgcaactcttcctcatgagatcttggagatgactagcaagttcatgacggaaccagttagaatccttgtaaagcgtgatgagctgaccctggagggcatcaaacaattttttgttgctgttgagaaagaggaatggaagtttgatactctttgtgatctttatgatacactcaccatcacacaagctgttattttctgcaatactaagagaaaggtggattggcttactgaaaaaatgcgcagcaataacttcacagtatcggctatgcacggtgacatgccccaacaagaaagggatgccattatgggcgagttcaggtccggcgcaactcgtgtgctaataactacggatgtttgggctcgaggactggacgtccagcaggcgagtattcgtacaattttttttgtatttgtatcgtcctttgcactgctggtttcacttgtcataaattatgatctcccaaataatcgagagctttacatccatcgcattggtcgctctggtcgttttggacgcaagggtgtggcgatcaatttcgtgcgcaaggatgacatccgtatcctgagagatatagagcagtactacagcacgcaaattgatgagatgccaatgaatgttgctgatcttatttga

SEQ ID NO: 5942 - DNA, 156 bp, Zea mays
  Peptide Sequence Number=SeqID_47721
atggccggtacagacctcgtcggtgatgaacggggagcgcgccgtgaccaggggtactcgtggagaagaattagaaaccccgagggcatttctgcaatctcagagattcaaaaatatgtagaaaaatgtagaaaaatggtgataggagttgcttga

SEQ ID NO: 5943 - DNA, 576 bp, Zea mays
  Peptide Sequence Number=SeqID_47722
atgtccggtgcaccagaggactcaggtttcaaactcgtcaccttcgggaatttccagaggccactccgctataattcaccggactgtccggtgtgcaccggacatgtccggtgctccaaggaagggcggccccaggaactcgccagcctcgggttttcattccagccgctccgctataattcaccggactgtccggtgtgcaccggactgtctggtgcatctgcggagcaacggctacttcaggcgccaacggctacctgcagcgcatttattgcgcgccagtgcgcgcagaggtcaggcacgcccatgctagcgcaccggacactctacagtacatgtccggtgcgccaccggacatcaaggcgggcccagaagtcagaactccaacggtcgatttccaacggcactgatgacgtggcaggggcaccggactgtccggtgcgccatcgaacagacagcctcccaacgaccatttttggtggttgggaggttgtttgttcgatggcgcaccggacagtcacggtgccccttgctaacgtcatcagtgcagttggaaatcgaccgttggagttctga

SEQ ID NO: 5944 - DNA, 303 bp, Zea mays
  Peptide Sequence Number=SeqID_47723
atgagccgtgattccctttccagcctaggttgtctagacccaatcttcactaccgagatccgaaccgttggatcggggacagatggttgtgatggggtgcacagggttttgtggcttggtgactggcgctgctccttccgcggcggcgaggtcgccggaggcgaggcagacgtggtcgctgggggtctggggtcgccggtgagggctggaatgggcgaggaaggtccagcaaactcactggcagggctccgaccacgagaatgggaccgaagacgagagaacgacgaaggggaggtgctctag

SEQ ID NO: 5945 - DNA, 624 bp, Zea mays
  Peptide Sequence Number=SeqID_47724
atgcgcactccggcgagcctcctccactcccactcagccatcgctgacaccccatctccggctgctctcctgctccctgctcacgtagaggagcagcaggccatctccgtggactccgacacggtggtcatcctgtcgtccctcctctgtgccctcatctgcgtggccggcctcgcgcttgtcgcccggtgcgcctgccgtagaggaggaggagcctctgtttcagtgtcggccaccaccagcggcggcaggtcgtccgcccaggcgcccagcggactggagaaggcggccatcgaggcgctgcccaccgtctccgtctcttcttccctgaaacaagcaagtagaagagacgccgccgacaaggaggagtgcgccatctgcctggcggcgttcgtggagggagaccagctccgtgtgctgccgcgctgtgcccacggcttccacgcggcctgcgtcgatacctggctcgccgcccacgccagctgcccctcctgccgcgccaccatcgtctccgtcgtatcgccgctgtgccggaggtgcggggcggcgtgctgcgaccagcaggaggaaacccccatggcagcaccggagcctgctgctgcggggaggggcttgcatgcttag

SEQ ID NO: 5946 - DNA, 1089 bp, Zea mays
  Peptide Sequence Number=SeqID_47725
atggatcccagccagatgatgttccccatctggggggcgccgcctcccgccgccttgaagccgccctccgatgaccacgccgccgcccccaacgcgcaggcgcagcccttcctcccccctcccaatcccaaccgcggctggaagcgcaagaatcccgccgccgccgcctaccagccaccggccctcggcgatctccaggtgcagaaccgcgccaaggctcgccgctggttcaagaacagcggcggcggcaaccccaaccaaagccgcaagtatttcttccccaagaacaagaacaacaaggtcgccgcgccgcgcaacaccacctccttcatcatccgggccaagcgcgccggcggcattgcctccctcgtctccccgtgccccgtcacgcccgccgtgctccccaccccgcgtctctccccctcccgcgagggcctagctgacatggcccaggcgcagtggggcgtcgatgggtacggctccatgaagggcctcatccgcctccgtagctccccccagccagccaaccccaatgctgccgcatcagatgacgatgatgaggggaactccagtggaagcgacgtcgaggagcacgtcgaggtggagcgacgcctcgaccatgacctcagccgttttgagatggtgtaccctggtagaggggaggatgctgggggctacgtgttggaggacgatgacgagtatgaccaggatgcgcatgtggctcgccttgaggaagagaacctgaccctaaaggagaggctcttcttgatggagcaagagaagactgatgcgcacaatgcagagaagcagcaggttgctgcgggttcagagaaggctggtggaaatgatccagagaagcagcagggtgctgcaggttcagagaaggctggtggaaacgatgtggatggacaggatgtcgttgttggtgtttcggggaagactggcgcagatagtgcagagaagcagcagggtattgtgggtaccgagaagacaggtgagcacagcatagagatggttgattcactgatagaggagaagatggatgacgacaatggcgagaatgaggttaggcttgcggcttcacagtga

SEQ ID NO: 5947 - DNA, 1191 bp, Zea mays
  Peptide Sequence Number=SeqID_47726
atggacacccccacggcgaaggcggcatggaacgccaactacggcgtcgtcggcagtggggaccgtcgtcttgccttctcccgccaactctcctccaacgccaccacgccgcgcctcgctcggtccgactcctccatctccatgcccgccccccttccccttcccccagtctacgaggggcccaagcccagcaggaagctactccgcctcgccacggccagccgccccatgcgccgcctcgccctcctcctcgccctcaacgttgcctactctgccaccgagttcgccatcggcctcttcaccggacgcgtaggtacaagcgattggaggttctggctgcctttacaaatgctacagctgtttctattgttcctgtctttctccttggctgttgaagcattacatgcatttatgcaagatgaatcggagcacaagcattatctgattgtttctgctgtcaccaatcttttggttaatttacttggtgtttggttcttccggaactacgctcgtgttaacataggtacgggaagcaacttatatcctgttgcttctggtgcaaatggagatttgtacttgtttccctgcaagggttgtaaattaaacagaattatgattggcagtttacaggaatgcagaggatatgaattaccactcggtctgtttgcatgtgttggcagattcaatacggagtgcaggcttgatactagcttcttggtttctttcattggggtaaaatctattttttttactattttcacgtttcctgtgcttcccatttatcatggtgacttgtggccatctgtttattccttttgtgctactacccgtaggattgagaatgctgaggttctgtgcctgggaatcgtctcagtggcagtgtttatgcttgttttgccgttatttaaagctactggtaatatcctactgcaaatcgcacctagcaatgtgccaccttcagcctttacaaagtgctcgagacagattgctgcttgtgaagatgtctccgaagtatggcaaggtcgattctgggagcttgttcctggtcaggcagttggatctctctccattagggtgaagagcggcgctgacgaccgggcagtccttgaatacacgcatggtttatatcaggatttgggcatacaggatctgacggtccaaactgatgagtttgtagggcctgttagttag

SEQ ID NO: 5948 - DNA, 2634 bp, Zea mays
  Peptide Sequence Number=SeqID_47727
atgccgacccctgccagtctgccacgtaggcgccagatcggagctctggagcgataccttaacatcatttgtattggcaccaagaggtgtaacctcaacgttaatagtgatggcgccaaggccctcaccatcggaattggatcggagtggaacaagatggaaggtttctgcggcggcgacagcgagctggacgagcaatccaaccaggagccggcgttcgaggccttcatgtgccctctcaccaagcaggtgatgcacgaccctgtcaccatcgagaccgggcagaccttcgagcgggaggccatcctcaagtggttcagggagtgcagggacagcggaaggaagccgacgtgcccgctcacgcaggcggagctgcgcagcaccgacatcacccccagcatcgccctgcgcaacgtcatccaagagtggagggcgaggaacgaggacaaggagctcgacaaggccatggcttccctcaccgccacacaggaggctcaggctcaagacgacgacgacgacaccctgcgcgccctcctctacgtctcccgcatgaagaagaccctcgtgcgcaggcaaggcgtcatacccaccatagctgacctgcttaagagcagcagtagaagggttcggctcaaggccctccaagtccttggtgtcatcgtcgaggaagacgatgaaaacaaggaagagcttgctaaaggtgacaccatacgcaccatcatcaagttcctgtccaatgagaatttccaagagagggagcttgcagtgtcgctattgtacgagctctccaagttcgaccctacatgcgaaaggatcggcgcaatctacggggccattctcctgctggttgggatggccagtagcaaatcagagcacggtgtggctgtggagaaagcagagaacacgctcaagaacctggagaagtacgaaacaaacgtcaagcagatggcagagaacggcaggcttcagcctctgcttaccaaactcatccaaggtccaccccaagtccagctcgccatggctgaattcctcggtgagcttgcgctggccaacgacgtgaaggtccttgtggcggagcaggtcggggccctgctggtcaccatcatgaagaccgagggcagccttccggcgcgggaggccacgctcaaggccctgagggagatatcgtcgaacgagtccagcgccaggatcctgctccaggcgggcatcctgccgccgctggtcaaggacctcttctccctgggcgccggccacctgcccatgaggctcaaggaggtgtcggccgccatcctggccaacctggtggcgtcgggcgccagcttccggtccatcccgctggaccacagcggggagacgctgctgtcggaggagatggtgcacagcctgctccacctcatcagcaacaccgggcccgccatcgagtgcaagctcctcaacgtccttgtgggcctcaccgcctccccggccacggtgcccgacgtggtctccgccatccggagctccggggccaccatcagcctcatccagttcgtggaggccgcgcaccgggagatccgcgtggagtccctcaagctgctgcgcaacgtgtcgccgtacatgggcgcggagctcgcggacgccctcggcctcgggggcagcaccggcaacctgagcagcctgctcggggtggccacagtcaccgaggaccggagcggcgtcacggaggagcaggcggcggccgtcgctctgctgggcgacctccccgagagggactggaacctgacgcggcagctgcaggagctgggcgcgttccgggcgctggccacgaagctggtggagctccggcggggcacgatccgtggcaaccggcacgtggcgcccttcacggagggggcggtgaaggtgctgtacagggtgacgtgcgcgctggcgctgctgcagcaggaggagacgtacgtggagctggcgcgggaggtggggctggcgccgctcttcgtggagctcctgcagcagatgatgagcagcgggcaggaggctgtgctgctctactcggccatggcgctggagaacctgtcgctgcagtcctcgaggttgacggacgtgccggcgcctcgtcgtgggagcagcctcgtgtgcgggtgcttcgggcagggacggtcgcccccgccccccggggcaatggggacgtgccgcgtgcacggcggcttctgctcgctgcgggagacgttctgccttgcggagggcgggtgcaaggcggtggagcggctggtggcgtgcctagagcatgcggatccccgcgtggtggaggcggcgctagcggcgctgtcgacgctgctgggggacggcgtggccaacgcgacggagggggtgctggtgatcggggaggcggaggggctgcgccccgtggtggaggtactggtggagaaccggacggaggcgctgcagcggcgggcggtgtgggccgtggagcgcatcctgcgcgtcgaggacatcgcgctggaggtggcggccgaccagaccgtggcgtccgttctggtggaggcctaccgcaacggcgacgtccgcacgcggcagacggcggagcgcgcgctccgccacctggacaggatccccaacttctccagcgccttccaccaggccaaaggcagggcatga

SEQ ID NO: 5949 - DNA, 1176 bp, Zea mays
  Peptide Sequence Number=SeqID_47728
atggaggggtgggcaataatgcaacaagcagtccggcggcggcacgggcgctggccgctgggcgtggtcctccctccatggctggctccatctagtagctccatgcgtagtgagccgagtccagcaacaagcccagaggcagtggcaacaacgcacatgccacatgccactgccactgctatatatggggcagcaccgcagcagcatcagctctgctctgctcagccagctagccatatatacggcggcattcttcttctcttcttcttccccaataacatatcgagctgcaagctgctctgcttcttttctagcatgggcatgagggtcttgttggtggtcgtgctcatctcgttcgccccccttattaccactaatgcagcagcaggtgtcaacgccacgagatctgctggtaggcagcagaagcagaagcagaagccgctggcgcctgccctcatcgtgttcggcgactccatcgtggaccccggcaacaacaacgacatccacaccatcatcaaggccgacttcccgccctacggcaccgacttccagaaccacagagccacgggaaggttctgcaacggcaggataccaaccgacttcatcgcctcccgcctcggcatcaaggagcttctgccgccctacctcacctccgagccgctcgacaagcacgacctcgtcaccggcgtcagcttcgcgtccggcggcacgggcttcgacccgctcacgccgcagctcgcctccgtgatctcgctcccggaccagctcaccatgttccacgactacctgggcaagcgcaccatgtccggcggtctcgaccggggctgctcgcagggccacaacgagatcgccgtcgcatacaacgccgggatggtgcagcagctggcggcgctgcgggccaagtaccccgacacgctgctcgtcttcatggacatctacggcttcctctacgacatgatgatgcacccgcgcagctacggcttcacgcagtccaccagaggatgctgcggcacgggcctcctcgaggtctccgtcctctgcaacggcgtcacctccgccgtctgccaagacgtcggcgactacctcttctgggacagctaccacccaacggagaaggcgtacaagatcctcgccgacttcgtcttcgacaactacgtcaagctcatcctcgtctag

SEQ ID NO: 5950 - DNA, 549 bp, Zea mays
  Peptide Sequence Number=SeqID_47729
atggcgtccgagggcgaaaacaagaggatgatcacgctcaggagctccgacttagaggagttcgaggtggaggaagcggtggccatggagtcgcagactctccgccacatgatcgaggacgactgcgccgacaacggcatcccgctccccaacgtcaactccaggatcctctctaaggtcatcgagtactgcaacagtcacgtccacgccgccgccaaacccgctgactccgctgcctccgagggcggcgaggacctcaagagctgggacgcgaagttcgtcaaggtggaccaggctacgctcttcgacctcatcctggtcgggttcggattagatcagtatatattgattgattggttgtgcgtcgtggtggaggctgccaactatctgaacatcaagggattgctggacctgacctgccagacggttgctgacatgatcaagggcaagactccggaggagatccgcaagacattcagcatcaagaacgacttcacccaagaggaggaggatgagatccgcatggagaaccagtgggccttcgagtga

SEQ ID NO: 5951 - DNA, 5427 bp, Zea mays
  Peptide Sequence Number=SeqID_47730
atggaaccctcgccctcctcccgccgccgctcccgcgccgccgccgccgacaagggcaaggaccccgaccccgcctcctccgaccacccttccccacccgcccctgacgatgacgccgacgtcaccttcccccagcccttcacctccgccagcaccgccctccagggcctcctccgcaggctcggcgccggcctcgacgacctcctcccatcctcctcctcagcgccctcctccgccacgtccggtcacctcaagaggatcctcgccggcctgcaggcgcacggcgacgagtcgcgccagctccagtccctcatgcagctctgcgagatgctctccatcggcaccgaggactcgctcgccgccttcccggtcgatgcttttgtcccaatcctcgtcgggatgctcggccgcgaggacgagcctgccaccgctggtgccagccccgacgtcatgctgctcgcggcgcgggcactctccaacctcgttgatgtgctcccctcctcctgctccgcggtcgtgcactacggggccatacagtgcttctgtgctcgactgctcaccatcgagtacatggacctcgctgagcagtctctacaagcccttaagaagatctctctggagcacccaactgcctgtttgcgagctggtgccctaatggctgttctatcgtatctcgacttcttctccactggggttcaggtcgggtcctctgatctccttacaaccgttcttatcttgtgcactgtttgcatctacttacacctcttcccatgggggacgaagctgccgtccgatgcttccgagtttgtcatggaagctgtccccttgctcacgaatcttctaaatcaccatgattccaaggtactagagcatgcttctgtttgtttgacacgcattgctgaagcttttgcctattaccccgacaaacttgatgaactctgcaatcatggattagttgctcaagctgctagcttgatagctgttggcaactcatctggccagacatcactgagcacatccacatatacaggcttaatccgtcttctctcaatatgtgcaagtggatccctgctggcagttaaaacactacttcttcttgggatcagcggcactcttaaagatatcctttctggctctgctttgatttctggaacatcagtctcccctgctgtaacaaggcctgcagatcagatgtttgagattgtgagccttgccgatgatttgcttccgcatatccctgcgagaatcattaagttaccaacatattaccatacatataaaggctcttcaacaaagaaatctgcttccatcaaacaagaggggggtggttcaacaggaaatgaaaggtctggccgtgagaggctattgcgtgagcaacctgagcttttacaacagtttggtatggatttgttacccacaatgacacaggtgtatggttctagtgtaaatgcaccaatacgtcacaagtgtttatctatcattggaaaattaatgtactacagctccgccgaaacaatccagtctctccttggcacaacaaacatatccagcttccttgcgggcattcttgcatggaaagatcctcaagtgttgattcctgctcttcagatagcagaaataatgatggaaaagcttccagagacattttccaagttatttgtgagggaaggtgtcgttcatgctgtggagtcactcatatgttcagaatcttccaacaaaatgccttctcaggtgccacctcaggataaagataaagattctgccatgccatcacgttctagacgtcaacgccggcgtgcgggtgctgttgcagcagaaaatagttcattggatgaatcaaatagttccaaccttggtgttatgtgctcaacagcaaccgcttcagaagctccaaacaccagccttcgtttcacagttagtgaccatgcaaagtctttcaaagataaatactttccggcggatactgattcaagtgatatcgggtttactgatgaccttcttaaactgagggcactctgtgcaaagttgaatactgtctctgagaacgtcaaaacaaaagcaaaagggaaatcaaaagctataagcactaattttttggacatctcaattgatgttgaagaacaattagacaaaataatatctgaaatgctctctgagcttagcaaagttaatggtgtttccacatttgaattcattagaagtggtgttgtcatagcattgcttgactatttgtcctgtgggacatttgggaaggaaaaggtatctgaaggaaacctatctcagcttcgtcagcaggcccttagacgatacaaaaccttcatatctgttgccctttctattgatcatggacgagatgaaactcccatggcactgttggttcagaaactgcaaagtgcattgtcttcgctggaacgtttccctgttgtgctcagccagtctagtaggattggtattggagggtctcgtctgacttcaggtcttagtgctctggctcaacccttcaagcttcgtctttcccgagctcaaggcgaaaaatcacttcgggattattcatcaaatattgtgcttatcgacccatttgctagtcttgcatctgttgaagaattcctttggcctagagttcaacgcagtgaggttgcatcgaagcctataattccatctggtaataattctgaatctggggttcctggcaccacggctggtgcatcattaacagctgcaatggctcaatctggtcggcgcccaacaacaagatcaaagtcatctgctgcaggtggtcttacatctaagaaggattctcatgatgaaagcactagtactgccaaaggaaaaggaaaagctattgtaaagccaaactcagatgaatcaaaaggacctaatacaaggaatgctgcccaccaaaaatctgcttcagagaaagatttggaaatgaagcaggcacatggccacagtagctctgaggatgaagagctcgacacatctcctgttgagatcgatgatgctttgatgattgatgatgatgacatttcagatgatgatgatgatgacgacgatgatcatgaggttctccaagaagggtctcttccaatctgttctcaagatggtgtgcatgacgtgaaactgggtgatgccgatgaatctaacattggatcagctacttttagccatgcacagccatcatctggttctggggctagaaacacttctagcaggggaccggattctactgaatttcgaagtatgggcacattcggttcacgaggtgcaatgtcatttgttgctgcgacgatggctggtctggcttctgttggtggtcgcagtgttagaggtgtccgagatcggcgtggtctgtcacttggaggtagcatgaatgatcacaataaacttatattcactgctggtggcaagcagcttaacaaacatttgactgtatatcaagctatccaacgtcaacttatgctcgacgaggatgatgaagaaaggtttaatggatctgatataccaaatgatggaaaccgcttctggggtgatgtgttcacaataacgtaccagaaggctgataaccaagttgagaagggttgccaagggacttccacctcattaaacataaaatcagattcttacaggtccatttctgaagcacaaggggtttctcttcttgatagcatcttacaaggagaacttccttgtgatcttgagaggacaaactcaacgtacaacattttagcattattgcgtatacttgaggggcttaatcagttatcccctcgtttaagagtacagggagcatctgatgattttgctgagggaaaaatcaataccctggatgagttatatagaactggagccaaggtaccttctgaagtgtttgtcaatagcaagttaacaccaaagcttgctcggcaaatgcaggacgttctcgcactatgtagtggcagtttaccttcttggtgttatcaaatgaccaaggcctgcccattcctgtttccttttgagacaaggaggcagtacttctattccacagcctttgggttgtcacgagcattgaatcgactccagcaacagcagagtgataatcacagctctggtggtgaaagagaggtcaggtttggcaggttacaacgccagaaagttcgtgtttcccgtaaccgtattctagattctgctgctaaagttatggagatgttctccagtcagagggctgttcttgaggtggaatactttggcgaagttggaactgggctggggcctactctagagttttatactctcttaagccatgaactacaatgtgctcaactgggattatggagagctacttcttcatatgattcaggattgcacactgatatgaaggatgtgatccgtttagatcctgaagatgggtcgtcaggaaaagaactcaacacagatctaccaggtgatggcatgtatttgatacaagctcctcttggattgttccctcgaccttggccacctaaagttgatacttcagaaggtagcagattcttcaaagttttggagtatttccgcttaataggtcaagtgatcgcaaaagtcctgcaagatggcagacttttagatttgcctttatcaacagcgttttataagcttatacttggacaggaacttgatttgtttgacatagtgtcatttgattctgagtttgggaagacattgcaagaactgcaagttcttgttgaacgaaagcagttccttgaatccacttctggcaagaaccagctacaagttgcagatttgtgtttccatggcgcttctattgaagatttgtgtttagattttactcttccaggttatcctgattatgtgcttaaagagggtgaaggaggcacaattgttaatatttataatttagaagagtatattactttggtggtggatgctacagttaagtcagggataaagcgacaggttgaggcatttagatcagggtttaatcaggtgtttgacatgtcatccctccacatattttcacctcaagaacttgactatctaatatgtggtcgacaagaaatttgggagtcggaatccctggtggataacataaaatttgatcatggatatactgctaaaagtcctgcgatcgtgaatctactcgagattttgtcagaattcacccctgagcagcagcatgcgttctgccagtttgtaaccggtgctcctcggcttccacatggtggattggctgcccttagccccaagcttactatagttaggaagcatccttcaagtgctgtgaatacttcaaattcaactggggcagtagagtccgctgatgatgatttgcctagtgtgatgacgtgcgccaattatctgaagctgcccccctactccacaaaagaaatcatgcgcaagaagttgctttatgcgatcctggaaggccgaggatcatttgatctttcataa

SEQ ID NO: 5952 - DNA, 2136 bp, Zea mays
  Peptide Sequence Number=SeqID_47731
atgctcggcataccgagggatgtcgtcgagcactcgctggatattcgggccggagcccgacccgtcaagcagcctctgcgccgattcgacgaggaaaagcgcagagcgataggcgaggagatccacaagctaatggtagcagggttcatcaaagaggtattccatcccgaatggcttgccaaccctgtgcttgtgagaaagaaaggggggaaatggcggatgtgtgtagactacactggtctcaacaaagcatgtccgaaggttccctaccctctgcctcgcatcgatcaaatcgtggattccactgctgggtgcggaaccctgtctttcctcgatgcctactcagggtatcaccaaatcaggatgaaagagttcgaccagctcgcgacttctttcatcacgcccttcggcatgtactgctatgtcaccatgtcgttcggtttgaggaatgcgggcgcgacgtaccagcggtgcatgaactatgtgttcggcgaacacatcggtcgcacggtcgaggcctacgtcgatgacatcgtagtcaagacaaggaaggcttccgacctcctctccgacctcgaagtgacattccgatgtctcaaagcgaaagacgtcaagctcaatcccgagaagtgtgtcttcggggtgccccggggcatgctcttggggttcatcgtctccgagcggggcatcgaagccaacccggagaagatcgcagccatcacaagcatggggcccatcaaggacttaaaaggcgtacagagggtcatgggatgtctcgcggctctgagccgcttcatctcacgcctcggcgaaagaggtctgcctctgtaccgcctcttaaggaaggccgagtgcttcgcttggacccctgaggccgaggaagctctcgggaacctgaaggcgctcctcacaaaggcgcctatcttggtgcctccaactgacggagaagccctcttggtctacgtcgccgcgaccactcaggtggttagcgccgcgattgtggttgagaggcaagaagaggggcatgcattgcccgttcagaggccggtttacttcgtcagcgaggtactgttcgagaccaagatccgctacccacaagtgcagaagttggtgcatgtagtgatcctgacgaggcggaagttgcggcactacttcgagtctcatccggtaactgtgatgtcatccttccccctgggggagatcatccagtgccgagaggcctcgggcaggattgcaaagtgggcggtggaaatcatgggcgagacaatctcgttcgcccctcggaaggccatcaagtcccaggtattggcggacttcgtggccgaatgggtcgacacccagctgtcgacggctccgatccaaccggagctctggaccatgtttttcgacgggtcgctgatgaagacgggagccggcgcgggcctgctcttcatctcgcccctcgggaaacacctacgctacgtgctacgcctccatttcccggcgtccaacaatgtggctgagtacgaggctctggtcaacgggttgcggatcgccatcgagctaggggtcagacgcctcgacgcccgcggtgactcgcagctcgtcatcgaccaagtcatgaagaactcccactgccgcgacccgaagatggaggcctactgcgatgaggttcggcgcctggaagacaagttctacgggctcgagcttaaccacatcactcggcgctacaacgagactgcggacgagctgacaaaaatagcctcggggcgaacgacggttcccccggacgtcttctcccgggatctgcatcaaccctccgtcaagatcgacgacacgcccgagcccgaggcaccctcggtccagcccgaggtaccctcggctcagccggaggcaccctcagctcgacccgaggcgccctcggttcagcccgaggtaccctcggcccccgagggcgaggcactgcacgtcgaggaggagcagagcggggccacgcctgatcgaaattggcagaccccgtacctgcaatatctccgcctaggagagctacccctcgaccaagccgaggctcggcgggtagcgcgacgcgccaagtcgttcgtcttgctgggcgatgagaaggagctctaccaccgctgcccctcgggcatcctctag

SEQ ID NO: 5953 - DNA, 693 bp, Zea mays
  Peptide Sequence Number=SeqID_47732
atggcgccccgcaagctctgtgacgacggcggctctcagctctcttacggaagcaggaggacggccttcttagagaaggttggccgcgcggggacgaggacgagacaggcgctctcttggggccactcgcttccctcacccgcgtggacgcttgtaaccccctactgcaagcgcacccgacctgggcgcgggatgaacacgaaggccgtgggatttccacctctctcacgcccgtctccggccacctcgcttcccccctttgcgctcgcccacgcgctcgacctatctgggctggggcacgcggcacattcactcgtcggcttagggaccccccggtctcgaaacgccgacagtcacgggccagtcagccgtgggaataggcgtagcattcggcatgaccataggggtgtcctcttctacagcatgaagacgttgtacacgtacgacgcctccagaccacacggagaacggcacccgaccccaccacatgggcaggccttggaaagatcccgggacggggaggaccccggcatgagtaagggtccgattctggcatgtgtccaggccttgccctacactccccactcaggcggagacccgctgctgccgcgtgaggacgtgccgcctgccaccatgctgacggacgacgtgccctctcagcatttaatgcgtcctgttgacaaaccatgctga

SEQ ID NO: 5954 - DNA, 118 bp, Zea mays
  Peptide Sequence Number=SeqID_47733
atggaccccgctgaaattgcgctcagcacagcaaatcccgccctagctctcagcgtctgccactgcccggggaccctctttgtcagccgtcttccaccccgcacctgggcgctcgcag

SEQ ID NO: 5955 - DNA, 564 bp, Zea mays
  Peptide Sequence Number=SeqID_47734
atggaccccgctgaaattgcgctcagcacaacaaatcccgccctggctctcagcgtctaccactgcccggggaccctctttgtcagccgtcttccaccccgcacctgggcgctcgcatgttgcaataaatcgctggatccgcggagtttgttgggagagaaatgtgcgcgctcggccaaattcgtgggccgttgtaaccgcccgggatctatgccccttggtcggactcccactcggggtataaatcattgtcgtggccgccgtgttggagccgtgcgaggtggagagggggcccctgcagccggggtgctcgtagatgccgtcgtcgctgggctctgggtggggcaatcgagagtgattgtcgagcttcatgaggtttgggcgcattgtcagggcgtgttgaagctgcggataccagcgagtcggcgtggttggctactgaaccttggcgatttctcgccggtcgccatggagctgccgtgtcacatgggcggcattgcggtcaccacgatacgtgatccgagggctaatagtgcataccggttcaatgatggtggcatctaa

SEQ ID NO: 5956 - DNA, 1746 bp, Zea mays
  Peptide Sequence Number=SeqID_47735
atggcggccatggttggaacgcccgcggttatggagcagggaagtggggagggaggttgcgaggagatttggacgagcggaggcgtggtggaggcggcgtggggagggagggcgcagggaggcggtgtggggatggaggttggggacgaagatcccaggcggacgccacctagcggccagacgcgcgccacttcgtcacggcccaaagaccagccgccgccggcagaaccccacgccgctcaatccagcctccgcctcgccgccgccgccgcctgtgctgctccgggcgcgccgcgtccatcagccatgctcgccctcgcccgcgcgctccggagccttggccaggcgggggccaggcgggagggccccctcctcgcctggctctcttccttgaggtcggccgccttctcctcctcatccgcgccgccggagtacgacatgccgtcggtgacatggggcgtaatacaggggcgcaaggagcgtctcgtctcgcgcgtgttggcgctcgacttcctccgctccgcgggcgtctccgaccccgccggggagctcgaggcggtcgagctcccctcgtccctcgaggtgctccaggagcgcctcgacttcctcctccgcctcggcctctccaccgacgacctctccaactacccgctattactggcctgctccctcaggaagaacgtcatccccgtcctctcctacctcgagaagctcggcgtcacgcgcgcccgcctggccgcctttgtccgcgcctacccggcctgcctccacgcctctgtcgccgtcgacctcgctcccatggtcaaggcgctccgtggcctggacgtcgaccgccaggacctcccccgcgtcctcgagcggtaccccgacgtcctgggactcaagcccgacggcacaatcagcacctccgtcgcctaccttgtcggcatcgtcggcgtggcgccacgagacatcggtcccatggtaacgcacttccctttcttccttggcatgagggttggcactaccatcaagccgttctgcgactacatcacctccctcgggctgcccatgcggatcctggcgaggatcctagagaagcgaccttacattctcggctatgatcttgaggaaacggtcaaaccaaacgtggaggcattgctcagctttggcattcagaaggaggccctgccgttggtgattgcacagtacccatctatactcgggctgccactgaaagcgaagctagcggcacaacagtacttcttcaccttgaagctccagatcgacccagatgggttcgcacgtgtgattgagaagttgccacagcttgtaagcttaaatcagaatgtgatcttgaagcctgtggagttcctccgtggacgagggatctccaatgaggatgttgctcggatggtggtccgctgtcctcagattctactgctgcggatcgagctcatgaagaacagtttgtacttcttcaagagtgagatgaagagaccaatgagtgaattgttagaatacccagaatattttacttacagcttggagtcaagaatcaagcctaggtatatgagagttacaagtcgggggattaagtgtagcttggattggttcttgaactgcagtgatatgaggtttgaggacaggatgcaaggggattttatagaaggggatgcaccaggtccttcgtttacgatgggtgggaagcttcagatgccaggcagccagctagtgtcagatgatgacgaggatactgatgatgag

SEQ ID NO: 5957 - DNA, 285 bp, Zea mays
  Peptide Sequence Number=SeqID_47736
atggtcgactacgcagagtgtacagtggtgaacagtgccgcgcagaagtcagagcagcaaagtcaaaggtcaccggactatccggtgtggcaccagactgtccggtgcagcaagacgacaaggcgccccaacggagaaagtccgagggagagaaacgatcggcgtgggatgcggaggtgggcgacggaagacccggaggaacccaacgcactcgtctggaagaagcagctgacccttgggccccacctggcggtgacccaagaggagcagcgcgcggcgcggtag

SEQ ID NO: 5958 - DNA, 354 bp, Zea mays
  Peptide Sequence Number=SeqID_47737
atgcaggaattcccttgcaggaccgccatcgcagcaaaatcctcccgagggtctccctacactgaccactcccctactgcccttgcccctttcgggtaccaggatgatcttcagattctcaagttcccagtcaccacagcgcttccccagaacaccacaccgacggccaggcgcccacaaattttacgcgccccgacggcgggagaaagtccgagggagagaaacgatcggcgtgggatgcggaggtgggcgacggaagacccggaggaacccaacgcactcgtctggaagaagcagctgacccttgggccccacctggcggtgacccaagaggagcagcgcgcggcgcggtag

SEQ ID NO: 5959 - DNA, 3999 bp, Zea mays
  Peptide Sequence Number=SeqID_47738
atggcgcgcggcggcggggggcggtcgaagaaggaggatgaggaggagctgcggggggcgaagcgcggttacaaggaggcgtcggcggagggtaatcgggaggaggaggcgcgctgggctaacgtcatcggcgacatctacaagcgccgctgcgagtacgtcgaggccctccggtggcttcgggcggactacgaggtctccgtaaagcacctcccgcagcggcacctcctcccctcctgtcagtcgctcggcgaggtctacctccgcctcggccgcttctcggaggcgctcacctaccagaagaagcatctacagctcgcaaaggagtctgatgaccttgttgagcagcagcgagctaccacacagcttgggagaacataccatgaaatccttctaagatctgaaaatgaccatagtgccataaggaatgcaaaaaagtactttaaatcttcgatgaagctggcaaggattctaaaggagagatccccttcccaaaagtcggactttctaaaagaacttattgatgcgtacaataatatgggcatgcttgagctggaacttgataattttgaagaagctgagaaactacttatccagggcctgaagatatgcgacgacgaagaggtagattcgtatgatgatgctcgcactaggctccatcataatctcggaaatgtttatactgaactacagaattggaaaaaagccagggggcacattgagaaggacatagagatatgtagaaaaatacgccatcttcaaggtgaggcaaaaggattcataaatctgggggagttacattatcgagttcagaagtatgacaatgcaaaactttgttacaataaagctcttgaagtagcaagatccttggaagatgaggatgctctaattgaacaaattcaccagaatattgaaactgttacgaaagcagttgaagtatttgagcagttgaaggaggatgaactgaagctaaaaaaacttatccgggacacttctaatgctcgtggaacatctaaagagagaaaactcctacttgatcagcatgcatggctggatagtcttattgagaaggccaggatgatatgtgcatggcaaaaacacaaggaattctcaaaagggaaaaaaagggtagcaaatgaacttcgcgataaggaaaagttgagtgattctcttctgtcgataggagaatcataccaaaagcttagaaacttcagtaaagctcgtaagtggtacatgaaaagttggaacatatatcggtcgatagggaacttagagggacaagcattagcgaaagtgaacattggcaatgttcttgattcttgtggcgactgggctggtgcattgcaagcttacgaagaaggctaccggattgctgtggaagcagacctacctaatgtgcaactttctgccctcgagaacatgcattacagtcatatggtcagatttgataatatcgaagaagccaagaaaatgcaggaaaaaatagacaatctgaagcaaacactgaatcaatgtgaagcaagggatactgttagtgactactgctcagaaactgacactgaaggtggttgcacatctgataacacgcttgatgctcagaatgaccatggacaggctgcaaataactacgaggaacctgatgatgatgttacgcttgcttcactcgttcagaggagtgggagctcatccaagattaaggtacccaagatacggaattcttctaagaagtttgatgaactatgtgatgtgactgaagacatacataattcttctaagaaggttgatgaactaggtgatatggctgaaggcactagggcagttttaagtagatcacgttctgatcactctgttggcagaaaacgtgtccgtgtgatcttatcagatgatgaatccgacgagaatcatgaaaacgttcagtttaaaaagacatcaactagtcctgcagatagtatgtcagtctcagcagaccatggagcaagcagcagcagaaaccaggatactttacaagttaatcaaacaagggatgcaccctatccagctgaggagagcatttgttcattcaaatcaagtagtcctattgatcatgcttttgaaggcataggattaggtgcttccagtgcaggaaagggaccaacctccaaatcagcagcaagtttttccaagctcagtacacctggctcaaacagtctgaatgaaagccaaaatgctgttggttctcaatccaaagatgctgataatcctcagaccctcatcaggcatttacttgcaagttacacagttactccaactatggatattctatggaataaaatgggatgcttcctctgcagcacttctgggccttcagaatcggcggccatctggtttacttggatggacgtgcttgtgtacatgaagatttctgatgaaaaaagggccaaaggtctattgcctatcattggggagctaaagtttcgtgggaaggtattggaagatgcggtatccatatattatgatgatcagctcgcttctgaacagaagtgtgttgatgttgttattgatgattgggtgccaaagcagctgatgaagttgtatgttgatttctgcatgaagtcattagaagcacccaataagaagctgctgacgaaactatataatcttgaggtctccgaagatgaaatcattgtttctgattgcggactgcaggatatgtcaattgtcccctttcttgatgccctaagatctcacaaaacaatagcagttttggatctttctcataatttactaggtagcctttttcaaatatgtgagtgcgctgttttgactgatcgattggaagtacttaatctatctgggaatcgcctcactgatgcatgcagttcttacctattcacaatcctgaaaaagtgcaaagcactttatagcttgaatgtcgagcagtgttctatcacgtcaagaactgttcagaagatgacagatgcactccatgaagagtctgtcctttcacatctctcattaggaaagaacaacccaatttctagcaatacaatgcttaaccttctatccaaacttgcatctctcacaaggttttcagaactaagcctgactggtataaaactgaataagttaatggttgataagttgtgcctccttgcacaatcctcgtgcctatcaggacttctgctaggtggaacttccattggaccggtggagacaactaggcttactgaggcattgtcttgtacatctcaagatttcctaaggttggagttgtctaattgtgggctcacaacacctgatttcacacaaatctgtacaaatctctcccggatcaatattcttgagttaaaccttggaggaaatccaattaacctggagggatgtgatgctgtacagcgaatgcttgtaaatccccaatgcagtattagatctctcagccttgacaaatgcaatcttggacttgctggaattgtccgtgtcattcaatcattaccagaaaacagccaattagaggagctgcgcgtgtctaagaacaccaacttggcgttggagacaacaacaaagtatgacgaagacatgcaggaagtatcaacagcttctgagcaaaagcaatgtaatgaccctgaaacaacgaatgatatagctccagggaacatagattttgcgaacatgcaggttccagacagtgaagatgaagcagataatgatgcccaccgtgccagatctggttcacgcaggagctgtgcaagttcatcgcagaaaaactcttactcttcttgtcagatgattgaagaactggcgaaggcccttatttcagcaaagcagttgatggtgcttgatcttagctgcaatggtttgtcggaggaggcagtccagtcactgtattctgcttgggcgtctgttccgagaggcgatggaatggctcggaaacatgtaaataaggaggtggtccacttttcagtggatggtatgaggtgctgcggcctaaaaccctgctgcagaagagacctgcaaatgtga

SEQ ID NO: 5960 - DNA, 687 bp, Zea mays
  Peptide Sequence Number=SeqID_47739
atgagcgggatttgtaaatacggtgaacagccctcacctaacgtcatgggcatagggcagcggaggacagtgacgcgcgtcgaggtcaacaggggatctacagcaccacctaatctggctaacggcgacggcgaatttggacaccctagatctacagcggcgcacgggcccgtaccccggtggcgctgctggagaagcggaggcggcgcactcacctggttaacggcgaagcgccggccgcagccccgcgccgtcctcggggtgcgtcgctccgtcgcggcagatccggtcgcccgcgctgctcgtcgaagagccggttcgagccgtccagatcgcggcacgaccctcggggcagccgtagaccaagccatgccctctgcccaccgccacgacggtcgtcctcgcgcgcggacgctgatgcgtcgccactggaggccgtgtcgcagagacgacatggacgttccgggtacggccgctcagtcgcggtgtgggctcactggtggagagagtcgcggttggaagccatcgcacggaatcactgggggagagaagacggctcagtcgcggtgtcctcccagccgcgcccactgcgggcccacatgtaccgtgacgcacgcgtcggtgcgtaggcggcggaggtcgcgggaaacgctctccgagcagcaataccgtgtgtcttttaactag

SEQ ID NO: 5961 - DNA, 345 bp, Zea mays
  Peptide Sequence Number=SeqID_47740
atggcggtgaaggcgagggtctcgccgacgggcttgctcgccgccgcaacgtgggcaggcttattatcactcgtggctgcctccgccctcgacgtgccgaccgtggccttcgacgagcgcttctcgccgctcttcggcgacggcaacctcgtccgctcccccgacgacaggagcgtccgcctcctgctcgaccgccggtccggttccgggttcgtttcgtcggactactacctccacggcttcttcagcgcgtccatcaagctgcccaggggctacacggccggcgtcgtcgtcgccttctacgtgagtgttccttctcaatcgatgccgcaacgttactggtag

SEQ ID NO: 5962 - DNA, 1119 bp, Zea mays
  Peptide Sequence Number=SeqID_47741
atggagctgttcccagcgcacccggacttgcagctgcatatcagccctcccccagccacgaaaccaacggagctagggttctggaaaagggctctagacaccaccccgacagcaactacaacggccgcggcggccaccacggccccctccctcgccttcgcgtcctcggcgccgacagccgtggggcaccacgcggcggccggcgcgcaccacaacgaccaccaccatcaggtgccgacgacgagctcccactcccacctggtgggcctcccgttcttgcaccacacccagcccatcctcctcccggagggccgcggcggcggcctccgccgggacctggcagccgcgaggcccatccggggcatccccgtgtacaacgcctcgcagccgctcctccacttcctgcagagccacacgcattgccacgacgcgatcgtcggcgcggccgggccgaggttgtcccccaaggccgcgctccggctcgcggcgaagcggggcgcgcgcgcgccccggatgcggtggacgacgtcgctgcacgcgcggttcgtccacgccgtcgagctgctcgggggccacgagagagctacgcccaagtcagttcttgagctaatggacgtgaaggatctgaccttggcccatgtcaagtcgcacttgcagatgtatcgcaccatcaagaccaccgaccacaagccagctaattctgcttcatcctacgggcaagcagcagccgcgaaaccggtcatcgacatccccgaccccgacgacgacagcctgttcgacctcatcaccaccagcgccgggtctgatcagtcgtcgtcgtcggctcagcactctaaccctgacggcggcggcggcaacgagcatggctccagcatgtgcgctctgtggtgcagctcctcgacaagcatcagcagggggggctggttccatgacagaccaagagacgatgatgccgccactcccggtcccggcgacgacatcaaatccttcgaggacgtgcaatcacacagccttcttgacgatgtcgccgacctcaactcgtcgccgttccaggtagtagctgggatgtttggcagcgacaagaaaccgaacctcgacttcaccctaggacggatataa

SEQ ID NO: 5963 - DNA, 123 bp, Zea mays
  Peptide Sequence Number=SeqID_47742
atggccgaggaccgcgcaaagctccggatgccggccgctccgagtttgccgcgcgacgggatctgttgggatttaggagataagcccgaccgagtatttctctctttcaagtccaaattttaa

SEQ ID NO: 5964 - DNA, 618 bp, Zea mays
  Peptide Sequence Number=SeqID_47743
atgtggtccacctacgtcccggagcagtgccccatcaccttcacctcgttgatgtcctttaggctcccaatgacgctcttcctgtttctggtgctctacctcgagtctgcaccaataacatgggaaggactgacatgttcgatgacatttacagggaagatggttttggccgtcttcggggtgtcgcatgcatttgtgattttcttgccaattcaggatctcattatcctatggatgaacaagagcctgatggacgacatccatgggtggggagttctcttcgacgacagagttggggatggaaccgtcactgggaaaactggaagccattttgaatcgaatacgattccaccacctctgtcttattgctttcagattggaatccagtcatacacttttgtgggcgattcgcgggctatatctaaaacattgtggtctttattttcagatcaagattcagtgcgtttgttggctgttgaaggttgtgctgctcttggtaaattgttggagccacaagattatgtagctcacattcttccggtcattgtcaatttctaccagcaagtaatttgctttctttgtggatatattattgggagacatgtttttagttgctag

SEQ ID NO: 5965 - DNA, 309 bp, Zea mays
  Peptide Sequence Number=SeqID_47744
atggagagctccagactcacctaccccgaccgcttctacgccgtcgcggcctacgccccgcacaaggacgaggccatcgccggctcgccatctccctcccttctatgggatgagcccttcccgtcctctgtgacggcgaaggccgcggctgcgggcggcatgggtcagcttcgcctgatgtgcagcttcagaggccgaatcatcccatgcttaaccgtctctacggacaaggaccatgacaacctcgtcgacgagtatgactacatcgttgtgacctcctacgactgcggatcctcacgcacctcttag

SEQ ID NO: 5966 - DNA, 513 bp, Zea mays
  Peptide Sequence Number=SeqID_47745
atggcgcagattagacacaacataaaacgaactgggggtaagggcgatccgattccagccgttgtttcgcagatcaacggtcagatggtcatcaccttcaccgagcttcagtacgcccacgcgcactacaccgcggcggcggccatcgtcggaccatcaccaagcgcgatacggtggccaaaacccaatcggcgacaggtacacgtagtacggaatgtggcgaacgtgatcggagctacatacccgaggaagagcgacaatgatcagtgcccacggagcagggcggctacgcggcggaaggtgaaggacgatgagaaactcacgtcgtcgtggggcctcgcgcccccggatttctccccgagcacaacccacgagtccgcccgagtgcccgaaatcgattcactggtgcaaagcaacggtgcaggtgagaggtccgcacggcggatcccgtggctggagatggatcacggtggtggcgccaggtatgtccaacaaaagggagagaggaaatag

SEQ ID NO: 5967 - DNA, 3306 bp, Zea mays
  Peptide Sequence Number=SeqID_47746
atggggaataagatcgcgcggacgacgcaggcgtcggccacggagtactacctccacgacctgccgtccacctacaacctcgtgctcctcgacgtcgtcagccgcggccgcttcctcaagtccgtccgctgcaagcacgacgaggggctgctcctcgtcaaggtctacttcaagcgcaccggcgagcccatcgacctcaaggagcacgagcggaggctggagcggattaggaaggcgttcaaggggattgatgggtcccatgtatggcccttccagctagttaatccagcaggaagacaaattggaagtggtttgatgagccagaacaatgctgtatctcatgtgaagaagatctcaaagactaacttatgctccttagtggctgcttatgatgatcaatcagatacctatagttttgacatttttcagcagatagacaccaaggtgagctgtgaaggaatggttttgcttgtctcgttactctgctcatgcatacgcagtgtgaaaaaacctgagctaagaagggccagcctaattcttctgaagttctcctccacatacatagatgatgataggcgcttacagctagtgctcccctatgtgattgcgatgctttcagatccatctgccattgtccgttgtgctgctttggaaaccttatgtgatgttctttgtcttgtgcaagatttccctatcagtgatactgttatattccctgagtatgtcctcccaatgctctctttgctccctgatgatacggaagagagtgttagggtttgttatgctagtaacattcacaagctggctttaacagcttacaggttcctacttcgttctcgtagcatcgcgaatattcgacctctggatgaatcactggtagctcacagatcccagtctgcagattcaccagcgaagaggcaagatattttttttcgccaacttgcagaactgaggaaatctatttatgagatagtgcaagatttagtgatgggacaaaagcagacacctaatacccgtagagctcttctgcaggatataggttatttgtgttacttctttgggcacaaacaaagtaacgattttcttctgcctatactcccagcatttctaaatgatcatgatgagcagctccgtgcagttttctttgcccagattgtctatgtttgctattttattggagcaaggagtgttgaggaatatcttctgccatatcttgaacaggcgctaagtgatggtatggaggctatccttgtaaatgcacttgattgcttgaccatgatgtgcaaaagtggttatttgaggaaaagagtaattgttggtctattggtaaaggttctccccctgctccggtatacaatcaattgggttaaacagtctgctgtaagatttgttgctgcctgcagcgagagcttaggatctgtagatacttatgtgtatctttctcctcagctacggcagttcctacacagggagccaccttcattggactctgaaactgctcttctttcatgtcttaagcctccactaccaaaatcaatgttctacgtacctttagaagatgctcaggacattggaaacattttactgaagagcagtggcaagaaagaacagatattacatggtggaagatactctggcatggcacaaagtggatctttgggcaaccttgaagatattcgtcgactgaaaggcactaatatttccagcagcgtgtccttggatgtcaaagactccttttcttttggcaaatcactatattctggttttgctctacatgcatctgctgcaaatagctccttttatgatggcttatctaaaggaataccatcatattctttttgtattgataaccggggtttaggagaaacacacatggtccctgattcatcagtgtataaagcttcgataaggctaccttggttggaaccgaatcgtcctggcatgcagactagagatgatcatttcagtagcaagcggcgagatttaagcatcaatgactctttgaagagcaattcttctttgcaaggggatagcatttcaaactctgatactggaggattgccgttctccagatcagcagtgaacctggagactggatggaagcctcgaggaattctagtggcacatctccaggaacatcgcttttctgtcaatgacattgccgtgtcgaatgacaataccttttttgtgactgcttctgacgactcgagtgtcaaaatctgggatacaagaaagttggaaaaagacattgctttcagatctaggttaacatatagcgtgggtaatagccgagctttatgtacggcaatggttcatggtacttcacaggttattgtcggtggtagcaatggaacattacacttgttttctgtggattgtgcacgaagcgttgggagtgtcgtggaaaggtatgctggaattgttggtgtaaaaaggaatgatatcaaagaaggcgcaattctcagcgttgtaaattgttcacccgacagctttagcccaactgttcttttcagcactgaacattgtggtatccataaatgggatacaagaaccaactcagaattttggtattttaaatcctctccagaggagggctatatatcagcacttgttgtgggccagtgtgggaattggttcatctcaggttcttcaagaggtgtccttacattgtgggataataggtttttactacctgttaactcgtggaactattcaatagtaagcccaatagagaaattgtgcttgcttatacctccaccaagttcaatatcttctgctggaaggccactagttttcgttgctgccggatgcaatgaagtctctctgtggaatgctgagaatggaagctgccaccagatgtttagaacagcgagcactgataatgaagctgtgatgtcaaaggcaccatcaaggcctgttaacaagccaatcattaaagatataataagagcacgtggtgatctgttaactggaggaacagatttgaagattcgttactgggatcaagccaggcctgagcaaagcttctgtattgctggtccctcggcgaaaaaagtccgttcagctaaagctgacattttagagaaagcagctggaaacgatgagtgttacgatataagatccagttttggagtacaagtcgtgcaggaaatgtacaaacagaataccacggtatccggtttgacgcccaagactcagttcgcggaggcagctgcagattctgccgggagtacaggcccgtcaaaggcagagctgcatgtggtcccaggaaactttggtggtgtgggtcctgactgtgactggtag

SEQ ID NO: 5968 - DNA, 240 bp, Zea mays
  Peptide Sequence Number=SeqID_47747
atgcagtattttcaggagaacttgcacaatctgtcggttgttccgaacgaggaatatgatgtgcttgagctgaaatggaataacggcggcgaatggatgattggagactttgcagatgacaggactctacgggcttcgattgcatcattcacagctgctgatggacttcagttcccaagggattcaggatggtgccagcctttgacaataacagtaatgcactttgaaattagtgtttag

SEQ ID NO: 5969 - DNA, 597 bp, Zea mays
  Peptide Sequence Number=SeqID_47748
atgtcgggagatcacgccaagaaggatatggtgaccggcgagaagcacgctacaagtcacgggaaggctccatcgggagagtcctacaacaaagggaaggggaaggaaaaggaatccccttcacataagtcgcgtcggagcggtgacaagaagaagaagatgaggaaggtggtctactacgagaccgacacctcatcgccatccacctccagctccgacacgccgtccgtcacttctaagcgccatgagcgcaagaagtttagtaagatccccttacgctatcctcgcattcctaaacatacgcctttactttccgtaccattagggaaaccaccaacgtttgatggtgaagattatgctaggtggagtgatttgatgcgatttcatctaacctcactccacaaaagtatatgggatgttgttgagtttggtgtacaggtaccatccgtaggggatgaagattatgatgaggacgaagtggcccaaatccaacacttcaactcccaagcctcaactatactcctcgcctctctaagtcgagcggagtataataaggtgcaagggttgaaaatgctaaggagatttgggacacgctaa

SEQ ID NO: 5970 - DNA, 255 bp, Zea mays
  Peptide Sequence Number=SeqID_47749
atgcccggcgtcctgcctgctctgctcgcgcggctttcggcttgccagcatgccctctcggcttgctcggccctaatccccatcgcgtcgtcgacttcgccggttgtcgtcgttcgtcgtcgcgttgaatacaaggctacctgcgatatggtaattgtgtccccgattgcgaagtcgtcgtgctgcataactaagtttaggtttaacgacataggttatgcgagaaggattaaatcgatgtttcgtatccgatga

SEQ ID NO: 5971 - DNA, 219 bp, Zea mays
  Peptide Sequence Number=SeqID_47750
atgcggtatggagtccgccgccgtggttctccagtgttagcgtcgtttgaaggggttgcagagggcctgggcgtgccaccggggagccttgatgaagttcgtagctcaattggggggatgataacctggtggtcaagaatttctcgatggagcagttccgccgccacagatccaccctgcccatggtcggggtacctcggcgtcctaactacggtgtaa

SEQ ID NO: 5972 - DNA, 204 bp, Zea mays
  Peptide Sequence Number=SeqID_47751
atgactgcgaggaatggcggtacgacggtgatggtcgcgcggccacgtcaccgagaaattgttgccctacaatccctctttaactttgttatagtatccatgatcaaacagtcacatgatcctactcaaagttgcttccaaaggtcatcccaagccactgttagtaaaatttcagactcagagttgactgacagcccgacttaa

SEQ ID NO: 5973 - DNA, 1323 bp, Zea mays
  Peptide Sequence Number=SeqID_47752
atggccgctaccaagatccttgacaggctcaaggtgggggcttcacctccagcgcccggcggcgcgctcccgctcaccttcttcgacgtgccgtggctcttcacgggccccgtggagcgcgtcttcttctacccctacgcgcacacggcggaccacttcgccgcccacctcctgccgtccctcgtctcctccctctccgccacgctgcgcgcgttctacccgctgctcggccgcgtccgcccgtgcccggacggcggcggcgggtacgaattcttctgctccgacggcggcgaggccgtcgagctcatcgtcgccgagagctccgacgacttcgacgagctctccgccggcgggccgagggacgtcgcccggctctacgcgctggtcaccgtgttccccgcccgcggggtcgccgtcggcgtgtccatccaccacgtggcctgcgacgactccagctacacgcacttcatcaggacctgggccgcccagtgccgcgtggctagcggcggcgcggacgcggtgccgccgccgcctttcctggaccgtggcgtggtcgccgaccccgagggcctcgccggcaggacgctcgacgaaatgcgccagctggcaggcaacggcccgcctccgcctccgccgccggcggcaggcccacagccgaagcttgtcatcgcgtcgttcgcgctcacccgcgaccgcatcgacgcgctgaagcggcgcgtggccgccaaggtcgcggcggacggcggcggcacgggccgcgtccactgctcggcgttcacggtggcgtgcgcgctggcgtgggcctgcctggcacgcgtgggcggcggggagcggccccgcgcgcacctgctgttctcggtggagtgccggcgccgcctggcgccgccgatcccgcaggagtacctgggcaactgcctccggccgtgcttcgtggaggtgggcacgggcgagctgctgggcggcgacggcgtggcggctgcggccgcggcgatcggcgcggccgtcgcggcgctcgacggcggcgtgctggatggggcaggcgggtggttccacaagatcctgtcgctggtcccggagcgcccgatgtcggtgggcgggtccccgcggtacggtgtgtacgagactgacttcgggttgggccggccggccaaggtggagctggtgtccatcgacaagacgcccggcacggtgtccctggcggaggcccgcgacgccggggtggaggtcggcgtcgtgctgcaggaggccgagatggcgcgcttcggctcctgcttcgccgatgcactggaggtgctctgtgacagtgtgactgaactgaactga

SEQ ID NO: 5974 - DNA, 240 bp, Zea mays
  Peptide Sequence Number=SeqID_47753
atggcgagactggggagcgggagggagttgtcaggtgatatccacgaagaggtggagactcataacagaatgctagaccgaatggggagcgacatggatacatcaaggggctttctctctggcaccgtgggcaaattcaagacggtgttcgagaccaaatctactggtttactacttgaccaggtagaatcatccacggtgaaagttttgtggggctgggcgtgttcaagaacattctga

SEQ ID NO: 5975 - DNA, 1314 bp, Zea mays
  Peptide Sequence Number=SeqID_47754
atggggaccggcgagaagcccattacaagccacgggaaggctccatcgggagagtcctacaacaaaggtaaggggaaggaaaaggaatccccttcgcacaagtcgcgtcggagcggtgacaagaagaagaagatgaggaaggtggtctactacgagaccgactcctcgtcgccatccacctccggctctgacacgccgtctgtcacttctaagcgccatgagcgcaagaagtttaaggatgaagattatgatgaggacgaagtggcccaaatcatgcacttcaactcccaagccaccactatacttctcacctctctaagtcgagaggagtataataaggtgcaaggattgaagagcgccaaggagatttgggacgtgctcaagaccgcgcacgaaggagacgaggtgaccaaaatcactaagagggagacgatcgagggggagctcggtcgcttccggcttcgccaaggtgaagagccacaaaaaatgtacaaccggctcaaaactttggtgaaccaagtgtgcaacctcgggagtaagaaatgggatgaccatgaggtggttaaggttattcttagatcacttgttttccttaaccctactcaagttcaattaattcgtggtaatcctagatatacactaatgactcccgaggaagtaataggtaattttgtgagctttgagttgatgatcaaaggctcaaagaagaccatcgagctagatggtccctccgcgcccgaagcacaaccggttgcattcaaggcgacggaggagaagaaggacaagtctacatcaagtagacaaccgatcgacgcctctaagctcgacaatgaggagatgacgctcatcatcaagagcttccgccaaatcctaaagcacaggagggggaaggactacaagccccgctccaagaaagtgtgctacaatgacagggacaacgacaagaagggcaagaggagagaaaagaagaggtactacaagaagaagggcggcgatgcccatgtttgtcgggagtgggactccgacgagagctccaccgactcctcctccgacgaggacgccgccaacatcgccatcaccaagggactcctcttccccaacgtcggccacaagtgcctcatggcaaaggatggcaaaaagaagaaggttaaatccaaatcctccactaaatatgagtcctctagtgatgataatgctagtgatgaggaagataatttgcgtaccctctttgccaacctcaacatgcaacaaaagggaaaattaaatgaattaattagtgctattcatgagaaggatgaccttttggattcctaa

SEQ ID NO: 5976 - DNA, 288 bp, Zea mays
  Peptide Sequence Number=SeqID_47755
tttgcatattgtccatttgtccttgtaattgtaacctgtaatggttgtcggttgcagttctgtggtagaaagtatcaaatcaaaggatcaactggcactggtgcttttgctaaagtatacaaagccactgttgacagtgatgcggaagaaatggttgctttgaagattcagaatccctcatttactttggaattttacatgtatcgccaacttgatctgcgtatatctgatgtcgagagaccaagctatcttgatctgcgtatatctgatgttggttatctattttaa

SEQ ID NO: 5977 - DNA, 411 bp, Zea mays
  Peptide Sequence Number=SeqID_47756
gaacttcaagaattccattcagcattggaggaggcaaaagctgatatagttggtctctgggcactgaatttccttattaagaagggattgcttcctaagagcctgtcacaatctatgtatgtctctttcctggctggctgcttccggtcaatccgctttgggctggaagaagctcacggctcattagagtttgtattgtggaaggttgaggatgctgtagaaagcctgagcagggagatactgacaatacaggcaaagggcgataagccttctgcccaatctcttctccagtcccgtgcaacattgacacaaccattgagaatggcattggagaggatagagcacatgcaggtacctgttgacatagccccggtattcagcacggcaaacaagctatttgcagacatttaa

SEQ ID NO: 5978 - DNA, 462 bp, Zea mays
  Peptide Sequence Number=SeqID_47757
atggcggcggatccgagcaggcggcggccggagtaccatccggcggtgaacgacgtcctgttgacgctcaccaacgccagaggcaccctcgccgacgtgcagcgccgactcgaccttgagttccgcgccgcctaccctgaccatgcgaatccggcgaagctggtggcgcgggtgaagcggttggaggaagaggcggccgcgctcaaggagatgtgccgcgacctcctcacccagaagcaggagctgatcgaccagatccgcgtgagcttgatggcgcagcgtggcatgacgcagcggctgctcgctgcgtccgggctgccccccttgtccgacgccgacgagaccgtccacaacagcctcaacgaggtgatccaagactggactgctcaagactgggaaccggttagaggcgacaatggagaatttaccgctggatttgggcatccatacccattcccatga

SEQ ID NO: 5979 - DNA, 1284 bp, Zea mays
  Peptide Sequence Number=SeqID_47758
atgggccaaagcccaatacaacaacagatatacacaagtgatttaacaccccctgcagttgcaactctagcaattacagatgttgagacagaaccgaaactccgagaacatcgtggaggggaggcccttggtgaagatatccgtgagttaggaggtggtcgggacgcggacatcgccgacaacaacacgcgcagacgaagtgaaggtcgatctccacatgcttcgtgcgctgatgctgcacgggtttggtggagaggacaaccctctcagtcagtcggtgtagatgaccagctcgaaggccagagaagatcgaaggagaacgccgtggtccagggtgctatggagtatacggaaataggacgtaggctattacgcatcttgcggtcctgccttgatgaaaataaggcttttctatcgaccgcagattctgctgtgcattactcacagagccaccaatccagttcaggatggaaggggattgagtatcgagcagcatttcctctacataagcctcccggtgctaacttctatcctcctgacatggacaaagcggagtttgaactttggaagagtaaactgacagataaagaacaaaatgatgccactgggtttttcaccgtcataaaacgacatgactctctgtcttcatcgtcattaacacaatcagatggatcggatcagaccaagactaaagatgatctttttattgttccatactccaaggagtatagaccattcctagagaaagcagctgagcttcttgagaaagcatcagcgtgctctgattctccaagcctcaagaatttgctgagaaccaaggcgaatgctttcctttcaaatgattactatgaatccgatatagcttggatggaattggactccaacttagatctcacaattggcccatatgaaacatatgaagatagcctttttagttataaggcaacttttgaagcatttgtcggaatacgtgatgacacagcaacttctcaagttaaactctttggtgatcagctccaggatttggagaaaaaccttccaatggacaatattttcaaatcagatagtatatctgctgctcctattcgtgtgatcaatcttctctacaatgctgggcttcatgacgctctaacaggattgctggtgcaggatgtgaagggtccacaaaccattgctttcaatttgcccaatgatgaaaggattgtgaatgaacgaggaacttccatggttatgctcaaaaacatttcagaagccaagtgcctctatcttaaagcctatagctga

SEQ ID NO: 5980 - DNA, 996 bp, Zea mays
  Peptide Sequence Number=SeqID_47759
atgcagtgcctcgagccatcgtcgagaatgctttccggcaaggcttctactggccgacggcggtggctgacgccactagaattgtccgcacctacgaaggatgtcaattctatgcgaagcaaacccacctgcccgctcaggctctgcagtcgatacccatcacctagcccttcgctgtgtggggcgcccgggggctacacacacctgctggtcgccatcgacaaattctccaagtggatcgaggtccgacccctgaacaacatcaggtccgagcaggcggtggcgttcttcaccaacatcatccatcgcttcggggtcccaaactccatcatcaccgacaacggcacccagtttaccggcagaaaattcttggatttttgcgaggatcaccacatccgggtggactgggccgtcgtggctcatcccatgtcgaatgggcaagtagagtgtgccaacggcatgattctacaagggctcaagcctcggatttacaacaacctcaacaagttcgacaagcgatggatgaaggaactcccctcggtggtctggagcctgaggacaacgccgagccgagccacgggtttcacgccgttcttcctggtctacggggccgaggccgtcttgcccactgacctggaatacggctccccgaggacgagggcctacgacgatcaaagcaaccaagctagccgagaagactcactagaccagctggaagaggctcgggacaaggccttactacactcggcgcggtatcagcagtccctgcggtgctaccacgcccgaggggtccgaccccgagacctccaggtgggcgacctggtgctttggctgcggcaagacgcccgagggaggcacaagctcacgcccccctgggaggggccattcgtcatcgccaaagttctgaagcccggaacgtacaagctggccaacagtcaaggcgaggtctacggcaacgcttggaacatccaacagctacgtcgcttctacccttaa

SEQ ID NO: 5981 - DNA, 297 bp, Zea mays
  Peptide Sequence Number=SeqID_47760
atggctagaatacaatggttcagcttaatccatgaaagcacgtcctttgctgactattgtgtttcaatggagaaggatggtggagatacattgagcatgaagtggttacatgattcttctttcggaatagacagcaaaatgagagccttcactgttgtttatattcttcaggtctgttttcctaggattatagttgttctttccattagcgctgctgctactaacaggatagggtacctgctgctgaaaagtgtaagttgtgtagcgttgtgccagatatggttgtctattcgttga

SEQ ID NO: 5982 - DNA, 483 bp, Zea mays
  Peptide Sequence Number=SeqID_47761
atggagaagctcttggcggcttggcgtctctggacgagcctgtgtgtggatgtggagccgggcctcttcgcccgcgcctgcgtcgtcgcgcacgggctacagctcgacgtcgccgcgctcaacgccgtcggctgggcgggggagtccccatcctggcctgccatgttcgatcgtgcggccgtcgctgaggtcgagctcgccaccccccacccagctccttcctctcgcgattccagcctccctcaactaccgcatcctgcgattccagtagtccaaatgcatggtgccttccatccttccatcctggcggaggacgtgttcctggatgaatccatcctggcggaggacgaggcagcgctgctgatgctccagtgcgacgaggccctcacgtcccgccttgcgcagtggaagcgaaccacaatacccaccaatctcgccgccagatgctcctgcgctgtcggtaactatgacttacgtgcataa

SEQ ID NO: 5983 - DNA, 942 bp, Zea mays
  Peptide Sequence Number=SeqID_47762
atggcgttcatgctcgccgcgctgctctgcgaggccatctccgtccgcttcgtcagcaccgtcctcggcctgcagtggcaccgatctaccgctcctcttcctgacactggccagtggatgctcctagcattgagcgggaaacttcctcgaacagtggtcgatctactgaaagctcgcatcatcacccttcatcattacctgatgatgttcatcatgttggcgttttcggcactgttcgactgcatcagaggtcctggactcggaataggctcgaggtatatgttcactatggcagtcggacgtttgctccggacagcaacatttcttgccacgatccttccgtctgctcgaccttggtgcgccgaagctcggtatcagatacctgaccatccacacccgtgggcacagaaatattacgctccttatgcttcagatccagacatgatctcgagggtcatggaggaggatatgccatacgctactcttcaagattaccccgacgagtacagacctgactggggactgatgagtttcttagtagacattttgaggccaagcaccggagaggggccctcatggtatcatctgctgaggaaatcaagcggtggctgtaatgatcttatgtacagtggacatatgtttgttgccgttctaactgctatggcatgggcggaagcgtatgggggatggagctccgttgtgatatggttcctcgtcatccacagcgctcagcgggaggtacgggagcgccaccattacagcgttgactgcgttgtagcaatctacatcgggatcctcttgtggaggatgactgcgttcctgtggtccacgatggaaagcaaccgatccagaaggctttccaagctggatgaggttcagaagaggctattccgcgctgccaaaggattccgacgtcttggagataaggagcctgctaaatga

SEQ ID NO: 5984 - DNA, 1905 bp, Zea mays
  Peptide Sequence Number=SeqID_47763
atgaggccgccgcccgcttccagtggagtcggccagaacctggctgcagcagcaatgcttctccgcgcgatgccggagctatcaaccaccgaggggcggcgaatccagggagagctcaagaatctcctagagggcgccgcggtccgacgggccgaaagctccgcctcccgaagcaggggtacccctcggaacatcacgccgcgacttcccgattcatgcgagaagcctcggtccacaccgggcgcacgcgcaacacagcgcctgcggccccgggtcgccttagcagcgagcaccgtcaccgtgaccgtcgggcccacctcgacgagagggtgcgccgaggctaccaccccaggcgtggggggcgctacgacagcggggaagatcggagtccctcgcccgaaccacccggtccgcaggccttcagccgggccatacgacgggcgccgttcccgacccggttccaacccccgactactatcacaaggtactcgggggagacaagaccggaactgtggctcgcggactaccgactggcctgccaactgggtggaaacagacgatgagaacctcatcatccgcaacctccccctgttcctctccgacaccgctcgcgcctggttggagcacctgcctccggggcagatctccaactgggacgacctggtccaggccttcgccggcaatttccagggcacctgccggcagcagccgggagagtctctccgggactatatccagcgattctcgaagcagcgcaccgagctgcccaacatcaccgattcggatgtcatcggcgcgttcctcgccggcaccacctgccacgacctggtgagcaagctgggtcgcaagacccccaccagggcgagagagctgatggacatcgccaccaagttcgcctctggccaggaggcggttgaggctatcttccggaaggacaagcagccccagggccgcccaccggaagatgcccccgaggcgtcaactcagcgcggcgccaagaagaagggcaagaagaagtcacaagcgaaacgcgacgccgccgatgcggaccttgtcgccgccgccgagtacaagaaccctcggaaaccccccggaggtgccaacctcttcgacaagatgctcaaggagccgtgcccctctcaccaggggcccgtcaagcacacccttgaggagtgcgtcatgcttcgacgccacttccacagggctgggccacccgcggagggtggcagggcccgcgatgacgacaaaaaggaagatcatcaggcaggagagttccccgaggtccgcgactgcttcatgatctacggtgggcaagcggcgaatgcctcggctcggcaccgcaagcaagagcgtcgggaggtctgttcggtgaaggtggcggcgccaatctacctagactggtccgacaagcccatcaccttcgaccaagccgaccaccctgaccacgtgccgagcccggggaaatacccgctcgtcgtcgaccccgtcatcggcgacgtcaggctcaccaaggtcctcatggacggaggcagcaacctcaacatcatctacaccgagaccctcgggcttctgcgtgttgatctgtcctcggtccgggcaggcgctgcgtctttccacgggatcattcccgggaagcgcgtccagcccctcggacaactcgaccttcccgtctgcttcggagcaccctccaactttcgaagggagaccctcacgttcgaggtggtcgggttccgaggaacctaccacgcggtactggggaggccatgctacgcgaagttcatggccgtccccaactacacctacctcaagctcaagatgccgggccccaacggggtcatcaccgtcggccccacgtaccgacacgcgttggaatgcgactgttggggacttgttctcaaatgctag

SEQ ID NO: 5985 - DNA, 1353 bp, Zea mays
  Peptide Sequence Number=SeqID_47764
atgatgggaacagagtgcatcatggccacactcggcggggatcctgaaccctcaattccacctggattcggaccttttgttgccctcgcgctacagggcatccaaaacaatgccaaatcagctgatgctcattctagttctgctcaagcagcacactgcatggagaaagatgttgaagttctggaacacggttcggcgcatggttggagtgacactcctgctagtacttcagggacccatagttgcaggaggtcacttcgtaacaggcctccaatagactatagccagttcgaccttatctcggacgaagaatctgatgttgaatcagcagaaaagggagtgggattagtgagacgcagacgacaattaccgaaaggagtacttcggggatgcgcacaatgtgctgattgtcaaaaggttgttgcaaggtggaatccatctggtgcaaggaggcctgttcttgaggaagctcctgttttctatccatccgaagaggaattcaaggacaccttaaaatacattgagagtatacggtctacagcagaaccatatggaatttgtcgtattgtcccgccgccttcatggaaacctccatgccttcttaaagagaagaacatatgggaatgctcaaaattttgtactcgggtacagaaggttgacaagctccaaaaccgtaaatcatccaagaagggcagaagaggtgggatgatgaagaagcggaggaagcttttagagctggaagataacaataatattaatcacaatcaaactggggtgcagcaaaaccaagagaggtttggatttgaacctggacctgagttcacacttcagacatttaagaagtatgcagatgatttccgtgaacaatattttaagaaagaagtgcccgcggactcaccaccatcagtagaagacattgaaggcgagtattggcgtatagtcgaaaagcctactgaagagatagaggtagtatacggtgctgatttggagactggaacttttggtagcggcttcccaaagtcttctcccgaagtaaaatctgatgttgagcataagtacttagagtctggttggaacctaaacaacttgcctagactacaaggttcagtactatcttttgagggcggtgacatctctggtgttttggtcccttggctgtatgtcggaatgtgcttttcatcattctgctggcatgttgaagaccatcatttgtactcactgaactacatgcattggggtgctccaaagatgtggtatggagttccaggaaaggatgctgtaaatttggaggcagcaatgaggaaacacctacctgacttgtttgaggaacaacctgatttgcttcacaacctg

SEQ ID NO: 5986 - DNA, 2120 bp, Zea mays
  Peptide Sequence Number=SeqID_47765
cgttgtcctccgatgcagcaatgatgggaacagagtgcatcatggccacactcggcggggatcctgaaccctcaattccacctggattcggaccttttgttgccctcgcgctacagggcatccaaaacaatgccaaatcagctgatgctcattctagttctgctcaagcagcacactgcatggagaaagatgttgaagttctggaacacggttcggcgcatggttggagtgacactcctgctagtacttcagggacccatagttgcaggaggtcacttcgtaacaggcctccaatagactatagccagttcgaccttatctcggacgaagaatctgatgttgaatcagcagaaaagggagtgggattagtgagacgcagacgacaattaccgaaaggagtacttcggggatgcgcacaatgtgctgattgtcaaaaggttgttgcaaggtggaatccatctggtgcaaggaggcctgttcttgaggaagctcctgttttctatccatccgaagaggaattcaaggacaccttaaaatacattgagagtatacggtctacagcagaaccatatggaatttgtcgtattgtcccgccgccttcatggaaacctccatgccttcttaaagagaagaacatatgggaatgctcaaaattttgtactcgggtacagaaggttgacaagctccaaaaccgtaaatcatccaagaagggcagaagaggtgggatgatgaagaagcggaggaagcttttagagctggaagataacaataatattaatcacaatcaaactggggtgcagcaaaaccaagagaggtttggatttgaacctggacctgagttcacacttcagacatttaagaagtatgcagatgatttccgtgaacaatattttaagaaagaagtgtccgcggactcaccaccatcagtagaagacattgaaggcgagtattggcgtatagtcgaaaagcctactgaagagatagaggtagtatatggtgctgatttggagactggaacttttggtagcggcttcccaaagtcttctcccgaagtaaaatctgatgttgagcataagtacttagagtctggttggaacctaaacaacttgcctagactacaaggttcagtactatcttttgaaggtggggacatctctggaaaggatgccgtaaatttggaggcagcaatgaggaaacatctacctgacttgtttgaggaacaacctgatttgcttcacaacctgcatgagggagagtttgtcctaacattccctcgggcataccatgctggtttcaactgtggcttcaattgtgcagaagctgttaatgtggcaccaattgattggttaccaattggacaggatgcagtcgagctttatcgtaagcaagctcggaaaattactgtttcccatgataagctgttgctaggggctgcaagagaagcaataagagctcattgggatattctgttccttaagaaaaatactgctgataacttgaggtggaaaagcatgtgtggacttgacagtactatatgcaaatcgcttaagccgctgatccaacgcgcgcagccgctgatccatcactgccagacgccatcgcgcccagccgcccagacgtctgagctgccagccgccgtcgcgcgcgcccaggagctgccagccgccatcgcgcgcgcccaggagccgccagagctagacgtcgtcggccgtcctccaccgccctccaggtacgtcgccggccccctcctccctcctccctccgccgccacccccaaagccgccgctgccgccagctactgcctctcccgtaccgccgccgccgtcgtacgagcaggccgtagggtttcgagtttggagttctgcctcttcctactgcctctccccaaggtccccactcgcatccaaggttgtacgagcaggccgccagctactgcctctccccaagcgctggtggtttgtttggtaaatggggaatgggcaatactctgttggttccctgttaagtgttacattttcaatgcggtcatggaaatggaattagatgttgctgttgtgaagagagatgaccttggaaatgctcatggtcttaatcttgatgagttcgatgatggttactaa

SEQ ID NO: 5987 - DNA, 204 bp, Zea mays
  Peptide Sequence Number=SeqID_47766
atgcatgatggtgaaaggcccaacaccaactgtgacgacgactttgcaactgttgatgatgactatgactaccctgaaggcgatggctgcattggaggtgatgacgatggtagcatacaccaaagggatgaacactctaatgacctcgacggtgcatgcatgaccatacaggccgatctacatattctatgccttaggatataa

SEQ ID NO: 5988 - DNA, 915 bp, Zea mays
  Peptide Sequence Number=SeqID_47767
atggtggagcaacccccggagagggggcctaacagggacattaaaaacaacacaaaaaaactgacggcatctaacactaatgcaactcagttttactcttacaaggaccaaatgcatgtaacaccagagactagggcctcagtgatgacagaaaaagatagcagtcaagcttctgctgcatcaagtcagccctttgcgggaactgttttaagagcacaaagtgtatctcaggaagcttcacctagcgtctttacttcaaagcctctcatagattcttcacttgtgaaaaatacatatgttggtttaagttcaggcggtgcccatattggacatccaaattttggtaaccagcaaccaagtgacgaatgccttaaaagaaaatctgaatctctatctggttcagaagcaaggggtcattcagctgcattggtgcaacctgctctaggaaatcataatgggagtggaggtgcacacaagggccttcggatggctaacgttgtacatcgattcaagagcttagttgaatctttggaaattggtgttgtgctatctgggaggttgtggtcctcaagccaagcaatcttcccaaaagggttcaggagcagagtaaaatacttcagcatcgtggatccaacacaaatggcatactacatatctgaaatattagacgccggaccacagggacctctgtttatggtgactctggaaaactgtccaggcgaactttttatcaacgtctctcctgccaagtgctggagcatggtccgtgagaggctgaatatggaaatacggaggcaactcagtacgggaagagctaatcttcctgcactacagccaccgggatcagttgatggttttgaaatgttcgggttgctgtcaccggcaatagttcaggtgaggaaagtattcacttga

SEQ ID NO: 5989 - DNA, 393 bp, Zea mays
  Peptide Sequence Number=SeqID_47768
atgcggtgtgcgctgtgcgctgtgccgagacagatgcgtgcgacggtgcgagggagactcagcactccactcacctggcgccacgtcgccctcccgttgggcctctttgcctcgcgggccgactgggccggctattgtgaagagagaaagggtcttgtgtgggctggctattccaggccatctggcccgtccatctacgtgacggatacttctcgtttcccctcctcacgcggccgcttctgctcggtgccccctctcctctacagctctactctcccctcccgcggaggcgtggacggcatggagttgggggagcccggggcccgtggatgccgtggtcccgtgcgattactcctgctgcgctgtagtgccttctgtgttgaagatgagtga

SEQ ID NO: 5990 - DNA, 2659 bp, Zea mays
  Peptide Sequence Number=SeqID_47769
gaattcaaggacacctttaaaatacattgagagtatacggtctacagcagaaccatatggaatttgtcgtattgtcccgccgccttcatggaaacctccatgccttcttaaagagaagaacatatgggaatgctcaaaattttgtactcgggtacagaaggttgacaagctccaaaaccgtaaatcatccaagaagggcagaagaggtgggatgatgaagaagcggaggaagcttttagagctggaagataacaataatattaatcacaatcaaactggggtgcagcaaaaccaagagaggtttggatttgaacctggacctgagttcacacttcagacatttaagaagtatgcagatgatttccgtgaacaatattttaagaaagaagtgcccgcggactcaccaccatcagtagaagacattgaaggcgagtattggcgtatagtcgaaaagcctactgaagagatagaggtagtatacggtgctgatttggagactggaacttttggtagcggcttcccaaagtcttctcccgaagtaaaatctgatgttgagcataagtacttagagtctggttggaacctaaacaacttgcctagactacaaggttcagtactatcttttgagggcggtgacatctctggtgttttggtcccttggctgtatgtcggaatgtgcttttcatcattctgctggcatgttgaagaccatcatttgtactcactgaactacatgcattggggtgctccaaagatgtggtatggagttccaggaaaggatgctgtaaatttggaggcagcaatgaggaaacacctacctgacttgtttgaggaacaacctgatttgcttcacaacctggttactcaattttcaacatcattgcttaaatctgaaggagtaccagtctaccgatgtgttcagcatgagggagagtttgtcctaacgttccctcgggcataccatgctggtttcaactgtggcttcaattgtgcagaagctgttaatgtggcaccaattgattggttaccaattggacaggatgcagtcgagctttatcgtaagcaagctcggaaaattactgtttcccatgataagctgttgctaggggctgctagagaagcaataagagctcattgggatattctgttccttaagagaaatactgctgataacttgaggtggaaaagcatgtgtggacttgacagcactatatgcaaatcgcttaaggcaagaatcgatttggagttggcgcaaagacaaaatatatgctctccatctcaatctagaaaaatggatgctgaatttgattctactgatagagagtgtgcattgtgctattatgatctgcatctttctgcttctggctgtccatgttgcccagggaaatatacctgccttgtacatgcaaagcagctttgctcatgtgactgggacaaaagatttttccttttccgttatgatatcaatgagttaaatatgttggctgatgctttaggtgggaagttaagtgcaattcacagatggggtgtctctcatcttggattaagtttgagatcatgtgtcaaaagagaaaaagaccaagattcgaagactcctcgcagagtaactgatggccccagaaggtcctacatgtctcaggcgtcaacagtatcattggcaccttcgttggtttgcaatgaacagaacaacaatggtaataagatgctggacaaagctagtttggaaacggatacttgtccttttacagagcaaataaaatctggaactatttcactacaggaggcacacatgaagactgaggtatcctgtacactaaacagcagtgtcattcctgaaggccataaaagctcactaagcttgccagttccttctggccactcactttcttccaattttgcgacaaggtctttaagtactgcaggagaatctgtgaaaaacacatatgacttggtagtatttaaagggagtagagaatcttcgcgggctggagactgtatctcttcgcctggtgtgcatcataacataccgccaataatgattgatcaaggaagcaacatgaatcctagtatggagagctcaaacaattcacataggctgacggcatctaacactaatgcaactcagttttactcttacaaggaccaaatgcatgtaacaccagagactagggcctcagtgatgacagaaaaagatagcagtcaagcttctgctgcatcaagtcagccctttgcgggaactgttttaagagcacaaagtgtatctcaggaagcttcacctagcgtctttacttcaaagcctctcatagattcttcacttgtgaaaaatacatatgttggtttaagttcaggcggtgcccatattggacatccaaattttggtaaccagcaaccaagtgacgaatgccttaaaagaaaatctgaatctctatctggttcagaagcaaggggtcattcagctgcattggtgcaacctgctctaggaaatcataatgggagtggaggtgcacacaatggccttcggatggctaacgttgtacatcgattcaagagcttagttgaatctttggaaattggtgttgtgctatctgggaggttgtggtcctcaagccaagcaatcttcccaaaaggtcagagcagagtaaatacttcagcatcgtga

SEQ ID NO: 5991 - DNA, 390 bp, Zea mays
  Peptide Sequence Number=SeqID_47770
atgggctttggggggaagagcggcggcgagctgtcgtggccgtggcagttcacgccgttccagaagctgagcttctccgtggaccaggtggtgaggagcctggtggacgccaacatcatcggcaagggctgctatggcgtggtggtgctggaagtgctgacggggaagcagccgatcgacccgacgatcccagacggcctgcacgtggtggactgggtgcggcggtgcagggaccgcgccggcgtgctcgatccggcgctccggcgacggtcgagttcagaggtggaggagatgctgcaggtgatgggagtggtgctgctgtgcgtgagcgcggcgccggacgaccgccggacgatgaaggacgtggcggccatgctcaaggagatctga

SEQ ID NO: 5992 - DNA, 249 bp, Zea mays
  Peptide Sequence Number=SeqID_47771
atggcggcgcctccggccacggctcccgcgaccgcccgatgtctgtccgtcgccaagtcgtgctgggctgccgagcggagctccagctcgtttgtcctctcggctcctgcgactggcctccggcaaagtgggagccgcgtcctcagcatccgtgccaaggttgccactggcctgcagagggcctgcattgcggatgatggaggaacacaagttggtgaagttgttttcaacacatcactgacagggtaa

SEQ ID NO: 5993 - DNA, 771 bp, Zea mays
  Peptide Sequence Number=SeqID_47772
atggtgggcaagcctttgtcgaagggtttcaactcgctggtcattttgggtgcatggtcgatttggaagcatagaaatagaatcattcatgttgatatttacacaggagttgatttgattagtggtgtcacatgtgatgctccatatgaatggtcggacaagactgattcagaatgggagtttaagagggatccgtcaagtgaaacttttcatgtggttgcctacgactttggtatcaagcataatattttgagacgattgacatcatatggatgcaaaataacagttgttccagcaaattggcctgcttcagaggtactcaatttgaagcctgatggtgttctttttagcaatggtcctggggatccagctgcagttccctatgctgtgaagacggtacaggaaataattgggaaggttcctgtttttggcatctgtatgggccaccaattgattgggcaggctcttggtgggaagacatttaaaatgaaatttggacatcatggcgggaatcaccctgtctgtgatctccgtagtggacgtgtagacataagtgcacagaaccataactacgcagttgacccagaatcactcccagaaggagcaaaagtaactcacgtcaatctcaacgataatagttgcgctggcctccagtactccaagatgaagcttatgtctctccagtaccatcccgagtcttcccctggtccgcatgactccgacacagccttcggcgagtttatagagctcatgaagagcaacagattgtaa

SEQ ID NO: 5994 - DNA, 255 bp, Zea mays
  Peptide Sequence Number=SeqID_47773
atggatagcatctatgcttcgccggaggactttcaccaaatgaagcagagagacaagataagagggcttcatttgctcgagtactttgtaaaccaatgccatcagttagggataaaatgcgaggcatggatcagacatggagatccaaaggaggttatctgcagcgaagtgaagagagtccagcctgaccttctagttgtgggaagtaggggtcttgggccatttcagagaataaacctgtcagcactcatgtag

SEQ ID NO: 5995 - DNA, 186 bp, Zea mays
  Peptide Sequence Number=SeqID_47774
atggctagtgttttggatgctgttttggaattgatgaaaacaccaactcctgcttctgccgaagattctgctacgccagtaaagctgataggagagagccttccagaaaagcccacattacctgctcccgaagcaccttcggagagtgatatggaatatattgttcgacacgcttcgggaaagtag

SEQ ID NO: 5996 - DNA, 165 bp, Zea mays
  Peptide Sequence Number=SeqID_47775
atgggggttgtgtggccattgatcatcaaccaggaggctcgtactcctgaccccacatatgtttcctggccatatatcacattctatgattttggggggagaccatttcttggtgaagaatctggagatgatatctttgaggaagacagaaatgggttgttcaag

SEQ ID NO: 5997 - DNA, 420 bp, Zea mays
  Peptide Sequence Number=SeqID_47776
atgtccggtgcaccagaggactcaggtttcaaactcgtcaccttcgggaatttccagaggccactccgctataattcaccggactgtccggtgtgcaccggacatgtccggtgctccaaggaaaggcggccccaggaactcgccagcctcggattttcattccagccgctccgctataattcaccggactatccggtgtgcaccggactgtccggtgcatctgcggagcaacggctacttcaggcgccaacggctacctgcagcgcatttattgcgcgccagcgcgcgcagagggcaggcacgcccatgctggcgcaccggacactctacagttgtacaaacactccctggacctcacaagtcctttttgcaagtgatgcaaatattaagggggagctgtgctacaacttgaccctttga

SEQ ID NO: 5998 - DNA, 507 bp, Zea mays
  Peptide Sequence Number=SeqID_47777
atggcgcctcctgttgacgtggctggcccgcgccctaggttgggcgatgtggaggctccttcgaggccgaggtcgagcctgtcttccgtggtcgtggtcgagtccgagcccctgggtcgggcgaggcggagactatcggctgaaaccagggctgagtccgagccctggggtcgggcgaagcggagttcgtcgtcttctggggctgagcccaagtacgagccctgggtcgggcggagcggagttcgccgtcttccggggcttagcccgagttcgagccttgggtcgggcggagcggagttcgccgtcttccggggcttagcccgagtccgagccctgggtcgggcagagcggagcttcctatggcgcatgcggccgggcctgactgcatgtcagcctcactctgtcaagtggcaccgcagtcggagcggcgcagacggtgctgtctttctgtcaggccggtcagtggagcggcgaagtgacggcggtcacttcgtctctgtcgactga

SEQ ID NO: 5999 - DNA, 180 bp, Zea mays
  Peptide Sequence Number=SeqID_47778
atggagtttgttcaccactcctcaaatgtctatcaagaaccaaaggttcatcattatctattaagcttcggcttcgcgctcttaagcttcgtcgacttgctcttcagcttcgtcaatttgctcttcagcttcgtcatcctgaacatatttaagtatggcaagattggggatatctactag

SEQ ID NO: 6000 - DNA, 645 bp, Zea mays
  Peptide Sequence Number=SeqID_47779
atggtgaccagcgacaagcccgccacaagccacgggaaagctccgtcgggagagtccgacaacaagaagagggaggaatcacctccccgcgtcaagtcacaccgaagtggcgacaagaagaagaaaatgaagaaagtggtctactacgagaccgattcttcgtcgccttccacctccggttcctacacgccgtccgtcacttctaagcgccatgagcgcaagaagtttagtcagatccccttacgctatcctcgtatttccaaacacactcctttactttccgtcccactaggcaaaccaccggtttttgacggtgaagattattgtatgtggagtgataaaatgaggcaccatctaacctcactccacgctagcatttgggacattgttgagtttggtgagcaggaaccatctgtgggggatgaaggctatgactcggacgaggtagcccaaatctggcacttcaactcccatgccactactatactcatcgcctctctaagtcgagaggagtataataaggtgcaagggttgaagagtgccaaagagatttgggacgtgctaaagaccgcgcacgaaggagacgaggtgaccaagatcaccaaaagggaaacgatcaagggggagctcggtgtaacaccctga

SEQ ID NO: 6001 - DNA, 330 bp, Zea mays
  Peptide Sequence Number=SeqID_47780
atggccagaactctaaaagaattattattattattttgcattcagaaaatctttagctctaaagaagagaaaggaagggctctgaagttgaataatgaacacggtctagcccagaggtcgatcaactctccagaagagctgttttgtgaacaatacagacatttatgtgaacatggatccaagttttctctctctttcagcaatccctacagcggccaaatcattgcgtctctggggtgggcacaggatggagagtggagactctggggtgggcataggaaagagactccggcatcaagcaaacagttaattgatgagcagccgtactga

SEQ ID NO: 6002 - DNA, 1767 bp, Zea mays
  Peptide Sequence Number=SeqID_47781
atggacgtgcgccggctcggaggccgcatcgcggcggcgctgagggcgctcgccgcggggggctcgctgcccatcccggcgtggatcaccaacggcctggcgatgatctcgctcgtgctctcctcctgcgacctgctccgcctctgcagcgacagagaccgacgtctccggttcccgctcggtggccgcgagttcgttaccgtggtctgccagctggcctccatcgtgtacctcttcagcccttgcggtactggtatcccatctgcgaaccccgagacccccgcctgccgcgaccagggcggctccgccgaccaaacgcgcgccgccgccgccgacgcgccggaggcattgcatggcggggcggagggcgaggacgaggagatcgtcgccgctgtggtgtccggggcgctgccgtcgcaccacctcgagtcgcgcctcggagactgccgccgcgctgccaggctgcggcgggaggcgctacggcggatgacggggcggggcgttgaggggctcccgctcgacgggatggactaccaggccatcctgggacaatgctgcgagatgcccgttgggtacgtgcagatgccggtcggggtcgccgggccgctgctcctggatgggaaacagtaccatgttcccatggctaccaccgagggatgtctcgtggccagcgtcaaccgcggctgcagagccatcgctgcgtctgggggcgccttcagcgtgctgctccgggatgcaatgtctcgtgcgcctgtcgtcaagttgccatcgatcaagagggctgcggagctcaaggcgttcgtcgagacacacaccaatttcgagactctggctgctgtcttcaatagatccagcagatttgggaagcttcaaggcattcattgtgcactagcaggacggaacctttacatgaggttcacttgtagtactggagatgctatgggaatgaatatggtgtcaaaaggtgttgaggatgtcttgggctacttgcagaatgatttccccgacatggatctcatcagcctatctggtttggatgttattttatcagacaactgtttgataacaaaatatcagacaactaaacacaatgccctgtttggtgctgctccagctccaaaaaagttggtagagcaagtcattaggtgctccagaagaaaagttggtggagcaagtaactattgttcagacaagaaggctgcagccgtaaactggatagaaggtcgtgggaaatctgttgtttgtgaggccagagtcaaagggggagttgtgcagagcgttcttaagaccaccgtgcaaaaactcgtcgagcttaacatcgtaaagaatctcgctggatcagctgtggccggagctcttggaggtttcaatgcccatgcaagcaatatcgttaccgccctgttcattgctacggggcaggatcctgcccagaacgttgaaagctcacagtgcatcaccatgatggaggcagtgaatgacggaggcgatcttcacatctctgtgaccatgccttccattgaggtaggcactgtcgggggtggcacctgtcttgcttcacaggccgcatgcctgaacctgcttggcgtcaggggtccgaaccgtgactcgcctggggcaaatgctaggattcttgcaaccattgtcgccggcagcgtgctcgcaggcgagctctctctcctggcagcccttgccgctggccaactcgtgaagagccacatgaagtacaaccgatcgagcaaagacgtgccaggtgcttctgcttcttga

SEQ ID NO: 6003 - DNA, 147 bp, Zea mays
  Peptide Sequence Number=SeqID_47782
atgaaggtcaagaagcttatcaaggagaaaaatgagggtgctggaatttctgaatatatcgatataaataaagagcttcaagagatttggcgcatgagtgattttaaatataccctggtgtcactgactctatttaagtgcctttag

SEQ ID NO: 6004 - DNA, 422 bp, Zea mays
  Peptide Sequence Number=SeqID_47783
atggattctcaggcgccaacaaactcagatggtgaccaaggaaggtgggtaggtcccgcgcccggcccacgtgggaaggtgagcgggccgtccgcatccagcactggcgttggcgtccggcctgttctgttctggtgcccgtgccctgcccgggagacgtcgcgtcgaatctttggtgccgctggcatgggccgtgggccagccacgcgccgaggcggcccgcgcggccacgtgacggtgccgggagacctcccgtcccgcgcccgcagtctctcgcgccccgtcgcgtcaagtgaccgctgcctgttttcctccgttgtttcggcgatgaacccgttcggccgtcgcattcggaccaactgcacctgctctggcgtgtggtgcggaaaaactggctgtgcctgtgatggccaagtgctagg

SEQ ID NO: 6005 - DNA, 1305 bp, Zea mays
  Peptide Sequence Number=SeqID_47784
atgggccgtggcggctggacgggcggctcaatggctggacggaagacctcccgtgagctgcctcctaagactcctgctccctctaatcctatatgtgaggcagccgacggggttgctaaaggtagaacgaagcttccgcagcacagcgtcgtcgtcgaggagataaggtccagacagaggtctctagccgtgcagcggtgctgtcgttggtggcggccggcgacttggagctgtcgaggtaagcaagctggtgtggcggcgattggagctgtcgactggagcgcgcccgatccaccagagaccgtgaagctggcggccggcaagtggtgggagcggccagatgacacgggcatgcccggaatggacccaggcgggggcggcagctcgcgctacttccaccagctgctgcggccgcagcagcagcagccctcgccgctgtcgcccaattcccacgtcaagatggagcaccacaggatgtctccagacaagagccccgtcgtcggcgaggccgacgctggcgggagcggggccggcggcgaccagccgtcctcgtcggccatggtcccagtcgagggtgggggcagcggaacgggcacgcccacgcggcggccgcgcggccgcccggcgggctccaagaacaagcccaagccgcccatcatcgtgacgcgcgacagccccaacgcgctgcactcgcacgtgctggaggtggcggcgggcgccgacgtcgtggactgcgtcgcggagttcgcgcggcgccggggccgcggcgtgtgcgtgctcagcggcgggggcgccgtcgccaacgtggcgctcaggcagcccggcgcgtcgccccccgggagcatggtggccacgctgaggggccggctggagatcctctccctcaccggcacggtgctgccgccgcccgctccccccggcgccagcggcctcacggtgttcctctccggcgggcagggccaggtcgtcggcgggagcgtggtgggcccgctggtcgccgcgggccccgtcgtcctgatggccgcgtcgttcgccaacgccgtgtacgagcggctcccgctggagggggaggaggaggaggatgagacggcggcgggcgccgccggagccgaaccacaagatcaggtggcacagtcgtcggctggaccaccgggtcagcagccgacggcgtcccagtcctctggtgtgaccggaggcgatgccggcatgtcactctacaacctcgccgggaatgtaggggcataccagctaccgggagacagcttgggaggctggagtggcggcggagtccggccaccgttttag

SEQ ID NO: 6006 - DNA, 189 bp, Zea mays
  Peptide Sequence Number=SeqID_47785
atggccaccaacggcgatgaggatgaacgcggcgggctgggcgagcgcgtcttggatccgaacgcgaggggcagcctgcagcggggcctagagagacaaaggaaatggagctcgtggatggagcacgcggtgacggacgaatgcctgttcgagtggacagcccccgcaaggacgttggcggcgccgtga

SEQ ID NO: 6007 - DNA, 291 bp, Zea mays
  Peptide Sequence Number=SeqID_47786
atggctgcccagccaccacgccccactgacctggccacgcgcgtcgcattggcgagcgccgccacacccgctgctcctatcatgcccagccccacctcgtcgctcctatcatgcgccccgttgcgagcgcctataaagctttgcatcgctgccgtggccatcctgttgcgcgcgtgccgtttcccccagcagggcgtgcgagccgctcccacccgggcgtcccccggtcgaaccttccccaactgcgctgctgcaaggtgtagcttcgtaacaatgtcgtgtgcattctaa

SEQ ID NO: 6008 - DNA, 171 bp, Zea mays
  Peptide Sequence Number=SeqID_47787
atggccacggcagcgatgcaaagctttataggcgctcgcaacggggcgcacgataggagcgacgaggtggggctgggcagcgtcggcaaccagcagcgggtgtggcggcgctcgccaatgcgacgcgcgtggccagaaaaagaaaagaaaagcaaggaaaagagagggtaa

SEQ ID NO: 6009 - DNA, 1419 bp, Zea mays
  Peptide Sequence Number=SeqID_47788
atgaactcacgggcgctccagcttcagctccaggccgctgcggcggcggctccagtacatgccggagaagacggcgagccggaggccaccccgaaggctccgctgctgaagatccaaggccaaggcagtggccttgctcggtcgatggggacaacgaccggcaacgctaccaagtgccccgagtgccccaagtggttcccgtcgttgaaggccatgtgcgggcaccttaggcaacacccggatagggactacaggggggccacccgtccgacgccggcgacgatcagcgccgccgcggccgtgtccgtggctgtggctggagacaacgagccgaccaataaggttccgcggaaggagtctgttgtcgtggccatcaacatggtggccgctgctgcgacggcagtgcagaagcagccgtgggaggaggccgagacccagtggccagccaaggcgaagcgcgggcgcacgcacgtggcaccgatgcaggcgagcagcatcagcgaggaggaggaggctgcgatggaggaggaggctgcgatgatcctattggagatgagccgcacgtcgtccgaaacccagcggcagcagcagcctgtggaaccggtgcgttccccctacgccgtctctggccaccagatccagacgacgtcggttgtcgaggagcttatgcagcagcagactccggagaatgccctggagctcagcgctgagtcccagacgtcggtagccaaacatgtcacggacctggtggaagctgtccttatcatggttccggcgaacaaggccatcttccccagcctcaactctggcgccggcgacaagaagcccaagaagcgctgggtcaggaatcccgtgcataccgctgcatcgacgacgtcgccgccacctccggaaggcgccgtccgaacgccaccggcgggcaagatgcacacgtgcccgacctgtcccaagtcgttctccacccatcaagccctaggcggccacatggccagccatgtcaagaacaagaccaccagcgcgcggcacgacgaccacgccgcggcccacgctgtgatcaagcccgacgtcttggcgcatagcgaccagagcgccggcaacggcgacgtcgacatcatccccgccagctctggcgcgggcaagggcggcgcgttgcaggagcggcaggacgcccagccgccaccggcgcgagcgccgacgccgccgcagacctcggctccgcacaagtgcgacgagtgcacaaagtccttctcctccggccaggcgctcggcggccacaagcggaagcactggtccctggagaagcaacaggccagagcggcgctgtttgcgccagtgattgagcctgagcctgagttgcgggacttcgacctgaatgagctgcccaaggaggagcaagacgaggacaacaatcagccctag

SEQ ID NO: 6010 - DNA, 1365 bp, Zea mays
  Peptide Sequence Number=SeqID_47789
atggcggtgcaccacgcgctcgaggtgctcgacggccgctgcgacgacgacggccacccgcgcaggactgggactgcgtggacgtgcgcggcgcacatcatcacggcggtgatcggctccggggtgctgtccctggcctggagcgtggcgcagctgggctgggtggtcggcccggcctgcatgttctgcttcgcgctcgtcacctacgtctccgcggcgctgctcgccgactgctaccggcgcggtgaccccggcaacgggccacggaaccgctcctatatggacgccgtccgtgtctacctcggcaagaagcatacctgggcgtgcggctcactgcagtacgtgagcatgtacggctgcggcgtcgcctataccatcaccaccgccactagcataagggcgattctgaaggcgaactgctaccacgagcatggacacggcgcgcactgcgagtacggtggcagctactacatgctcatcttcggcggcgcccagctcctcctctccttcataccggaattccacgacatggcgtggctctccatcgtcgccgcggtcatgtcattctcgtactccttcatcggcattggcctcggcctcgcaacaaccattgctaacgggacgatcaaaggaagcataacaggtgttcggatgaggacgcctatgcagaaggtttggcgcgtctcgcaggccgtcggcgacatcgccttctcgtacccctactccttgatcctcctggaaatacaggacaccctgaagtcaccgccggccgagaacaagacgatgaagagggcatcgattggctcgatcctcgtcacgacgttcttctacctctgctgcggctgcttcggctacgccgccttcgggagcgactcgccgggcaacctcctcaccggcttcggcttctacgagccgtactggctcatcgacttcgccaacgcctgcatcatcctccacctgctgggcgggtaccagcccatcttccagttcgcggaccggttcttcgcggagcggttccccgacagcgggttcgtgaacgacttccacaccgtccgggtcgcgtgcctgccggcgtgccgggtgaacctgctgcgcgtgtgcttccgggcgctgtacgtggcgtccacgacggcggtggccgtggcgttcccctacttcaacgaggtgctggcgctgctgggcgcgctcaacttctggccgctggccatctacttccccgtggagatgtacttcgtccagcggaacgtgccccggtggtccacacgctgggtcgtcctgcagaccttcagcgtcgtctgcctgctcgtcagcaccttcgcgctcgtcggctccatcgaggggctaatcacccagaagctaggctag

SEQ ID NO: 6011 - DNA, 1518 bp, Zea mays
  Peptide Sequence Number=SeqID_47790
atgaactcccagctccagctccaggcctatgaggccgcgggggcggttcgagtccatcccgcagaagacggccagacggaggccaccccgcaggctccgctgcggaagatccaaggccaaggtacggctgacgatctgccgcggcgccaaggcagtggccttgctccgtcgatggggacaaccggcaacacctatgctaagtgccccgagtgccataagtggttcacgtcgttgaaggccatgttcgggcaccttaggaaacacccggataggggctacaagggggccacccgtcccacgccggcgacgatcagcgccgccgcggccgtggctggagacaacgagccgaccaagaaggtgccacggaaggagtctgttttcctggccctcaacatggcggacgaggagaagaagccgtgggaggaggccgggaccaagtggccggccaaggcgaagcgcaggcgcacgcccgtggcgccgatgcaggcgaccagctgcagcgaggaggagcaggaggaggctgcgactggtatggaggaggaggaggaggaggaggaggagaaggaggctgcgatgatcctattggagatgagccgcacgtcgtccgaaacccagcagcagcagcctgctcaggaaccggtgcatgcgcccgatgccgtctctggccaccagatccagacgtcggatgtcgaggagcttatgcttcagcaccagcctgcagggcaacaaattccggaagccgcgcagatcgttcaactggagaatgcactggagctgatcagcgctgagtcccaaacgccggcagccaaacaggtcacggagctggtgattaccacagaaactgtcctgacgatcatggttccggcgaacaaggccatcttcccgagcctcggctctggcgccggcgacaagaaggccaagaagcgccgggtcaattccgagcagacagtagcatcgatgtcgccgccgccgcctccagaatgcaccgtccgaacgccgccggcgaggcgcataccgtcgccggcgtcgggcaagaagcacacgtgcctgacctgcagcaagtcgttctccactcaccaatccctaggaggccacatggccagccacgtcaagaacaagaccaccagcgcgcggcacgacgacctcgccgcggcccaggctatggacaagcgcaacatattggcgcatcgcgaccagagcgccagcaacggagacgtcatcatccccgccagcgctggcgcgggcaagggcgcgttgcacgagcgccaggacgcccagccgccaccggcgcgagcgccgacgccgcagacctcggcgctgcagcacaagtgcgacgagtgcagccagaccttctcctccggccaggcgctcggcggccacaagcggaagcactggttcctggagaagcaacaggccagagcggcgctgcctgcgccagtgcttgagcctgagtcgcgggacttcgacctaaatgagctgcccaaggaggggcaagacgaggacaacaatcagccctag

SEQ ID NO: 6012 - DNA, 804 bp, Zea mays
  Peptide Sequence Number=SeqID_47791
atgcaggtggcgtgcaaccgcaccgcagtggcgcaccccttcggcttcgacgcatccagcatggaggcccaggcccacacgtcatgcccgtgccccctcctgaagcagcgggagagccctctcccacggcatgaagacgacgcgcccgtgttccattcctcgaacgactcgagcacgcacaacggccgcaccgcgaaccggaccgggaaaggggatatttcgaaagggatccttctccgtgaaggaagcgggccccgagccctcctactgatcaggggttcgaaggctggcccttcggaagggggttcgaaggctggcccctcggaagggttcgacagccaccccagagcacgcagagcgagggatgactctaggtacgtctgctacatggccgaggctcgggctacgctcccgaggcgcattcaatgcggggattgcctgacaccttatcctgacaacgcgtgcctcagtcggcaaggtcgaagaagctccgcctcgcccaaccttaggcctcggcctcaaaatgaggtctccgcctcagggctcgacctcaacctcggcctcggaaggaggtctccgccttgcccgaccctagggctcggcctcaacctcggcctcgggaggaggtctctgcctcgcccgaccctagggctcggtctcaacctcggcctcggaaggaggtctccgcctcgcccgaccctagggctcggcctcaacctcggcctcaggagaagtctccacctcgcccgaccttgggctcggaccgactgcgccacgagggatacatcattaccctacccctag

SEQ ID NO: 6013 - DNA, 330 bp, Zea mays
  Peptide Sequence Number=SeqID_47792
atggtggatgatgccttgtctagaagggtacatctgatggctatgacttcgccgggttgctacaacccttacccgtacctcaaggagtttggcaagacctcactatggacttcattgagaaattgcccaagtctgaagtttaaggtgctttatgggtatgatccaccatttgctgttgctcccatgatttcagtggatacttgtgtggatgtatcagttctgttagctgaaagggcaggattcactaatatgttgaaggaaagattggctgaggctcgcaaccggatgaagttgcaggctgataaattgcgttctgaaaggcagttctag

SEQ ID NO: 6014 - DNA, 393 bp, Zea mays
  Peptide Sequence Number=SeqID_47793
atggcggctcgacgtggcgcgcggcccggcctcgccccgcccggcgcgctcccctccccgcaccccggaggcgctcgggcccccggcgtggctcggcctcgcaccgccagcggcagccccggccccggccgcccctttcccccaccgcatcatggcctcggccggccggccatggcgcggcgacctgtggccccggcgtggcgccctccccgacgcggccccctgcccggcgcggcggcactggtgcagccccggcccccggaaagctcaccgcacccgcggctcgcggccatggcggctcggtcccgcccgccttggtgtgccccgcccctgcgcagcgcggccccggcccggcgtggcttcggctctcgcgaccgtggtgcccctgcgtag

SEQ ID NO: 6015 - DNA, 207 bp, Zea mays
  Peptide Sequence Number=SeqID_47794
atggttgggttagctggccgccggatcaccggggtgctggaccttttgtctcgcggctgcatcgtcatcgtcatcgtcatgcacggcgcatgtggggtgtcgtccgcccaggcccagcagggctgcaggggtggctttcagggcccctgttgggctgcaccggcagagatcccctctgccccgcctaccgccggcagcgacaaatag

SEQ ID NO: 6016 - DNA, 1029 bp, Zea mays
  Peptide Sequence Number=SeqID_47795
atggcgcgatgccgggggaccgccgagagcctctgccaggggcggctcgacctcgacgacgacaagttcggcgcaatgtgcaccaccgcgttcggctgcctccaggagtggccggacctgggcgccatgtgcggcgcgaacctcggcgtgcctgccatggccggcaacggcaacgagtcctcttgcagcggcagcggcggctccaggaagaggaaaccggacgcgtacgacggcctcgatgccacgggtggtgcaaacgacatgagcaagagacccagagggaagcggctgtctggcatctctgagatcgtggcgccagggaaagggaagcaggagcggccaaaggcaggcacaaagaaaaaggccgaggctgcatcggcggcggcggcggctgctgctgccggccataagaccgactacatccacgtccgggcccgccgcggccaggccacggacagccacagcctcgccgagcgggtgaggagggagaggatcagcgagcggatgcggtacctgcaggagctggtgcccgggtgcagcaaggtcacgggcaaggccggcatgcttgacgagatcatcaactacgtgcagtccctgcagaagcaagtcgagttcctgtccatgaagatcgccgcttccaacccggtggtgagcttcgacatcgtcgaggacctcttcggccggcagctgaagcagtcacgacgcagcccggcggcagccctgcccgcgatggctctgccggccggccagctggagccgtcctgccttcagatgagccacatgccgcagatgcatccatctgcagcggcaaactccaccggatttgggctggacatggtcgtcaacaacccgtacgcgcccgccggcgcgagctgccctgtgtcggctgccgcgtcggtatcggtggcggccggaccgtcgacgaccgagccgtgcctcaacgtgaatggaactgctgcctgggacattggctcccggaatttgttcagcggatttgttgcacagtttcagtcagtagaaagtgagtag

SEQ ID NO: 6017 - DNA, 426 bp, Zea mays
  Peptide Sequence Number=SeqID_47796
atgggcaagaacaacaaacgcaagcgcgagccgactcctccatcagaggactttggcgactcggaatactcagaggaggagttctcctctgagttcgaggggtctccggctcccgtctctcctccagcgtcgtccgatgactcggatgactctcagaggattgccgcggaggtctggacttacatccgggccgtcgagcgctctgggctcgagggctcggatgagtcagagtactcctcggatgaggaggactcgcccgaggaggacgttgaaggtgacgacgacgacgacggaggcgacggcagcgatgacggtgatggcggcagtaggggcggcaacggcggcagcaggggcgacgacagtggcagcagcaggggcagcaacggcggcggcagcagcaaaggcagcaacagggccagtggctag

SEQ ID NO: 6018 - DNA, 354 bp, Zea mays
  Peptide Sequence Number=SeqID_47797
atgtaccaaacggtgcagcagcagttgatgtgcaacccgaaggtactgccgctcgaggaggccatgcggtcctttggaacccaagggtggaagaaagacggagtgcagattcctgctagcgacaaagtttacgagtatatcctcttccggggaactgatatcaagtatttgcaagttaagtcattaccaccacagccgccaccaccacaagcagcttccctgcacaatgatcctaccataatccagttttaccagacttcagctcctaggcagttcaatatgggcttcagaggccaaccttccagagtaaccttcctctctaccaaccagggaatactctgtggggctctttag

SEQ ID NO: 6019 - DNA, 645 bp, Zea mays
  Peptide Sequence Number=SeqID_47798
atgaatattgaaccactaagacaggcatcgatatcactatatgctggacatatcactaccggaatccgagactttgccgagtgttggcttctttgccgagtgccttttgtcgggcactcggcaaagaaagctttgccgagtgccgtactcggtaacgttaggcactcggcaaaacgtgctttgccgagcgctgaacactcggcaaagaacggcactcggcaaagaaagcaaataaacggctctcccgttcttccttctccttctttctctccactcctctctctgttacgcttacaccgcgtcgctcgctctccgccgccgcctccccgtgccagcccgctcgccgcgccgccgccccgccgcgccgccgcgtgccccgcgctctccgcgcccgcgctctccaagcccgcccgctcgccgcgccgccgcgacgcgcgctcgctcgcggccgccagccccccgcgccgccgctgtccgcctgctcgccgctgtccgccgctgtccgcccgctcgccgctgtccccccgcgcccgctcgccgctgtccgccgctgtccgcccgctcgccgcgccgccgctctccaagccgtccgcccgctcgccgctgtccgcgccttcgtcctcgcctccgccgtcctcgcctccg

SEQ ID NO: 6020 - DNA, 465 bp, Zea mays
  Peptide Sequence Number=SeqID_47799
atggtgtactgtagaagggttcacctgccagtaggtatcaccgtgctagaaaacaaccgtctaaaaaatagctatatcatctcaaagggctgggaagtaagtggagttaccaagaacccaggcatcgctttctccacgttgagaaaaagcaaccgccttctctgcgttcgactaagtgacatggtacaaggtgaaggaaacgacgacaatgacagtgctaccgctcaccccactatgtctctcctcgcttcttcgataataactcggttacattatgcagccagggttcatggtgcacgcaacgcgactgtccagcttcaggggcaccgcttcgccggcctcttcgggttgcctccgtcggtgcccatcgccaactgcgccgagtttgtccactcccaggtggcttcattggtgtcggacctagcgtccgcgattaaggatgtcaatgccacgacgacaaggtga

SEQ ID NO: 6021 - DNA, 390 bp, Zea mays
  Peptide Sequence Number=SeqID_47800
atgaccgtggataattatctattggatatgggtatggtggaatttggtattcgcgagtacggttatagatataataaggtatccacggataattttttcgcgggtatggatatccagtatccatacccgttacccaatggatatctgacattgttgaatgctaaaattgtagtgggcgggcgggtaacgggtatccaccgaatagcggatacccggtgggtacggatggacagcgtggtcctctcgtggctcaacgacaccatcaccgtcgagatacaggacatcgtccgcgaccaggtggacaccgctcgcaaggcgtggggctcgggcgctccacctcgatgctcagttccacctgttcgcttaggggcatctctcgtgggagagtag

SEQ ID NO: 6022 - DNA, 519 bp, Zea mays
  Peptide Sequence Number=SeqID_47801
atgaggagcaagccggccggcgatgccgccgagggggaggagtgggagttcatcagtggcaagagacaccggtatgcgggtcaaggcggacgaggagcgcagtggaacgacggtcggatctcactgtcactcaagcggcgtcgtcttcctcccgccgtatacagtcgcgccgcaccaacccccccacgcgagaggcaccccggtgacaaggccccacgaggccacgacgaacaggttaacgcaccggagattcggatggggacgaggaagatggtcaccggtggacttgcggcggagcgtgaatctctttggcgagttgtcgaggtgcggtccttcacctcccgcccagcaccccgccgtcgagcgcgaaggacgagaatggcaacccgaagactccctgtcgactctcccttcacagcaggaggctccttcaactccacgacgtctagttcatggctcctcccgtcggttattagcggaataggagaagagaagcgcactgctttatgggcgagataa

SEQ ID NO: 6023 - DNA, 171 bp, Zea mays
  Peptide Sequence Number=SeqID_47802
atgaggagcaagccggccggcgatgccgccgagggggaggaatgggagtccatcagtggcaagagacaccgcaccccgccgtcgagcgaaaaggacgagaatggcaacccgaagactccctgtcgactctcccttcacagcaggaggctccttcaactccacgacgtctag

SEQ ID NO: 6024 - DNA, 1692 bp, Zea mays
  Peptide Sequence Number=SeqID_47803
atgaatgagaaggatagctgcctggagtacgtcctccaccagattagagactactcctgcagtcctgctataggcccacactgccctgatcccgccggagtgcccgcacgcgcgcccttgcctgggccggccgccggcgaggggtctgggcggtcggtcgacgtgaccccccccgcaggcgcgctgtctcttcgtcgccctgctcttttcgaccggcctcgcctcgctgtccgcgagtggcgccgtgtcggcggcacacgccggcggcggtgcgggaacaaggcgagggcggcgcgccttgtcgccgtgcggactgagcatgacttgagccttgagaggggctgtattcttgtgtataggttctctttctatcggtcaactgttgctgattcggacggaatgttggaggatcaatcttgcctgatatcaaggtcgctgccgggttcctgtgagcaggaatccagactagcttacatgacttaccacctacttgagatcacgaggagtaagcgcccgcctgggaccctgtcgattgagcacgacgtcgtggcagcattgactaaaaggacaaagtcctctgagcaccaaaacagcgaggcgctggattgtcaaggaagtaatggtcagggcgactcagattcaagcaccctgataagttccattggccgggacaactcgatcaactgtcttgctcgttgttctcgttctgactatggttctatcgcatcactgaaccggagcttccgatcgcttgtgcgcagtggcgaactgtacaaggagcgtcggcagcaggggatttcagaacactgggtctacttctcttgcaacgtgcaggagtgggaggcgtatgacccctaccgttcacggtggatgacgctcccaaggatgccccgcaacgaatgtttcatgcactctgacaaggagtcgcttgccgtgggcaccgagcttctggtgtttggaaaggagatcctctcgcatattatcctgagctatagcatcctgacacattcatggtcgcggggcgttgaaatgaacgcccctagatgtttgtttggatcagctagttttggagagaaagcaattatagccggaggcatggatgctgatggaagggtgcttcgctccgtcgagctgtataactcggaaaccaagaggtggacaacacttccaagcatgaataaggctaggcggaagtgctctggtgtcttcatggatggcaagttctatgtgatcggtggaatggccagtaacacagaagtgcttacttgtggagaagagtacgacctagatagaggtacctggcgggtgatagagaacatgtccgaggggctcaatggtgcaagcggcgctcctccactcgtcgccgttgtcgaaaacgagctatatgcagcgcagtacgccggaaagctagtgaggaagtacaataaaagggacaactcgtggacgacgctgggggagttaccggagcggccagaagccgtggatggctggggcattgcgttccggggctgcggagagcggctgttggtcatcggtggaccgagagtgctgggcggcgggatgatcgagctccattcctggattccaagcgaggggccactgcagtggaacatgatcggaagcaagccctcggattttactcaaggttcgtccaatagagctagtcggttccgtgtactcgttaatagctag

SEQ ID NO: 6025 - DNA, 1131 bp, Zea mays
  Peptide Sequence Number=SeqID_47804
atgacgatgccaaacgacggaggtagtggtagtggcaagagcatgggggccagggctgtcacagcgagcgagcacggcacacgtgggaatgtgacgtatgtcacgaaggacaaggctcatggcgcgcgatcgaaggccacgaagggccaactggccaaggcagggcccgtggaggcaggtatagtgtcaggtgggaggggcagcacaaccagtgtgttgctggtacaagtgggggatgaaagaacagggcgcctgggtgtggtagctggcgttcgcctggggttgctaggcggccggagcggcggctatgccaacgatgaaggtgggggcgaaccaagccaggaggacacccgtgtgcacgtcgggacagcctggggcggtggctacggccagggccatggagggcaccggaagcagaacaacggagagctggacaagggagggggggggggcggggttggacacagccccgacgaccaggggaggggcgaccgccactggcgaagaagaggaggcgtcaggtgggccggagctggcgtcgagcgacactcaccgtgggacgagcatgaagtgtggctcctgccggggaagaggccgagcaggggccgcgcgtcggcggggaggccaggagtggcggcggggtatgaggaaggagagaatagagagaaaacttgctctgagaagctcacaaaggcccttttctcctttgcgactcgactagctcctgttatcatatttgtggacgaggttgacagcttacttggtgcaagaggtggtgcatttgagcatgaagcaacaagaaggatgcgcaatgaattcatggcagcttgggatggtctcaggtccaaagagaaccaacggatccttattcttggtgcaacaaatcgtccatttgatctggatgatgctgtgatacggcgtttacctagacggatatatgttgaccttccggatgcgcagaaccgaatgaaaattctaaagattttacttgcgaaggaaaaactagaatctgattttaagttcgatgagcttgcaaatgccacagaaggctattcagggagcgacctaaagaacctatgtgtagctgcagcatataggccagtccatgaactactagaagaagagaaaaag

SEQ ID NO: 6026 - DNA, 195 bp, Zea mays
  Peptide Sequence Number=SeqID_47805
atggttgtgtcatccatggtagttgccagcctcaaagattggtctgaaggtaaggtccaagatgagatgtgctggttagatcaagagttctacaggagcattgagggaacctatgcagaacttgttgcgggtgctccctatcgtctaccgatacatgacgagcagcagctcaacagtgtgcggcaatacaagtag

SEQ ID NO: 6027 - DNA, 729 bp, Zea mays
  Peptide Sequence Number=SeqID_47806
atgactacagcggagaggacgattgctcctcaccgacttcccaccacgcacctcgcctacgcccgccaggtgttcgacagggtgagcctgtctaccctagacgctccccatgttccattacaacaatgggaccttcacctgggcatggcagcacgtgacagcgtgatacacccagcccaggaggaggtcatcgagtcaattatagatgggatgtggaacgtcgtggaggtcgtggctgtcgtggctgatgcctgcgtgcggtgcctgttcaggcagaacgggtatgagaactacccatttctggagatggatagggagcacgacaacatcgtcaactgcaccacccctaacttcactagttctaattgtagaggggatgaacttatgaaagagatgaacatcatgaaatcagtgctggtgaaactggtggaatatgaatatttgagaagaatggtgctggcttctgtatcagggcatggggcctctatcccacaattatcttctcagagcagcgcacctcagtactcctcttatggtggatatcaaggtacaagcaaaaagattgaaattccaaatggaagggttggtgttatcattggaaaagtcggggaaactattaggtatatccaacttcaatcaggagcaaagattcaagtgacaagagaccatgaagctaaacctggtgcattgacaatgcaagttgagctttctggcaacctgagctgttga

SEQ ID NO: 6028 - DNA, 625 bp, Zea mays
  Peptide Sequence Number=SeqID_47807
aactgaaattgtcggggtcgatgtcaacgacaacgacagtgctgaagtgctgatgctggctcctctgctcatgattcatcagaacggagcagagttcgactgggctctttcccgtatgaacggggcccatatcgccgccgcctcgccggaggccggcgggtcgtcctcgtcggcctcgtcttccggcgtctcggcgtccgggcgctcctggctgctcaagggggatcttgcgctgcctctcgggatgtccttcgcggcggtgcttgcccaggttgtaaatagatgcgctggttctgaagggggattacgacctgatgtcctctcaaaggccgtcggccccatgggtcctcacccacccgacacagaccatgtcaccgactgcccccacccccgcgcttgtccgctcgccagtcgacttgacgcgagcgcctccccatcgtcccctgtccatcttcttcagtctgcgaagttgacgggcgccaagagccggtctcctggatcccaactggcccggggtttgctctggggagacacaccggtcaccgctcagagtcagagacgacttgatcgaaggagtgccagacaacaggtcgccatcagagctgaagaaatctgtcctggttaa

SEQ ID NO: 6029 - DNA, 2484 bp, Zea mays
  Peptide Sequence Number=SeqID_47808
atggatgtcctgacaccaattctggatgcagatatttatggtgacagatttcatagcttcatgagtaactttgagaaagcttttggtagtacattgagaaccattcaccttatcaatgaaacgcctgtttttgagcaagatgtggagcaatgttcttacaaagatgatgattctgtacctcaaatcaagttgggtggtgctgattcattacctgaaataaaggttggtggtgctgattcacaaagtcagatacatgatgtccagactgacatgccctcgagttcaatgaatagccagattgttcttcatacaggcatcaatgatcagttggttcatcttacttgtagcaggtctaatccagaaattggtcagcacatccttagtgtatttgagagatcgctgaatgagcaagctcgttcaaatgagctcaaagagcttgaaataggacttactatgagaaaattgcaattgagtcgatctcagttagctctgagctctgaatcacaaatgttagagaagatcaaagttcatatgggatttcagaaagcctcattcaaagagaagaaattcaagactgaaatggaggatacaaagcatgcagaacttttcaggaaacttatagatatgctccttactgcagtggtactcatgtctgtctgttttggatatggaacatatatttattcgtaccagcggataactgctgctacttcagcttgtgcagcaatttcaaggcgttctgcaatgactggaccaaacatgccagtaacattcaatgttatgatattgggagttctttgtggttattttggaagctgctgtgttgacacactgggcggggatggaaatgaccaaggctggtcatttgccatattgggcccgccgatacacattttacattttggtgtcacttattctgccatgcttggctggttgcagttcttctcttcagtgggaatccactctacattgaaagttttgcttgcatatagtccttcagatgcatatattttgtcgaaatgcaagtttgtcgaggcacgagaggatgaggatgtcatggaagctaggagcctggaggcggcggggacccggacagacagaactgaaggagacaggcggcgaagcgagcgcatcacatctctctgcgctatggtctcctcccccgccgcgcccgcccccaacgacgtcacgctacttaccgttctctccgcctgcgccgactccccatcctcgccgctagccagccccctcgccctcaccctccacgcccgcgcgctcaagctattcccctcccacctcctcctctccacctgcctcgcgcggttctacctcgcgtcccgcctcccgcatctggcgctccagctgttcgactcaatgccggtccgctccgtcgtcacctacaacaccatgatctccgggcttatgcgcaacggcctcgtcgacgccgcgttcgaggtgttcgacgggatgcccggcccggacaaggtctcatggacggcgctcatcgacgggttcgtcaagaacgggcgccacgacgaggccatcgactgcttccgcgccatgctgctggacggcgtcgagacggactacatcacgttggtcgccgtcgtgtctgcgtgcgcggaggtaggcgcgctcgggctcgggatgtgggtgcaccggctcgtgctcaggcagcggctggagcgcaatgtccgcgtcgccaactcgctgatcgacatgtatgcgcggtgcggacaggtgaacctcgcggcgcaggtgttccgctccattaggaagcggacggtggtctcttggaactcgatgatcgtcgggttcgcagccaatggccggtgcacagacgcgatcgagctcttcgaggagatgcggaggcaggggttcaagccggacgcggtgacgctcaccggcgtcctcacggcttgcagccacgccggtctcacggagcacggcctgaggtactacgacctcatgacgacagagtacggtgtcgccgcgcggatggagcactacgggtgcgtggtcgacctgctcggccgggccgggcgcctggacgaggcgatgcacgtggtggagacgatgccgatgcggcccaacgaagtggtgctcggggcactcctcgcaggctgccggacgcacgggaacctggacatggccgagcagatgatgcagcacctcttcgagctggatccccagggcgacgccaactacgtgctgctttccaacatctacgcagccgtcgggaagtgggacggcgcggggaaggtccgaagcctgatgaaagcgcgcggggtgaagaaacggccggggcacagcaccgtggagatcgacggcgacgtgcacgagttcgtgtcgggagatcagtcccatccgctggccggggagatcggacagatgcttgggctgctctggcacgagatgacgaggctgcaatctgggttcagcgttttgcctttgcctatggatttaggaatggtgatggaataa

SEQ ID NO: 6030 - DNA, 1416 bp, Zea mays
  Peptide Sequence Number=SeqID_47809
atggggcatcatatagtgatagcgacctcgacgcacggtgacaatgcgatcaacgatgctaccgctctgacctccaaggctccaacttatccccaattcgcggccttcgtccttcgacgaccagtcgcttcgccgttgtggtggaaccccgagacggaggctaaccggcgagaccagcggcccgtcggctccagttcaaatgagctgcccggtcgtcctcttgccccgttccgccgctcgcgacgcgacgcgatacgccgtgacaagaacacgcgcgcaaggcgccgacccggccgccgcattcggtctcgctattccccaaagcagcgaccacagccgcgccgagtcaagagcgcgcgcgcacggcgcctccaggtcgcggctccgctccgctcttgcacacccagaaggcaaacgcaaaccatatcctccctcctcgtcaaaccccactcgcaaagcgcggacgcgttccgcctcgcgcctgtgcccctccctccttctgctctgctctgccctgctccccacgcaagggccaccgcgcgccggagcccatcccatcccatggaggcgccgcagcggcccaggccgcgccagcggccgcagctcgcgcgcatcaacgcgatgaagcactcctcgtaccccgccgaggacgaaggcgacgacgacctcgcgccggtcgacctcggctccgagttcgcgtcgcagaccagcttccgcatccgccgcgggggcgcggaggtcgccgacctcttccggaagctcggcctcaagggccccgaggacttcaccatccccccggccatctacgccgccggcatggcgcacatccccaacccttcccgcagccgccgccagtcgctgcaggcaccgctgctgccggctgcgggcgctgacgggatggcaccagcaccacagggacctccagatgtttctgcacgggacgctgcactcgcagcgaggctggatgcagccgtccaaggtgaagagcaagctgtgttggccgccaaagtagtccaaccggaaccggaggtcgctcaagtttctgcacgatcatacaaggggtctggaaccgaatcgagcaacagagcagtccaattggagacaggggaatcttctagacgagtgattgctgccgcggtgaaggaggggactgcacacggagtgaagggaaagggcgatgtggtcaaggtggatcagctacgagtggaaagaacaaaagcggtggttgtcgaggcgccaagagagactaccgctgccgtggttcaagctgtagcggagtccccttctcagagcaccgagtatttgatctcgccgtcgccaaataggcggtttaagagaactatcacgtcttggaccaagggacaccatctcggcagtggatcttttggttctgtgtacgaggcgatcagcgagtaa

SEQ ID NO: 6031 - DNA, 180 bp, Zea mays
  Peptide Sequence Number=SeqID_47810
atggagaagatgtcaattttgagccaggcaaaatctagcaagggaactgtctactggatggcccctgaggttgctaaggctaagccacatggacctccagcggacatatggagtcttggctgcacagttttggagatgctgacaggcgaagtgccgtatcctgatatggaatggatttaa

SEQ ID NO: 6032 - DNA, 408 bp, Zea mays
  Peptide Sequence Number=SeqID_47811
atgtggtggtggtggcggtgggggttggacttcttggtgttgctggtacatatggttttgctggtggggatggtaatgtttgttgtggaattgatgctggtgatattatcgggggtggtaggtgtgggcgacaactctttggttgtcagccggttgatttctggccatcctatctttggaggccttggttttagggcaatccctggtgggatgtgtcgagtcttcgccatggaaaagatagtaaaaccttcgctgttgcgggactcggccattgcctctgcctctagtgttgctgttgcggccctgttgcgtggggtactcatggcgacgagcagtgtctccagtctgctactgattggcgatggtgttcacttgggactggttacggtttggccgaccaaagtctga

SEQ ID NO: 6033 - DNA, 744 bp, Zea mays
  Peptide Sequence Number=SeqID_47812
atgaacaccgtattgttcatgctggattgtaatcactctctcgcatcctcaccttcaagcaacctgaagaggtccttgaaggcgcggcgcgatgccagtgcggtccttgaaggtggcagcgcccgtgagcagcgcgacctcatcgacctcgctccagagcttctggacggcgcccgcactaccacgcccccgccggacgatggggccgaggcggcggcgaccgaggccatggcgagcgtggcagaatccgggaaggagcggttcggcttgcggtcgctcttgcgcaagggcgcggcgcgctcgcgacgggagctagggttagggttcggggagcggccgcgggacttggagcgggaggtgcgtttcttggagcatggggtggaggcacgcggcagcagcagaggcggagccgacttcgtccatggcgtgcggggaaggccgcttggagggcatcggcggtgtgggggcgagggctcagcaggcgggcgattcaaatttcgatgtgtatcgagaaatcggggagcagatggggagccgaggcagaaggggaaggcgagtccagtgggcagcggcgcaggctgcagcactccagagctgatattgaggcgaggggacgcctgcggcggtgatgccacgatccgcgttgccgacgagggcggaagcgcaagggtctgggcatccaactcctacctctacctcctcgccaagggcttgaacatcgtctaccagttccgcaaggcgtag

SEQ ID NO: 6034 - DNA, 138 bp, Zea mays
  Peptide Sequence Number=SeqID_47813
atgtcggtaattaaagatgacatggtttatgtggttgacattgcaccagatatcttggaagcagacaattcctcataccaccgcaggacatctagtgctatcacagtttcactcttcgcgccgacactcagggtctga

SEQ ID NO: 6035 - DNA, 222 bp, Zea mays
  Peptide Sequence Number=SeqID_47814
atggaggaacaaatatcaacaggtgttgctacgttcttcaccaccacaccttcggagcatgcccagcccacggaatgcgccacaagcagtacagcaaccgcgccgagtcctggacatgtcaacggagtctgttgccatgctcgatggacctctgccggcgcagccgcccaggtggttgctgcggctgcgctagctcggcaagacggcaatggagataaatga

SEQ ID NO: 6036 - DNA, 2421 bp, Zea mays
  Peptide Sequence Number=SeqID_47815
atgggggacgccgccaccgccgcagcggcggcggcagcgtcgcccgcttgcgccgcgcggaagcggcggcgcggcgacgacagcgcggggctgaggcgggtggcggagatcgtgatggtcctggccgcggccggggaggtacgcggcgggaggcagcccacggccgcggagcgcgcgctggcggccgaggcgcgggagactctggccaccgccgtcgccgagagggccgtgcggcccaaggatctgttcccgggggaagcggtgcgcgcggtcgtcgaggatctcgggctcaaccgctccaaggacccagctgccatggggtttcgcccgcccaaggcctccatcgccgataggctcatgcttactaagcgcaaggttttgccaactctctcgtttgcacccattcccgcacagtttactagccattgtggtggctttgaaattcttaactggggtgataaatgtgatatggaagaagtcaaggaagctccagtggttagcgcacctcaaacagtcgtctcaagtggaacgtctgagttccatggtttgaatggggctaccaagtttggtgttggagttcctaggaacccaccagttccatctttagctgctactggcccattaacctctacatccccagttaccttgaagccaccaggatcatctcctgtaaaaccagttgccaactcatcagttgttcctctagtcaatactggtccatcaaaccttaaattggacaaaaatgttagtggtcctctgaatttagcattcagtggagcaacggtcgtccactcaaacaagtcaactttagacacatctgctaggcccgatgtaaatgctgtacagagttccaatcagacggtgaaaaaccatgacacaaaaccagtggcagttcaagccgcgacaggtaaccctgttatgggtcatcgtgctacaccaggcgtggcatttgctccaccaaaacctactttcatcaatcacaatgagatagcaaagaatgttctacaatttcttcaccaacctgcaaaccatcctagctggactccaccatcaactgagtacatgcattctcgtttgtgctgtcaaatatgcaaagttgatatcattggtacagacaatttacttgtttgtgatgcttgcgagaggggagtacacttgaaatgccttcatcagtatggcaataagggcgtccccaaagctgagtggcattgttctgcatgcctgactcagagtaagggaaaacccttgccaccaaaatatggcaaggttacaaggactgtagttgcatcaaagactgctccacctggtggtggagcacagctttctttgcaggaatcagcagaaaacatggctgcaaaggaaaatcaccaaaagttggctgcaaatggaaatcttatgaagccattctccattcatggtggcagcacagtacccgacagtaatgtattggcactgagtgctgtcatggctggttcacaatcacaattagtttctaccttgagaccatcaatagtcgttaaagctgaaacaccctctaatggaaaggaaggaactgggcaaccatgcaatactgcaatacaacctaatgtgcgatcatcttctcttaacaacagattgagaagtgattcctgtttgaaccctgctgattcagcaaatgaaatcatgcatggtaagcatgctgcagaaatttctggtgttgaagcaaaggtcaagtctgaagcaaactctgaggttgttgtgagtacagatgaggaattggttcatagcagtggaacatcaatcgaaactgaacgagccaaggttgtcgctattgaagaaaacagggcacaatcaacctttgagacagataaaatgaaagttggggaaacaactatcaacacaggaacaacagatcaatgcatcaatactgaagaaaagctccccagtttagcaacttctgaggcacacacaatcactgacgtgaagatgactagcaatacaggaataccagtacagcaacacaacattgctactattgaagagaagacccagattgatgcagtgtctgatccacatccacatgcaatccaagatattcaagatatggaaatgggcaccaacaatggaccacccatagatcaaacaagcagtcttgttgaagaaaacccccctggacaatcctcttcaattgctgatgcgtgtgtcactgctaatactggaataccaacagatcaaacacagcatccaaatgagtcaactgaaaatgcagtaaagaaatctcccaacagagaactatataaagaaaaaccgggctgcaacataacctcagatattacccaaaaagtaacttcaaatggcatcatgtgccctgaggacaaaactttatgtgttcatgaagataaagcagtgggttgtgacacagaagcaaaagaagaaaactaa

SEQ ID NO: 6037 - DNA, 1479 bp, Zea mays
  Peptide Sequence Number=SeqID_47816
atggagttcttcccgggtgcgtacaagaaggcaacagcggcgctcgacgaggcggcgagggcgcggctacggggcccgttcatcagcgacaccgtcgcgccatcgccggcgccgtccggcggcgctgcggacgccgacgacgatctgatggattcggtcgacgagttctacaacggatacggcgagcacggcacggacggcggcgccgtcgccaaggatgccgtggcgtcccgggctacggagtggaaggaagctttgcgattgacgctggcggatgcggcggccgacgcggcagccgtacggatccgcgccgaggcggagcgcattgtccgagacgccgggccagccgccgttggcggcggcggcgggattaggaagcaccttgtggagcggctccgtgcgaggggttacgacgcccgtctctgcagatcgtcgtggggaagaaccagcagcatcgccgcgccgggcacgtacgagtacgtggacgtgacagtgggctcgccgccgccgctgccgtcagctcgctacatcgtggaggtaaacgtggcagccgaattcgaggtcgcgaggccgagcgccgagtaccaggacctcctctcctccctgccgccagtgctcgtgtcgagtccaccagctctgaaggaactcgccgcggcaatgtgcgccgcagcggcggagtccatccgcggcgcgggcatgcacgtgccgccgtggaggcgcgcgtcgtacgtgcaggccaaatggtccgcgcggttcgagagaacggaagccgcggcaccggtggcggcggcgacggggccacgcgctgaaggaggaccgagggcagcagcgcgtgcccggcggcctggcgtggggaagaattgcggaatggagatgggacgccggcagggggtcatggggcgggaggcactgggtaatgatggcccctcccgtgacgtggtcggtccgagccctgggttgggcgaggcggaggctcctccgaggtcgaggtcgagtctgtcttccgaggtcgaggtcgagtccgagcccttgggtcgggcgagacggagaccgtcggctgaggccgaggtcgagtccgagccctgggtcgggcgaggcggagttcggcgtcttccgaggccgagcccgagtccgagccctaggtcgggcgaggcagagttcgtcgtgttccggggccgagcccgagttcgagccctgggtcgggcgaggcggagttcgtcgtcttcggcggccgagcccgagtccgagccctcggtcgggcgaggcggagttcgtcgtcttctggggccgagcccaagtccgagccctgggtcgggcgaggcggagtttcttatggcgtctgaggccgggcttggccgctgtcagcctcactctgtcgagtggcacaacagtcggagcggcgcaggcggcgctgtcctcttgtcaggccggtcagtggagcggcgaagtgactgcagtcacttcggctctgttgactga

SEQ ID NO: 6038 - DNA, 300 bp, Zea mays
  Peptide Sequence Number=SeqID_47817
atggcgtggtcggtccgagcccgaggtcgggcgaggcggagactcctcctgaggccgaggttggggtcgagcgaggacgcgattccgcctgaggtcgaggttgaggccgggccctggggtcgggcgaggcggagtccatcttccgaggtcgaggtcgaggccgagccctggggtcgggcgaggcagagactatctttcgaggccgaggcgggggccgagccttggggtcgggtgaggtggagacttctcctgaggccgaggcccagggtcgggcgaggcggagcttcctgtggcgcctga

SEQ ID NO: 6039 - DNA, 966 bp, Zea mays
  Peptide Sequence Number=SeqID_47818
atgtacccgagaaaggccggtccccttgcaaaaaactgcgacaaagcctccaagcgagtaccagcactccctttgaggctcgggggctactgtcgggaaaacagcgccgcctgccccgctccgactgttgtgccaccctccagagtgaggctgacagcagctgagtccaacctcaggcgccacaggaagctccgcctcgcccgaccctgggcctcggcctcaggagaagtctccgcctcgcccgaccctagggctcgacccccgcctcggcctcggaagatagtctctgcctcgcccgaccccagggctcggcctcgacctcgacctcggaagatggactccgcctcgcccgaccccagggccccaacctcgaccttgggcggaatcgcgtcctcgcccgaccccagcctcagcctcaggaggagtctccgcctcgcccgacctcgggctcggaccgaccacgccacaggggggatcatcattaccctacccctagctagctcaggctacggggaacaagaccggcgtcccatctggctcgccccgggacccccggggtcgaaacgccgacaagttacataccgacagttcggcgaggcccaccgcctgacagcgtctttgtccctctgcgatttgtgctgccgaaagggccactcggtcaccggccttggtttggcgtgttccggcgcggtacctcgcttcagaaccgacaaggcccgccgcgccgccccgccccgtcccgtcccgtccgactctgttccgttcggctgctggctggacagttgctccacagccatccagccgatcctacaacattcttctcggacagaggacgcagctgcaggcctgcagccgtggcagcaccgtccgagagtgcagccaggggtgcctgcccatgccctcgccgcacctagcccgtctccgaaaattccagatcgccaggcttgcacgcggcacgccgtatag

SEQ ID NO: 6040 - DNA, 1359 bp, Zea mays
  Peptide Sequence Number=SeqID_47819
atggatccgctgtgccataccgaaggcatcgccctctctttctcaaagttcggagtcgaggccgccgcccagaccgcctccccttccccgcctccggtgcccaaggccagggcttggattgtttgtggtagcctcggcctttggagttcattcagatcggtgattcctgcgtcggccaacagttttgaggtggtaatggcggaccaggctaaccaacccactgtccttcataagctaggtggccagttccacctgagctccagcttctctgaaggtgtacgggcccgtaacatctgcccttctttctcaccttatgaaaggagatttgccacgaggaactacatgacccagagcctttggggcccttcaatgtctgttagcggtggcatcaatgttccagtgatgccgactccgctttttgccaatgctccagccgagaaaggtggcaaaaacttcatgattgatttcatgatgggcggtgtttcagctgctgtttcgaagactgcagctgctcccattgaacgagtgaagctgcttattcagaatcaggatgagatgatcaagtctggtaggctatcagagccgtacaagggtattgctgattgcttcaaacgtaccatcaaggatgagggtttctcttccttgtggaggggtaacactgctaatgttattcgttacttccctactcaggctttgaactttgcgtttaaggactacttcaagaggctgttcaacttcaagaaggacagggatggttactggaagtggtttgctggcaacctggcctctggtggtgctgctggtgcttcctctttgttttttgtgtactccctggattatgcgaggacaaggttggccaatgatgccaaggctgccaagggaggaggcgatagacaattcaatggtcttgtggatgtctaccgcaagacactcaaatctgatggtattgctgggctttaccgtggatttaacatatcttgtgttggaattattgtttatcgtggcctgtatttcggactttacgattctatcaagccagttgtcctcactggcagcctccaggacaacttctttgccagttttgctctgggttggctgatcaccaacggtgctggtcttgcatcttaccccattgatactgtccgcagaaggatgatgatgacttctggtgaggctgtcaagtacaagagctcattggacgcattccagcagatccttaagaaggaaggccccaagtccctgttcaagggtgctggtgctaacattcttcgtgccattgctggcgctggtgtgctttctggctacgaccagctccagatcctcttcttcggaaagaagtacggctccggcggtgcttaa

SEQ ID NO: 6041 - DNA, 477 bp, Zea mays
  Peptide Sequence Number=SeqID_47820
atgacaggcgccggtggcggagaggataaggagactttaattctccccccgcgggccccaagcgacgtagtggagaccagacaacgtgacgggcacgatccgacgcgacgcgattcaattcaacctctacaggctacaggttgcacaactgtggtggcgtttgttaggagttttaggctatctgcactcgcggactgcaaactggatgcatcgccatttacagtaaaatatccctgcagcggtgactgtatgaccaactgtatcgggcccaagacgagctcgaacctcagatatggcgtcttgcagtggataccctattcctccacgtggacaaccacctcttcctcgcgcgcgatgccggacttggacggaggagcaggcggccacgtcttggagccggtggaggatgacagcgcgccgccgggtcagatccacgcgcctcctcgccggatccgcgtggcttcgccggattcgtga

SEQ ID NO: 6042 - DNA, 135 bp, Zea mays
  Peptide Sequence Number=SeqID_47821
atgacatgtgcaaggacctggaagtatccagttgaatgtgttgaccctagatgctacgggaaggttctagtcgctgctgcaggccgtgcgataccttcccagccattgacagaatatcgaatggctaatgattaa

SEQ ID NO: 6043 - DNA, 801 bp, Zea mays
  Peptide Sequence Number=SeqID_47822
atgtccggtgcacaccggacagtccggtgcccccttccgaccgttggctcggccacgtgtctcgcgcagattgcgcggccgaccgttggcctggccgaccgttggctcaccggacagtccggtgcacatcagacagtccgccttccgcccagcggatttgattttggagggaaacaacaatcaggggaggagaatttgaatgtggaagaaaacatcaatgtgggctgcatgcaacacttggagcatcccattcatgatcctacttatgaagattacctggccaggaaacgcttctcatcttgtgctgaaatgttccccaccaactcagaatttattcctattccaaaaatgtgggctgctttctttatgggcctgcttctaaggccggattcttttgagtgggccaagaaatttttgttgtctagagctctttcttctttcgttgagcccaacatggaaactgtccccatcaagattccctccaaatgcctgctccctcctagtcaggaattgcataaggaatctcagtctccttcgcctgcagatgttgtcaacagaaagaagcgttcaatcttggttgacactgaagttagaaggagtgccaggctcagagagaaggctagaggttttaagtcttgctctggaataaggaagaattgcttgtgctgtgctaggccgtcgccaccctctatcttccacaagattattaagaaattgggggctaagttctgcaaagttgatccctccaagttatgccctgatgcattgaacagctccagatcctccagctctgccatctag

SEQ ID NO: 6044 - DNA, 654 bp, Zea mays
  Peptide Sequence Number=SeqID_47823
atggagcgagaggcggctgaggcaatggagcgagaggcggctgaggcaatggagcgagaggcggctgaggcaatgtcgctaggtaagtttgaggatgtctcctgggaattccccccgcggctgtggttcaagtctgctcgcctcttgcctacaggcggttctatcgataagtggctctctgccttccacggaacttgcactgtttacaaaaccctcttcctcctcgctgccatgggtgaccccgtcgctattaaaccctcatctgcggagcagttgatcccgctccttttcttcctcatggcttcatggcgcaacaagttgatcactaggaaatcatggtacgcactgtcacctgtcctcaaccctctgcttatgaagattggggcattgttcttgttcagccgctaccagagcatgagcctcaagatgaagaccccatgcccccttacccccacgatggtcatcagcttccggtggaattctttgggatgggccagcctgtgccaaattttcaatttgatctcaacatccctcccattggtgaaattgaagaagaagccgacaatgaaaacaacactgatgatggttgggatccctagccggttcaacaggcccaacaagcgcaaccccctgctccagtgtgagagcacctag

SEQ ID NO: 6045 - DNA, 438 bp, Zea mays
  Peptide Sequence Number=SeqID_47824
atgacgggaccgacgacgaaagagaagatggcgtatgtgtctacgacgaggacgctcctgtgccagaccaaccggctaccgaccaccaccaactctcatggtggcggtggcaccgataacaaaagaggagatggcgtctgtggctactacggagggcacgacgatggtgactctccggtccgtgctatttctcgcgcagcaggcgacgacactggcgaggcacgcaccatgcgcgtggtggcggtgagcaataccaagctagtgcccatcatccagggcgtctacagtgtgggccaccacttcttcggcaagaattacgtgtggtgtcttgtcagggaagaggagatggtgagggagcaagagtgcgagcataacaagcggcatcattatcgcgacagtgacgtgttcatgaactcttatgtacgcatgtggaaatga

SEQ ID NO: 6046 - DNA, 2205 bp, Zea mays
  Peptide Sequence Number=SeqID_47825
atggaggcggcgccgatgcgaaaggcgtcgtcgcaggcgtcgctggcggacccagacgacttcgacctgacgcgcctgctgaaccacaagccgcggatcaacgtggacaggcagcggtcgttcgacgaccgctccctcggcgagatatcgctcgccggcgcgggcacggccagccgcggtggctggggctacggcggcggggggatggagagctacgagagcatgtactcccccggcggcgggctgcggtcctactgcggcacgccggcctcgtccacgcggctctcgttcgagccccacccgctcatcggcgaggcctgggacgcgctgcgccgctccatggtgtccttccgcggccagccgctcggcaccatcgccgccgtcgaccactcctccggcgaagtgctcaactacgaccaggtgttcgttagggacttcgtcccgagcgcgttggcgttcctgatgaacggggagccggagatcgttcggaacttcctgctgaagacgctgctgctgcaggggtgggagaagcggatcgaccgcttcaagctcggcgagggcgccatgccggcgagcttcaaggtgctcaaggacccgaagcgcggcgtcgacaagctggtggccgacttcggggagagcgccatcggccgcgtggcgccggtggattccgggttctggtggatcatcatcctgagggcctacaccaagtccaccggcgacatgaccctcgccgagacgcccatgtgccagaagggcatccggctcatcatgaaccagtgcctcgccgagggcttcgacaccttccccaccctgctctgcgccgacggctgctgcatgatcgatcgcaggatgggtgtgtatgggtacccgatcgagatccaggccctgttcttcatggcgctgcggtgcgcgctcctcatgctgaagccggatgcggaggggaaggagatcatggagcggatcgtgacgcggctgacggcgctgagctaccacatgcggagctacttctggctggacttccagcagctcaacgacatctacaggttcaagacggaggagtactcgcacacggccgtcaacaagttcaacgtgaacccggagtccatcccggactggctcttcgacttcatgcccacccgcggcggctacttcgtcggcaacgtcagccccgcccggatggacttccgctggttcgcgctcggcaactgcgtcgccatcctcgcctcgctcgccacgcccgaccaggccgccgccatcatggacctcatcgaggagcgctgggaggacctcgtcggcgagatgcccgtcaagatatgctacccggccatcgaggggcacgagtggcagatagtcacgggctgcgaccccaagaacacaagatggagctaccacaacgggggatcttggccagtgctgctgtggctgctcaccgcggcatgcatcaagaccgggaggctgaagatcgctcggcgcgcgatcgacctagccgaggcgaggctcgcgagggacggctggccagagtactacgacggcaagctgggtcgctacatcggcaagcaggcgaggaagctccagacgtggtccatcgcggggtacctagtggccaagatgatggtggaggatccgtcccacctcggcatgatctccctggaggaggagaagccgaccaagccggtgctcaggaggtcggcctcttggacaggtcacttcgccactccactgaccggcctgacagaaggacagcgccgcctgcgccgctccgactgctgtgccactcgacagagtgaggctgacaagcagccaggcccggcctcaggcaccataggaaactccgctccgcccgacccagggctcggactcgggctcaaccccggaagacggcgaactccgctccgcccgacccagggctcggactcgggctcagccccagaagacgacgaactccgtttcgcccgaccccagggctcggactcagccctggcctcagccgacggtctccgcctcgcccgacccaggggctcggacccgacctcggcctcggaagacagactcgacctcgacctcggaggggcctccacatcgcccaacctagggcacggaccgaccacgtcaacaggaggcgccatcattgccctaccccaagctgactcaggctacgaggaacaagaccggcgtcccatctggctcgctccgccagacaagtaa

SEQ ID NO: 6047 - DNA, 198 bp, Zea mays
  Peptide Sequence Number=SeqID_47826
atggcagcaccggctccgcgcggtgcccttgccaccggggcacaggcacccagcaggctgcaggatcggactgcccggacagccggtcacgtcggatttataattgcagagtctagcgacgtggaggttggccatgtggttggaggtatggctagcttcaacttcacggtgaagaagaagaaccgcgcgctatgctga

SEQ ID NO: 6048 - DNA, 309 bp, Zea mays
  Peptide Sequence Number=SeqID_47827
atgctcccctggctcgtcgtcccgctcatcgtcatctgggccaccactcagctgctcctctcggccgcctaccgcttcgaggtcacctccccgtgcctcgcctgcgtttccgtcctccttgaaagtcacctagaggggggggagacaaccgatcaagccaaggatggaggcaagaagagcttcgaggtaccgagtgcacgggagaaggtcaaggagaccaggaacccaaagccaagggtgaagaagaagacttgcaaagtcaaggttgatcgagttaagagttatggtgcatcaaggatcactacataa

SEQ ID NO: 6049 - DNA, 1953 bp, Zea mays
  Peptide Sequence Number=SeqID_47828
atgggcaggtacagcgacgggaaggacagcggcgagaccggcggcggcagctacccgctggtggcggtgtgcatcgacaaggacaagaacagccagaacgccctcaagtacgccaccgagacgctcgcccacaggggccagaccatcgtcctcgtgcacgtcaacaccaaaggcacctcgggcgagcaccatccttcatctccatgccgcggcgagcatcgtccatgtggggtggcggacgccgccgggtacaagcagccgacggacccgcagatgaaggacctcttcctcccattccgctgcttctgcacgcgcaaagacatccactgcaaggacgtggtgctggacgaccacgacgtggccaagtccgtcgtcgagttcgccgcgcacggcgccgtagagaagctcgtcgtcggcgctagcgctaggggcggcttcgtcaggttcaaggcggaaatctgcaacaccatctccaagtccgcgcccgacttctgcaccgtgtacgtcgtctccaagggcggcaaggtgacgtcggtgcggcaggccgtccggcaggcgccggcagtgtcgccgctccggaccatgatccatgggcccaagccggaaccagagccggtgcacgcgcagaaatggacgcctccgcctccgcctccagcggttcaagacaaccacatcatgtcgccgttcgcgaggacgacggggcacagcgccgggtcggcgcggaaggcgttcccggacttctcgctgccggagtcgtcggacatatcgttcatcgggtccgccccccgcaggagcacggagcggtacccgccgcggctgtccagcgggtcggacggcgtggaccagcagcagcagcacagcttcgaggcgtcgcgcacgcccagccggtggggcgactcgttcggcaacgacagcacgtcgcactcccagaccagcacctcctcctggtgctcgcagcctccggacgagatggaggcggagatgaagcggctgcggctggagctgaagcagaccatggacatgtacagcacggcgtgcaaggaggcgctgagcgcgaagcagaaggcgctggagctgcagcgctggaagatggacgaggagcagcggtcgcaggagacgcggctgacggaggagtcggccatggcgctcatcgagcaggagaaggccaaggcgagggcggccatcgaggcggccgaggcgtcgcagcggctggcggacctggaggcgcagaagcggatcagcgcggagatgaaggcgctcaaggaggccgaggagcggctccggtccatggccgccggggcgcgcgagtcggcggtccggtaccgcaggtacaccatcgaggagatcgagatcggcaccgaccgcttcaacgaggcccgcaaggtgggcgagggcgggtacggccccgtgtacaagggccacctggaccacacgccggtggccatcaaggtgctccgccccgacgcggcgcaggggcggtcgcagttccagcaggaggtggaggtgctgagctgcatccgccaccccaacatggtgctcctcctgggcgcctgccccgagtacggctgcctcgtgtacgagtacatggccaacggcagcctggacgactgcctgttccaccgcggcggcggcgggccggtgctcccgtggcagcaccggttccgcatcgcggcggagatcgcgacgggcctcctgttcctgcaccaggccaagccggagccgctggtgcaccgcgacctcaagcccgggcaacatcctcctggaccgcaactacgtgagcaagatcagcgacgtcgggctggcgcgcctggtgccggcgtcggtggcggacaacgtgacgcagtgccacatgacgtcggcggcgggcacctctgctacatcgacccggagtaccagcagacgggcatgctgggggtgaagtcggacgtaatcgtcgtttcctctgacggctaa

SEQ ID NO: 6050 - DNA, 225 bp, Zea mays
  Peptide Sequence Number=SeqID_47829
atggagcccgagcgcatgcccacggaggcaagcccgagaccaaaaataacagaaaggagagccgcgtgtcctcccagccactgccacccttccccacctatcgatctcgagttctctcgaccccacccgacccggagccgcaccgcctcgacccagaccggcgccgacgagccccagcgcccaatggcggcggctttcctcgccctggaggcccgcgtgacatga

SEQ ID NO: 6051 - DNA, 2679 bp, Zea mays
  Peptide Sequence Number=SeqID_47830
atggcgccctctgccgctgccccaggcatctctgaggctgagggggcaccacgcatggccaagttcctctgcagctttggaggtagtatccttccccgaccacttgatggctgtcttcgatatgttggtggcgagacaaggattgtcatattgccgcgtgacatatcatatgccgacctagctgcacggatgagagatctctacaaggatgctgataccatcaaataccagcaacctgatgaggatctggatgcgctggtctcggtcgtgaatcacgatgatgtggtgaacatgatggaggagtatgacaaagtcactgccacaggggaggcgttcactcggctcaggatcttcttattttctcagcaattggatgacaatgctgcatcagtggctgtgcattacaatgtagacgagcgggaaacagagagaaggtatgtagatgcgctcaacagccttggtgatgttaggtcaccttcctcccctgtatctgtggagcagctttttggcatcggaggcaatgattcaggaattcctgattttgctggcttgagacatttgaatgtccctcgtccatcacatggtcagaggtatggagagatggattctccttggagccctgcttatgtctcaccaagccagtacagagtgcatgacccgagggattttccaatttcaccgtcatctgcaaggttccaagtaggagcggaggattttgatgacaggattcctgacgactttgtaaggcagtcaccaaaatatcattattatgaggctcaatcaccatcacatatggataatttagtctggcttccacctggtgctgtaattcagcaaaatgcaggtttccctggtgatttgagcaagcacaataaatttttggatgggaacagtggatgtgatcactgtggttcactattccacaagggtcagggttcggtgactgatcctatctatatgaatcctcgttggactcggccagtccaacaacattttgaccaaccaagcatgattaatgattatcccggtcaccatgctaattcttgtccagattactgccgccctggtgagcattatgcgggaggtcaagatgttagattggaaaatggtgtttatgttaaagagcaaaatggtggtcatactcccatgctttataatgagtcacgtcctcacgatagagtctggtatgcgcataccaaccaaagtcatcagcggtatgaggatccaaggctgcattatcctactaatgatagagtgatcgagccatacattgtcgatgctagctctgtaaattccgcatttgcaccaaacaaagtatatgaaatgcattcagcatctcttggtcattctagttctagccatgaaagtcctcactattttcatggtagcagtgagctcataaatgacgcatatcacaaccaacaagttggaggcagtgggtcatatgtgcagccagcagggtctgaagaatcccctggtcagcattacaaccacttttcggcctatggtgcagattccttttatcaaatgcaacaaaatttgccacccattcaatctttgaggaggagagcgaacagtcctgttcacactgcctcaccatatgattccccacacctgccaataccaaatgggagcattaacatgaattctgttagaaatacaggtgatgcgagtcccaggatagcaggtcttattggatatgatcgaatgccaaacccatttactccgcccaatggcagcatactatatagagttggtgggcatgatgttcctgcagctatggagaacactagtgcttttggtcctaggtctaatccaactgctgctcagtatgttcagccttttattgctcctgaatcaatccagcatcaacctggagttcccttgagggaggtttatcctgaaagagcataccctgaacccatgccgtcatcatatgctgatggcaaagtagctgtttctgcattgcccctcaccgaccaattattcaggttggatataaacacaatgaagaaacttgaaggacaagatgatgggaactctactcgaaatgtgaatgaaacaactcttttgcatgctgtggatgaaccaagtaccttaccccaccatgttggatctgtacatgaagtcgatcctaagcaggagaagctaaccgaaaaagaaagcaggcaaaagcaacatgaagctggggctacagcactgcaggaatgtgaggatatttcagaggatatgttgaatttccttcctgaattaattgcctctgttaaaaaggtaacactggaagatgctgctgagacacaaatagcccaatcagatgctaatgctgctgtttcacctgttcctgatgatgacgataatggaaagaagctggatgaggcaacagctggtaatacaaatgcaaatcaggaccttgatttgcaaggaagccttgatcggcagaagagtttcaagattgagtctacaactgctgaagctgaagctttgtcgaaaggactacagatcacggatttctggaaagaagctctgatcctaagctcacttcatcatccaaatgtggttgcattttatggtgtagttcgtgatggtccagatggaagcttagcaactgttactgagtttatggttaatgggtctctcaaacagttcctgaggaaaaaagacaggcactacattttctaa

SEQ ID NO: 6052 - DNA, 465 bp, Zea mays
  Peptide Sequence Number=SeqID_47831
atggctctccgctataattcaccggactgtctggtgtgccaagcggagcaacgactatcagcgccaacggtcgtctgcaaaagtgaacagtgcgcggacaaggacagcgccgcctgcgtcgctccgactgctgtgccactcgacagagtgaggctgacagcagccaagtccggcttcgggtgccataggaagctccgcctcgcccgaccccagggctcggcccccgtctcggcctcggacgatgaactccgcctcggccgaccccagggctcggcccccgtctcggcctcggacgacgaactccgcctcgcccgacccagggctcggactcagcctctgctccggaagacgacgaactccgcctcgcccgaccccagggctcggactcagcatcggctctggaagacgacgaactccgcctcgcccgacccaaggctcggactcggcctcggctccggaagatga

SEQ ID NO: 6053 - DNA, 1086 bp, Zea mays
  Peptide Sequence Number=SeqID_47832
atgcaggcggcatgcaaccgcaccaagggggcgcaccccttcgacttcgacgcgtccagcgtggaggcccaggcccacacatcatgtaacccggcgcaccgggaccgggaaaggggataccccgaaagggatcctcctccgcgaaggaaacgggccctgagccccctactaatcagaggttcgaaggctagcccctcagaagggttcaacagccgcctcagagcactcgggctccgcgcccactactggtcagaggttcgaaggccggccccttggaagggttcaacggccgccttaggccactcgggctccgcgcccactactgatcaggggttcgtaggctggcccccgaagggttcgacagccgcctcagacgcagagcgagggatgaccctggccgaccccggaggattcacgtctcgcccgagggccccctcaagcaacggatacaccttcggctcgcccgaggcccagtcttcgctaagaagcaaccttggccagatcgcctcaccgaccgaccgtatcgcagaagcatttaatgcaaggatggaagctccgcctcgcccgaccctagggctcggcccccgtctcggcctcggacgacgaactccgcctcgcccgaccccagggctcggcccccgtcttggcctcggacgacgaactccgcctcgcccgacccagggctcggactcagcctctgctccggaagacgatgaactccgcctcgcccgacccagggctcggactcggcctcggctccggaagacgacgaactccgcctcacccgaccccagggctcggactcagcctcggctccggaagacgacgaactccgcctcgcccgacctagggctcggactcggcctcgactccggaagacgacgaactccgcctcgcccgaccccagggctcggactcagccttggcctcagacgatggtctccgccccgcccgacccggggctcggactcgacctcgacctcggaagacagactcgacctcgacatcggaggagccaccgcctcgcccgacccagggctcggaccgaccacgtcacaggggaggccatcattaccctacccctag

SEQ ID NO: 6054 - DNA, 2069 bp, Zea mays
  Peptide Sequence Number=SeqID_47833
atgggacggaggctgctgcgccaccactcgccctcatcctcctcctcctccctccgccgccgcggggggctcgttctggcggccgcgctgctggcctggtgctggtgccaggcgagcctgccggtgggcgcggcgcaggcgcaggcgcagccggcgccggtgcgcgtgggcgtcatcctcaacctgacgtcggcggtcgggcagcggcggaaggtgggcattgagatggccgtgggggactactacgccgcgcggcccgccgcgtccaggaccagggtcgtgctcagcttccgggactccgccggggacgtcgtcggcgccgcttccgccgcggtggacctgatcaagaacgagcaggtgcaggccatcatcggcccgcagacgtcggcggaggccgagttcgtcgcgtacctcggcaaccggacccacgtgcccgtgctctcctcctcggccacctcgccggtgctctccccttcacagacgcccttcttcgtgcgcaccgcggccaacgactcctaccaggccgcgcccgtcgccgcggcgctcgccgcgctcggctggcacgcggcggccgtcgtctatgaggactcgccctacgggtccggaatcctccccgcgctggccggcgcccttcagggcgtcggcgccaggatcgcaggccgcgccgccgtgccgagcggcgcggacgacgaccgcgtcgacgcggtgctctacggcctcaaggcgatgccgacgcgcgtcttcgtcgtgcacatgagcgcccttcccgccgcgcggctcttccgccgggcgaggcgcgcggggatgatgacggaggactacgcgtgggtcgccaccgacggcgtcggcggcgtcgtggacgcgctgggcccggacgacatcggcgccatggacggggtcgtcagcctccgcccgttcgtgcgggtgacggagcgggtgagcaacttctccgcacggttcagggcgaggctccggcgggagcacccgagcgccgacatctacccgcacgacccgaccgtcgtgatgctctggtcgtacgacacggcgtgggcgatcgcggcggcggccggtgtctccagcccgacgtttcagacatcgcagcagagcgcgggggtcacagacctggaccggctccgcgtgtcggcgaccggagcggcgctcctcaaggcggtgcgcgagacgaccttccgcggtctcgccggtaacttcaccctcgtcgacgggcagctgcagccgccggcgtacgagttcgtcaacatcgtcgggaaaagctcgagggcggttgggttctggacgccagaggctgggatcacgcagactctgggggccgaagccgccaaaaaagggctgaagaaaatcctttggccaggcgattccacgtccgtcccgagaggttgggtcgtgtcgcccaacggacgtaagcttcgcgtcgccgtgccggtgaagcatgggttcaaggagttcgtcgacgtcgccggtgagtcgacgacgggaggacatgcaaacgtcacaggctactgcatcgaggtgttcgacgcggtcatgagcaagatgccatatccggtgagctacgagtacgtgccgttcccctacagctccagttcctacgacagcctcgtgtcgctggtgccgagacagatagccgacatcgtcgtcggcgacgtgacaatcacggcgagcaggatgggcagcgcggacttcagcatgccgttcacggactcggggtggtcgatggtggtggcggtgcgcacggaaacgagcacgagcatgtggatcttcctgcggccgctcaccaccagcctgtggctcgccagcctcgccttcttctgcttcaccggattcgtgcagttcggcctcatcttctacttcgccttctccaccctcgtcttctcgcacaaggagaagctggagagcaacctgtcgaggttcgtggtgatcatctgggtgttcgtcgtcctgatcctgacgtcgagctacacggcgagcctgacgtcgatgctgacagtgcagaagctccagccggcggtgaccgacgtgagagagctccaacggaccggcgcctacatcgg

SEQ ID NO: 6055 - DNA, 561 bp, Zea mays
  Peptide Sequence Number=SeqID_47834
atggagtactgctgcacctcaagaagccgccggctctcgtactgcctcctcctgctggtcctggtgtgcgccgccgtcctcccagtgccgccagcggcggacgcggcgggcgtgccccgccggctgctgcagactagtacgtgcacggggcaggacttcgacgtgccccacgcgcacctgcgcgcgcgggacaacgtgaggccgctcaagtacacggaggcgctgtcggcgcgggcggcgcagtgggcgcagcggttcaagggcgactgcgcggccgcggggcccgcgccgggcgtcaacgtgttcctgggcgcggcgggggcggcggcggcgtggctgcccagcgacgccgtcgcggcgtgggcggaggaggagcagcactacgactacggctccaactcctgctccgccggccacaacgcgtgcgggcgctacacgcagatgatgtggcgggacaccagggagttcggctgcgccgtcgtgctgtgcgactccggggacacgctcatggcgtgccactacgagccaaagggcaacgtcgcggggcagaggccgttctga

SEQ ID NO: 6056 - DNA, 1122 bp, Zea mays
  Peptide Sequence Number=SeqID_47835
atggggagggcgccgtgctgcgacaaggcgagcgtgaagaaggggccgtggtcgccggacgaggacgccaagctcaaggcctacatcgaggagcacggcaccggcggcaactggatcgcgctaccgcacaagattgggctgaagagatgcgggaaaagctgcaggctgagatggctcaattatctgaggcccaatattaagcatggtgacttcacagaagaagaggagcatatcatttgcagcctctacattagcattggaagcaggtggtccatcattgcagcgcagctgccggggcgaacggacaacgacatcaagaactactggaacaccaagctgaagaagaagctcctcggaaagcgcgcgccgtccaggcgcgcgaggacgaaccaggatccctgctacctcgccgcgggagccgccagcagcagcagcagcagcagcgccgcgacggccacgcaagccctaagcgcgtcggctctcgagcggatccagctccacatgcggctccaaggcatctacggcgcgttagcttgcagcggcggcaacgacgacagcaacgctgccttcgggtcggcggcggcggcgccgccgcagtggccgaagcttgaggcgctgtcgcaggccaacaggctgctcccggggtcgctgccggcggacgccatggccacaaccgtgagcgtgcagccgcacccacagcatctggtcgaggtcgaccaccaccagagcctcgccgccgccgcactcgagggcgagcaacagctcagctctgccggtgaaggaggctttttcgagcggcccaaggtagatttttactctccatcagccgaggtcgccgccgccgccgccgccagcgtagagatgaactcggtcgccccgatggttgttggcggctacgcgggcgccgccggattcgggcctcagcaccatcacgacgagctctacgacttcctgtacagcaagtacggatcagtgggcgggctggcgcacgacggcgggcatgttcccaacgttgccagagctgcagaactttgtggtgctctgaggaagaggatgaagattgaagaggctgctaaagaccagccgacgacattctgcacttggcaggcgaaggacgcctaa

SEQ ID NO: 6057 - DNA, 858 bp, Zea mays
  Peptide Sequence Number=SeqID_47836
atggagcggaacagggacctgaaggaggaggaggacgtggaggagccgctcttgcgtccgcgggctccgccgctgtcggacagcgggcgcgaccacgctgggctgcgcggccaccactcgtgctccggcgcccgcctccccgaccctgaccccgacgacgacgacgaggccaggaaggccccgcggcggtcgcgcccggccatgctctgcggcccgcagtgcttcgcttggtcgtggctcgcgaccgtgtccaaggtcaaggcccgagctgcggcgggggaggggggcgaccggcctgacctggcaaccgacctgtcccagttcgcgagacagagacggagacagagaccgcgaggaggaggcggtggcgaccccttcttccccgaggactctgaagcagccagcggggccgcggcgcctcctcaactctatggagacgtcaaaaggaccgcagcgagcagccactacagttcccgtggcctgcacatgtggatgtggccatggctggctggacttggcctgctcaacctcgccctaccaaccatggcgaagtcgttttcttggaacaattccatccctcttctcgctttggaagcaagcgtacaacaggcagggcagcagccgtcttggcagcacgacctgttctatttgtcacctgcaagttgcgacaatctccacttggtcacctgtgcacctgcaagcgaatgcaccaccaccttcctccgctctgaaatctacgacatggagctcttccccttcctcatcgacgacgggcagcagcacgttgccgccgtgggagccatagtcgctgcagtggagggatgcgggacgagattggaagcggagcgaggaggatag

SEQ ID NO: 6058 - DNA, 1830 bp, Zea mays
  Peptide Sequence Number=SeqID_47837
atggaggaagcattggcaacgtgggaggacgacaaagcactccacgcaaacgactatggctcccacggcggcaacgtgctgctgcccgtcgtcgatgaggaaggggaagagctccatgtcgtagatttcagagcggaggaaggtggtggtgcattcgcttgcagagttgaggaggcgccgcggccccgctggctgcttcagagtcctcggggaagaaggggtcgccaccgcctcctcctcgcggtctctgtctccgtctctgtctcgcgaactgggacagctgccctggcgggcggcagagctcggcgcgacacgggatcgcgtctgccggccaaccactgcgggccgcagagcatggccgggcgcgaccgccgcggggccttcctggcctcgtcgtcgtcgtcggggtcagggtcggggaggcgggcgccggagcacgagtggtggccgcgcagcccagcgtggtcgcgcccgctgtccgacagcggcggagcccgcggacgcaagagcggctcctccacgtcctcctcctccttcaggtccctgttccgctccatcggagtgtggttcagctcgctctctaccgcgtcgccgtcgcccgcgtcctcgtccatgaagcagaagagcagggacgccggggccaagaagccgcctttgccggggtacgccgggacgaagacgtccgcgcgcgggctgtacagcggcggcggcggcggcaggcagcaccggccttcgttccagaactccgtcttctccattgaggagatccttagcgccaccaacaacttctcgccggcgctcaagatcgggcagggtggcttcggcgcggtctacaagggcgtcctccccgatggcaccgtcgtcgccgtcaagcgagccaagctgcggatgcagaaccctcacgtggacgtggagttccggagcgaaatcaagatcatggcgcgcatcgagcaccagagccttgttcgcttctacggctacatggagtgcggcgaggagcgcatcgtcgtcgtcgagtacgtccctaacggcaccctccgggagcacctcgacagtaagcgaccacctgccattgctgctgctctgcttccaactccatctgccatctctcacctcgcaagaaccaactccaaccaagcagggtgcaacgggcggttcctggacttcggcacgcggctcgacatcgccatcgacgtcgcgcacgccgtcacgtacctgcacatgtactccgaccaccccatcatccaccgcgacatcaagtcctccaacatcctcctcaccgactcgatgcgggccaaggtggccgacttcggcttcgcgcgcctcggcgccggcctgggcgccggcggggaggccacgcacgtcaccacccaggtgaagggcacggcggggtacctggacccggagtacctcaagacgtgccagctcacggaccgcagcgacgtctactcctttggcgtgctcctcgtggagctcgcctcggcgcgccgcccaatcgagaccaagcgcgagatgaaggagcgcctcaccgcgcgctgggccatgggcaggttcatcggtggcgcctcggccgacgtgctggacccgcacctcgcccgcacgcccgccgccgaccgcgcgctggaggcggtgctggagctcgcgttccggtgcatgggacccgtcaggcaggacaggcccgccatgagcgactgctgcagggcgctctgggccatcaggaagacgtaccgggacatgctcgccgccgatgccacgccgcagttctccgatcggcgggccaccaccagcagcagcagcgccgacagcagcggcgacctctggaggatctga

SEQ ID NO: 6059 - DNA, 255 bp, Zea mays
  Peptide Sequence Number=SeqID_47838
atgtcgtcctccgtgctgagggctgcggccgatagggctattcgcaggcatgccctcacgctgacggacgccgcggcgtccaggatccggcagctcctcagcctcaggcagcgtccattcctgcgtctcggcgtcaaagcgcgaggtttcaacggcctctcgtacacgctcaactatgccgctgggcgcctgctacctgaccgcctgggggccatcgctccccttagggctgggggtcactggctatgtccttga

SEQ ID NO: 6060 - DNA, 429 bp, Zea mays
  Peptide Sequence Number=SeqID_47839
atggatgagccgtcggtccagcaccagcagcaggagcttgtccgcctcctcaagggcggcatgtctgagtccgtgccgctggcgtcgctgcttcgtccggccataaggtcccgcgtgctgcagcatcgcgtccgacgtcgaggagttgcgggtcgacaatctaagtccgtgccgctcgcgtcgctgcttcgtccggccatcaggtctgtcagcaccacgaggaacaggaatgattgcatcagctacaccagggaccgagcacgtcgacggaagctaagatcgcgcctaggcagcgacgtccgaatcccaaacgaggttcaacccttgaagaccttcatcccgttccaattcgccgaactcgttcgacagctgtcgcggcgcatcgccgcgacggaggagaaaacggaggcgcgcctcatctcgttgtag

SEQ ID NO: 6061 - DNA, 243 bp, Zea mays
  Peptide Sequence Number=SeqID_47840
atggagcgcgaatcgttcgtcaacgatttcgccaagcccggtatcctccccaacgccaagacgatgggcgagcgcgtaccttcacggtgccccatcgtcgatgggccagatggccaccacttcaacaactgtaaccgggatcgtggtgttgggcgtgttttcacccaaacccacagcccagtcaagggaggaggcattagaggtgggccgagacgtacatgtcgttactctgtctcgacataa

SEQ ID NO: 6062 - DNA, 1620 bp, Zea mays
  Peptide Sequence Number=SeqID_47841
atgagctacacggagcgcctgctctacaccagcagcccgcgccaccctggcatttttgcccccggcacccccacggccacacccgacatggtggcagcggatgagtgcgacggcgacgaggccggcgcgctggtcgccgccgcctgcaccggcaccggcaccgataccggctcgacccaggacgcgccggcggtgcggtccccgcgcgccgcgtgggcgctgttcgtggaggagtcgcggaggctgtgggcgatcggcgcgcccatcgccctgaacatcatctgcctctacggcaccaactccacgacgcagatcttcgcgggccacatcggcaacctggagctctcggcggtggccgttggcctctccgtcgtctccaacttctccttcggcttcctcctcgggatgggcagcgcgctggagacgctgtgcggccaggcgttcggggccggccaggtgtccatgctgggcgtctacatgcagcgctcctggatcatcctcgccgcctccgccgcgctgctcacgccgctctacgtgtacgcggcgccgcttctgcggctgctggggcaggacccggccatggccgccgccgcgggggacttcaccatcgccatcatcccgcagatgttcgcgctcgcgctcaacttccccgcgcagaagttcctgcaggcgcagagcaaggtgggcgtgctggcgtggatcggcgtcgccgcgctgctggcccacgtcgcgctcctcgcgctgttcgtcaccgcgctcggctggggcgtcgccggggccgcgctcgcctacgacttgtcgtcgtggctcacctcgctcgcgcagctggcctacgtcgtggggtggtgccgggacggctggacggggctgtccagggccgcattcaccgacctctgggcctttgtcaggctctcgctcgcatccgccgtcatgctctgcctcgagatgtggtacatgatgctgctcgtcgtgctcaccggacaccttgacgacgccgagatcgccgtggactccatagccatctgcatgaacatcaacgggtgggaggggatgctgttcatcggcctcagcgcggccatcagcgtccgcgtgtccaacgagctgggttcggggcggccccgggcgaccaagtacgcggtggcggtggtgctggcgcagtcgctggcgttggggctgctggccatggcgctcgtgctggcgacgcggggccagttcccagccatcttcacgggcgacaggcagctgcagaaagccgtctccagcatcgcctacctgctggccgtgaccatggttctcaacagcatccagcccgtcatctcgggcgtcgccgtgggcggtggctggcaggccgtcgtcgcctacatcaacctcggctgctactacgccttcggcctcccgctcggcttcatcttcggctacctcttcagattcggggtcaagggcatctgggcgggcatgctctgcgggacagcgttgcagacagccatcctcagctacatagtctggacgaccgactgggaagcagaggcgtcgctggcgttggagagagtcagaatatggggcggccaccacgaaaagcttcctacctctgattcagaacaggaggtcgcggttgtctga

SEQ ID NO: 6063 - DNA, 2574 bp, Zea mays
  Peptide Sequence Number=SeqID_47842
atgtacctggcgtacgggtggccgcagtcgatccctctggacccggacgactcggaccgcgtggtcctcctccgcgtgctcggccgcctcctcctcgccgtctgtccggcttcgcttcacctctggtccgccgcccaacaccgggtccgcctagcccgctccgatcgctccccggagtccctcgccacccatggccacaacgcgcacgccgcgtggagccccgacgccaggaccgtcgccgtcctggtcagcccactccccctcccggagcacttcgctcgctccctccgcccgcgggcgcggcagactcaccatgctgtttatgcgtgctgtgtacagacctcttccttctacctctacgtttacaaggttcagcactcgggaaagcaactgatcgtcggtggcaagcaggtcccggggctttgcctggctagtatatccctaatcatcaccgagaaggttcctctcgccaatggcgttgctataacgagcaatttcgtgtgtgacagcaaaagcatgctcctcggactatccaatgggcatgtgcaggtcgtgtcctggaacgctgagttctcagacagcttcaagcttggttgctatgtgtgttcatctgagaaacctactgctgccgtagatgcgttggtgtttgatcctcccagtttgcgagaaagctctaacgcaaggcctgctccttgctgcacaggcaattcttctattgtccatgttgagctgtcggtgaagctgagattgctggttgctttgtactcaggctgtcgcattgccctctgtactattggtaagaagggattaaggcagcctggcagcaccagagtggagagatggttggacactgatgatgcgatgtgtacttctgtggcttctgagcaacagattcttgctgtcgggtgcagtagaggtgttgttgaattgtatgatctagcagaaaacacacgccatatacgaaccatttcgttgtatgattgggggtattcagtggaagataccggtcctgttgcctgtatatcttggacgcctgacaattgtgctcttgcagttgggtggaaatttaggggacttactgtatggtctgtgtctggatgtcgattgatgtgtactattcgtcaaactggttcaaattctgcctcatctcctatggtgaaacctagcgctctaaaatttgagcctcttatgggaggaacatcacacattcaatgggatgataatggatataagttatttgctgtcgaagaaagcttgtcagaaagggttcttgctttctcatttgccaaatgttgcccaaacagagggctttcaggcacaacatattcccaccagatttcatacatttcccagaactggccagttctacatgtggtggcaagcaatgatgggatgtacttggcagttgctggctctcacggactagtgctatatgatttgcgaaataaaaggtggcgtttttttggtgatgttacacaagagcaaaagatccaatgcaaaggcctattgtggatgagaaaaattgttattgtgtgcaactatgttgaatcgtcaaacacgtatgagctcctctttttcccaagatatcatcttgattatagttctttactctaccggaaacaactgcttggaaggccaattgtcatggatgttttccaggattatatattagttacttacagtccattcgatgtacatatctaccatgtggtggtctcgggagaattatctcctgctagcaatccagttttaaagctttcaacattgcgagaactttcaatcatgagtccaaaaagcccacctgtttcaatgcgcttcattcctgaacaaaatgacaaaggagcgctgacagaagatactcatggattttctgatcttttgtcccagcaaccatcaagatgtttgatcttgcggaccaatggggagctttctgtgcttgacatggacgatggacatgaacacactctcacaaattcaattgaactcttttgggtcacctgttcgcagtttgaagagaagggtagtcttatcaaggaggtttcatggcttgattacggtcatcggggtatgcaggtgtggtacccatcacatggagcagatcgttttaagcaagaggattttttgcagttggacccggagcttgagtttgatcgtgaggtgtatcctcttggtcttcttccaaatgttggtgtggttgttggtgtttctcagagaatgtccttctcaactgcggagtttccatgctttgagccttcacctcaagcccaaacaatattgcattgtttattacgacatctccttcaggtgtctaggtgcttgttgcgtcatgactcccgtgtctctgatatatgtgatagtgtaggtgctgaccacctagtcaggccttggttgggctggcgccacagacttggtgctggtgtgtgtagaggagtgctcgttgggtgctggctgctgggggacatgtggggtggggtactggggggtgataactgggatggaacttttgtaggagagggatcaaagggctctggtggggttggaggacgttatgtttctgttggaggggagtgttag

SEQ ID NO: 6064 - DNA, 312 bp, Zea mays
  Peptide Sequence Number=SeqID_47843
atggctgctgctgcagaggtcgctggcgggtcccccggcgctcgtcgccccgcaggcttcccggtgtggaggtggaaccggagttctgtttgtagcggcacttcgaatgccagtgtttttgttcattgtggctgtcgggtgaaagggaaatgtgcctttgggccatttctaagtattttggtgattaagtgccaacacaagtgcttaaatgtgaatctatgcccatggatgaacaaagtgcaaatcataagtaaagtaacgataaggccttcacaggcagctgactgggggttgccaccaacccacacctag

SEQ ID NO: 6065 - DNA, 660 bp, Zea mays
  Peptide Sequence Number=SeqID_47844
atggtggagggcctcctggttggtgcagagtcgaccattgacctcccatccgagaaggtcgagctactcaaggaggcgttcgatgatctcgtcgcgtcgttcgctagcttcgtcgtggagtcccccgcgggcgtgtgccgggccaggcgtacctccagcgtggtggcctcggcctcggtcgccagccccacagggagaaggaccggtgtggaaaaggacgccgggcggtctggagaggaaagcatagaaaggaagagcatactggccttcttcctaagcaaaataaaggcaaagaagggtggatcactcgacctttccgacaacggtggaagagagctaggattacaggaggaggtcatcgggtcaattatcgctgggacgtggaacgtcgtggaggtcatggctgatgtctgcatgcggtgcctggtgttgtccgttctcgatagcggcattagtgcctttggtggctggatgtggtccacctacgtcccggagcagtgcccgagagtgaacatcatcttggtggggatgtggtccacctacgtcccggagcagtgccccatcaccttcagctcattgatgtcctttaggctcccaatgacgctcttcctgtttctggtgctctacctcgagtctgcacaaataacatggaaagggtga

SEQ ID NO: 6066 - DNA, 642 bp, Zea mays
  Peptide Sequence Number=SeqID_47845
atggcgttcacgatttcaaactatcggtttcaaaatttctttgcctgggttttaaagtctgttagaatattattaaatgaacctaccgaccaagttccagcagcaaacagtgaacttgtggtgatttttcttaagtttcttcttgataaggatccaatcaaacaactacttgaagcagatgagagaattgagtgtgatatcttgaaggaggctttcttgatgccatttactgctatctcttcgcagatacaatgtcaaggattgcttcctttatatcctgttacatcatcagctaccttgtcatcatcctgctcgccaacatcaatatcattttataaggatgaagattcatcgcatgaggaatcctcctatagcttgactgactatgtatgcttgaagatacctgatggatcattaaataaagtaaattgcatcggtgtgataaagggctctggttttctgttgcatatacctgacggatatgagtgtgttgacctgtcactttataagccctggaaaatcttggatggtgatgctgcaaatagagaacttttcctttatgccactctcaggaacattccctgcaaatatttacagtttgcaaaaactggtggtaacaattcttatttcccctatgtttga

SEQ ID NO: 6067 - DNA, 237 bp, Zea mays
  Peptide Sequence Number=SeqID_47846
atggagataaaccaaattaatatgaaacaattcaagttagtacagtatcctggagagtttgtggtgacattcccaagggcataccacattgggtttagtcatggtgataactccagtgcacaagaatccgctgaacagggtggcgctgagctgtatgaagaggtgaacaaccgtgggctctgcgctattgcccaggctgagtcgtctgttataaggttctcggtggactcgccatga

SEQ ID NO: 6068 - DNA, 342 bp, Zea mays
  Peptide Sequence Number=SeqID_47847
atggagggagggagggaaagcgaggtcaggaggggggctcacgagaaaacactcgaactggtcctcgaggtcctccagcgcggcgcggatggcgtgcaggctcctgtcctcctcagccagggccgccagggcgacgacctcgtctccgccgcgcgcgccgagacccagacccctgcccttgacgtgcacgaggccgggggcggatgcggaggcggaggcgcggcggcggacagcgcgcaggaagtgggcgcgggagagggcgtggatggcatcgctgaccttgtcgtggaggtcccagatggtctccagcagcacgacctcctcttcttatttaccgtttaa

SEQ ID NO: 6069 - DNA, 486 bp, Zea mays
  Peptide Sequence Number=SeqID_47848
atggtcggcaatgggggcgggagctaccggagacggagcgggcggtggcggcagtgggctgcgtggggagcgagctcggggcggcagtgggcgggcgggcggagctccggcgacctcggggcggcagtgggcgggcggcggcgaccgagctcgggggagctcgagcgggcggcgagctcgggcgacgtcgggcggggctcgcggcggcgagccggagctgggacgtggcaggcggcggcgattgtggacaccggcggcggcgtagggctaaaatacaaaaaattcgggcccatcggcttcgctccacccacgtacctctccgacgtttacgcgacggcgatgcccgcgcgcgcgcggttcgatcgtgaggacccgcggaaatgcatgcgcgtccggcaccggccggcgtcacgtcgcgcgacgacggcgacggatgccaagaagaaaggagagcccgcgagcaagacaaccccctgcaaacattga

SEQ ID NO: 6070 - DNA, 1213 bp, Zea mays
  Peptide Sequence Number=SeqID_47849
atgggcacggcaacggcagtgcgcgcgcgtgccgccggacggcgaggcgcgcacgttctagctcactactcagtactcactagtcgcggcgccgacaggtcgggcgggagatggagcggtcgacagattggccgggaaccgtgggcgtacgagacgtacggccgcaggggcgcagggatgtacatgtactgctcggaaggtggaatttacgaggccgtgaccatgcatgcatgggcatctctgtcaccgtttccgtgcgtgctgctgcggcccgggatgggcagaagaggcacggaccttggtggagagtactggaggaggtcgagtgaagtcggaacagagcatgttcagaaggacggtccgtgcacctgtttctgcaccggccacagaggctgccgttcatccgggccggccccgcccccggctccggcgcagccgagggacgccaccatccggctcttcggctgcgacttctccaacgacgaccagcagcagcggcaggccaagcagcagcagcagcaccgccaggacgccggcgcggccgccgactcccccgacgccgccaacggcagctcgatcacgtccgagagcaacaacggagccaacaagagcggcggcgccgacaggaagttcgagtgccactactgctgccgcaacttcccgacgtcgcaggcgctgggcgggcaccagaacgcgcacaagcgcgagcggcagcacgccaagcgggcccacctccaggcctccctcgccatgcaccgctacgtgcccggccacatgtacggcctcttcaactaccaccagcagcagcagcaccacctcggcggcggcggcggcggccgcttcgactaccccgcgccgctgcagttgccgcccccgccgccggcgcgctacccgatgtggacgagcgccggccccgcggggccctacggcggaggcccaggctccatgtcgcagccaatcaacggtagcccggtgccgccggggctctggagggtgccgccccccgctgcgacgacgaccaccactaccgccatggagaatttcggcgtgcccggccgccgccacggcgctggtggtggcacggcggctgtcctggccgctgggccggctggcgcggaggcggcggcatgcaaggacgacgcgatgggcttgttgtccccctcgccctcgctctcgtcgtgctcgtccacgtcgccggagaagaagaagctag

SEQ ID NO: 6071 - DNA, 276 bp, Zea mays
  Peptide Sequence Number=SeqID_47850
atggccctcgatccggccgtcgcgtcggccgtctggggggagggggtggggagcggtgcggcatgcgtctgcgcgctcgacgcgggcctcccggcgtgggcgctcggcgcgggccccacaagggcgctcggcgccgcccactggtggtgctcggcgctgctcccgtggccggcggctgcgcactggcgactcagcgcccggcggctggcggcgctcgggacgacccctggccggccagacgagccgaccatggagcctcggcgcgagcccccatga

SEQ ID NO: 6072 - DNA, 171 bp, Zea mays
  Peptide Sequence Number=SeqID_47851
atggcagtgaggttttacttcatcgatgtcaataaagttccacagggggtggtgaaaagaggaaatgtaactctatggaaggatggagagtggaaagcggaagtaataggaggccacaaagcttgtcttgtgatggatgaggttagagaaatgatcgagaataacaagtga

SEQ ID NO: 6073 - DNA, 345 bp, Zea mays
  Peptide Sequence Number=SeqID_47852
atggacggctcggacctgggcctctacgacacggcctcccacggcgacgcgccagcgtccgcgcctgaggacggccgtcgtgcctgcgggagaggagctggcttcgtccacgcctgccccgggagtcgtgtcgtgacctggacggctccgaccgggtcttccacgaacggcgcggcgaccggatctgcgacggagcggcacgggccaaggacggcgggggcttgcggccggcgcttcgccgttagccagctattcgaggtgagcgactcgttccaccatccctatcttggttatgttgatttggtgtccatggatacactgtctgcatttttagatggttgttga

SEQ ID NO: 6074 - DNA, 249 bp, Zea mays
  Peptide Sequence Number=SeqID_47853
atggcttctgtttgtggaggttgtttagcacttcaagatgctggggttcctataaagtttcctgttgctggaattgcaatgggcctggtccttgatacacaagaatttggtggagatggtagcccacttatactttctgatattactggagctgaagatgcctctggtgacatggatttgaagattgctggtaatgaaagtggcatatctgcatttcagatggacactaaggttgtaatgacgatatag

SEQ ID NO: 6075 - DNA, 133 bp, Zea mays
  Peptide Sequence Number=SeqID_47854
agattcgtcacttatactttctgatattactggagctgaagatgcctctggtgacacagatttgaagattgctggtaatgaaagtggcatatctgcatttcagatggacactaaggttgtaatgacgatatag

SEQ ID NO: 6076 - DNA, 694 bp, Zea mays
  Peptide Sequence Number=SeqID_47855
ggctcttcgaccgttgcacgttagacgcgtggccacaaacactgctcgtgagcaatccagcgcgtcgcatccgccgtggccacaaacactgctcgtgagcaatccagcgcgtcgcatccgcctcaacgccgcctaccgcgacatggacggctcggacctgggcctctacgacacggcctcccacggcgacgcgccagcgtccgcgcctgaggacggccgtcgtgcctgcgggagaggagctggcttcgtccacgcctgccccgggagtcgtgtcgtgacctggacggctccgaccgggtcttccacgaacggcgcggcgaccggatctgcgacggagcggcacgggccaaggacggcgggggcttgcggccggcgcttcgccgttagccaggtgagtgcgccgcctcgccttctccaaaagcgcacgcaccgggggtacagctcgttggatactgtagatctacgattttcgaaaatcgccgttagcgaggccattgcgccgctcctcactgttctcgtgtccttcaccatagcgcccatcccgcagctttctgctacatatatggagcccctacgctggtgtattcctctttccgtcggcctgggcagacacgcgcaggtcctcaggctctcctctcggtctcttctgcagctattcgagacttacttagaatatgttgtctcccttccctag

SEQ ID NO: 6077 - DNA, 252 bp, Zea mays
  Peptide Sequence Number=SeqID_47856
atgacgatggcctcccgcgtcagggctcagtctacagccttaggcctcacggttgccaaggtggagacacagctgggtgagttgctgcggaccatgaacctgtacgacttcctgcgaaccatgctcccggatgcgggcccgcccccggcggccaagacggtggacgaggtatgtcgtgacattcagagcaccagcggcggtgcccgccagccctccacgggtgagatgatgctcaaagacttcctctcctga

SEQ ID NO: 6078 - DNA, 678 bp, Zea mays
  Peptide Sequence Number=SeqID_47857
atgaaggaatttcaaattgctatgaggcagtatgccataaagcatgagttcgagcttggaatcgatgtaacttcgactaccagatacgtcggatattgtaaatgtggtgattgtcaatggaggatttatgcacgagaggaaaagaaaggattaccgaccattgtggttgttgtattgcatgattcgcatacttgcacatctagtggaaggaagaagacgactacaccaagttgtggatggtttggaaggggaaggagaaggcattataatagttgtttggcagttgggatgagggtttcaagctactattctcttggcgggagccgggaggcagtacttgctaaggcgtctgacagcattgtagagattgatgtggttttagaggatgggaagtactatttcaaccatttcttttgtgccctagggccgtgcatctcaggttttagggatggttgtacaccatacctaagtgttgacgcgaccgcacttaacggtagatggaatgggcagcttgcttcatcaactggtgtggatgggcataattggatgagtggtttcgacccatctgttaaatgtgattacataacaaacaacatggttgaggagaagaaggataggggaaagactccagggtttgatcttgccatctgttatggctacattgaaagctcagactag

SEQ ID NO: 6079 - DNA, 139 bp, Zea mays
  Peptide Sequence Number=SeqID_47858
atgggaggccggttgggggccgagtgctgcctgggaggatggggcgtggtcgagctctgccggcgagacgatcgctgcatgtggaagtgctttcatgcctcatgcaacgcctgccgcgccgagtctgttggctggggct

SEQ ID NO: 6080 - DNA, 1152 bp, Zea mays
  Peptide Sequence Number=SeqID_47859
atggcgctcacgtcgttcccgttcgcgccatccaacacctcgctgtcctactcctcccgcgcctcaaccgccgccgcgttcgctcctcgtggggttcactttgccgcgcccggaaggagcggcggcggccaaccgctcgcgtgcgctgcgcctcggtgccgcggacgggctccgaggcggcggcgcggagggggcctgctggtctgggcagcggctgactactacgcgacgctgggcgtgccgcgcgccgcgagtaacaaggacatcaaggccgcgtaccggaagctcgcgcgccaggttctcgacgcttgcctcacatcaaaccccaccattcctcgtctcaccgcgaggcaaccgtgcatagttgggctgattggttggccggccgtgcgaagccgggtccgcgcaagcctggccagccgcatacgcaggattcgagcgtaccggtggatgcagaaaaatagcagtaagatgaattattttgcatctactcgtgcagctcacgtctggcacatacagtaccatcctgatgtcaataaggagccgggagcgaccgaaaagtttaaagagataagtgcagcatatgaggtgctgtcagatgaaaagaagaggacgttgtatgaccaatatggtgaagctggggttaagagtgcgaccaacccatttgatttgtttgagacattctttggaggcagcatgggtggtttttctggcatggaccagagcacgtttaggacaagcaggcaaaatactgttttacagggtgaagacatcagatatgatgtggttttggggttcacagaggcgatatttggaacagagaaatatattatactatctcatttggaaacatgtgatacatgtggtggttctggatcaaaagctggctccaagatgagaatatgttcgacatgtggtgggcgagggcaagtaatgcgaactgagcaaacaccatttggtctgttctcccaggtttctatttgccccacttgcgcaggagagggcgaagtcatctcagagtattgtaggaaatgttctggagaggggcgtatccgtgtcaggaaggagatcaaagtaaaaatccctccaggagtgagcaaaggcagtactcttcgtgtacgtggggaaggtgatgcaggatcaaaagggtaa

SEQ ID NO: 6081 - DNA, 882 bp, Zea mays
  Peptide Sequence Number=SeqID_47860
atgggcgtgcctgacgtctgcgcgcgctgcgcgcgcaataaatgcaccgcagggagccgttggcgccgcagagagacgttgctccgctggcacaccggacagtccggggttcgaaggctggcccccgaagggttcacagtcgcctcagacaccgagcgagggatgaccagggaaggacagcgccgcctgcgccactccgactgcagtgccactcgacagagtgagtctgacaggcagtcaggccttgccaaaggcgccacgacgaactccgctccgcccgaccccagggctcggactcgggctaagacccggaagacggcgaactccgctccgcccgaccccagggctcggactcgggctaagacccggaagacggcgaactccgctccgcccgaccccagggctcggactcgggctaagacctggaagacggcgaactccgctccgcccgaccccagggctcggactcgggctaagacccggaagacggcgaactccgctccgcccgaccccagggctcggactcgggctaagacccggaagacggcgaactccgctccacccgaccccaggactcggacttgggctaagacccggaagacggcgaactccgctccgcccgaccccagggctcggactcgggctaagacccggaagacggcgaactccgctccgcccgaccccagggctcggactcgggctagcacccggaagacgacgaaactccgcttcgcccgaccccagggctcggactccgccctggcctcggccgaacgacttccgcctcgcccgaccccttggctcgggctcggccacggcaacaaaaggcaaactcaaccttggcttcggaggaacccccacgtcgccctgcctagggcatag

SEQ ID NO: 6082 - DNA, 1452 bp, Zea mays
  Peptide Sequence Number=SeqID_47861
atggacacggtcgagaagatcgtcgaggacttcgcctcggacatcgccgtgagccccttctcctccgggacgagcctccgggagatgatacgcgcgatacgcgcgtgcaagacggcggcggaggagcgcgcggtggtgcggcgggaatgtgcggcgatacgcacggccatcagcgagaatgagccggagctccggcacaggaacatggccaagctcatgttcatccacatgctgggctaccccacccatttcgcgcagatggagtgcctcaagctcatcgcggccgcgggattcccggagaagcgggtgggctacctcggcctcatgctgctccttgacgagcggcaggaggtgctcatgctcgtcaccaactccctcaaacaagatctcaaccacacgaaccagttcatcgtgggccttgcattgtgtgctcttgggaacatctgctctgctgaaatggcgcgggatctttcacctgaagtggagaggttgatgcgcagtagggaagtcaatacaaagaaaaaggctgctttgtgctctataaggattgtcaggaaagtgccagatttggcagagaacttcatgggcctggctgcatcattgttgaaggagaaacaccatggggtcctcatatctgcaattcagctctgcacagaactatgcaaagcaagcaaagattctctagagtacctgaggaagaactgcatcgaaggtttggctcgcatactgagagatgtgtccaataggtcatatgctccggagtatgatgtttctggcattgttgatccattcttgcatattcgagtccttaaacttttgcggatcttgggtcaaggagatgcagattgcagtgaatatatgaatgatattcttgctcaggttgcaacaaaaactgagtccaacaagaatgctggaaacgccattctgtatgaatgtgttcagactataatgggtattgaagctactagtggtgtaacttcaaccgcaagcacagatattcttatggatcttctgtccattggatcatctccatcacagaatggcacccccgtaacagacttccgtcatcctggacaagcagagtctaaacctgttcctggtgtacctgaagctgttgacctcctcggtagtttgtcaccagccgagtctaaacccacaccagttgtacctaaggacatggatctgctcgacggtttgtcatcaaatacatctatttctgagtgcaaccttgaagatcacgctgctgttccaaagttcatccaattgagactggatccggctagtggcaacactgttccagctaatggaagtggttcagtcacacaagggctcaacatcaccaataaccaacagggacagcagcgatgtgatcttcaaattcatcgtgatgtattcgacaccacgctaaaggatggtctgagcaaactttcttcagctcctcaatcattgtaa

SEQ ID NO: 6083 - DNA, 657 bp, Zea mays
  Peptide Sequence Number=SeqID_47862
atgactttgtgtccatatgttaaggttaagggtccacatcgcttaaaaatgtcactcctatggaagagtaacatcgacgtccgtctcctttcagcagccttcggaccatcgctctctccaatcgggcgagggttggggttggggtacgcgccactgaggtcgagaggcggtggaataagagaggagccgctgtcgcaccagcggaggacgagcagtgcatggcggagtaggagaggactcgttgccgcaccgccgccactgcaggggggacgacagacactgaacgaggagaggggccacatccgcaccatcgctccagcgagacgacgggaggcggccgaggagaaggtccgccgcagccgcacaacggtgcaggcgaagacgggggatggacttcatctgctgcgcaccgctgctgttggggcacgacaggtggtggaggaggaggtccatcgcagccgcgctgacgttgcagcggaggacgaagagggcataggggaggtggaagggatcacatcggagagaactggtgatggagcctcgcgagtgagggagacaatggttggagtcctagaaggagagagcttgcgaagctacagggtagatgaatccgattctattttgggcgctgctataggtagtgagccgaagaggtga

SEQ ID NO: 6084 - DNA, 945 bp, Zea mays
  Peptide Sequence Number=SeqID_47863
atggcagtcgacgcagctttgcggctgttgtggcaaccggtgcgtcggtgcccctctggaggggtttgcgcagaggctagggcagtggagacggcggaggctacctgctttgacctgggatcctggcctttcgatgtgctggatggcatcttgggcgaaaaccttggcgatggtgacatccgtggacgccacttccccctgttgagggcgtcgcattgctatgtcttccagttcgtcttgacctcgaagttaccttcagttcatgctttcgcttctcgacgtctggtcgggcaaataaccggaggtgggtattggatcaagattgctgatgaagaatcagagctgcctcgagtaccccttggtctttgcaccgtcaatgtctcaccactaagtccagaaccaaatcctgaagagagtaagctgacgtatgtcgaggagcagcttggggacgccatcgttggggagagcgagcagctccagcgccctctcggaaatcctagactgaaagaaggaagtggtgtacttgcgggcctccgactcgtcgtagaacacatccggcggcgcctggaactcaggccgaggcatcttcactctcctccgagttgccgctctcctcggtttctcgcctcgcaggcacaaacgttgctggtgccgctggctaacgaatcgaagccagtatgggccgagttccgttttctcagaagacttctgagctcaattgccacagcagcagcagccgccgacgccgacgtgcagcccgccaatagctgccgtacgcttagactggtttatctgtttgtggcgcagacgcccaaggtggcgaagcaggacaagaagaagaagccccgcggccgcgcgtacaagcgcatgcagtacaaccgccgcttcgtcaccgccgtcgtcggattcggcaagaaacgcggccccaactcctcggagaagtag

SEQ ID NO: 6085 - DNA, 759 bp, Zea mays
  Peptide Sequence Number=SeqID_47864
atgtctcgtcggctcatcaccagcgtacacatggaattattcaacccgtccccgtctacgaatagatcggtcgggggtggcgtggggaggggcggggaggatggatttccgagaagagagatgggtggacatgtcttgaagataagagagagatgggtcatgggtgaggtgtttgggaagagaacaagagacgaaggagtgaggctgacagcagccaagtccggcctcgggcgccataggaaacttcgcctcgcccgaccccaaggctcggactcggcctcggccccggaagacgacgaactccgcctcgcccgaccccagggctcggactcggcctcggctccggaagacgacgaactccgcctcgcccgaccccagggctcggactcggcctcggccccggaagacgacgaactccgcctcgcccgaccccagggctcggacccggcctcggccccagaagacgacgaactccgcctcgcccgaccccagggctcggactcggcctcggccccggaagacgacgaactccgcctcgcccgaccccagggctcggactcggcctcggccccggaagacgacgatcggccctggcctcagccgacggtctccgcctcgcccgacccaggggctcggactcgacctcgacctcggaagacagactcgacctcgaccttggaggagcctccgtctcgcccgacccagggctcggaccgaccacgtcgcaggaggggccatcattgccctacccctagctag

SEQ ID NO: 6086 - DNA, 1431 bp, Zea mays
  Peptide Sequence Number=SeqID_47865
atggcgaactggtgggtgctccccagcgcggtaaaagtgcagacctggatcaacaaaaaagataaagatgagtttgttggtgttggtgctcgatttggccccaagatagagtcaaaggaaaagcatgccaactggacaaacttgctgttagcagacccttctgattgctgcacccctccaagagagaaggttgctggagatattttgttagtggagaggggaaactgtaagttcactacaaaagctaaggtggctgaatctgctggtgcttctgcgattataattatcaatgataagcacgagttatacaagatggtatgtgagaccaatgaaacaaatttagatattggcatacatgctgttcttctgccaaaagatgcaggctcttctttacaaaggtctctctctagtggtgaagtcttagtggagctgtactctccagatcgtcctctggttgatactgcagaggtgtttctgtggcttatggcagttggtaccattctttgtgcatcatactggtcagcatggagtgcccgagaagcagatattgaacaagagaagcttctgaaggatggtcgtgaagtagcaccaaactttgagcctggaggttctagtggtatggtagatatcaacatggtatccgcaatactgtttgtggtgattgcatcatgcttcttgataacactctacaagctgatgtcccattggtttgtggagcttctggtggttatcttttgcataggtggtgtggagagcagtcataaattgaccaaagaacttcttgttagttttggaatgaccaagtgtgctgggtctgcaaacatgcttggtggccttactgtcaatgtcaagggtattaccttgatcgttacagtcatccaaattgttagaatacctaaccttaaggtgggttcagccctcctgggttgtgccttcttatatgacatcttctgggtttttatctccaagatgttgttccatgaaagtgtgatgattgtggttgcacgtggtgacaagactgatgaggatggtgtacccatgctgttaaagattcctcggatgtttgatccatggggtggatacagcatcataggctttggtgatatccttcttcctgggctgttggttgcttttgcattaaggtatgattgggctgccaagaagaccttgcaatctggctactttttgtggtcaatggtggcatatggttccggtctcctaattacatacgttgccttgaaccttatggatggccatggccagccggctctcctttacatcgtgcctttcacaatcggcaccttcttagcactgggcatgaagagaggcgagctcagaaacctgtggacaaaaggacagcccgagagagtgtgcacgcacatgcacccatcccccaaggattcgcctgttgcggtcagctcgctgtcgtag

SEQ ID NO: 6087 - DNA, 426 bp, Zea mays
  Peptide Sequence Number=SeqID_47866
atggcccgcagggcgctggagctcgcggcggttctgctcgcgctggcggcgctggcggccgtggcggccggaggggacatcgtgcaccaggacgacgaggcgcccaagatccccggctgctccaacgacttcgtgctgggattgaattcgtcgtggactcgtggagtttgcaatctcgcctcggatggccgtaccgtcgctttatttttttgggtgtggattgggttgggtgttcagccacgtcatttgcttggacgggaagagggacgattaggtcgcccgtacggtctcgcgtacagcatcgtcggctatggagtctctagagcttcattagatatgctgttaattacacggagtatgcccgttgcctttatgcgcctcattagatacgatgatcatgatggcacttacgactttcaagtttga

SEQ ID NO: 6088 - DNA, 678 bp, Zea mays
  Peptide Sequence Number=SeqID_47867
atggcagtcgctccatccgcgccctctttcttcccatcctccccctcaaagatctcgtccacctggtccccctgtaatactctctgggagcagggccaccaatgcagacgtccctcgtcgcggcgcagctgtggcctacgctcgacgtgcccgacctgctccgccacgctgacctggttatccgaggtcagccgcatcgaggaggtcgaggagcccatcaagccagtgctcaccttcgcctcgccgtccgagagaagagaagttctcaagagtgaagcccatgcagctggtgacctgggtgctgttgtccacagagcttacttcagaatggatgaaatgatgcgaggtcaaagaggatggcgggagcttcaagcacttggagataagataaatcagtttagtggcataatagaaggcttaatttggtctcctaaagcaagtgattcaaatgataaacatgatgattgggcttttgaggagctcttaaagagtgggttccaatttgctgaactagagtgccttgttatgctggaaactttgatcagaaataagcaactcattgtggcaaatgctggtgactcccgctgtgtcatctcaaggaatggtcaggtgctgcagatgcatggtttgagatcagggttgtatagacaaacagtaaagatatcaagcaaagggtga

SEQ ID NO: 6089 - DNA, 1482 bp, Zea mays
  Peptide Sequence Number=SeqID_47868
atggcgtccgtgccgctgtcctcgccgtcgcaggccggcctccttggccccccgttcccgctcctgccaccgcccttcggtgcatgcctccgctaccgcttgccgaggctgcctacaggcctctcgtcgagcgtgaggaagggagggctcctgccgctgccgctcctggtgcctccccgggccgcggggggcaaggacgggcgggccgtgaccaaggaggagttggaagaggaggaagaggagttcgaggtgaccaaggagggcgaggaggttaatcaggagacaggaggaggcagtggagccaccaaggaggcggcggcaaggggttcgggtcgattcgcggcggactacgtctcgctcggcgtcagggagcccgtctacgaggtgatagaagtgagatcaaatgggaggatgtccaccaagaaaataagcaggcggcagctactgaaatctagtggtctccgcctacgagatactagaagtgttgacccatcactatggttaatgaattcaatgccttccctgctggtacgtgagcaagctattttactcaatcttggttcgttgcgagcaattgctatgtatgcgcgtgttcttatattcaactataacagcccaggagggaaggcctttctagggttattactgtctaggttaaatccaagaaacatcaatggtgggcctgcaatgccttttcagcttgaggttgttgaagctgcacttctttctagaatacaaagattggagcagagactaatgaaaattgagcctcatgttgaaagtcgtttggttcaaactgctctgaaactagatatttcatatgatctactgggggtcacacctggggaagctgacatggctgttgtggaggacgacgtcttagaggtggctacattgctagaagttctgccaaatcgcttgacagctgatgtgttggagcagcttcgtctaagtaaacaagcattggttgagctgggatcacgagcaggtgacctcaagcagatgcttatcgatctcctagatgatcctcatgaaatcagacgaatatgcataatggggagaaattgcacacttgatagattgagtgatattgtggagtgcactgttcctttagagaagcagattgctgaagaggaagaggaagaaattgaaatgttattggaaaattatcttcaacgatgtgaatcatgccatggtcaagcagagagacttctgaattctgcaagagagatggaagactcgatttctgtgaacttaagttctcgacgacttgaagtaagtagagtggagctgctgcttcaagtgggaacattttgcgttgcaataggagcattaattgcaggaatatttggcatgaatcttaaatcatatctggaaacaaatgcgtgggcattttgggtgacgactggtggaatagtagttggagcagtagctggatttttcgtcgtatactcgtatctaagggctaggaagatattgtga

SEQ ID NO: 6090 - DNA, 261 bp, Zea mays
  Peptide Sequence Number=SeqID_47869
atggcgagctcttcggtgctcgccgtctcctccatccccctcccttccccgggcgcctataaaaggacccgcccgagcccgtcttcaccacacagctccgggcatctccactgccttcctccccgagcctatcgagctagcgccgccgtgctcccttcgtcgctccgggcgccacttttcccccctattgtggccggcaaccgcaccggcggcatcaccgccgcgggcacccaccaccgtgctgcggaccggccgccatag

SEQ ID NO: 6091 - DNA, 585 bp, Zea mays
  Peptide Sequence Number=SeqID_47870
atggacgtggacaagctggagaacggcggcggggaggagagcccgcggcccgccgtcaagtaccacggctggaaggccatgccgttcatcatcgggaacgagacgttcgagaagctggggacgctgggcacgtcggcgaacctgctggtgtacctgacgcaggtgttccacatgcggagcgtggacgcggcgacgctgctcaacgggctcaacggcaccaccagcctcgcccccatcatcggcgccttcctctccgacgcctacctcggccgctacctcgcgctcgccatcgcctccgtcgcctccctcatcgtaagcgcagcgatccatctccagtccacccctctcgctcgttacctgcttaatttgagggacaccggggtcgggtccgagctagctaggccgccggcggcgggtcggaatcagttcgggggtagatggaatggaattcggcatgctgttgctgcagggccatttaatgattgcgagacttggataccaagtagtaggacagctgtcagctgcaccgtgaacgggccatgtttggtttcaatcagttttaacttttgtccgtccaaatactga

SEQ ID NO: 6092 - DNA, 519 bp, Zea mays
  Peptide Sequence Number=SeqID_47871
atgactcagcctcgtttctacaaactagagttccccacctacgatggcacgacagatccccttccactggataaatcagtgcgggcagttgttccgtggtcagcggacgcggacctcggattgaacgtgactggcctcctaccacccttgagcagaacgaagactacgccgaccgcttcaacgttgtactgtgcgacacccacaatttctcagcggcatagaaggcagagttgttcgtcggtggccttccagattgatgtcgagcttcgggagccacgagacctacagactgcgatgtacttggcacgggctttcgaaacacgcgcaaacgccggcatcaccaacccgcagcgtcaagccttccccacgccaaggcccgacgccgttccattgtctgcctctgacccccgcggcacaagcgagtgcgcaggcaccaacacatcaagccggcgcaggcggtctggacggtgctgcgaccacccgaactgtaacaaaaatggacccgggccatttggctaa

SEQ ID NO: 6093 - DNA, 417 bp, Zea mays
  Peptide Sequence Number=SeqID_47872
atgccctggacgtatgacggaattggcaatggtgatggtggcatgggcaggaggtggatagggacggggttgctggttgtctgggtgggtcctaggagctggggaactgacgctggtggtaaggctggtggcagctgctggatgtgttgctgtgttgggttgctggatggtaggaaagtgttggataggaaggtggtgatggctgccatggatcgggtgagatcggtgacctcctgtgcgacggaatctagggttatgggtggcgtgggtaagggaaatggaggacaatggatgtggtgggttgtggggggcatagatgtcgctggtggcgtggaggtgatgggtggaggacctgacattgccgataccagattgataggattcctgatcctaccggggatgtcgcgtagggaatag

SEQ ID NO: 6094 - DNA, 357 bp, Zea mays
  Peptide Sequence Number=SeqID_47873
atgaagctgagccctcagagctttggttggtgcaggcaggaggtgtccatcatgaactgggggaatggatgctcgctcgtccaagtctggttgtggctctttgggcagcaagggaggaagccgtcctctggtgtttggctggggccaaagctctgtctttccttcagagttctttgtctagctagtgctgggagaaagttggaaagatcagaaaacggcatgttttccttaaatctgagactgtaccctggtagatatgagattaagtttattgttgatggtgtttggaagaatgatccgctgcgacccactgtgcacaacaatgggcatgaaaacaaccttctgcttgtcacttga

SEQ ID NO: 6095 - DNA, 411 bp, Zea mays
  Peptide Sequence Number=SeqID_47874
atggcgaccttcaccgcagtgcaattccgcccgcctagcccagtaatcgggcctataaaggcaatgaacacccctcacagctgctccctgatacgtccatgggattccagcaatcgcagacatcctatatgcacggcggtgcttttgcttgctattgccccttcgttctccctctcgatcacaacgaccgcacacggctatcggcatgggtggggggttcacggctcgaccatttatgagcaccggtcacgggaccgagctaagagggtccattgcgagatcctcgaggttgttgcatgctcataccgcatgaggagtcctaccgatgcacccgccgtcatccattcaagaccatcccaggagaacgacgactgtcaggtcgggtccaccgtgcagtggcacagggcgtag

SEQ ID NO: 6096 - DNA, 489 bp, Zea mays
  Peptide Sequence Number=SeqID_47875
atggaggacggtgccgccaccgccgaattgatccgcgccgcggcgagttcggcgccgtatcgccactccgccttcctatccgcgctttggtctccgtcgtcccagttcccatctccggccaccactatttctgactcggtcagcactgatcgggatttctcatcacgggaactcaagccgccgcatccacttcgcacgagcaccgtagttcaaccatccctgggtggtctggcggattcaacagggtgcatggatcgtgctcaggactattggaccagggaatcatgggtcccgtggatggaattgctcaccggatcgggctcacccgcggccgcgccgcatcacaccatggtcggagtcgtcatcgcaaaatcattggcatggttatgctctttcgccggcgtgttccaccgctgcggcacggggcggcgccgcctcagtccggcgatgtttaggaagatggtcgttccaccattagatgatagctag

SEQ ID NO: 6097 - DNA, 1089 bp, Zea mays
  Peptide Sequence Number=SeqID_47876
gagtgcacgcgctcactctcgatgctcgcgggcctgctcgtggagctccgcgacaccacccgcctcgtcgcgttcgtgaccgaccagttcgggataaccttcttcaccgctgcacatgacgccagcgtgaccgcacggtgcctcttcatgcccatgaacctccatgcgctctcacttgtcctccacctccccgagcaggcctccttcatgcccggcgagtttcgggaccttgccgagccggtgcgcctgcccggctgcgtgcccatcccggggcccaacatcgtcttgccattccagtccctgtggacgcggacagggtcgggactgccctcgacgccgtcggtggcggtcgagacgcgggcagagagggcccgacggaggtggagcagcggaaggggcatgcgggcaggagcgaaagggcgagggcgcccagggaggcgtggagcacgggcatcggccccgacagtattccgagcatcgcgacgacggggtgggggaatggacctatgcggggcggtcgcagagtgtgggcgaagaagggggtggttgtggacgagacggagcgacgacgggggtgggggaatggacctatgcggatgcggggggagcgggacgcggctgggggagcggggcacgcgggctgccatggattggcgcaatttgtgggctcgcgtcgcacaaggaaagggggagcggggcgcgggggaagccgacgttgttgggggagcggggcaaggctgccacgccgtcccgcgatttgtgggcaatctcgccgatctcgcgtcgcgcaaggaaaggggagccgggcgcgcgggcagccatggatggaagctggcgctgctcccgcggctgggggagcggggcacgcgggctgccggagcgggggactggtttgtgggctcgcgtcgcgcagaaaggcagaatgcgatgcaaaggcagaaccgagctgatgtcctcctcctaagtgtcaacgacggtgtcaccgtcctagctccattgattcgcctcattcgaagaaatgaggggaccgtgcaagaggaatctagattaactgattggctcaccctcctcctcatcgacatttgttag

SEQ ID NO: 6098 - DNA, 378 bp, Zea mays
  Peptide Sequence Number=SeqID_47877
atgcagcctcccgagaggctggaacactgcacgctagccgcgcccgcgcaggtgggcgaggaagaaaaaagcaagttaataatcgttttcattgatgataaggcaggcagccggcaacaagttgatgaccatcgctcacatgtgctgggccacgataacgaggcattagtacaactggggatccggagtgaaaggagcgcgccgtttcgtgcgacgaacccaaacccaaacccaaacctgacatgcaagcaaacacggccgcagggccgctcaactgatcagtctcaggccagccagggcaaatccggtactgccaggtcatgtcacaggcggttggagtacaacgcccggaatgttttcgtacggatggatatgtga

SEQ ID NO: 6099 - DNA, 1296 bp, Zea mays
  Peptide Sequence Number=SeqID_47878
atggatttgtcatccgacgacgtgaaggcggcgaacatgcggcctgcggttgctgctgccgacggcacgtcgacgcttctgcggggttggcgggagttcatgcggagcggcgcgccggcgaggttcctctgttatgaggacggcaagtggatcggtatcaccggagaggcggtgccgcagctgcgccaggcgttccaggagaggagggcgatggccgatgcttcgtacgggggcaaggcgtacctgttcgacttcctccgcatgatcaggatcgacgaggtcaccggcgaggagaccgggctggcgtggatcgacgaccgcggggactgcttcttcccggcgcccgactgcggagggaggaagcgcaagagggacgacgagccggcggaggacgaggccgagtcatcctcgggcgtggacgtgcgctcaggggagagacacggcgtggacgccaagaagatgaaggcatgggagaacgcggcggtgaggctcgaggagaacgacatgtactaccaggtcgtcagcaagctattcctcagctatgggatggcgcaacgcggcgcggcgatcacggaggtgcgcaagatcgcgcccggcgcgaggaccgtggcgttccgggaacaggggcagcgcctcgcctacgcgcgctgcacagccaccggcaccgccaagttcgcatggtacggcgcctcggaggacgacgtggccgccgtcgtcgagcgaggattcgtgaggaacaacgcgccaaggctgggcgcgcgcaagcacggcgacggcgttcatctttcgccggcgcagtgcccttacacgagtgccatgctggccaaggcagacgggagcgacgaggcgcacatcgtgctgtgccgcgtgctgatgggccggccggaggctgtcccggcaggatcttcgcagttctgccccagcagccgcagctacgacagcgccgtggataagctggagaatccacagtggtacgttgtgtggaacatggatatgaacacgaggatcctcccggaatacgtggtcagcttcaagtgctccaagctgcaacagatgcgagaatcatcagaagcgacttcaaagctgaagaagccggcaccagtggctcgcgacatgttcccgacgcttcttgcagagatccagcagatcgtgccagacaagtgtgatctattgcaggagtcatacaaaaacttcaagatgggtcagattaagaaagaccagttcatccagttcctccgcaattacgtcggagacgaagtgctgaaaaccgtggccaagaaacttcgacgatgctaa

SEQ ID NO: 6100 - DNA, 333 bp, Zea mays
  Peptide Sequence Number=SeqID_47879
atgccacctcgctcacatgatcacaaggctcgtagttccggtgttgctcctgttgcccctccagctattgaccctactctggcttttatccttcagtctcttactcagcagcaggctcatctggcagcagagcaggctcgacacgcagctattcaacaacagatgtccaagcggatgatctcaatgtttcagactattcaggaccgtcaggacacccttcagcagcagctcttagcagacaggatagagcatcgggcattcatgacgcatatccttcagcacactggtgttcagctcccactagtgcggtctgctcctcctccagctctttag

SEQ ID NO: 6101 - DNA, 141 bp, Zea mays
  Peptide Sequence Number=SeqID_47880
atggctaccttgttgttgtcctccaccattgagcgtcccctcgcctttgtccacctcaccgccgctccggtgtccgtcgcgccctgctccttccattcgtacagcactgctctggtggtcgtccaccccagcgccctgtaa

SEQ ID NO: 6102 - DNA, 489 bp, Zea mays
  Peptide Sequence Number=SeqID_47881
atggccgtgatgggttcaacatcagaaaagattggcacgcggtggcctggtggctgcggacctgcggtgcctggtggcgagcctgccatcctggtggctgcggtggccgaatgcgggcggcggcttatcactggtgggcggtggcacgcggtgccacggtggccggctggccgccagacggtgttccaccctatccccttccggatgagctttgatcacctaggctacccctctttggtaagtacctacacgagtacatataccaaccttccaggtcaccatctgcggtcagcactggacctgcttgcatcctctccaacctcagagcacgtgggctccgaaggagaggttgatctagatcctggactggacttctctggattctgtgatcccggggtcacgcaacactttttgtctgcatgtgattactacctctttgatgactccaacgactacaactccgacgatgagggttacaacccgacttga

SEQ ID NO: 6103 - DNA, 1866 bp, Zea mays
  Peptide Sequence Number=SeqID_47882
atggagacccataccgcagcaaggtccggggtcccctcccggaaacaaccactagtgcagtgtgaaaatgcgagatcgatctggacggacgcgtcgtcggccagccaaagtcgcactctgcgacttccactcgcctatcgcggggacaagggcactagcgcacgggacggagcctgctggactccatccagccggcgccgacggctctcctcgccctcggcgccgccacgacgacccgccgtccctccgacgacggccagggctcggccggcactggcgtccacggccgccgtggcgttccccgagtgccccgccgactaccaggactacaccccctgcaccgaccccaagcgctggcggaggtacggcaactaccgcctcagcttcatggagcggcactgcccgccgccgcccgaccggcagcagtgcctggtgccgccgcccaaggggtacaagccgcccatccggtggcccaagagcaaggaccagtgctggtaccggaacgtcccctacgactggatcaacagccagaagtccaaccagcactggctcgtcaaggagggcgaccgcttccggttccccggcggcggcaccatgttccccaacggcgtcggcgcgtacgtggacctgatgcagggcctggtcccgggcatgcgcgacggcaccgtccgcaccgcgctcgacaccggctgcggcgtcgccagctggggcggcgacctgctggggcggggcatcctcaccgtgtcgctggcgcccagggacaaccacgaggcccaggtgcagttcgcgctggagcgcggcatcccggccatcctcggcatcatctccacgcagcgcctgccgttcccgtccgccgccttcgacatggcgcactgctcgcgctgcctcatcccctggaccgagttcggcggcctctacctcctggagatccaccgcgtcctccgcccgggcggcttctgggtgctctccggcccgcccgtcaactacgagaaccgctggcacggctggaacaccaccgcgcaggcgcagaaggccgacctggacaggctcaagaagatgctggccagcatgtgcttcaagctctacagcatgaagggggacatcgccgtgtggcagaagtccgccgacgcctgctacgacaagctcaccccggtcaccacgcccgccaagtgcgacgacagcgtcgaccccgacgccgcctggtacgtgcccatgcgctcctgcgtcacggctcccagccccaagtacaggaagctggggctcaacgccacgcccaagtggccccagaggctcagcgtcgccccggagcgcatcagcgtcgtcccgggcagcagcgccgccgccttcaagcaggacgacgcccggtggaagctcagggtcaagcactacaagacgctgctgccggcgctggggagcgacaagatcaggaacgtcatggacatgaacaccgtgtacggaggattcgcaggcagcctcatcaaggaccccgtctgggtcatgaacgtcgtctcctcctacggcccaaactccctcggcgtcgtctacgacagagggctcatcggcgtcaaccacgactggtgtgaggcgttctcgacatatccacgcacctatgacctgttgcatcttgatggcctgttcacagcagagtctcacaggtgcgagatgaagtacgtgctccttgagatggaccgtatccttcgtcccacgggctacgccataatccgggagagcacctacttcctcgattctgtggcacccattgccaaagggatgcgatggagctgcgagaagcacagcagcgagaacaaggccgacaaggacaagatcctcgtctgccagaaaaagctttgggcaggaaagcagtga

SEQ ID NO: 6104 - DNA, 522 bp, Zea mays
  Peptide Sequence Number=SeqID_47883
atggcgcgtgcacgcggtcggtccgcggcggggtgtgaatccgcggcggcttgcaactacggcgaggaattgcaggggctcgggtcgatcctcacgtttggcactccacacacacaatccacacacacagtagagcgcccaagacccaaccccgaccaccgaacgccggtgcaggagcggggcaacaatggcgggcggtggccttccctctcgggtctgtttgctcgttcacgggaagggggcggctggcttcgtggggtcttggggttccgagttaagcgtccgcgtttatacgcgcagcccaggcggggtggaggttacgccaccggcgaaatcggcccggtcgttggcgccagctggatccgcggaggagatggtatgactgcgattccgattcgaacggcggtggaagacgtgcagatggatgggatccgatgctcagtggagcggcgagttcacgtagtgggcgcgggggaggccgagtcaatccgctcctgtggattcgcggcggaggactgttag

SEQ ID NO: 6105 - DNA, 501 bp, Zea mays
  Peptide Sequence Number=SeqID_47884
atggcagctcagaccatagtactgagctctcggagaaggagccgaaagcatagtcgtgggagcaacccggatcactgggaggctacatgtctagtacatcgtccgaaggatgaactccgaggtgcagaggcctactcagagcactatgctatctctgagagggacactttcgaggcgaccatggtggatgacggtcttaacctcaggtattatccccatcgttcaattggcagtacggagagcacgattgtctcacctgtcggtgatggtaaccctagattgagcagcacattcaacctggtcgccatgctcaacatcgagctagaccatgctttggacgagctaagcatggctcatatggagatcgcgaaactgcatgctaagcgcgcagagcgccgccaccaggagggtggttccctcgcccacgctgggactcaacacacttacggctcgccaccatgtggtcaccatgcctatggcgccccaactacacgaccatga

SEQ ID NO: 6106 - DNA, 135 bp, Zea mays
  Peptide Sequence Number=SeqID_47885
atgggtgtcgccaacgccggactcgtctacttcaatggccgcctgcttgccatgtacgaggatgacctccgcaccgtcggccgctacgacttcgacagtggtacgaaggaccagcagcatgtaggggtgcgctag

SEQ ID NO: 6107 - DNA, 2190 bp, Zea mays
  Peptide Sequence Number=SeqID_47886
atgcactgcatcgccccccgcctgctcctcctcccgctcccgaccgtctcccgccacgcgctatcgccaacccagacgccacctcttcctcccctcctcccctcccgcgcctgtaagttccacctcgcctcggcgcgctcgccgtcccgcgccgccgcttcggtttccggcgacgacgaggatgaggaggttgacgtggatgacgacgaggacgacgagacaaccatccgcaacgtagacgatgaatacgacgacgatttcgaggacggggatgagggagatgagggcgatgaggaggcggtggacgaggagagcggtggtgagtacgaggaagaggcgggggaggacgaggacaagcgggaggataccgcagcgcggaggcgggactcggaggagtataagtcgcggcgggtggcgaagctggtcgccgaggtgcgggagttcggggaggacgtcatcgactacaacgagctcgccgggatctacgacttccccatcgacaagtttcagcgcttggctatacaagcatttttaagaggttcatctgttgtagtttctgcacctacaagtagtgggaaaacattaatagcagaagctgcagcagttgcaacagtagcaagaggaaggcgtctcttctacacaacaccattaaaggcattgtcaaaccagaagttccgtgatttccggaataccttcggtgatcataatgttggccttcttacaggagattctgctatcaacaaagatgctcagatcctaatcatgacaacagagattttacgtaacatgctgtaccaaagtgttggcatgacagcctctgaaggtagattatttcaagttgatgtcattgttttggatgaagtccattatttgagtgatatctcacgtggcactgtttgggaagaaactgtcatatattgtccaaaggaagtccaacttatatgtctgtcagccactgttgcaaatcctgatgaattagctggctggataagtcagattcatggtaaaacagagcttgtaacatcgaacaaacgtccagttccgcttacttggcacttctcgaagaaatattcattacaaccgcttcttgatggaaaggggaaaaaaatgaataggaaactgcggatgtctaactcccaaaacttagcatctccaaagagtgagttctattatgtgaaagggaagaggaggtttagaacaaataaaattgagcaaggtaatagcaggcctttggacatatcgaaacaggttccactaatacgtgacactttatcacaactatgggaaaatggcatgcttccagctatctggtttatttttagtagaagagggtgtgatgcagctgttgagtaccttgaggattgcagactgttgcatgactgtgaggctagtgaagttgagctggaacttaggaggttcaagatgcaatatcctgatgctattcgagaaagtgctgtgaaaggactcatgcgaggagttgcggcccatcatgctggttgcttgccactgtggaaatcatttattgaagaattatttcaacgtggccttgttaaagtagtttttgcgacagaaacccttgcagctgggattaatatgcctgccaggacggctgtaatttcttctctcagtaaaagaatagatgctgggcgccagctcttaaccccgaatgaactattccagatggcaggtcgtgctggaaggagagggattgatacagttgggcatgctgttcttgttcagactccatatgaagggcctgaagagtgttgtgacatcatctttgccggacttgagccacttgtctcacaattcactgcatcatatgggatggttttgaatcttcttgccggttcaaaagttacacataaacagaaagaatcggatgatgttaaggacaagcattctggaagaaccttagaagaagctcgaaagctagtggagcaaagctttgggaattatgttggtagcaatgtaatggttgctgccaaagaagagactgaaagaataaggcaagaaatacaatacctctcttcagaaattactgatgaatctattgatcgaaaatgcagggaagaattatcagaagaagactatgctgagatttccctcctacagaagagactaaaggtctattctacacccctgttcttcaggaagagaagcagatcagaaatgaggacgaatctctag

SEQ ID NO: 6108 - DNA, 1839 bp, Zea mays
  Peptide Sequence Number=SeqID_47887
atgggcgccacaacgcggcgcgagccgctgaagcagcgcgtcaaccgctgcctcctcaagctttccgaccgcgacacagaggccatggcggccgccgagctggaagccatcgcgcgcgcgctcgagccggacgagctcccgaccttcgtatcggccgtttcggacgcgcgccccaccgacaagaccccactccgccgccacgcgctgcgcgccctggcactcgtcgcggcgtcccacccgcgcgacgtcgtggccccgcttatcccgcgcatcctcgccgccgcgctccgccgcgtccgggaccaggactcctccgtccgcgccgcgctcgtggacaccgcgcgcgccgcggcggcggcctcggcctcggcctccaccgcgctccggcctctcacggacgcgctcctccacgagcaggaccagtgcgcgcagctagcggccgcgctcgccacggccgcggctgtcgaggcgtccgccgtcaccgacgacctcgcttcctacctccacaagctccaaccgcgcctcctcaagttacttcgcagcaatgccttcaaggccaagcccgcgctcattaccctcatcggcgcctccgctaccgtgggcggcgatgccgaagtcactgcctccatcccgtgcctccgcgatgcagtcgctagcgatgactgggcagcgaggaaggccgcggcggaggcgcttgctgcattggccctagagcacacggatcttctcacgacctacaaatcctcttgcgttaccttcttcgaggccagaaggtttgacaaggtcaagattgtgcgagagtcgataaaccggatgattgaggcgtggaaggagatcccgggtgctgaagaggacgagtgctcctccgctccgccatcagcgtcccagtcacaacgaagatattctcttacaggaagtgcaagtgatgggcgatatccagctgcttcgctgggctcaaactcagttccatcagcaacaaggaggagcagattacctgtgagcagatcatctccacctgatgtgtcacccagtgtcaccaaaacatatagtccttcatccatcaggaacaagaagctgtcaccgccttcatatcggaaagcgcgccaagcaaataattgtaactacaaggttgagatagctgttgctccggatgctacaccaatcaaagtggtgacggaggagaagctgctggaaggaggcaatgtgagaggcagactggaggctaggagggcactcttccaaggcagccaggataggtcggccaagctggctggatacaaagcagggtcacgagttgttccatacgagggtggtggtaatttggaagagatttcagaagttgaaggtagatcggaaaggtatgcagttcagaaagacgagagcttgtcagaaataaggacgcagctccttcagattgaaaatcagcaaagcagtttactggatcttctccagaaatttatggggaagtccgagaacggtatgcgttctttggagacaagagtgcatgggctggagatggctttggatgagatctctcgtgatttggccttctcttcaggaaggatgtcaagcagagagcctgatgcaaagacgtgctgcattccgagcccaaaattctggagaaggcacaatggtggtaggtcttcctcaaggttttctgtctcagacgcagcaaacagctcagatgggagcagaacttcttacaagtgggagaggcagaggtttgggcttcagggtgggtttgtcacaaacccattagccgagccgaacatttcatctgcagggaaaacaatggttactcatgaaggcaggaagaaggataaaactttacaaaagtga

SEQ ID NO: 6109 - DNA, 294 bp, Zea mays
  Peptide Sequence Number=SeqID_47888
atgccggagttacggtcaacaggagcctcgatctcgaatcccccacatacacccgtgattaacaaagagcaaggagagacgaacacaataagccacataccaacggtggagagtgtcggcgcgagtggcccgacggtgaatggcggttcggccggaggagcaagtctgcggcgagctattcgtcgggttaaggtgacgcccacgcccgattgccagcccgcgcaggatccccggtcgctggtgaacgtccttgacccctccctggttcctgagccgcaccaatcgatggaatag

SEQ ID NO: 6110 - DNA, 1572 bp, Zea mays
  Peptide Sequence Number=SeqID_47889
atgcaaatcaatcagacactgcgttttgttacttggactaattttatcagcagcgtgagagagaaatcacgcaggttcactagagttggcatgaaaaaaagaatcccccagaatctgcaaagacaaagcttggacgaaggcatcatcgaggctctcttcggcactgcagcagcaaaccgcaagccgaaaccttcagacaaggaatcgggcgaatcgtcggccagcctcgggcgctcaaacacaccggagcaaatattcctgctcgagccgcgcaagtcacacaatatttccatcatcctcaagtccctcacggtggggcgggatgaaataatcgacgctctccgtgacgggcaaacagaactcggcactgacgtcctggagaagctttcgcggctccacatctccaaggaagaagagtccaccatcttgaggttctccggggaccccgacaggctcgcccccacggaggccttcctcctccgcctcctcctcgacgtgcccaatccgatcgcgcgcgtcaatgcgctgcttttcaaggtgaactatggtgcggaggtcgcgcagctcaagcactcgcttcggacgttggaattggcgagccaggagctgaggacaaagggcctgttctttaagctgcttgaggcagtgctcaaggcgggaaacaggatgaatgccggaacggcacgtggcaacgctcaggccttcaaccttacggcgctccgcaagctctctgacgtgaagagcactgatgggagcaccacgttgctgcacttcgtcgtcgaggaagtcgtccgctccgagggtaagcggctcgccatcaatcgcaactacagcatccgccgctcgggcagtctcgcgaggtctggccacgagggaggcagctcggcagcaggcttcgcaagccaggggccatcgcgggaggaaaggcagagcgaatacatgaacctggggctaccaattgttggaggtctcagcacagagttcgccaacgtgaagagggccgcactggtcgactacgacgcagttgtcagcgagtgcgccattctagacggccgactcaatgagatcaagagactcttggagacctgcagtgatgatggatttgcgcgggggctgcgaggatttgtcagggctgcagaacaggagctgaaggcgctaagaggggagcaggaaagagtacttgagctggtccagaagacaacagagtactaccatgccggtgccaccaaggaacggaacgcacatccccttcagctgttcatcgtagtgagggacttcctgggtatggttgatcaggcatgtgtggacatcaagaggaaagtgcagcagaagaaaccagcgccgtcgtcatcgcagccaaacacagctgctgcccccaccgtggcggctgtggcagcggctgcggccacaacagcagcgacagcgtcagcgaccgatggtcaaacagcaccagctcagaaaccacccgaagcagatagcaaaagaaagagggtcatgccaagatttccaaacctgccagcgcacttcatgaaggatagtgcagattctgattcaagtagtgacgaggaatag

SEQ ID NO: 6111 - DNA, 420 bp, Zea mays
  Peptide Sequence Number=SeqID_47890
atgtgtaggggtaccaatccactaataggggttgagtggttttcacaacctatctatgtggtaacgggccactgctatgtatatgaaccttcttctgttgttactggtgttataagttatttagaagagcagagaaattcgctaatcgatctccaagagagacatagtgttaagataccttgcgaaatagatgcccagtttgctgggatggttgaagcctgggcttcaggactgacttggagggagataatgatggactctgcaatggacgatggagatttagcccgtctactcaggcgctctatagatttactagctcagattcccaaactgccagacattgatccggttctccaaaagaatgcacaaattgcttgcagcgtcatggaccgagtaccgattagtgagcttgccggttga

SEQ ID NO: 6112 - DNA, 942 bp, Zea mays
  Peptide Sequence Number=SeqID_47891
atgcccacatttcagattgatgagaagtactggccattgatgccagcattaccgtcatatgggtatgggcgggagcgcaaaggaccacgatttgggagcctcattcatggacagaatttgagagatgtagtcattacagctttcgagtacatcattcatgttttaaacgctttggcactgtaccaaacacttgaagtaccagtagatatacacccatttttctataacatcctgtctatactaactcttgcactagttacagattcttgtcaggatgtgcttattgagaattgctacatatcggttggcgatgatgcaatagctataaagagtggttgggatcagtatggtattgcatacggtcgtccatcttctgacattttaattcgcaatgtaaccgcccgttctcttgtgagtgctggaatttcaataggcagtgagatgtctggcggagttgcaaatgttactgtggagaatgtgcgcatctgggaatcaaggagaggtgtgaggataaagactgccacaggaagaggcggctacatccgtaacatctcataccgcaacataactttcgacaatgtccgtgctgggattgtgataaaggttgactacaacgagcacgctgatgatggatacgaccggactgccttcccagacatcacaagcatatcattcaagggaatccatgggcagggtgttcgggtgcctgtccgagctcatggcagcgacgtcatccccatcaaggacatcagcttccaggacatgtcggtaggcatcagctacaagaagaagcacatcttccagtgctcctacctcgaggggcgtgtcatcaggcctgtgttcccgaaaccatgtgagaacctggacgtctatgatgagcaagggcagcttgtgaagcgggcagtggccctaaacagcacagaacttgactacgatatatga

SEQ ID NO: 6113 - DNA, 360 bp, Zea mays
  Peptide Sequence Number=SeqID_47892
atggccgccgctcgagctgctctgttggcagctctagtggtttcagcatctacaccacacccaaaccaagcacatgggaccagggaggcagggactggactcgtggaagtggaatggaaccccacctgcttcctggcccatgacctcgcgacggcctcgcagttcttgatcattcgcttctgtcgccactccatcatcctctccacaatgccatccccacgcgcggcgcgacgcttctggccgaccgcttgcgagtgcaagtacgagaggaaaacgtcggctcagtcgatgtggtacacggcatccacatctgggccgaggagcgacaacgcgtactgcgacggctacggtgggtactag

SEQ ID NO: 6114 - DNA, 195 bp, Zea mays
  Peptide Sequence Number=SeqID_47893
atgatgagaaggatgtctacagtagaaggggcaccagaagaagaagaatcagaagattttatgaaaccagtaagaagaaagaggctcaaagattttttgaactcatcaagtctctgttcaatcaggctaaaagagagtgggtgggatttctgggcccaatccctatatggcaggaaacttggcgcacacatgtag

SEQ ID NO: 6115 - DNA, 720 bp, Zea mays
  Peptide Sequence Number=SeqID_47894
atggaaaagacccgagctgggcgagttgcacgcgaccacggcgcgcagggacaacacaggccatcggcaaactccggcgggcagcaacagagcagggcgcgccatggggaaaacagagaacgccgagctcagcgcgcgcgcaggggtgggatctggactgggacgagagcgcggggaaggggccgagccacacggccgacgaactccatggctaagacgagcaggaagggcgcgctacaggggcacacgacggctggcccccgaccatcgcggccacggccatggggacgcgccatggtcgagcggagcatgagcttgagcgaaatccgagcagggaaagagcgccggccggacttggcagaggaagcagagaactatgcgtggccacaggggagggatacaggcgaggaaccgcggcacgcagggacgctcggccggacgcggcaagcagatagagcgacgagccgaaggaggagcgagcagggaggagcgcgcagccatggaggaaccttgggcgcggcaaggaagctccagggagcagggagggcgcacggctggagagagatgggggaaggagagaggagcggcgcagctggagcagcgatgccgcggcagggaaggagctcgatgccggagctagagaaggaggccgctgtccgaacgccggcgagcagggagaggaagaagctccggccaggcgtgctctcgcgggagaactag

SEQ ID NO: 6116 - DNA, 534 bp, Zea mays
  Peptide Sequence Number=SeqID_47895
atggagctagttggaggctcttgtgttggaccgtcgtacagggttcgcgggttaactggaacatcgtcgtgtcgttctgtgaacgccgctgagggcggtgtccacgtctatcggctgacccgtagctcctcggacaaacatagtgaccttggattgaaccctaccatgctcgaaacctcggtacgcctcaacggagctcgtcgatccgctgttaatgtggctagtgaggcactagatggtttaaggtcgattaacttaggggaaataggagagcacctagaagaagaattcaaagtggaagtggaagaggtgtctgctcctacatctgaaactgctccaactgaagttgtctctgaaggtcctccagaagatatgcttagtatgcttatagacaaggaacaaaatgttttgatgtatgaatcatatttttacaaagaaaaagagactggagtgatgaaggtatcaaaggccttgatgacttcatcatttcagaagggtacctcagtcaggtaccaggttttcagaaatagttaa

SEQ ID NO: 6117 - DNA, 489 bp, Zea mays
  Peptide Sequence Number=SeqID_47896
atggggacgcgccatggacgagcggagcgtgagcttgagcgaaatctaagcagggaaagagctccgaccggacttggcagaggaagcagagaaccaggcgcggccataggggagggatacaggcaaggaactgcggcgcgcagggacgctcggccggacgcggcaagaagagagagggacgagccgaaggaggcgcgagcagggaggagcgctcagccatggaggaaccttgggcgcgggaaggaagctccagggagcagggagggcgcacggctgaagagagatggaagaaggagagaggagcagcgcgcctggagcaacgatgccacgacagggaaggagctcgacgccggagctggagaaggtggccgcagtccgaacaccggcgagcagggagaggaacaagctccggccaagcgtgctgtcgcgggagaactagagagggcgagcgtggagctagagccatgcgcaggagaagctgggtgctag

SEQ ID NO: 6118 - DNA, 270 bp, Zea mays
  Peptide Sequence Number=SeqID_47897
atggagaaccactcgggaaaacagtgctaccacaagggtggtattggatgcccttgggtgataattaggaaagctagtggaggactaccttaccggaaagggacaagggcagtaggcgagtggacgcagcagttagacactggcaacttgaggacacgacaactcactgtacacagccgaaaacccctcggctcccacacaaaaacgacaaagcttacatcagggaacaaatcttacactgcgatcttgcccaaattcgcgaagatatga

SEQ ID NO: 6119 - DNA, 315 bp, Zea mays
  Peptide Sequence Number=SeqID_47898
atggacgacgtgagggcgagccgaggcaccgaacggggcgagcgtgagatagaagggcacgcgaccaaggacccaggtgtacgagaccgcccaacattgcctagggtgcggttgagtggaggcagaaaacagtggctagatccgaccgctggaggaggtagaggggaggatgccctgcgcaccaggggaacgagcagggagatggagaaagtcgggccgacaacgcgacatccatggccgagcagggtcacgcgcccggcaaggatgtccgacgccgagggcaaggcgctgggcatggcggagcgacggccatga

SEQ ID NO: 6120 - DNA, 171 bp, Zea mays
  Peptide Sequence Number=SeqID_47899
atggcgcaatgccacactttatggggaaaggtcgagtccgagttggtcggggtgatcgcggttggcacgagctttccggtgaggttagtgcggtttcatcctacagtcaacatccctctgataccacttctgtcgcacccggatttcgggggcaccaacacccaggcgtga

SEQ ID NO: 6121 - DNA, 219 bp, Zea mays
  Peptide Sequence Number=SeqID_47900
atgcgggggcgcgcgcgagcgtgctctggcgcgggcaggaagcgtcgaacacgtggagggttttgggagacagggtttaggagaggtctagggttcttctcccctcttatccaaggtatccttagtgccaaggtgtgctctagccatggtaacacctggggtgttacagcacatgccgagaaatatagtaaatcggtactccttaggatgattggttga

SEQ ID NO: 6122 - DNA, 243 bp, Zea mays
  Peptide Sequence Number=SeqID_47901
atggccgggcggggtcccaggtgggcctggcttagggtgtgccagggcccacccggacccccctgtgggtccgcccctgcatataccaacctgtactatttactatctggtcaagtaaaagacacaagggattatatccaaaaaaggggtagacccagtatcgacggctcccacatgagtgaggcttgggaaaggataaaccgaggcaagcctttccccgtaaatgtggagaggcttctttag

SEQ ID NO: 6123 - DNA, 624 bp, Zea mays
  Peptide Sequence Number=SeqID_47902
atgggaagttttcttatgaggaagctagagcagttggacgtcgcgcacaacttgctcaccggcgcggtaccgccggggatatgcgacctgctgcgcctcaagaacttcacgttggccacaaacttcttcacgtgcgagccgccgtcttgcgcgcgcgtcgtgccgcgggacggtgaccggagcaattgcctgcccaaccgctcgtcgcaacggacgtcgcagttggcacaatccttctatctcagcatgcaaatcagaacattcatccagatgaggactaacctgaaggtggttgataactctggggccaagcgggtgatgtccatccagtccttgagggggaagaaaggagcaaggctcggggacatgatcatcggatccgtaaaggaggcccagccttgtggcaaggtcaagaaaggagacgtagtctacggcgtggtcgtccgcgccgccatgaggaaagggcgcagcgacggcagcgaggtccagttcgacaacaacgcggtggtcctcgtgaacaagaagggcgagctgatcggcacccgcgtcttcgtccccgtcccccacgagctgaggaagaagaagcacctcaagatcgtggccctggctgaacacatcgtttga

SEQ ID NO: 6124 - DNA, 1179 bp, Zea mays
  Peptide Sequence Number=SeqID_47903
atggcccccgtccccgtgtcggtgtcggccaccctcgcgccgccgccggcggcgccgccaaaggcaacatccaggagctgggaacggcgtgcgccggctgacgccgcgttcgcggccgcctcttccgtcgccatctcggccgcgttgctgacactgacgccggccgcgcccgccgcggccttgtccaaggaggacgtcgccggctcgcttaccaaggccgtggacacggtgagccaggccatcgacgtcggcggcaaggccgctgagcaggtggcggccgtgctcaaggcgttgggcgaggccgtcaagccggcgcttccggtcctgaagagcgccagcgacgaggccctcaagctggccgcgcccgtggtgtccgccgcctccaagcaggccacggaggcactccagggcgccggcgtcgaccccgcccccgttctgtccgtcgccaagaccgcagcggagcagagcacgaaggtgatcgacgccgcgaagcccgtggcctcggcggccgtggagaccatcacgtcgctgggccccgaggactacgtcgtggccgccggagcggcgtttctcgcgtacctcctcgtgccgccggtctggtcgctggtctcgtccagcctccgcggttacaaagctgcgagcctgcaacatatcgcggcctcgcattgctcaccatgcggttgctataataaaggcgacctgaccccggcgcaagcactggacaaggtgaccacgcagggctacgtcctgatcgacgtgcggagcgacaaggacaaggccaaggcaggattgccgcagctgccatcgaacgcgaagaacaagctcgtctctgtgccgtatgcagcaatttcttccagtgcattttcttcgttgcaaccgcttcaactcatcacgctgtggtacagcgacgtcgccaagactgtggcgaagacgctggacagcgtggggttcaagaactgctgggtcatggccggcggcttctctggccggaaagggtgggcgcagagccgtctcggaacggattcctacaacctatccgtggtcgaagtcgtcacgccgtcacgtgtgatccctgctgtcgcaggccgccgcactgggacgaccgctgcacgcattgggacggcctcgtcggcgtccagagcgactactcgcaagcttcttcccggcggcgtagactga

SEQ ID NO: 6125 - DNA, 798 bp, Zea mays
  Peptide Sequence Number=SeqID_47904
atggccacaaggtcggggagctccattcccgcgccggtgcctcgcaatgcggcggcgaggagccggacgagcgatgagccgatgacggatttctcgcgcaacggcgaggagccgggcgaagctgatttctcgaacctctcagatggaagtcttgtagccgttaagaggctcaaagatggtaatgctgcagacggggaagcacagtttcagactgaactcgagatgatcagcttggcagtgcacaggaacctgcttcagactctatggggattctgcatgacctccagtgagaggctactgaacaaagaatatgattcccttataaccaactcaaactacagggaagacaccactggactggatcaccagattaccagaaagaggatagcacttggggcagcacgaggtctaccgtacctgcacgagcagtgtgatcccaagatcatccatagagacgttaaggcagcaaacatactgctagatgactgctgcgaagcggttgtcggggattttgggctcgcgaagctcctggaccaccgtgaatcacatgtcaccacagccgtgcggggaactgttggccacatcgctcctgagtacctctccgctggccagtcatctgagaaaacagatgtctttggctttggaatcctgctgctggagctgatcaccggtcagactgcactggcgtttgggaagtcgtcaaatcagaagggaaccatgttagactggttccttccgggccacaggtccaagatgtcagagatggtcaggatgctgaagggcgatggggttgcatag

SEQ ID NO: 6126 - DNA, 390 bp, Zea mays
  Peptide Sequence Number=SeqID_47905
atgagtgaggcttgggaaaggataaaccgaggcaagcctttccccgtaaatgtggagaggcttcttagaacccgtgactcagtgagacagctcacagctctcaccactctaggtgtccttgagaaagttggaattgaaccggaaattcaaagaattggtaaatacaaaagtgccggagatcaacttgcacgcaagagcatgtcaaatgaagttagggagatgctggcagcactgcttgacaatatttatggaaactggctggaaacaatatcttctacacatgagcacatctatgttggttgtttatttaaaggcattttcaacagaaagatgaagctggagaaggtcgatcttattgcagtagggggctcccctagtgtatttgcgtag

SEQ ID NO: 6127 - DNA, 393 bp, Zea mays
  Peptide Sequence Number=SeqID_47906
atgcccacaactccgcgagaacgccctggctgctctccccacgcttgcccacgccgcatcctctccctccccggcgcccctacgtcgcggctcgcggtggctcccgctgccgcgctcgccacacggagtagcgagggtgctacttaccaccttaccggcgttggagaccgaggtggcggctttgccggacaagggagtcaatttatacagcctgcaacttctatccaaaaacaggttgctcaatttggtaaagagaagaccgttttacgcactgaggttgatcgcggtttcacgttttatgcactgaggttgatcgcggtttcactgcagaaatatttagcatgcatcctatgtcattttgtcagctttgtgacaaagcctgtactctactag

SEQ ID NO: 6128 - DNA, 453 bp, Zea mays
  Peptide Sequence Number=SeqID_47907
atgtaccctgctgcagagatcgctagcgtccgatacctatctcctgctgcaggcgcagcctctctcagacctcattaccgtgacgacttcctcttccagttccagtacagcgacctcctgctggcgcctgcgcacccttcgctctaccaagatgtcgctgatcacctggtcctcggagctagcttcccggctgatggtgtcaacaggtccagctcggaggagtcggacgcctacctgcagcgcagcctcgcggaggagcgcaggaagaggaggatggtatccaacagggagtccgcccggcggtcgcgcgtgaggaagcagaagcagctgagcgagctctgggcgcaggtcgtccacctccgcggcaccaaccgccagctccttgaccagctcaagtgctcaaccgtgtcatcagagactgcgaccgtatcctccgtgaaaactcccggctga

SEQ ID NO: 6129 - DNA, 378 bp, Zea mays
  Peptide Sequence Number=SeqID_47908
atgctgagcacctggctgggtatcatgcagctgtctgtgtgtctggtgcgtgcaccgtgctggatgtgcatctggtgcgcacagaagaagctgcgtacactgaactgccatgccggcccccaatcaccaggacagagcaccaccaccccactagcagtagcagcgggcgcctatcatttgctgccacacacaaaaacaaaagtagcgtatgaatatgaagcggttactcgtggctcgtgctcgcggatcaagcgatgcgtatctgctttcatgccttccgtatcctctggcgatgatgtcatgaaccctggttgttcgttccatcacgacggacatgtgccgctccatggatgcgagcgccccgtctgggctgactga

SEQ ID NO: 6130 - DNA, 108 bp, Zea mays
  Peptide Sequence Number=SeqID_47909
atggaaaggtaccggacccctgtatatacagtccaggccttcgagtatggtccaggacctccacgcggagacccgatgctgccacgtggcctactgcacgtgacgtaa

SEQ ID NO: 6131 - DNA, 273 bp, Zea mays
  Peptide Sequence Number=SeqID_47910
atggaggaggagaaggggcacaattgcaaggaaggggaaggggcacgatgctcacatccaaacacgttcgcgctaggctaccccaccctagccgcatcagctctcagtcgagcccacaaagctacgctcatggccacgcatctcaccaagtctggcccgcctagccacgtgtcgcaccttggccattgccacatcgagcctggctggctactgcgcaccggtggccacaccttggccgaccgcgcgcttgatctggccataccgcgcgagtag

SEQ ID NO: 6132 - DNA, 196 bp, Zea mays
  Peptide Sequence Number=SeqID_47911
atggcggccgctgtgactggcgccggcgccgccgtcttccactatgaagtcccctcccgatctggtgaagattatgggcgcgagatgttgaaggtctttgaccctatggggaaggactcctctgggaccctcttctactggatgtggagccactacggtctggaaggggttagggaaaaagctgaccgggcaaggg

SEQ ID NO: 6133 - DNA, 813 bp, Zea mays
  Peptide Sequence Number=SeqID_47912
atggcccactttgccccctggatccgcccctgcttggtggagttgttgtggagagagagaaaagtgttctccttgggcgattcgagtttgcagcagcagcacgccacgagcagcgacgccagagaagagggagttccaaatggcgattacaacgaagaccagacgacaaaagacatgagcgagaaatggcacccggacaaatgctcctcctcctccatcagcgtgaagcacatggaggaagccaaggagaagttccaagagatccagggcgcctattcggtactctccgacgccaataaacggctcctctacgatgtgggagtatatgatgacgaggacgacgaggatagcatgcaggggatgggggacttcattggtgagatgacccagatgatgagccaggtgcggccgatgaggcaggaaagctttgaggagctgcagcagctttttgtcgacatgttccagtctgatattgattcaggattctgcaatgggactgctaagggccatcaggttcaggggcaagccaaaagtagaacatgctcaccacggtcccctcctactactatagtaaaggaggcagaggtgtcatcatgtaatggcttcaataagcggggttcatcagcaatggactcaggaaagcctccaaggcctgttgaatgtggtgcaggtcagagccaggctggattttgttttggggcgtctgtagattcacttgagaagtatgaagtccctaggtggttattaaaagaagttagcagctatgtaaaagttagctacagtggcgagtctttaagtgctgatattccttga

SEQ ID NO: 6134 - DNA, 420 bp, Zea mays
  Peptide Sequence Number=SeqID_47913
atgattctaaagtactattcattgttcagcggggtagctgacggcctcgacctgaagtactacccccgccgttcgaccggcagtaccagaggtgtgattctctcaccagttgttgagggcaatcctagattgagcaccatgatgtctgacaataggcgccaaggtggaaggtgtacccagcgggaacaacaggcaccccaggatgaggcaccccagcaacagttgccactaacacccccaatgactatcgagcggatgtttctgatgtggacccaggcagtccaaccggttggccagacactagcagctatgcaacagaccccatggatgccaaagattggttacgcacagtggagcgggagctgcataccacttagtgcaatgaccgtgacaaggttctgtatggtccccgcctgctaa

SEQ ID NO: 6135 - DNA, 159 bp, Zea mays
  Peptide Sequence Number=SeqID_47914
atggacaaggcaagcgggatccgcatctcgatgggtgacgcagaagaggactcgtcgctgtcggaggcgatggatctggggctcagggcgcgcgaaaggtggcgtttgaacccatgccctaatgaaagaaggcgagagacactagataaagctgtttaa

SEQ ID NO: 6136 - DNA, 210 bp, Zea mays
  Peptide Sequence Number=SeqID_47915
atgaagggatctatctcggacatagaaggcaaagggtacttcgacccctaccaaaaacgaggtctcggtcggagaactgtcgaaagcttgaaggcgaagcgatctaccgtcaactgtcgaaagcttgaaggcgaagcgatctaccgttcaaagcgggggctcttcaggacactcggcatcaccaccagcttgggcggttccaagtcatag

SEQ ID NO: 6137 - DNA, 297 bp, Zea mays
  Peptide Sequence Number=SeqID_47916
atgttcaagtggtcggcgaaaggccagaacaagaatcatcaccgtttatacggagttctacttaatatgaaaagattccaagaattgtggatagaagagaaagtgaagcttcgtgctatactcgtcagctgctcgatcgaagacttcaatcgaagactatcgtcgttcccgccaacactgaatcaagttgataacggtacgttaactaatcgcgtgatgcggaagacgacccaagtcgaccccaagcgcgggctactccgcaggatggtgctgatggacgaatcggaagatggataa

SEQ ID NO: 6138 - DNA, 345 bp, Zea mays
  Peptide Sequence Number=SeqID_47917
atggctgggctggacaagaagagagcttctgtcttcttcgaggcctctgctgatggttacacatcttgtgctaaggagatgaccaagctctcaggtgtttcatcgttctacaactcagaaggggtgatcaaaaattttggggaaatgaagaagttgctttctgcggttcgtgttggaatgaacccagtgttaccgaagattgagcaaaccggtcccccagaagtactccatgtccatttggatgggtgcattcttggtactattgcttctgctatgattgagaaagcagttaattatcttcgtacattgaaacttctggcacaatcacttgctattactgactga

SEQ ID NO: 6139 - DNA, 921 bp, Zea mays
  Peptide Sequence Number=SeqID_47918
atgagggcggtggtgatcacgcgcggcggcggcggcccggaggtgctggaggcgcaggaggtagaggaccccgcgccgctgggcgacggcgaggtcctcctccaggtggtcgccgcgggcgtcaaccgcgccgacacgctccagcgccacggccgccacccgccgcccgccggcgcccccccgtacccggggctcgagtgctccggcaccatcctcgcgctcggccccaacgccccaccacggtgggccgtcggcgacaaggtctgcgcgctgcttagcggcggcgggtacgccgagaaggtggtggtgccggcgggacagctgctgccggtgccggagggcgtgtcccttgcggacgcggccggcttacccgagatacatgggggatcaagtggaattggtacgttcgctatacagattgcgaagcacctcggaattatggtttttgtcacagcaggaactgaagaaaaattagcggcctgcaaaggtttgggtgccgatgtatgcataaactacaaaaccgaagattttgttgagcgtgtcaaacaggaaacaaatgggaaaggtgttgatgtaatccttgacaacatcggaggaccatatctcgagcgcaatctgaacagcctaggtgttgatggtagacttttcatcatcggcttccaaggcggcgctgtagctgaagtgaacctgcaagcggtgtttgcgtggcgtttaaccatacaagctgctggactgcgcggcagaagcgctgctagtaaaacccagatcgtcagtgaggtggagaagaacgtgtggcccgccgtcgctgctggcaaggtgaacccggtgatctacaagacattcccgttatccgaagcagctgatgctcatcggttgatcgaatctagcatgcacattggcaaaatactgctgctcccatga

SEQ ID NO: 6140 - DNA, 2346 bp, Zea mays
  Peptide Sequence Number=SeqID_47919
atgccgttcggtttgaggaatgcgggcgcgacgtaccagcggtgcatgaaccatgtgttcggcgaacacatcggtcgcacagtcgaggcctacgtcgatgacatcgtagtcaagacaaggaaggcttccgacctcctctccgaccttgaagtgacattccgatgtctcaaggcgaaaggagtcaagctcaatcctgagaagtgtgtcttcggggtaccccggggcatgctcctggggttcatcgtctccgagcgaggcatcgaagccaacccggagaagatcgcagccatcaccagcatgggacccatcaaggacttaaaaggcgtacagagggtcatgggatgcctcgcggccctgagccgcttcatctcacgcctcggcgaaagaggtctgcctctgtaccgcctcttaaggaagaccgagtgtttcgctcggaccccagaggccgaggaagccctcgagaacctgaaggcgctccttacaaaggcgcctgtcttggtgcccccagctgatggagaagccctcttggtctacgtcgccgccaccactcaggtggttagcgccgcgattgtggtcgagaggcaagaggaagggcacgcactgcccgttcagaggccagtctacttcgtcagcgaagtactgttcgagaccaagatccgctacccacaagttcagaagctgctgtatgctgtgatcctgacgaggcggaagttacgacactacttcgagtctcatccggtaactgtggtgtcatctttccccctcggggagatcatccagtgccgagaggcctcgggcaggatcgcaaagtgggcggtggaaatcatgggcgaaacaatctcgttcgcccctcggaaggccatcaagtcccaggtgttggcggacttcgtggccgaatgggtcgacacccagctgccgacggccccgatccaaccggagctctggaccatgtttttcgacgggtcgctggtgaagacaggagccggcgcgggcctgctcttcatctcgcccctcggaaagcacctgcgctacgtgatgcgcctccatttcccggcgtccaacaatgtggccgagtacgaagctctggtcaacgggttgcggatcgccatcgagctaggggtcagacgcctcgacgcccgcggtgattcgcagctcgttatcgaccaagtcatgaagaactcccacggccgcgacccgaagatggaggcctactgcgatgagatcgacgacgcgcccgagcccgaggcaccctcggctcggcccgaggcaccctcggctcggcccgaggtaccctcggcccccgaagccgaggcactgaacgtcgaggaggagcttagcggggccacgcctgatcgagattggcaggccccgtacctgcaatatctccgccgaggagagctacccctcgaccaagccgaggctcggcgggtagcgcgacgcgccaagtcattcgtcttgctgggtgatgaggaggagctctaccaccggagcccctcgggcatcctccagcggtgcatctccatcgccgaagaaggcgcccgggggctacacgcacctgctggtcgccatcgacaaattctcaagtggatcgaggttcgacctctgaacagcatcaggtccgagcaggcggtggcgttcttcaccaacatcatccatcgcttcggggtcgcaaactccatcatcaccgacaacggtacccagttcaccggcaaaaaattcttggatttttgcgaagatcaccacatccgggtggactgggccgccgtggctcatcccatgtcgaatgggcaagtagagcgtgccaacgacatgattctacaagggctcaagcctcggatctacaacggcctcaacaagttcgacaagcgatggatgaaggaactcccctcggtggtctggagcctaaggacgacgccgagtcgtgccacgggtttcacaccgttcttcctggtctacggggccgaggccatcttgcccgctgacctggagcacggctccccgaggacgagggcctacaccgatcaaagcaaccaagctagccgagaagaatcgctggaccagctggaggaggctcgggacaaggccttactacactcggcgcggtaccagcagtccctgcgacgctaccacgcccgaggggtccggtcccgagacctccaggttggcgatctggtgcttcggctgcggcaagacgcccggggaaggcacaaactcacgcccccctgggaggggccattcgtcatcgccaaagttctgaagcccggaacatacaagctggccaacaatcaaggcgagatctacggcaacgcttggaacatcaaacagctacgtcgcttctacccttaa

SEQ ID NO: 6141 - DNA, 1206 bp, Zea mays
  Peptide Sequence Number=SeqID_47920
atgggctccttgtactgcgacgccgccgcctcgccgaccatctccagcaccggaagcagcaccggcagcagtggcaatgtcgccggcgttggcggcgacggcgacggcgacggcgacggcagcgtcaagatatacgcgtgcttcgcgctcggcagctccaacagtctcgagtgctacgagcctggagccaacacgtggcgccgcgtgggcgcgctccccggcgtccccgacggccacatactgaaggggttcgccgtggcgacgctgggcgagtccgtgtacgtcataggcggccggctctgccggagggagcgtggagccgcggccggcggctaccgcgacgccgacgtcggcgtgagggcagacgtactgcggtacgacgcgcgccggggggagtggcaccactgcgcgccgctcctggtcccgcggttcgacttcgcgtgcgctccgtgccggggcaggatctgcgtggccggcgggcagcgctcgctgtccggcgcccggggcacggcggcggccgaggtgtacgacgcggagaaggggcagtggtcggcgctccccgacatgagcacgctgcgctacaagtgcgtcggcgtcacgtggcagggcagcttccacgtcgtggggggctttgcggagagcgcgctgacggcctgcgacacctccctcctggcgcccggcggagccaccgccgtgctgcagtcgtcggcgctggagcggagctcggccgaggtgttccactgcgcgaggggcacgtgggagatcctcccggggatgtggcagctcgacgtgcccccgaaccagatcgtggcggtggccaacaggctgttcagctccggcgactgcctcaccagctggaagggacacgtcgaggtctacgacggcgagctcaacatctggagcatcgtggaccactccgccctgcccgacctgtcgctgctcgccagtctcccgtcttcagctcagcggctctacctcaccatggccgtcgtcggcacgcagctctatttcctcgccggctaccaggtgccgtcgggcgacgacagcttccgaacagtctcgctagtgcacagcttcgacaccagcgctgcaccggggctggcgccggcgtggagcagcttccggcccgagatgagtcacgaggacgccgaggacggcggcaaggagctgttcagccagtgctgcacggtgcagctctccaactaa

SEQ ID NO: 6142 - DNA, 1752 bp, Zea mays
  Peptide Sequence Number=SeqID_47921
atgcacacaggacgttgcaaagttgaggcaccggcgcctgggcacgagacagatgagggcgtttgcaccagggaggaggatggccaaaccagcagccgtgaaccgctgtcagctcctattcctaccgctgagtttttaccgctgcagccgacgctgtcgtcggtgtccccacatctgctgtcggcgccgccgccgtccccgatgcccgtggttggcttgtccatgcttctgcagtcgtgggaggcaacgcaagatggccacgccaccgccgccgcagtggtgccacctgctggcgtcgcacagcctgctgaggcagcgccgacggcacacaaagacaccacgcccgtcggcaccagcatggaagtcgaaggctctacgtcctctgtgttacttgaagctggtcagcctgagccatgcgtggattcacccaatgggagcacgcaggcaccagcgcagggcggcaatgccgctgttccaaacgtgccgccgccgccgccgccagtaccggcgcacagaggcagatctcaagaggggccgtctatggacgagcccggtccggcagtgacagacacgccacctcgaccgccgtgtgaaatgcaaggagaaccacctgcactgccgccggccgccgccaaggttttgccgtcgccgtcgccgtcgccgtcgccgccgccactaccggcgcacagaggcagatttcaagagggggcgtctatggacgagcccggtcaggcagtgacagacacaccacctcggccgccgtgtgaagtgcagggaggaccgcctgcaccgccgccggccgccgccaaggtttcgccagcgccaccgccgccccctggaagcatctcggcagcggtgcgcggcaagaaagccgcgagcaagctgaaacgatcgacgcagatgggcagcctgtacagacgcctgcgagacagagtggaaggctctggcagcacgcacggcgacaggatgcggcagaaccgcaagaggccccggacggtaggcgcgtccaagagcgacgccggcggccagggcatggccgatgcattggccgagatggctaagagatcgacgtacttccgacaaatcgaagaggacgcggagaagtatgcagcggtgatcctggagctgaaggacgccatcggctcgttccagtccaaggacatgtccgagctggtgaggttccgtcagcacgtcgagcggcagctggtgtgcctgaccgacgagacacaggtgttagccaggttcgagggcttcccttccaagaagctggaggcgttgaggacggcggccgcgctctactccaagctggacggcaccgcctcgaggctccagtgctggaagcacaccgccggccccgtatcggcgcagctcgacagattggagagctacttcaacaaggtcaaagacgaggtggacatggtagagcggaacagagacgaggagatgaagcggctgcagtcccagggcgttcacttcgacttcggcgtgctggtccggatcaaggagggcatggtagacctgtcgtccgcctgcatggagctcgccttgaaggagagccaggacgccagagagacgccgacgccgacgcgtgcgaagtgggcgagcagccacggcgatggagagtcgaggatgctgtggcgggtgttccagctggccttccgggtgtacaacttcgccggaggccaggacgagcgggcggacaggctgacgagcatcctggcgcacgagatcgaggagcgagcgctcctgtaa

SEQ ID NO: 6143 - DNA, 1383 bp, Zea mays
  Peptide Sequence Number=SeqID_47922
atgcggctgcggcctactaagcagcccggcgaccacccccggcccagacgtcggctccactcgggatactacgtggcaggccctctgggcccacccccgagctataagtacgccgcactcctactactcccaactcgcatcgcatccgcccacatctcaagccctgagaagcccgcacactcccccaggtccctgaggctaactgcgttcgtcccgtccaagtgcttcgtgttgggacgatcgagaaagtcgccgggtttgcctcccacgagcctgccctgctgcctggggccgctggtgaagcggaagcacatgacgaaccaggacgtggtcgtgtcggagatgggcattgcggccgggaccgcgctgccgggctcgagcccggccctcctggcctgccggggcgcggcggccggcgccatgtccctgcggtacctcgacctggcagcggcggcggcgcgctcggccagctgcacctgggtcgaggccatgcgcgcctcctcgcccacccgctcccgcgccgccgccgacgtcgacgagctcacggcctggatgaggaagcacccgtcggcgctcgggaagttcgagcagattgccagcgcgtcccaggggaagaaggtcgtcatgttcctagactacgacggcacgctcgcccccatcgtcgccgacccggacgccgcctacatgagcgacgtgatgagagcggcggtgcgcgacgtcgcgaagcacttcccgacggcgatcgtgagcgggcgctgccgcgacaaggtgcgcagcttcgtcgacctgtcggagctctactacgccggcagccatggcatggacatcgaaggaccaagctccaatcccgagtcagttctgtgccaacctgcgagcgagttcctccccgtgatcgacgaggtgtacaaggcgctggtggagaagacgaagtccacgcctggcgccaaggtggagaacaacaagttctgcctgtccgtgcacttcagatgtgtagatgaaaagagatggaacgcattggccgagcaggtcaaggcagtgatcaaggactaccccaagctaaagctcactcaaggcaggaaggttctggagatccgtccgagcatcatgtgggacaagggcaaggccttggagtttctgctcgaatcgctcggattcgccagctgcagcgacgccctcccggtgtacatcggtgacgaccgcaccgacgaggacgccttcaaggtgctgaggaagaggggccaaggcgtcgggatcctcgtgtccaagtgccccaaggagacgaacgcctcctactcgctgcaggaccccggcgaggtcatggacttcttgctccgcctggtggagtggaagcggaaatccacgacgactcggccgccggtgtag

SEQ ID NO: 6144 - DNA, 555 bp, Zea mays
  Peptide Sequence Number=SeqID_47923
atggagtttcatggggatgaaaccatgttaactcgtttccaaggtcttgaaaactgtgtgaaacctccactgagattggagacaccaaacgatattgatgtcctcttcgagaatgcgacggttaaagcacacttggatgagtacaaaccgcgatcaggccgcgggtaccgcgcgataaaaagacgagccatgcgttctggttcgagaaaaacgacacgggatcccagtaatcgacgccaggcaaaagcgagaggcacctccgctccgctcggcttgccgtgggttccgtcggcccggcccctcgccactgctgtagagtacgccctttcctctccggtcgagtcagccgcgctcctttacgcctcgccgctgcccccgccaccgcaacgcctggtgcccgggggccgggccgggtcgcgtggtggatcgacgctgtaccagtaccaccctgcctgccggccggccggcctttggtgcgtcgcgtggcatgtgctgcttgcgcgcacgtcgcgtttcgccgtcgagtcttgtgaagggacgccggacgcgcgctga

SEQ ID NO: 6145 - DNA, 510 bp, Zea mays
  Peptide Sequence Number=SeqID_47924
atggcgctccacaagctctatgacgacggcggcccccagctctcttacggaagcaggacgacgtcagcagggactcgaccgctccaacagctgtccctccgccaggctccgccgcacctccgacagccacgacatcacgccagcaggggccttcttagagaaggttggccgcgcgggaccgaggacgggacaggcgctctcttggggccgctcgcttccctcacccgcgtggacgcttgtaaccccctactgcaagcgcacctgacctgggcgcgggacgaacacgaaggccgcgggacttccacctctctcaggctcgactccggccacctcgcctctccccccttcgcgctcgcccacgcgctcgacccatctgggctggggcacgcagcacactcactcgtcggcttagggacccccctgtctcgaaacgccgacagtaagagagctgagagccgccgtcgtcacggggctagcggggcgccatcattgcctatctggcggagctag

SEQ ID NO: 6146 - DNA, 855 bp, Zea mays
  Peptide Sequence Number=SeqID_47925
atgtctaaaagccaaaatgtcacagtatattggtctatgcagaggtccctggtggttaagttactgcagaaggagagcgagataccactagaagaacttctcgcgaggtaccgagaggatggctgtgcagatcatgaaacagcggagttgaagaattcaccccattttgttgaagaggtcaatactgacatgtctttggatgatcaatctgtgagcattttggaagcgaaaagtgatttatttgtggatcaccaatccagggatgtgctggaaactgaggacacggctccacgatcagaaatcgcatcagagccttgtgctaaacaaaattttgatgaagagaataatctcactgatgttaagacagtcaatggagataagagtgatgatgtaaagagtgatgatgtaattgctgatgctgcagctgctgcaagatcagcacaaccaactggcaacaccttcttgactacaaaagtgcgcacgaaattcccattccttcttaagcattctcttcgtgaataccagcatatagggctggattggttagttgctatgtatgagaagaggcttaatggaattctagcagacgaaatgggtttaggcaagacaatcatgactatctccttgcttgcacaccttgcgtgtgagaaggggatatggggtcctcatcttattgtcgtgccgactagtgttatgctaaattgggagactgaatttcttaagtggtgtcctgcttttaaaatactgacttatttcggaagcgcaaaggagagaaagcagaagcgtcagggctggatgaaccctgatgtcttccatgtttgcatcacaacatataggcttgtcatacaggactga

SEQ ID NO: 6147 - DNA, 336 bp, Zea mays
  Peptide Sequence Number=SeqID_47926
atgtggaatgagaataaccgaacaaggcctaacctgtttggttacgaggatgtgacaattccagttttgcgtttggtagaaaggatgaggatggacggtgattctcatcccgtcaaccactgtgttagcagtgggacacaggcagacgagaagccggtgatgcaatgcaagccatgtcaggtgctgcctgccaggatgggcacatcagaggactacagcgaggggggggggagccggaagaaccaggaggaccagagggcggcggtgcttggtgaggactgccaaagaggaagactgaaacaggcaggaacagcgctaatcggtgacagagcatga

SEQ ID NO: 6148 - DNA, 783 bp, Zea mays
  Peptide Sequence Number=SeqID_47927
atgaggtgcaagaggcacccgaaccaaggccggcggcggcgtgtgcgccacgtgcctccgcgaccgcctgctcgcgctcgaggccgcgcagagcggcgacgcgtccccgccggggcccgcgcaggcgcaggcgcccgagcccccgccggcgttcccgaggtaggccccgcctacggaggcggcggcggcggcggcgcgctggaggaaccccacataggctacggctacgggtacgggcacgagaagcggcgcgcgggcaagttctccgtgctcgccacgctcttcggccgccaccaccaccaccgtagaccagaagcgaggcaccaggagcggaagaagcattcttggctcgccggcatcatgccgcgccgccgccgcagcaaggggcaggtgccggcctcggccacctcgccacagtcggccccgccgaggcgctcctgccgcgcggtcagcaaccgggggctctcgccggagcgggacggcgacggcgacgacgacgagagcagctcgcccgccgcgtggcggccgtccccgtcccccatgcggcggaccacctgccggcgccgccagacgagcggcagcatgccgtcgggcttcgccgtctgcctcagcccgctcgtgcggcccatcccggggcgccggcccgtgcagccgccggacccgggagcattctccagcgagctccggccgccgccgccgccgccgctccacagcagcctctcgtccgcctccgtcacgcgctgtcgctccaggaagctcgccgacggtggccgcttccggtga

SEQ ID NO: 6149 - DNA, 2031 bp, Zea mays
  Peptide Sequence Number=SeqID_47928
atgtcgtttggtttgaggaatgcgggtgcaacgtaccaacggtgcatgaaccacgtgttcggcgaacacattggtcgaacggtcgaggcctacgtcgatgacatcatagtcaagacgaggaaggcctccgacctcctttccgaccttgaaacgacattccagtgtctcaaggcgaaaggcgtaaagctcaatcccgagaagtgcgtcttcggggtcccccgaggcatgctcttggggttcatcgtctccgagcggggcatcgaggccaacccggagaagatcgcggccattaccaacatggggcccatcaaggacttgaaaggcgtacagagggtcaagggatgccttgcggctctgagccatttcatctcgtgcctcggcgaaagaggcctgcctctataccgcctcttaagaaaggccgagtgcttcacttggacccctgagaccgaggaagccctcgggaacctgaaggcgctcctcacgaacgcacctatcttggtgccccccgcggccggagaagccctcttgatctacatcgccgctaccactcaggtggtcagcgccgcgatcgtggttgagagacgagaagaggggcatgcattgcccgtccagaggccagtctacttcatcagtgaggtactgtccgagaccaagatccgctacccacaaattcagaagctgctgtacacagtgatcctgacgcggcggaagttgcgacactacttcgagtctcatccggtaactgtggtgtcatccttccccctgggggagatcatccagtgccgagaggcctcgggtaggattgcaaagtgggcagtggaaatcatgggcgagacaatctcgttcgcccctcggaaggccatcaagtcccaagtcttggcggactttgtggctgaatgggtcgatacccagctcccaacagctccgatccaaccggaactctggaccatgtttttcgacgggtcgctgatgaagacaggggcaggcgcgggcctgctcttcatctcacccctcgggaagcacctacgctacgtgttacgcctccacttcccggcgtccaacaatgtggccgagtacgaggctctggtcaatgggttgcgcatcgccatcgagctaggggtccgacgcctcgacgctcgcggtgacttacagctcgtcatcgaccaagtcatgaagaactcccactgccgcgacccgaagatggaagcctactgtgatgaggttcggcgcctggaggacaagttctacgggctcgagctcaaccacatcgcccgacgctacaacgagactgtggacgagctggctaagatagcctcagggcgaacaacggttcccccggacgtcttctcccgagacctgcatcaaccctccatcaagatcgacgacgcgcccgagcccgaggcaccctcggctcagcccgaggcaccctcggcccccgaggaaggcacccggggctacacgcacctgctggtcgccatcgacaaattctccaagtggatcgaggtccgacccctaaacagcatcaggtccgaacaggcggtggcgttcttcaccaacatcatccatcgttttggggtcccgaactccatcatcaccgacaacggcacccagttcaccggcagaaagttcctggacttctgcgaggatcaccacatccgggtggactgggccgccgtggctcaccccatgacgaatggacaagtagagtgtgccaacgacatgattctgcaagggctcaagcctcggatctataacgacctcaacaagttcggcaggcgatggatgaaggagctcccctcggtggtctggagtctgaggacaacgccaagccgagccacgggcttcacaccgttctttctagtctatggggccgaggctatcttgcccacagacttagaatacggttccccgaggacgagggcctacgatgaccaaagcaatcgagctaaccgagaagactcactggaccaactggaagaggctctggacatggccttactacactcggcgcggtaccagcagtccctgtga

SEQ ID NO: 6150 - DNA, 2805 bp, Zea mays
  Peptide Sequence Number=SeqID_47929
atggactattcatcaagccttgcagatcttgttcttccatctgtggaacgctttcagaaaatgcttgatattgttgaatcatttacattcgcaattcctgctgctcgagctcctccccctgtttgctggtacagcaaaggaaactctcctgtttttattgatccagcatatagagaaaaatgcatgaacgagttttctcccatcctgtctcctataaggtctgctattgttcgacgtcaagtctactttcctgataggcgtttgatccagtttgattgtgggaagttgcaggaacttgctattctgttaaggcgcttgaagtcagaagggcacagggccttgatatttactcagatgactaagatgcttgatgtcttggaagagttcataaatctatatggatatacatatttacgtttagatggttctactcccccagaagagaggcagactctgatgcagaggttcaacacaaatccaaagttcttccttttcattttgtccactcgaagtggtggtgtgggaatcaaccttgtaggtgcagacactgtcatcttctatgacagtgactggaaccctgcaatggaccaacaagcacaggacagatgccacaggattggtcagactcgtgaagttcacatatatagactcattagtgaaagcactatagaggagaacattctcaagaaagcaaatcagaaacgagctcttgatgatttagtgatacaacgaggtagctacaatacggaattcttcaagaaacttgatcctatggaattcttttccgggcacacatctcttcatgcagaagatcaggagaagaattgctctacaacctcaggagtttcaaatgatgttgatctggctctgtcaattgcagatgttgaagcagctattagacaagcagaagatgaagctgactatatggctctcaagaagctggaggaggaagaagccgtggacaatcaagaattcagtgaggaggctgcgggcagacaagaggaggatgaattggttaatgaggagaatggaaaacccgatgagcacattaacgaagaacaaaaatataactcttctgatgtagagaaggagaagcacattactctgtctaccaatcgattaaataaggaaaaggctcttacattggctgttggtgatgaagatactgacatgcttgctgatgtgaaacagatggcagctgcagcagctgcagcaggacaagcgagttcatcatttgagaaccagctccggccaattgatagatatgcaatgcgctttatggaactctgggatccagtaattgacaaagctgctttaaatcatcaagtaaatgttgaggaggaagaatgggagcttgatcgtattgaaaaattcaaagaggatttagaagcagaaattgatgaggaccaagaaccactttcttatgaatcatgggatgttgattttgctacgacagcctatcggcaacatgttgaggctttaactcaaaagcagttgttagaagaacaggaaaggcaagctcaggaagcaacaaaagagttggaggagaagaatgataatatgagcagtcaccacagaaagtcaaaaaagaacaaaaagaagacaggcaaactcaagcccctgaaaagagtgcgtctgtcgcctgaatcagaagtcatactggaggaaacctctgtagataatgcaccctcacctgagcttacaagtgatgaatcgccacaccattattgtaacaagcgtaagaagattacggttgccactgaggaaaatagtaacagcagaagtttaaagaagctcaagaaaactactaaatcaagttttatttctgaagccttgtcacctaggctgaaggaggaccttaatgattcagattcaaaatcagtgggtagaactaaaagtgatggcagatttttcatcccttgcatgccagtgaaacgtgttattgtaataaagcctgagagattgaaaaggaagggaatatggtctcgagattgtgcttcagactcatggtcatctgaggaagatgcagttctttgtggaactgttcatgagtatggtccactttgggaattggcaagtgattttcttcattttttgccaggcggttccttgtataggggaagatatcatcatcctgtgcattgctgtgagagatacagagaactgttctgcaaacatggaatgtcagcaacagataattctaacagtgaaaaggttccttctgggactggaaaggctatacttagagtgtctgagctgctaggaatagcaggtagtggtccaagccgcagcccacaatggtgcccacctactgtcgcagttccccttccacgcagccaaggcgtgggcggtgccatcgaggcccagatatggttcatccaacacgcgctgaaggaaatcggtggcatgccgtacccgcagctgacgcgcaactatgaggattgtagcctcctcatgaatatgaagttggaggcctccggaatgcgattgagtatgatgacgcgatcacatagaggaacatgtctcttgatgccatcctcttcgctttgctatcggagatattatccgcacgctggcggtgaagaagacgaccaagtctccatccatgttggttcgaagcgcacatgcaagtctacactacaatggttttggagggaccgagagttgctctcattccatgatggtgagcacatgtatgacttcgtgctccaccaaattgggatggtgagctccctcaacctctacgacgaggacatcactgagcaacgcacagtcgagaagatcctacatgttgtccctaggtag

SEQ ID NO: 6151 - DNA, 138 bp, Zea mays
  Peptide Sequence Number=SeqID_47930
atgaaggcacaatttctgatgaccggccttgggctcctttcgtacttggggattgaggggtgctacgcctacgctgggtgcatcctcaacagctctaggatgaggaactgcagttcctcacccacacctatggagtag

SEQ ID NO: 6152 - DNA, 987 bp, Zea mays
  Peptide Sequence Number=SeqID_47931
atgggcaacggcaaagacgcgctccagcaggtcggcacgaagcagaggcacggcggcggtggaggcggcctccccaggctgtcagcctccagcaaggcgctggtcctcctgccgctcctgctcctggccttcatcttcctcttcgtgtatcccaaggagttcgagctgcaggcgatgctgagcgcgtgcggcccggcagccgcggagccggcggcggtccggaagcccgagttccggctgctcatcggcgtgctgacccgcgcggacctgtacgagcggcggcacctgctgcgcatggtgtacgggctgcagctcgcgtcgccgggtgggctcgcggcgcacgtggacgtccgcttcgtcttctgccggctgtacaaggacgaccagcgcgtgctggtgccgctcgagatcctcgcccacggcgacgtcatcgtgctcgacggctgcgaggagaacctcaacggcgggaagacgtacacgttcctgtcggcggtggcggcgctctacgccgacgagccgtacgactacgtgatgaaggccgacgacgacatcttcctccgcctgccgcagctggtggggtcgctgggcgggatgccccgggaggacatgtactacggcgccaccatcccctgcgatagcatggacccgttccgggagtacatggccggcatggcctacgcgctgtcgtgggacctcgtgcagtggatcgccacctccgacgtggcgcgcaaccacagcgtgggcacggaggacatgctcaccggcctctggctcaggatcgggggcaaggggaagaaccgcttcaacgccaagccggccatccacgactacctcaacccggtgcccgtggaccagtgcgagcacgagttcatgcccaccaccatcggcgtgcacaggctcaagagcaacccgaggtgggcagaggcgctcaagtacttcaacttcacggcagggctccagccgtccaagttctacaagatcgactag

SEQ ID NO: 6153 - DNA, 603 bp, Zea mays
  Peptide Sequence Number=SeqID_47932
atgcccccgcccggtgccccctcgcgttgtcagctcgccctcgccgcgcacgtccgagagaacaccggccacctcctccgcgaccgcgcgccgcccctctccgccttctctgcggccgcgccacctcctctctgctacatcgaccaacagctcagaaagcaacgagcgttccagtggtatgacatgatcccacagaacgctttgagggtgtccacactgcggcgtcaccgcgcccccgcctttctccccacgcgcggtagcattcgagccatcaacgtccttccccaaaccccatccggccatctcgccttcaatgacgcccgagccatcctccccacgcgcggcgcctccacaacaccaacgacgcccgagccccactatcccgccttcaacggcgcccgaaccccatcctccccacgcgcggtgcctccgcaccgccaacggtgccccaagcccccgccaccatgtcccattccctacgccaccatgcctcagaggtgtgaagcctttcctctcctctccgacgcagcagcagcagttgtcctgcctccgtcccctgccagaccgctgaaatccgctcgggtttgggctattttgttgtga

SEQ ID NO: 6154 - DNA, 2229 bp, Zea mays
  Peptide Sequence Number=SeqID_47933
atggcccatcctgttcggcttctctgtctcctcgccttctttggcagcctgcatgtggccgccacatccaacgagagggaaaacgaccagcaagcactcctgtgcttcaagtcccagctttccggtacagtcggcactctctcctcatggagcagcaacacatccatggagttctgcagctggcacggggtcagctgcagcgagcattcacctcgccgtgtgatcgcgctggacctcgcatcagaaggcatcacaggtaccataccaccctgcatcgccaatctcacctctctcacaaggctgcagctggcaaacaacagcttccgcggcagcataccgccggagctcggactcctcagccagctccgcatcctgaacctgagcatgaactctctagaaggcaccatcccttccgaactctcttcgtgttcccagcttcaggcccttggactgtggaacaactcccttcgcggcgaggtaccacctgccctaggccagtgcgtccagctcgaggagatcgacctcagcaacaacgatctagaagggagcatcccctcccgtttcggggctcttccagagttgcggacactcgtcctcgctggcaacaggctcagtggcgccatacctccctcgttgggccgcagcagcctctccctcacgcacgttgaccttggggcaaacgctctcaccggcgggattccggagtccctggccggcagctcgtctctccaggtgcttaggctcatgaggaacagcctcggtggagaactgccacgggctctcttcaacacatcatcgctcatcgccatctgcctccaggaaaacaagtttgttggccctataccacctgccactgccgtcgtctctcccccggtaaaacaccttcacctgggagggaactttctctccggaacgataccggcctcgctggggaacctttcttccctgcttgaccttcgtcttactcggaacaggttgcatgggagaatcccagagagcataggctatctgccagcgctaagtttactgaacctgaatctgaacaacctgtctgggccagtgccactctccctgttcaacatgtcctccctgagagctctcgctatggggaacaactcgctcagcgggagactgccgtcaggcatcggctacacgctaccgagaattcagatcctcatcctcccgtccaacaggtttgacggtccaattccagcttctctcctccatgctcaccacatgcagtggctctacctcggacagaacagcctaaccgggcctgtgccgttcttcggaacgctgccgaatctggaagaactccaagtgtcgtataacctgctggacgcgggggactggggcttcgtctcttcgctgtcaggttgctctagactgactaggctctacctggccgggaacagtttccgaggggagctgccgagttctatcggcaatctttctagcagcctcgagatactgtggctacgggacaacaagatcagcgggcccataccgccggagctgggaaacctcaagaacctcagcacgctgtacatggatcacaaccgcttcactggtagcataccggcagcgatcgggaacctgaaaagactggtggttctgtccgctgcacggaacaggctctcaggcaccatccctgacgcgatcggcgacctcgtccagctgaccgatctgaaactggacgccaacaacttgagtggcaggatacccgcgagcataggacgctgtactcagctccagatactcaatcttgctcgtaatgcgctggacggtggtataccgagatcgatcctcgaaatatcctctctttctctagaacttgacctgtcgtacaaccgcctggctgggggcatcccggatgaaatcggcaacctcatcaacttgaacaaactcagcgtctcaaacaacatgctgtccggcagcatcccgtccgcgctcggccagtgcgtgcttctggagtaccttaagatgcagaacaatctctttacaggaagcgttccacagtcgtttgcaggactggtcgggatcagagagctggatgtctccaggaacaatctgtctgggaagatcccagggttcctcacgtccctgaactatctgaactatctcaatctatccttcaacgatttcgacggagcagttccggaaggcggcttttttggcaacgctagtgcggtgtcaatcgaaggaaatggtcgctggacgaatctctag

SEQ ID NO: 6155 - DNA, 333 bp, Zea mays
  Peptide Sequence Number=SeqID_47934
atgactgccggtctcctaaatctcggtgcaacccctcggcgtcaagcagaaggtgccgcccatcactcccctctccccccttgcaacagcggcatactcccctctctcccttgcaacaacggcatcaaaggtttctgcaatagcgacatggacgaccagttcccgggtgaagctgttttcagcaacaatgacatcaaagtggtcattctcatagtagcacaactaagtccagtaccaatgaaccaaagaaatgaaccaatggaaatatgttgtgtacaagttttaagtggtgaagctattgatactgccaaggctcttgctttgaaagaatag

SEQ ID NO: 6156 - DNA, 870 bp, Zea mays
  Peptide Sequence Number=SeqID_47935
atgcccatgcatgccgatcctggagcccacccacacggacactttggcgttgcttctgcggtggggggcggcgccccatcaccctcacccagtcaccttgatgagtggagtttcaccaccacgcagttagttgcaaatctgatgcaaaagccgccactgctgcttcaccagcgaagcaacagtatttttgcgcaaccaaccatggtagcagtggcaactggcaaaggaagcctgaaatctgatttaggcgccgtcccaattgcttctatagatgagcatgcagccgagagcacgatagcccggcaccaggcccggtttttggcctggcccaagcacggcacggccccgctggattcgtgcctgggtcggcccgaaccaactaaccagaccgtgcctgggctacctgctgcggccgccgagtggcacggcccggcccgccagaaaacggcaggcacgaaccggtccgataacggggagcggggcataagtccagcctccctctccactcggccactctccgctcatctgctgtccactctctcattccctctcgcctctcggcctctccgtcgctcctcgctctgcgtcgcgctctgcctgctgctcaccgcctcaccatcgaccgtcgcagtagtctctgccggatcttcgtcaccgccccccttccgtgcggcgcccctctccagactccggctctccatcggtgaaatccctaaccctaatcagaaatacctaaccctaatcccctcttctccagactccggctctccctcccgctgtcccgcgtcatcatcttcggctccgggctgcggcttggcagataagtccctctctggctctccctctccagtcggccaacccaatccctag

SEQ ID NO: 6157 - DNA, 453 bp, Zea mays
  Peptide Sequence Number=SeqID_47936
atgtaccctgctgcagagatcgctagcgtccgatacctatctcctgctgcaggcgcagcctctctcagacctcattaccgtgacgacttcctcttccagttccagtacagcgacctcctgctggcgcctgcgcacccttcgctctaccaagatgtcgctgatcacctggtcctcggagctagcttcccggctgctggtgacaacaggtccagctcggaggagtcggacgcctacctgcagcgcagcctcgcggaggagcgcaggaagaggaggatggtatccaacagggagtccgcccggcggtcgcgcgtgaggaagcagaagcagctgagcgagctctgggcgcaggtcgtccacctccgcggcaccaaccgccagctccttgaccagctcaagtgctcaaccgtgtcatcagagactgcgaccgtatcctccgtgaaaactcccggctga

SEQ ID NO: 6158 - DNA, 1296 bp, Zea mays
  Peptide Sequence Number=SeqID_47937
atggcccccgtccccgtgtcggtgtcggccaccctcgcgccgccgccggcggcgccgccaaaggcaacatccaggagctgggaacggcgtgcgccggctgacgccgcgttcgcggccgcctcttccgtcgccatctcggccgcgttgctgacactgacgccggccgcgcccgccgcggccttgtccaaggaggacgtcgccggctcgcttaccaaggccgtggacacggtgagccaggccatcgacgtcggcggcaaggccgctgagcaggtggcggccgtgctcaaggcgttgggcgaggccgtcaagccggcgcttccggtcctgaagagcgccagcgacgaggccctcaagctggccgcgcccgtggtgtccgccgcctccaagcaggccacggaggcactccagggcgccggcgtcgaccccgcccccgttctgtccgtcgccaagaccgcagcggagcagagcacgaaggtgatcgacgccgcgaagcccgtggcctcggcggccgtggagaccatcacgtcgctgggccccgaggactacgtcgtggccgccggagcggcgtttctcgcgtacctcctcgtgccgccggtctggtcgctggtctcgtccagcctccgcggttacaaagctgcgagcctgcaacatatcgcggcctcgcattgctcaccatgcggttgctataataaaggcgacctgaccccggcgcaagcactggacaaggtgaccacgcagggctacgtcctgatcgacgtgcggagcgacaaggacaaggccaaggcaggattgccgcagctgccatcgaacgcgaagaacaagctcgtctctgtgccgctggaagaccttccgagcaagctgaagggcatggtgcgcaacgcgaagaaagccgaggcggagatcgccgctctgaagatatcctacctcaagaagatcggaaagggctccaacgtcatcatcatggactcgtcggtgcaccccacccatctccatttccgattgcttctgcctttcaagtacagcgacgtcgccaagactgtggcgaagacgctggacagcgtggggttcaagaactgctgggtcatggccggcggcttctctggccggaaagggtgggcgcagagccgtctcggaacggattcctacaacctatccgtggtcgaagtcgtcacgccgtcacgtgtgatccctgctgtcgcaggccgccgcactgggacgaccgctgcacgcattgggacggcctcgtcggcgtccagagcgactactcgcaagcttcttcccggcggcgtagactga

SEQ ID NO: 6159 - DNA, 252 bp, Zea mays
  Peptide Sequence Number=SeqID_47938
atgtctaaaagccaaaatgtcacagtatattggtctatgcagaggtccctggtggttaagttactgcagaaggagagcgagataccactagaagaacttctcgcgaggtaccgagaggatggctgtgcagatcatgaaacagcggagttgaagaattcaccccattttgttgaagaggtcaatactgacatgtctttggatgatcaatctctgctgcaagatcagcacaaccaactggcaacaccttcttga

SEQ ID NO: 6160 - DNA, 843 bp, Zea mays
  Peptide Sequence Number=SeqID_47939
atggcccccaagagagcaaattcaaaggccgccacttccatcgacgatgcagtgaaggcgacccttctggctaaaaataaagataaggctcccattgcagacgacatcactctggaggccttcgatgatgaggcagttaacaacaaaaggcaacaccaagacaatctgcctacgccggagggcactgcgcgcacctgcagctctaaggaggtacctcaggcacccccgctaggcttcatccactcagagggagaagaaaccatcaaagacagcgaaatcataggcatttcagccaaagaccaactcaagttgcgagccctgcgcatcaagaacaatcatttacagaaacagaaagaaatactcgcagccaagcgccagcgcatcaacatgcaagccaaactcaggcagatgatagtagatgaggagcaaaaggccagagagctggaacaacaaattacagatatgcaaggcgaaggctcacaccacatgcagtggagccctctcatcactccaactgtcaatgtttgggacccgaccgcacacccggggttacccctcgaggtgcttttgggtaggacggtgttgccgactgtagctcgatggttcgtgctaggcgcacgagagacgatagacaattttatacagctctttcaacggtcttcactttatacttcagaaattagtgatcggttaccagcttatgctttagagatcaacattttgtccttaggggttgaggactcattgggtgcaccggaggtgcacccaatgggtgtagcccagagctttgagtggattactgaaagtaatccactcaaaggtctttatcttatgcttttttag

SEQ ID NO: 6161 - DNA, 969 bp, Zea mays
  Peptide Sequence Number=SeqID_47940
atgatgaaaaaagaggatgcggagaacgctcgtgcaaaggctcaggctacccgcaagcatgctgctgacttggagctggtgctgaagaatatgtgtggccaccgcgagaggacagaatcttccacccgtgctggggttgaccgggcgcacaggcttttcgtggatgcgtaccgtgaccttggtgcgcaaaccgccccttttgacaaattgggggaggaggcggggacccactttctggggtggttgcaagatgagctagagtcgctcccatctattatgacgggtctcatgtcctatgcgtctctcgtcacttgcgaaggggctgcgaatgctttgtcccgagagggatgcagacatttcgaggtcttccaccgagcgaacaaggacttcgatcgtggcgtgttccagattgaagatgacgtgctgaagcgctctgctggggcgctagatgataggatgtgggccctcacggccgtggcgtcgtccaggagagggcagaccgagcgctggtgcaggtatgttatgggtttggcgaggggtgttgcgatgaacgaagaagatgtggaggacctcaccagcctaaaaagctcagtgacccggagggatgcttcgacggaggcaggagccaaagagcaaaccatgctccaaggaggtggcattgggggtcctgtgacggcagacgcttcgttatcgattgatgcgcaggttccggcgtctgggcctgcgcaagcaaaccctgatgatgacacaaatgatgatattttgatgcatggaaatgcggtgtttcttagtagtaatgcgtctagggaatatgatgttgggtcgtggtctttggagggtggaaagttggggagcactttttcttggatagatgacgaatcctcggaggatgatttagattattttgcagcattggatttagctgtagtggagtctccgttgaggtcgccccctgtgaagcgtcggtga

SEQ ID NO: 6162 - DNA, 459 bp, Zea mays
  Peptide Sequence Number=SeqID_47941
atggcggacagacgggggattccagcattgcgctccctagaaactgtagcgggttttctgaagctactggaactttgtaaaggccttgtagtgttaccctgctacaatttgggtaacatgacttgtgggtacaggggggactccactgacgtcggtgatgatcgcggcaagcaagtgaagcctcgggctgaagagggcacctcaaaggggaaggctctggttgcagccactcgaaaaaggaaattaggtatgggggacgatgagactgggccaagggcctatgggatttttgttgaggagttaatggggatatgcgcggttcccggggaagtgatgtctttgcccgagctccgggaaacttcttcgcgcatgctgaagcgatggagaaagatcaccaggacgcttagcggaagaagcgtaaggcccccttcggctagtggacccacgccgagaagctaa

SEQ ID NO: 6163 - DNA, 543 bp, Zea mays
  Peptide Sequence Number=SeqID_47942
atgggcaagaacaagaagggtggaagttcgtcgcaccactccgatgacaagaggaagtgcaagccaagtctcccctcggaggactttggtgactccgagtactcggaggaggagttttccttcgagtccgaggggtcgccggtctatgcctctcccccggtgtcgtccggtgagttggacgattcccaggggatcgctgccgaggtgtggacgtatatccgggccgtcgagcgctctgggctcaagggctcggatgagtcggagatatcctcggacgaggagaactcctccgactcgtccgaggaggagagcggtggtgatggcgacggcgagggcgacgacagcaatggaggtgacggcggcgatgacggcgacgacgacggtgacggcaagggcgacgactgcgatggaggtgacggcggcaatgacggtgacggcgacggcaagggctacagaggcaacagcggcaagggcgacgacagcggcggcaaggcgacggtgatggcaaggccagtggcaaagcgccactggtttaaatattag

SEQ ID NO: 6164 - DNA, 432 bp, Zea mays
  Peptide Sequence Number=SeqID_47943
atggattcggacccccatgggacagtaccggacccctacatatacggactggacctccgggccgagtccaggacctccacggagggtaacgctatacccccgggacgggtcccggacctctcagtgtggggtccaggctgctctcagcagggtcccgcgctgtgctacctcagtattaaatgcgccttgtccactcctctgacggacgacgaccaaaccatcttgcaggcggtgtgcctgtccattccttggccggtagtgcgcccgtgctgcgacatggacgggcgggtgcactccgccacccggccggagaattccctctccgacaatgatcaagaagatgagccacctcaagaggaggacaatgatcaagggggagatgaagatgatcaagacaaggaagatgatcaggccatactgaaagtcgcctag

SEQ ID NO: 6165 - DNA, 408 bp, Zea mays
  Peptide Sequence Number=SeqID_47944
atggcctcatggacctcatcaataatgaagggtgccgtcaaaatcacattttcgatatctgaaactgaggatatcagttcagagccaacaactaaactcaagtgttacaaggacatcgagctcaattttgctatgccacagagaatggtgcatgtggactattcttccttatatgcatcaggtggtctaaagttggctttaacctttagcccactttacattagagatttggacatcaaaagaaagctaaaacattctaaagcttttagatctctaagtttagaagagggaggcaaacatgccctagaatattggagatcgcagctactgctatcaccaagtaacacgctaagatatcgaagaccgcaactgctgctatcaccgttaaagtataggacgaatctctag

SEQ ID NO: 6166 - DNA, 1956 bp, Zea mays
  Peptide Sequence Number=SeqID_47945
atggtccccaagcgcacacacgatcctcgttctggggatgaatctacggcagatgaatccagtttggaagcttcaaactttgaaaagaacactaaacctggcaagaccggcttaggttcgcactgtgaacctacacccgttgtgaatgctgctaagcttctatctccagaagcaaggcaatacgtgatagattgtggctttggtgcctttcttgagatgaaggctacgaagatcttttcccttgagacaatcatagtcatactgaacaagtgtgacgtcagctcttctgatgagtcctttacgattgtactttccgatgagcatcaattaaaggtcacaacagaggtagtgcacagtatttttggtcttcctactggagaaatatcaatagaccagaagaatttcacccatacagagttcctgaaattttggaaaattctgaaagctggaggacatgtgacagagtccacgaccagatgtagagggaaaccagtatctaccaaaagaatcactttacaatcgttgttgaattacatggaagctgaagctgacaaggaaaagcaagcctttgctttcttcaccattctgctatccaagctgctcctaacaacaacgagcaatgtgcccactaaggggcacgtggcgttgtgctcttacatcgagaacacgcaaaagtatgattggtgcaaatttgtttgtcaggatctgaaaaataaaatcagttcatggaaacagaaaccgacatcaaaaatcccgggatgcttactactgctgttgatatgttcgttcagaattgttgtcccggaacctaagctggaagaagcatctgctggtccactcatcaaacattatgatgacaacagaattttagagttgttaaaggctgttaaggatacaataaaattcaaagaagagagttcaagggctatcgccccagtcccactttgcattgggtcccactttgcattgcaaaaagaccgttttaacggtttacaaccagagggctcaaacagccagagaaggaaacaagtcttgaggcacaaagtaaacttattacatggccatattccagccaagatcatctatactagctcagagcacctgattgccaacctcaaggtgcagcgcaacgccaagcctcaaccccccaaagaaaagaaaccagcttccaaaaggcaaaagggtgaaggacaaaacttagggattcaaattcatgtggaagatttgctcaagggctatgaggttgatgagaatcagcggggcattctcttgaaagtaatagaagacgaagttgggtctagtgaaatcaagctcatggaaaaattgaagaagattgttgcgaatcgttccttctttatattttatgatgagatcaaaaacagggcccaaattaaagacaaagaaagaatacaacagatggagaagaatcttgtagttgatattgaagatgtgacgatttcagaggctgtatttgttaagaccttcaaaccatatggtcgcttgcatacttcgatcattgaaactctgattcgcatatggaataaatcatgggatgacaggattatgctttcacttcttgctgtagagcaaatactcggtaagagaaaagattatctcgaaagagaacttaaagactatgacaaagagaaaaagcacacgatttttgtgcctttcattattgatcaacactggtccttagttgtggtggaacctgggagagaagttataactgttcttgattccttttatgaattgcggctgtgcgaaaaacgtcatgaaaatctgatggctcaactgcaaaaaaatctttatcctttcataggcctggaaaatgctacgcaccgatttattacaccaccagtagttcagaatcaaaataacagtcatgattgtggttttcatatgcttctgtacataaagcgatatgaggatcaaaactaccataacattagtgag

SEQ ID NO: 6167 - DNA, 531 bp, Zea mays
  Peptide Sequence Number=SeqID_47946
atgatgagaagcagagaagtgagcgccaggatgctgcagaagatcagggaccatgtccagaaatggtaccacaacgagggtttcgtatgcgcacaggttgttaactttggaaaccttaacaccaatgaggttgtctgtgaggtggttgagggtgacatcaccaaggtggagtaccagttccaggataagcttggaaatattgttgagggaaatacccagcttcagatcatagaccgtgagctgccccaacagcttcgacctggccacatctttaacattggagcagggaaacaggctctgaagaatataaattcacttgctttgttttcaaatatagaagttaatccacgtcctgatgagacaaaggaagggggcatagtagttgaaattaagcttaaggaactggaacccaagtcagctgaagcatccatacaacctggaggaactgtgtcatttgagcaccggaacatctatggtctaaatagatctattgttggttctgtcacttccagcaacctgctgaaccctcag

SEQ ID NO: 6168 - DNA, 189 bp, Zea mays
  Peptide Sequence Number=SeqID_47947
atggctcagatgtccatcgctcagttatctttctgtctcccacagcaccaaggtcgcccgttcatcgcaagggttgagcaacagtcatggcatcttcgacgagactgtgatggtggtgctaacaatgttcatctaagtgctagggaacttctcaagtcaagcaaaaatgtagtgaagaaggttggctaa

SEQ ID NO: 6169 - DNA, 309 bp, Zea mays
  Peptide Sequence Number=SeqID_47948
atggatgatttggagctgtttaatgacgcaggcattgtgatttcttcgccccaaggtgccgtaatgtcttcaccgcctagttcaagttccttaccactagttccattaggtggtaatactgctaataaggtcaatgattgggaatcttttgtactatctgatttttgggatgaggaagggagacatgatgttccaagtgagatggagatgtattctcaactaggactcaatgaagaggacaaggcaaaggaaaataaaatagatgaagctggtttaggaggtacaagtaatgtggatcaatcggagtga

SEQ ID NO: 6170 - DNA, 618 bp, Zea mays
  Peptide Sequence Number=SeqID_47949
atgacaaaagaagctggtcagggatctggatcatcagagcgcatcggagggtcccacgcacgggacgggtgcgagggcaagaatttctacacgcggagcgcgttcgtgagcgccgccggcgcgttcccgggcttcgcgcacggcggcacggaggcggatggcaagcgcgagatcgccgccttcttcgcgcacgtcacgttcgagaccggatatttctgctacatcaaccagatcaacgggaggggccaggcctcgtgcgactcaggcgtgaagcagtggccgtgcgcgccggggaagcagtactacgggcgcggcccgctgcagatctcgtggaacttcaactacggcccggcggggcagagcatcggcttcgacgcgctgggggacccggacagggtggcgcaggaccccgtgatctcgttcaagacggcgctctggctctggatgagcagcgcgcaccaggtggtgccgcaggggttcggcgccaccatcagggccctccacggcgccctcgagtgcaacggcaacagccccgccacggtgaacgcgcgcgtgggctactacaaggagtactgcaagcagttcggcgtcggcccggggaacaacctcacctgctag

SEQ ID NO: 6171 - DNA, 1023 bp, Zea mays
  Peptide Sequence Number=SeqID_47950
atgggcggcggcggcggcaatccaaatctgatgatatctcaacctaggctagagtgcttgtgtctcgatacatggggcacccttgtgacacctcaaatcacctcacacaacaagctgcaccgcagcaacgaacacgaaccttggcagaacgaagctgaagtagttcgctgtgaacccagtatggcaaacgcgccgaggatcctggccctcggcctgctagcgctcctgtgcgctgccgccggcccggccgccgcgcagaactgcggctgccagccaaacttctgctgcagcaagttcggctactgcggcacgaccgacgcctactgcggcgacgggtgccagtcgggcccgtgccgctcgggcggcggcggcggcggcggcggcggcggaggcggcggaggcagtggcggtgcgaacgtggctaatgtggtcaccgacgcgttcttcaacggcatcaagaaccaggccgggagcgggtgcgagggcaagaacttctacacccggagcgcgttcctgagcgccgtcaacgcgtacccgggcttcgcccatggcgggacggaggtggagggcaagcgcgagatcgccgccttcttcgcgcacgtcacgcacgagaccggacatttctgctacatcagcgagatcaacaagagcaacgcctactgcgacgcgagcaacaggcagtggccgtgcgcggcggggcagaagtactacgggcgcggcccgctgcagatctcgtggaactacaactacgggcccgccgggagggacatcggcttcaacgggctcgccgaccccaacagggtggcgcaggacgccgtgatcgcgttcaagacggcgctctggttctggatgaacaacgtgcaccgtgtgatgccgcagggcttcggcgccaccatcagggccatcaacggcgccctcgagtgcaacgggaacaaccccgcccagatgaacgcgcgcgtcggctactacaagcagtactgccagcagctccgcgtcgacccagggcccaacctcacttgctag

SEQ ID NO: 6172 - DNA, 1182 bp, Zea mays
  Peptide Sequence Number=SeqID_47951
atggcgggcggcacgaggtcacgttgtcccgtgctgctgctgttgctcctcggcgtgactgctcgactggcttcaggcgtcgtctccgacgtactccctccgtttctttttattagtcgctggagcctgctaccaaatggcaacttcgagctcgggccggcaaagtccgatctgaacggcaccagggtgatgaaccaaaactccgtaccgaactgggagatcttagggttcgtggagtacatcgggtccgggcagaagcaggacgacatgatcctaccggtgccggaaggcgcatgcgccgtgcgtcttggcaacgacgccaccatccggcagaacctaaacttgattcgggagacgacctactccatcaccttctgcgcggcgcgcacctgcgcccaggccgagaggctcaaggtgtccgtcgccgccgagtccggcgtcctcccgatccagaccgtgtacaccagcaacgggtgggactcctactcctacgccttcagagccaggcacagcaccgcgtggttcagcatccacaaccccggccacgaggacgacccggcgtgcggccccctcatcgactccgttgccatcaaggccctgaaccctccgcatcttaccaaggaaagccatacggccggtttaagccagcgcagcgaacatgcagataacatgctgaggaacggagacttcgaggagggcccggtcatcttcccggacacggcgtggggcgtgctggtgccgccgatgagcgaggacgacgtgtccccgctgccggggtggatggtcatgtcggacacgaaggtcgtcaagtatgtggacgcggcgcaccacgcggtgccgcgcggcgcgcgcgccgtggagctggtggccggcagggaggccgcgctggtgcaggaggtgcgcaccgtgcccggtcggcactatcgcctgtcgctcgcggtcggagacgccgcgaacgggtgcgagggccccatggccgtggaggcgtacgcggcgcgggcgacgctgaggacgacgtacgagtcccgggggaatggcgggagcaagcgcgccgtggtcgacttcacggcgatcgcgaacctcacgcgcgtggtgctccagagctacaaccaccacatgaagcccgacgggacgctctgcgggccggtggtggacgacgtctccctcgtcggcctgcgctag

SEQ ID NO: 6173 - DNA, 621 bp, Zea mays
  Peptide Sequence Number=SeqID_47952
atgagtatcaatggttttaatcatagacgttaccttgtaatggcgtggtcatatccattttggaggcagctgccgaacggcaacttcgaggacgcgccggcgagatcgcagctcaacggcacgcaggtactggggctctacgcgatccctcgctgggaagtctccgggttcgtggagtacatcgggtcaggccagaggcagggggacatcatccattcatcctcccggtgccggagggagcctacgccgtgcggctggggaacgaggcctccatccggcagcggctggccgtgtcgcggggcgcgcgctactccgtcgccttcagcgccgcgcgcacctgcgcccaggccgctcaacgtgacggtcgcccccgactccgacgtgctccccatccagacggtgtacgcgagcagcggctgggactcctactcctgggcgttcgaggctaggcacggcgccgtgacgctcatcgtccacaaccccggcgtctctgaagacccggcctgcggcccgctcctcgactcgttcgccatcaaggctctccggccgcctcctgtgcccaccaaaaggacaaggatgtgcctgtttttaaatgctgtgagagaggagagtggaacatag

SEQ ID NO: 6174 - DNA, 831 bp, Zea mays
  Peptide Sequence Number=SeqID_47953
atggagttgtttcataggaggagaaagattggtgaaagactgcatggtctgatcttgccatctgttatggctacattgaaagctcagactagagggttgggccatttgacaattgtcaaaagcgacaattacttggcagaagtgagagatagtacaaattgtttgacaaaacatgtggtgaaggcagagtcgagacaatgttcttgtgaagagtggcagcacacagggaaaccttgtcaacatggattggcagtgattattgcccaggatgcaaggaatgttggtatgaagaactttgtcgatgattattattctattgagaagtttagaaaagcttacatgggaaggattccaccaattggtgaccgttctttttggacgaaggtggattttgcaaatgaagtatgtgcaccaatggctaaaagaggggttgggcgacaaaggaaaaacagaatgaagagctgtctagagggtggcagtgggaaaaatgaaaggaagaggaagcctaggaagaataccacgaaaaattggatctcgaaagagttgcggacttcaacatcacaacctagtgctcctaatgaagatgtagaagcagttggtgatgcagaggcgactcaagatgtagaaacagctgtaatagacaatggtggccatgaagatgaagcactagtctgtgtgccggctgaagatgcagcactagtccgtgtgcaaactcctcctagttctgcaccaagaagtgtcaagtggctcgttaagaaaattactccgaggaaaaacttgaagcgtgctgcgcaaaattctgagcacaactgcttgctgcttgctgtatga

SEQ ID NO: 6175 - DNA, 264 bp, Zea mays
  Peptide Sequence Number=SeqID_47954
atgaagaagtccttaacaacttgcaaaaacacttcaaatcagggcagagccattattaaagatctatctgagaagcttgacttatcaaggaccaaaaatcttgcccaacccaaagttgagaaagtcattgctaagaagaagagtgctcaagaagaaaccaaggctcataaatctcttattaaatccatgatgactcgattgtatgggtctaatgctagaaaaggcttcactggcttgcaaaagctagagagtctttctcaatga

SEQ ID NO: 6176 - DNA, 840 bp, Zea mays
  Peptide Sequence Number=SeqID_47955
atggagcccaagctgtcttcggtcggcgttcgcgacctccgccgtgtcgtcatccccacccccgtcctcgtcgtcctgctcgacgcccgccacgacctccaccgcgtcttcatccccacgaccgtgcccttcgatccgtatcgtcacccccctccagcgttaggatttgggagcagcaaggcaccactagagatggcctcgaccacctacgcgctctcctccgagccaacctcgaagttgggacgatatgccctggacgatcgcctgcctgtcgcccctcgcgtcgtcgacctctgcaacggcgcgtctgcaccccgcatggagctcgagtcgtcatcggcaccagcggggtcatctgccctcgccctccgcccccccaatccccgcatctcgcaatcgtgccccatccatggcgccacaggaggcggggagcaaccgagtggggaagccagacgccagtgtgccaccgtgggggttgggaagatgaagagggactctgtgaagatgaagaatgagggctttaagaatctgcctctgcatttcgcagagaacacgactcatcggcctgcccctgcgactgtgtttggcttcaagctgaagctcaatgcaacagtcctaagggaggaagcagagcaattggagctcgaactggagatgcgtagagagttaagggacataaccacctgcagggacgtttccttcaacctcggtctcaacggccgaatgcctgctacaatcgggaacctcgcgcagctcaccacgctgatcctggcaggctgtagcttcaccggaggcatcccacagcaacttggcaacctgcagcaactctcgttcctgtaa

SEQ ID NO: 6177 - DNA, 282 bp, Zea mays
  Peptide Sequence Number=SeqID_47956
atgtacatgcacagtgttggaaatagtagaatgtacctgggcaaggtgagcccaacagtcaaggaacaattgacttatttggcaaagttagaggcggtctgtgccgaggacctggacatagatcccgatgaggtgcttgtcgtcatctcccatttctgtttcaaaaacttgatggatgagagtgtcactgtcgacaggccaaaccccagagacacggtgctcaaaaacatcgccaacatgaggccgaaagtgttcatccatgacatcctcaatggatcatag

SEQ ID NO: 6178 - DNA, 270 bp, Zea mays
  Peptide Sequence Number=SeqID_47957
atggcgcggttaatacggtccacaccgaggctgtcctcggcgcccgaccgcgacggcgcgaccgtgttctactcaacgtatggcgatcatggaacacaagccacacgggtgagaaactttctgagcatacctggccacggtaaagtggaagatctgcaggcagggaaaagatcaagggactggattcttgagtttacaggggggataactatgtgcatggggtgcagtcgtggcttactcaaggaagcccacgccggtgctgcagggtga

SEQ ID NO: 6179 - DNA, 270 bp, Zea mays
  Peptide Sequence Number=SeqID_47958
atggcgcggttaatacggtccacaccgaggctgtcctcggtgcccgaccgcgacggcgcgaccgtgttctactcaacgtatggcgatcatggaacacaagccacacgggtgagaaactttctgagcatacctggccacggtaaagtggaagatctgcaggcagggaaaatatcaagggactggattcttgagtttacaggggggataactatgtgcatggggtgcagtcgtggcttactcaaggaagcccacgccggtgctgcagggtga

SEQ ID NO: 6180 - DNA, 225 bp, Zea mays
  Peptide Sequence Number=SeqID_47959
atgaaggatgccaaaacccatcaagacacccctgggaaccaatggggcattctcgacctcgacacagaaggtaagtccgtagatcaaagtgatttcaaccaagtccaagattgtatagtatctgaagtctttcggcgagacaaaggtatcctactcatctacatcaaattacgcacccgtcggcatcgacaccacgacagctcagccagcttgaaatatcgttaa

SEQ ID NO: 6181 - DNA, 205 bp, Zea mays
  Peptide Sequence Number=SeqID_47960
atgtccggtggtgcaccggacactgtccggtggtgcaccggacactgtccggtgcgccagaccagagctaacgcccactttttcagagcgaattggctcaagcatagcgcgaaaactcattcagatgctcccgtgtatggagaactaagcgacccgttcaggaacactgtcaaggcggctgtcttaactgtctcagattttcaag

SEQ ID NO: 6182 - DNA, 186 bp, Zea mays
  Peptide Sequence Number=SeqID_47961
atgaacgtatgtgagctcacccttgctgtctcacatcccccacaggtcaagaacagattctatcttacctttggagattcaccttataagcttagttatcccaatttagacataaaacaacagatcaagccttgccatgatccttcagcttataaccagccactagactatctgtttgcctactaa

SEQ ID NO: 6183 - DNA, 650 bp, Zea mays
  Peptide Sequence Number=SeqID_47962
catctgcatctgaacgtcaaccactggatctgtcccaaccgttagaggattcgaaggattctgaaagggaaatgtgctcttgggcaatttctacaaaaacagtgacaaaagaagaagaaaagaaaaggaaaagagttggctgtgtgcagccaacaccaacgctggccaggcacatcggaccgttcggtggtgcaccggacagtgtccggtgctccaggctggccggcggtgaaccagctgctctcgagaaaatgcagaggcgtacggctataattcaccggactgtccggtggtgcatcggactatccggtgagccaacggtcgccagcgccaatggtcagccgcgcgatctgcgagcgacgcatggcccacaacaatggtcagctgggcacaccggactgtccggtgtgcaccggacagtgtctggtgttcaccagacagtgtccggtgttcaccagatagtgtccggtgcgccaaccgaccccgaggaccaacgatcggatgcgccaaatttagaaggagatcgcgcaacggacaactacagtgactgtccggtggtgcaccggactgtccggtgcaccacgagacagaaggcaagtttggccttccaagttggcctccaacggctcctagctgccttgaggctataa

SEQ ID NO: 6184 - DNA, 726 bp, Zea mays
  Peptide Sequence Number=SeqID_47963
atgcctaattgcagtatgaaacatggcatgctcgtgattagaaacaacacccccgccgttgcccagtacgtgccgttcggggagtggccgttgacggcggccggggacgtttctcccggcggcggcgaaggctgccacgcggcggtgacggtgagcagcagcgtcgcgacgtccatcgagtcgctgagcttcattaacctggacctgcactggaagctgcagcagcagcggctggccacaatgttgctgggcgcgccgccgagctcggccgccgcggcccatgctgacgatgacgacggcgcggcaagagcagcagcgcacgtgggcggcggcgccttcttgcaggtggccccgggaccatcgcccggcatggaggccaccggcaccgtgccgccgccggtggcgacgtcgtcgtggttcatggacagctcctgctacgacgtgctcccgtcgtccccggccgcgcatgctaacacggccgcggccgcggccgccgtaggcgccagcgactgcaacgtcgtcaacagcggcggcggcgacaacgccacgtcgagaaacagcagcaactgctgcgggccggggagcgcaatcccgccgtggggcgacatgtccacctgtgaattaggcgactggcgccggcgcgcgatggagggcaggcagggtcacgggaatcccatctatgaaccacgtgcgaacgtgtaccagtacctgtacccgtgtgtatag

SEQ ID NO: 6185 - DNA, 1128 bp, Zea mays
  Peptide Sequence Number=SeqID_47964
atggaggtgagggaggtgcttgctgctgatttgagtccgaaagcagataagccacatgctgcatccacagacggccttgggacccttgctaaatggattggaaaacaagaaaaaatcaagcagcaagatacccagagagttccgtgcaaacacagtcagagggagatcagggaagagaggggaggggaggagaggaggaagaagaagaagcagcagcagctgcagctgcagggcagcaggcatggagcctcatcacgcaaacaagtggagcgtgcgagcaagagtgacccccaggtggtcgtcgtcagccagttcggggaccatcactacaaccgtttccgctacacgcttgtctcctacatcgtcgtcgtcgacggcggcggatcgtcggcggctggagaggcgacagtagtacatagcccgatcaggaaggtgttgctggcaatgatcgaggccgcgttctcaagcatagacctggaatcacagtcgggagcgcatccgaggatcggcgtagtcgacgacctgtccttccaccccgtgggccaagcgacgatcgaggacgccgcttctctggctaggcaggtagcgtctgacattgcctgcatcgcagcagtcccagtgttcctgtacgcagcagcccacccggcggggaagtcggtgggcgcggtccggcgtgagctcggctactaccgcccaaactacaggggcaaccagtggtcaggcagcgtgctccccaacgtcctgccggtgaagcctgacgtcggtccggcccacgtcgtctcgcacaagagaggcgctacgacggtgggtgtcacgccttggatcgagaactacaatgtccccgtgctgtgtaaggacgtcgccaccgtcaggaggatcacccgtggtgtcactggacggagcggaggccttcccacggtgcaggctctcgcgctcttccatggagatgactgcaccgagattgcgtgcttgctggatccagatcatgccagcgcctatcaagttcagaccgtcgtggaacagattgcaggagaccagggacttgaggttgagcagggatactacactgacataaccaaggacgaagcgctcgataagtatctcaagattgcttgcgctgacgactga

SEQ ID NO: 6186 - DNA, 810 bp, Zea mays
  Peptide Sequence Number=SeqID_47965
atggcggggagatcgacgtacgacaaccccttcgaggagggcgcagccgcggccgaggtcaaccctttcgcggaccaagctaaacgaggaggaccgacggctcagtccagctattctggcggcgctttctacacgacgcagtcgcaacgcccggctcctcctagcacacgcctttcgccgcttgctcctgaacctgctggcttctacaatgacttcgctactccagtggatatccccatggacgacacaaacaacaaggacaggaagacaagggagaaggagcttctggccaaggaggccgagttgaacaggcgtgagaagctggcgttgtgttggaagagaaaaactggccaccgtttttccccatcatccataacgatattggcaacgagatacctgtccatctgcaaagtacactggttggtcgtgtgcctgttttggaacataatctgcgttacggctgcctgggcaaaagggtcaggtcctaaaatatggtttctcgcaatcatatacttcattcttggatgccccggcgcctactacctttggtaccggccactataccgtgccatgaggaacgagagcgctcttaaatttggatggtttttcctattctacttggttcacatcgccttctgcgtgtacgcagctgtttctccttcgattctcttcgtggggaaatcgttgaccgggattttcccagcaatcagtttgataggcgacagcgtgattgtcgggatcttctacttcattggctttgcactgttctgcctagagtctttgctaagcatgtgtgtcattcaggtgtga

SEQ ID NO: 6187 - DNA, 288 bp, Zea mays
  Peptide Sequence Number=SeqID_47966
atggcgtctcgtctcgttgcggcggcggcctcctcctcctccctctcctcagcgtcccccctcgctcgcctaatctctcgccgcggccttgccggtgccgcagacggccatgggtctgcgaaggtgcccttgtggaaagatccgttgagcccgagcaagtggaaggaagagcactttgttctagcaagcctctcaatgtggggggttattttttatggtggttacaagctttttagtggaaagaaggaagccaagactgagggagctggctccaacaaggacccctaa

SEQ ID NO: 6188 - DNA, 849 bp, Zea mays
  Peptide Sequence Number=SeqID_47967
atggccggcaggtggaagcacgacaacccgttcgaggagggcgacggcggagacgtcaaccctttctcgcatcgacgcccaactccgctccctcctgaaccagctggtttctacaatgacattggtgcatcgtctgtagatatcccacttgatacaaaaaaggacctcaagaaaaaggagagagaacttatggctaaagaggctgagctaaataggagggaacaggaaataaaaagaagggaagaagctcttgcgaaagctggagttttaatagagcccaaaaactggccaccgttcttccccgtcattcatgttgacatttcaaatgatatacccgtgcacttgcagcgagtgcagtatgtttcttttgcgtcactcctagggttggtcatatgcctcttctggaacattttatgtgtaactgctgcttggattacaggaaatgatcctaggatctggtttctggcagtcatatacttcattaccggatgcccaggtgcctactttttatggtaccgacctctttatcgcgcgatgagaaaggatagtgcgttcagctacgggtggttcttcctgttctacttttttcacatcgctttctgcatatacgctgctgtttctccgccgttcttttacgtggggagatcattggccggaatctttcagtcgatcgacgagataggcaggcacgctggcgttgggataatgtacttcatgggcttcgcgttgttcgtgctggagtcactgctcagcatctgggttttccagatagtgtaccgattcttccgcgggaaaggtagcgaggcgcagatgaggcctgacgccgcgtctcgtgcgccgccgttctga

SEQ ID NO: 6189 - DNA, 750 bp, Zea mays
  Peptide Sequence Number=SeqID_47968
atggccggcggcgtcgcctcggcctcggcctccgcctccgcctccggccccgcctccgcgttcctccccgacgcgcccaagtccgtaatcggcgccggctccggaggaggcaagcggaatcatctctgcggggcgctgttcaagtacggccccaaatctgcgcagggaaataccttgtatttcgtttttttggtctggatagatttgcaacccttgaaagttatggtagcattcaggactggggattttaaccatcaggtgatcttcattggtggcctcacagatgggcttttagctactgattacttggaaccattgtcacttgcattggaggttgagaaatggtccttggtacagccattgctttcttcatcatacactggatatggaatttccagcttacagcaagatgcgttagaactagagcaactcatcagttacctaataaataaggaaaattctgaaggagtaatattgcttggtcatagtactggatgccaggatattgtgcattatatgcgcacaaactttgcctgttcgaaagcggtttctggggtcatcttgcaggccccagtaagtgacagggagtatagagcaactcttccggaaacagctgaaatgatagacctggcagccaaattgattagcgagggccgtggaatggatttgatgcctagaaaagcaaactcagatgctcctattactgcctacagatattatgctttttgtgtcattttcccgcttctttaa

SEQ ID NO: 6190 - DNA, 1317 bp, Zea mays
  Peptide Sequence Number=SeqID_47969
atggggtgcgggccatccaaggaggacgcggagggcggcgccgagtcgcgctgccgggagcggaagcacctgctgagcgccgccgtccacgcgcgccacgcgctcgcgggcgcgcacgccggccacaccgccgcgctcaagaacgtcggagccgcgctctccgactacgccgcgggcgagaccgaccgccacgacgccgtcctggtgccgcgctccgcctccgccgcggccgcgctcagcgccgggcagggctcggcggccacggtggtcaaggcgctgccgtccccgctcgacgccttgctcccgccgccgccgcccccgggtgccggcgacggcgacggtgacgacggcgggcacacgacgctgcacaggtccatgagcgcgcccgacatccagctccagccgcccatccggaagggccgctccggggaggcgcccatcatggaggaggacggcgagggcgacgcccccggggacgacgcggggcggcgacgggaggacgacgacccgcagctccagcctcctcctcccccaccgccgccggcgaacaatcccccgccctcgcgctccccgccgcctgtcccggctgcgaaggccaacctggagcgggcgacggcagaggggaattcgtggaaggactacctgttcggctcccccgacgccatgcccggcccgccgcccacgctggaccccagcgccagcgccgccgccgagtcgtcgtgggcggccgagcggaggatgcccgcgcctccgcctccgccgcccgaatccgaccaacagcctacgaagcagccgcagccagtgccttccgccgaggagatcgccgagggaaagaagcccgcggctgagctcgtcacgcgccgggctaggaagccggagggcaagaagggcagggtcgtcatggtgacgccccagccggcgaggctgggcgacatcctgcgcaggctcgacgatgaattcctcaaggcatcccagggcgcgcacgaggtgtccaagatgttggaggcagcaaggatgcattatcactccaatttcgccgagacgcgaggatttgtggatcattctgcaagagtgatgcaagccatcacttggaatcgctcatttaaagggatccctccaccagaaaatgtgaagaatgagttggctgatgatgaatgggaaacacatgctaccgtactcgataagttgcttgcatgggagaaaaaactatgccatgaagtgaaggaattcgagacaatggagtcaacaattgcagaaattgatcgtctaagagatcaacagctttacccaaaactccttgaactggtgaaggggtaa

SEQ ID NO: 6191 - DNA, 147 bp, Zea mays
  Peptide Sequence Number=SeqID_47970
atggacagggtcccgaaagctctggttcccccaacgagcgacttgctcgacatcactgaacgccttggcagccaccggcttcccccaagaggaggtgctaaaggttcacaacaagccaataaaaagaccaaaaatgggttcaaataa

SEQ ID NO: 6192 - DNA, 963 bp, Zea mays
  Peptide Sequence Number=SeqID_47971
atggccgcgtacttcaaccactcctcgtcctacccgccgccgcctcccccgccgggcacttccccgtacggcgcgtaccgccacgcctacccgccggcgccggcacccccggccgcttacggcgcctactacgaccgcgcagagcaggccctcccggcgcgggacgaggtccgcaccctcttcatcgctggcctccccgccgacgccaagccgcgcgaagtctacaacctcttccgcgatttccccggatacgtctcctcccacctccgcacgggcaaatcctctcaggcgtatgcgtttgctgtgtttgcagatcaacagtctgcactagctgccttgagtgccacaaatggaatggtatttgatcttgagaaaaattgttctcttcatgtagatctcgcaaaatccaattccagatcaaagcgcttgagatcagatgatacttcaccttattctcctgaaaaaagaaataggaaaccaaggggatttcctgattcaggtgctggaagcaatatttacatatctggaatggaaattatagttgacattgttccgtcttgcagttacacaagccttgagtctagtgcttctctcagcaaggacccatccacatttgcccctcaaaataatcctccatgccctactctttttgttgcgaacctggctccagcttgttcagagcaacagctgatagatgttttctcaagttgtgcgggatttgtgaaactcaagatgcaaaacaagcttggagctccagttgcatttgttgatttcaagaaacaggacgaaaatgatgttaccattttcacttttccaggatattctgcttttatttgtacagaatatcttggtttaggaagtgcaattatgcagagcagtcatctatgccacattgtagtagccttgtcatcttatggtcttgcactcttgtacacttgtcatcttatgaaccttatggtttga

SEQ ID NO: 6193 - DNA, 675 bp, Zea mays
  Peptide Sequence Number=SeqID_47972
atgacccgtcgagccaaggacgccatcgaagtttgtcgtcgaccgccactactccccaaccttcgccttgttcattttgtcgctgtcaaaaatattggtccaaaacgattaaaacctctgtggtgtaaggtggaagtaccggtggggattgtcgaggagctgccaagaattctcgtggaagagggtgaactagaagttgaagctcaggagtgtcttgatcaccaccccagttccttcgacaaaggcgagccctggcatctaacatcctatattcgcaatagtttaatttattcattgcctaactatattgttgcattaggagtgacggggatacggagatatgacccatggtggatggtacgccctaaccctctggtagtcgggcggtccctgggtatggtggcccctgtggaatctgagatgtgtagcaaggctgctactggaatgagtgtagtggtgattgtatctcacgaagtactgtgggtaaagagcaaggtagagatgcaaactctcgtggatgacactggtatttatatcaagggcaaagggaaacggtggaagcgggcagacccaggagcacaatgggcccatgcccggactagtcacgttttgggcgtgatcgtgttgaggccattcgttttccctgcgcccaacatcctcaaacgccagagatag

SEQ ID NO: 6194 - DNA, 411 bp, Zea mays
  Peptide Sequence Number=SeqID_47973
atgacacgcgttcttcgacaactgcccgtgcgcctggcccctattcctcccccgctctctctctcccgctcggccacctcatttgcagactgtgcccagctcatcccctctcgcctgcccgtgcccaagctccgccgcacccgtgccgtgctcgtcaccgcgaccgcgccgcgccagtgccccattctcgcctcgcccggtgtcgtcattgcgtccgcgcccgaaacctaccgacgtcgcctgagctccaccttgcctgagctccgcccgagccttgccgtggccccgtccgtcaggcgccagtgccctggcatccccgtcgcttccccctcccgtcgctcgagccgctggaccatgggacccgcttgccagagagcgctcgcaatcatgtcccaaaccgaggatgcctag

SEQ ID NO: 6195 - DNA, 432 bp, Zea mays
  Peptide Sequence Number=SeqID_47974
atgacaaccacgagcggtgtcacgagtgatgagtcgggagatccatcctttggttcctgctcctccgaaagctccatgctgtggctcgaactaccaccatcgttgtcatctccgttagggtcttctctagcggatggggtgccctatggtggtgcaggggcacctctagctaaggcacaggggagggttgactcgcagactccacctcctgctgaggcgaggggaaagagtcctgctgctactactcctggcgtcgacgctcctgctcctcgtgcaggcgacgatgcagtctctccaggtgactcgactgtcctgccaccgtgcggcgtagtggacgctccgcaaggtccttacagagaggtactcagggaacaacctgagtcccctaaagtatcacaattcatcatcataatcaatatcatcatatcataa

SEQ ID NO: 6196 - DNA, 657 bp, Zea mays
  Peptide Sequence Number=SeqID_47975
atggagcacgcggggcgccatcaatatttgttaaccggggcgagccagatgggacgccggacttgttccccgtaccctgagctagctaggggtagggtaatgatggtcccccctgtgacgcggtcggtccgagccttggtcgggcgaggcggagttcgtcgtcttctgaggctgagcccgagtccgagccctgaggtcgggcgaggcggagttagtcgtcttccggggccgagcccgagtcttgggggtcgggcgaggcggagttcgtcgtcttccggggccgagcccgagtccgagccctggggtcgggcgaggcggagttcgtcgtcttccggggccgagcccgagcccgattcctggggtcgggcgaggcggagttcgtcgtcttccggggccgagcccgagccctggggtcgggcgaggcggagttcgtcgtcctccggggccgcgctcgagtccgagccctggggtcgggcgaggcggagcttcctatggcgcctgaggccggacttggccgctgtcagcctcactctgtcgagtggcacagcagtcggagcgatgcgggcggcgctgtcttcttgccaggctggtcagtggagcggcaaagtgactgcggtcacttcggctcagtcgactgaagggcgtgcgtcaggataa

SEQ ID NO: 6197 - DNA, 118 bp, Zea mays
  Peptide Sequence Number=SeqID_47976
cggagcaacggctacttcacgccaacggtcgacggcaaccgcattaaatgcactacagtgcgcgccagagttagaacacgcgcagaaggggcaccggacagtctacaggacctgtccg

SEQ ID NO: 6198 - DNA, 609 bp, Zea mays
  Peptide Sequence Number=SeqID_47977
atggcccttcctgtgacgtggtcggtccgagccctgggtcgggccaggcggaggctcctccgaggtcggggtcgagtcggtcttccgaggtcgaggtcgtgtccgagcctcgggtcgggcgaggaggagactgtcgtcttctggggccgagcccgagtccgagccctggggtcgggcgaggcggagttcgtcgtcttccggggccgagcccgagtccgagccctggggtcgggcgaagcggaattcgtcgtcttccggggccgagcccgagtccaagccctggggtcgggcgaagcggagttcgtcgtcttccggggccgagcccgagtccgagccctggggtcgggcgaggcggagtttcctatggcgcccgaggctggacttagctgctgtcagcctcactctgtcgagtggcacagcagtcggagcgacgcaggcgtcgctgtcttcttgataaggtgtcaggccatccttgcattaaatgctcctgcgattcggtcggtcggtgtggcgatctggccaaggttgcttcttggcgaagactgggtctcgggcgagccgaagctttgtgctgatgggggttaccagctgagattaggagtcttgggg

SEQ ID NO: 6199 - DNA, 843 bp, Zea mays
  Peptide Sequence Number=SeqID_47978
atgtccgccgccgccgcgacctctgccagcgactggaccatagtccgccgccgcggccgccgccgaggcaacgccccacgctccacctcccagcccgatgccccgacgcctctccccgtgaccccagtcctctggtccccctccgattcctctctcgaccccgcccgcgtctcccgcctcgtcgcgcgcgcccacgccgccatctcccgcgtcgctgcctcccctctctaccacagcctcctccaggactcgtcgctccgccgccgcctcagtctcctcgccccggcccacctctccctcctcggcgtcggcagcttcgagtcctcccccgccgcgcgcctccagctcgcgctcgccgccctcctacgccgcgacctcctcccgaaagccgcctccgcggacgtcttcgaccccgtcctctccgccgtcgagtgcgcggccgccgcggcgctcggcttctccgtcccgagcctcgacgacgggtgccgccgttgcgctgaggagcccacgctcttctacatgccccactgcgaggcgtcgctctacgatgctctcctcgccgctaactgggattcccccgcgcagctacgccgcgtctgcgtgctcggcaacagcttccggcggtacgcgctccaggccgaggagaaccgctcgggccccgccgccaaggccccacatgtcctcgctgcagagcggttcgcgcgcgaggagcggttcggcgacccgagggatctggatgacgaagattggttcgcccacgcgttcaacgagacgagctggcatttcttcgagctgcgcgacgacgtcgacttgtccgccaccattgctgtaggagggagctaa

SEQ ID NO: 6200 - DNA, 456 bp, Zea mays
  Peptide Sequence Number=SeqID_47979
atggcgcactgctacatctcctattgtacacctggaccctctccttacgcctataaaaggaaggacaacacggaggccgcgggttttccccttttctccctctcttctacccccttcgtgctccgtctcgcgccgacccatctgggctgggacacgcggcgacaatttactcgtcggtccagggaccccccggggtcgaaacgccgacaggcggctacagccccggggaatctttgtaaaggctacgtagtgagaccccgcctactcaccttgggagtgttcaagggtccgtacaacccgaggcaaaaggggaatcacggctcatgggtggcaatgagattgatggtttttggtgttgactctagtaatggttgtccgcattgcaaccactgctcaggagaagatgaagccgtggaaggagacttccaggagttccaagactacgtcgagttctag

SEQ ID NO: 6201 - DNA, 557 bp, Zea mays
  Peptide Sequence Number=SeqID_47980
gctgatgcgatattttcctgaagttattatattccagtctatgccagacatctacatgcaagatattgatcagctagaacttggcaaacccttgcctttcgtgtctgttcatatttctcgtggcttggttattctgaaggctgatatttcttttattgttattttattgaagtctttgcggcgcatgaatcatcctaacattgtgaagctcaaagaggttatcagggaaaatgatatattatacttcataatggaatacatggagtgtaatctctatcaacttatgaaagaaagggtcaagcctttctccgagtctgaagtccgcaactggtgttttcagatatttcaggctcttgcatacatgcaccagaggggctactttcatcgtgacctcaaacctgagaatctgttggttagcaaaggtgtcataaagctagcagactttggtcttgcaagggaagtctcatcattgccaccatatacagaatatgtctcaactcgctggtatcgggcaccagaagtcttgctccagtcatctgcttatgattctgcagttg

SEQ ID NO: 6202 - DNA, 573 bp, Zea mays
  Peptide Sequence Number=SeqID_47981
atgaagtatcagttcccacagaccaaaggcagtcaattgtctgaggtgatgacaacagctagtagcgaggcaattgacctcatctcatcactatgctcatgggatcctagcaagagaccaaaggccacagaagtcctccagcataccttcttccagggttgtacatgtgttccgcttcctgtccgtcggaaagcttcatcgcttcctaaaacacctccatgtgttggatcaaagagaatttccgagaacagtgttgctagaagattctcgaccgggactctatctacgatgaaatctcatagcaatgcacctgcaaaatcaaacggtttatctaggactgggaatcctgtacttaggcattcacgcagcttgcctgaaactggtcgacgagcagtacagaaggtctcatcaatcacagagaaactgtcgcaaatgtcggtgacctccagaacacgaagcgccgtgaagcctgccgccccgacgatgaaggccggacatggcaagtcagacttcctggggaagtctgacgatatccctccggcaaagaggctgacgagaaaattggtcagctaa

SEQ ID NO: 6203 - DNA, 477 bp, Zea mays
  Peptide Sequence Number=SeqID_47982
atgttgcgctctatgcaactgaaagccaagcccaaactcgacccaccagagcagacttcaaggcctataaaagatcgttttcccaccagcttcctatatattgagagatatttgggtagaattatacagcagttgcaatcacacctaatgcgggggacagggaggcacgctgacagagaggcgcgcggcggcacggggacagggaggcgctcggcggcggtgggggagagggtggcgctcgacggcggtgggggagagggtggcgcggggacacggaggcacgcggcggcggggggcagggaggcgcgcgtacaggagggccgaggacgtgctcagggtgttattgcagggtcagaggttgggactagattatcccaattgtctttgattgtcccctcaaaattagagggacgagagaggacgtccctgtcctgcttgtcctcagccgcaactgaacttgtcctcagccgcaactga

SEQ ID NO: 6204 - DNA, 549 bp, Zea mays
  Peptide Sequence Number=SeqID_47983
atgaccaaagccctctccgaaaggaaagcaacttcttcgatgaaatccctgcctttgatggaatctttgaagaaagctatggctgatgcaaaaaagcccaggtccatacaagacttgctgaaggagcaggtggctaaactcagagaacaagcatccggtggaggcggagggaatgggaatcgccgtggaggcagtggtggttctggtggcccagatgatgagtccttcaaggaagcattggatgaagtagtccaagttatcttagccactgttgctttcatacttgtgtacatccacataatcagaggggaggagctttaccgtcttgccagggactacaccagatatctcgtcactggtaagagaactgcccgactgaagcgttccatgcaaaagtggcacaacttctccgaaagcttcatgcagaaggaaggctcagaagaggaccaatatgagaaacctacatggtggcaacagcctcagaaacttgtgcatcttatggaggagctttgcaggggaaattggcgtccccatgcccaggagtcgtag

SEQ ID NO: 6205 - DNA, 555 bp, Zea mays
  Peptide Sequence Number=SeqID_47984
atgggggaagaaggagaggggatcggccatgggggagaaggagaggcggctagccgcgcccaggctacaggggattttgttgaggcatgggaggtgaacggctcacgcagggagaacagagaacacctaggagctgctgctggtcgcggctcctccacggcgactcgcgagcaggagcctagctggggcggcttgccggaggaccagggtcggtgggggcagggctggggagacatccggccgagcgacacaggagcaggcggtgggggctgcgctcagccgcgcgagggagcaggggccccgacgcctgggcacacgggcgagccgccgcgcggctgccggctgtctaccgcgtcacgctgggcaagctgtgctgccgtgcgcgctggccgccgcgctggctggctgccgcgttggctagccgccgcgccggctgcgccaagctcgcgcgcacccgcgccgagacgccgcgcccggggacgtcgagcctggccacaccgcgccgccggccgaggaaaacagagggagcacgcaggggaggcagccatggattga

SEQ ID NO: 6206 - DNA, 264 bp, Zea mays
  Peptide Sequence Number=SeqID_47985
ggtagggagagatacggtgtcgcaaggctggaaccatctctgcatctgattgatgagccaacccgtgttgggtctgttcaagcctttcaatgtgctgttgttgcgggttgggtggtgacggatgccttcaatattatcctgaagggcttgactacattgagcagtatggctagcctctttgtaaaccaatggtcattaaaatatcatgatctagaactcgacaaggaagcagagaatacatgggtggattgctacatagagtag

SEQ ID NO: 6207 - DNA, 534 bp, Zea mays
  Peptide Sequence Number=SeqID_47986
atgcagctcagcttcaacgacacgtccatgaaggccatctgcgggcacccgtcgcggagccgtccgccagcacaactggcaccacctacacgctgtctcctcgctgtcggcttgggcagccccacgcacgctcggcaggagatggtgacggaggggaaacaacacctagaggagacatcggcgccacctgcacaacggtggaatggtagggagagatacggtgtcgcaaggctggaaccatctctgcatctgattgatgagccaacccgtgttgggtctgttcaagcctttcaatgtgctgttgttgcgggttgggtggtgacggatgccttcaatattatcctgaagggcttgactacattgagggctcggactcgggctcagccccggaagacgacgaactccgcttcgcccgacctagagctcggactcgggctcagccccggaagacgacgaactccgctccgcccgacccagggctcggactttggctcagccccagaagacgacgaactccgcttcgcccgaccctag

SEQ ID NO: 6208 - DNA, 888 bp, Zea mays
  Peptide Sequence Number=SeqID_47987
atgcggctgcggcctactaagcagcccggcgaccacccccggcccagacgtcggctccactcgggatactacgtggcaggccctctgggcccacccccgagctataagtacgccgcactcctactactcccaactcgcatcgcatccgcccacatctcaagccctgagaagcccgcacactcccccaggtccctgaggctaactgcgttcgtcccgtccaagtgcttcgtgttgggacgatcgagaaagtcgccgggtttgcctcccacgagcctgccctgctgcctggggccgctggtgaagcggaagcacatgacgaaccaggacgtggtcgtgtcggagatgggcattgcggccgggaccgcgctgccgggctcgagcccggccctcctggcctgccggggcgcggcgggccggcgccatgtccctgcggtacctcgacctggcagcggcggcggcgcgctcggccagctgcacctgggtcgaggccatgcgcgcctcctcgcccacccgctcccgcgccgccgccgacgtcgacgagctcacggcctggatggtacgatgctaaccctgtttctctcgcagaggaagcacccgtcggcgctcgggaagttcgagcagattgccagcgcgtcccaggggaagaaggtcgtcatgttcctagactacgacggcacgctcgcccccatcgtcgccgacccggacgccgcctacatgagcgacgtgatgagagcggcggtgcgcgacgtcgcgaagcacttcccgacggcgatcgtgagcgggcgctgccgcgacaaggtgcgcagcttcgtcgacctgtcggagctctactacgcggcagccatggcatggacatcgatgactagctcatgtacgctcgcacgctag

SEQ ID NO: 6209 - DNA, 360 bp, Zea mays
  Peptide Sequence Number=SeqID_47988
atgccgtttgggctccgcctgtcagccgcccgcgcccgctctgccagcctggtcccgcctgtcagccgcccgggcccgctctgcccgactggccccgcatgcacagtgcttgctctgccgaggctgggtgccgaggttctttccttttgctttttagtcaccttcctgcggggagagtatttcttctctgaagaggttgtctgcattgtaaccactgctcaggagaagacgaagtcgtggaaggagacttccaggagttccaagactacgacgaattctaggtgtgggttggcggcaacccccagtgagctgcctatgaaggccttatctttactgcgttttgctagcactttgatttaa

SEQ ID NO: 6210 - DNA, 165 bp, Zea mays
  Peptide Sequence Number=SeqID_47989
atgaacatactctactttcttgctgacaccgttggaggcaactgcaccatggtactttgtgaggatgtggtgagcaataataaaaaggacattgacgatgactccacatctaagatatcactttcgtctgatgaacttgccactgagacttgtcctgatttgtag

SEQ ID NO: 6211 - DNA, 184 bp, Zea mays
  Peptide Sequence Number=SeqID_47990
tggaaaatacaactccttcaactatgaagaccctgtccacttcatcgccaaccaccctaatatgaagggtaaccaaaaggctgataagtccgtctaccactctaataggctcaagggcaagagcaaatacacctccaggaagcataagtccaaggaacggtttgccaaggtggcactcaagtag

SEQ ID NO: 6212 - DNA, 225 bp, Zea mays
  Peptide Sequence Number=SeqID_47991
atgtcgagagaacacgacaagagggagatggtcaccggcgaaaagcccgaagccttgggaaagaagaacgatgaacatactctattaaaggaggctagtgacaagcacaaggaagaatttgtcggctccatcaagtcacataggaagggtgacaagaagaaaaataaaatgaagaaggcaccacaggtgggtgatgaggactataacttcgatgaggccgcctaa

SEQ ID NO: 6213 - DNA, 660 bp, Zea mays
  Peptide Sequence Number=SeqID_47992
atgacatatggggcctgggaccataatctactgacatcagatgttttttttctgattactacacttctctgctccaattctctagcatcattctcctttttgtctcaggaacttcaatacgaccttgacaacaatgtccattacttggacattgctccattgaaaattgatgttgggaaatactcgatagtttttgagatttcacttcaggaaccagagcaggagactgtttatgctactggagggagaaacactgaaagtgtaattgtcacaggactgatcaaagttgacaaggcagaaataggaatctctgacaatgatgctggggccgtggagtctgtccaaaacaaatgtgttcaggtgttcttgaaattgaggcatgagagtaaggttgaacacttattcgtggtacctggctctgcaaggcagttcaaaattgttcttgacttcctaggtttggtggagaaattttactacctttctggaagatatgaccttgagcttaccgttggtgatgctgtaatggaaaattcatttctacgacctcttggccatttggagttggacctgccagatgccccagaaaaagccccacgtcctcctgcacaagctgttgacccattctcaaaattgggccaacgaatcaagctgattctcaga

SEQ ID NO: 6214 - DNA, 927 bp, Zea mays
  Peptide Sequence Number=SeqID_47993
atggccgggaggcgcccggcaccggtggccatcctccttctcctcgccgcggcattcgcccccatctcctccgccgttcgcccagtctccgacgcgcacagatccgctgccgtggagcttttcgccccctccgctgacggatccttcggcgatttggagagtacgtatgaggcggtgaggactttccagatactcgggctggagaactataagagtctgtctgggaaggcgtgcaagtttgccgcggagaacctggcttcccccggttccaccacgaaagatctgttccatgctgtccggatcagtggcgcgcttggatgcgctgttgatgccggcgtgtacgatgtgggtgctagctttagtggtctcgatgttgctacatggtgttgtggcgaggctcaaggcagtgattcagggatactaattccctgttggaattatactatcctgtgggaggtttgcttggcatcaaggaacaaaggccataattgttgtttctgtctgatgcagaagggtacattccatgccactaaggcacttagccaaagtgacgggagatggcgttatgacactgccagtgctgagtctagcacatttgctgctggtattgcactagaagcattagcaggtattgtttcactggcagatgcagcggttgacccatccatgatgggagtggttaaaaatgacgtcgtgaagctgtttgacaccatcaagagctacaatgatgggaccttctactttgatgaaaagcatgttgatgctactgaatacaagggccctataatcacatctgcttcagtggtgcggggtgtcacctcttttgcagctgttgtttctggaaaattgaatatccctgccgagaaaatacttggcctggcaaaattcttccttggtattgggctcccagggtcttcgttccgttga

SEQ ID NO: 6215 - DNA, 156 bp, Zea mays
  Peptide Sequence Number=SeqID_47994
atggaggacacgagtgagatcacgaccgctcgcccacactcaggagtggagatcgtgcagagggtcatgactcttgaggcctacaaccagaaacagttccagcaactgcttatacttcataacaatacaagttggtggtataaaaatggtgactga

SEQ ID NO: 6216 - DNA, 447 bp, Zea mays
  Peptide Sequence Number=SeqID_47995
atggcacacacggcaaaatctagtggccaacagggcactgcgacggcgtccagcgacgcggtgctaaagaaaacacagacgaaccgaaggggaatccgatggtggtcttcaccaatatatggtggaaggcaccgaggcgggcaagggcgatggcatgtgggcaatgcagtagggtcatggaggagcgaggacgaggcagggaccgacttggcaagggcacaagggacacagggggtgcccttggacggtggtggggagcaccgaggtgttgtggtcctcaaagaggtcaccacatcaaagttgaagacccattataggagaacaactttgctaaagggtgcaagcatagttgttatgaagaatttggagaaaaacccagtccaaaactggctgtcagactgtttggagctgaatttcagagttgcagtgctatggggtgaactttga

SEQ ID NO: 6217 - DNA, 225 bp, Zea mays
  Peptide Sequence Number=SeqID_47996
atgagcctcccatcctacgacaatgcaaagcacgcgacacgggaatgttccaccctaacctgccccttctgggcaccagggcaaacaagaacaatggacccaggctactgtgacacggcgcataggcccttggggttgctcaaagtgtgcggtgtgctagcgggagagcaggtgggcacgagcatcgcgaaagacgttgcgcgcatggagcttccgcagaggtag

SEQ ID NO: 6218 - DNA, 210 bp, Zea mays
  Peptide Sequence Number=SeqID_47997
atggacttgctgtccgactcgaagtactcctctctagagtactccgagtcaccaaaggactcaaatgaggaggatgggtttttcataagtggagagaagacagaggtttcaagaacccagcggctgattgaaaggaaacaacaaggatgcacatatttatgggcagaagaggttcctacttcatatcccgttcatacaacaaatagttag

SEQ ID NO: 6219 - DNA, 765 bp, Zea mays
  Peptide Sequence Number=SeqID_47998
atgtgggagggctatccttggccgcagggggagggcgccgcgggggaggggggcagggggcgggggatgggtgtgggcgtggaggagggcgtcgaccagacggacgaggagtcatcgctctcctcgccatcggagggggtggggccgatcgaggtggtgaggggcgtcggtgccatctccaggaccggctctagcacctcttcctcctgctgctgttgtagcagcagcgacggcgggacaccggagacgaggttagggtttggtggggccagcgcggtggcgggtgttgccatgggaagggccaaggtggagaacgcgctcctccctccccgacaccgaccgacccctcgtccgctcgcctccctccctgatccccaccgccaccgccgcgtcctcctcttcctcctccgaggttccgatcgccgcctgcacctgcgtctccgtcggcgaggtgggttgctcctcccctgcctgccggtcctggatccgcccgatctgcttgcacggcgcggcgcggcgctcgatctcatatcgtctggttttcctttcctcctgtgccaggtagcggtgggcgcggtggctacaagcagcggcgatcgggtggtggcggattgcggggtgtgcgccatctgcctcgacaggatagcgctccaggagacagccctcgtcaagggttgcgcgagtgaccatgtcatgtggctgctgggggttggcggtagggaccgcgaagtggggagggcgggaggcgggggcagtctacactaa

SEQ ID NO: 6220 - DNA, 720 bp, Zea mays
  Peptide Sequence Number=SeqID_47999
atgaacacaactgatcaagccaaggatggaggcaagaagagcttcgaggtaccaagtgcacgggagaaggtcaaggaggctgaggaacccaaagccaagggtgaagaagaaggcatgcaaagtcaaggccaagactcagctcagtctggcacaccggacagtgtccggtgcgccaggttgaactccggtgaacaggccgctctcgggagaagtctggcgacgtacggctataattcaccggactgtccggtggtgcaccggactgtctgtgtctggtgcgccaacggctccaggactgcaatggtcgactgctccatttatggaaggaaatcaggcaccggacagtgtccggtggtgcaccggactgtccgtttgccatatggtccctacccggagggggactccactgacgtcggtgatgatcgcggcaagcaagtgaagcctcgggctgaagagggcacctcaaaggggaaggctctggttgcagccactcgaaaaaggaaattaggtatgggggacgatgagactgggccaagggcctatgggatttttgttgaggagttaatggggatatgcgcggttcccggggaagtgatgtctttgcccgagctccgggaaacttcttcgcgcatgctgaagcgatggagaaagatcaccaggacgcttagcggaagaagcgtaaggcccccttcggctagtggacccacgccgagaagctaa

SEQ ID NO: 6221 - DNA, 327 bp, Zea mays
  Peptide Sequence Number=SeqID_48000
atggctactgctcagacgggctgcgtagtgaagggcctgctcgtcctgatcccctttcatcaccttaaactatggaaacgccatataacaatgagagcacaagatagcaggggggaaattaggcaacccttcgacgtcgctaggcgccacataaaaccaaaactcccaccagttaccccatttattcttcgcacacggaacaatcttgatcacttcagccaaagtctttccagtcctcggtccaccaccatcgccgaatcgctaatcgtcttctcagacgacgtcgcagtcgaggacgcggtctcggtagacgacgacgaggaataa

SEQ ID NO: 6222 - DNA, 375 bp, Zea mays
  Peptide Sequence Number=SeqID_48001
atgggggagaaagaaaaatggaggccatcactgctccatcacgtagggagacgaatcggtgacggagtaattgggcacggacgcccaggcgccctggcggcctggccagcccggcagcggcgcggagcgacagcgcgcccacgtgcggccttgcgcgaggaggcgaggcaccgcgggtggggcccgcgcgtcagggtgagggggagaaaatcccctggcggcgactattgggcctcgactgggctgttttggcctggtcgagcggctagggtgttacagaagtgggggaaactcctgatgaacgagtacaccgagaaagacgtaactcccgccaccgcggtcaccgacaggctcaagagtgagaacgagaactag

SEQ ID NO: 6223 - DNA, 798 bp, Zea mays
  Peptide Sequence Number=SeqID_48002
atggacctgattgactcaaaacgtaaacattttttgtgggctggctcagagaggttgactggtggaaagtgcaaagtcagctggaatcgtgcaacaagaccaaagaagcatggtgggttagtcatcctccaacttggcaacttctcatgggccttgcgtcttagatggttgtggcaggaagccaaaatgttgactagccaaaggatggggaaaaatagatccattcaagaggctctctcaaataactcatggatacatgacctaaattttcatcatgatgatttttcatctacgcacctccatgaatactgtcacttatgggtagaggtgaatcgggttcgcttattggaaaatacccctgatcttacccaatggaagcttaccccgagtggccagtacacagctcggtctgcctaccaggcgcaattcgttggctccacactcactaactttaacaacataatttggagagtctgggcacctccaaagtgcaaattctttagttggcttgctgttcaaaacagactctggacagcagacagcctacgattgatggcctcaccttcaccaaccgaagagttcagcagggaagcagctcgtcagtctctgatcgcgatctccgagtccactccggagacaccttcaccgcagacggtgaggacaccgccgatctccagcgcagagaacgggaagccgggcgatggggcggacaagttcagatcgaagctgatgtccatcacagacctgtcttctgatgcccaacctgcgcagtgccctcccgaggatgtcgctgcttaa

SEQ ID NO: 6224 - DNA, 984 bp, Zea mays
  Peptide Sequence Number=SeqID_48003
atggagaatgcgaacttagacttgatagccataagtcgcgtcacaaaagcaagaatggttactctcgggcggcggcggcggctctggcgcgcgagccccccgggcggcggcggccacgggcggcgctgtccaagggtctggcgagccccccgggcggcggtgcgcggctctggcgacccgccggtgcacaccttcccgcaccacgagttcgccgagatccccgacgtctccgacacggcggcgctctacggcgcgcaggagctgcagtaccgctccttctgcttcgacccggaccggctggagcgcgtccgcgggctgacgcttgccgacggcgccctcggccgctgcaccaccttcgaggcgctgtcggggctcgtgtggcgtctctggcgtctccggcgagcctccggggcggcggcggcgcgctgtgcgggcggcggcacggacgcgggcggcagcgcggacgcgggcggcggcgcggacgcgggcggcggcgcggacgtgggtgtgcgggcggcggcgcggacgtcgacgagggacgtgggcgcgctgtgcgggcgacggcggcggacgggcggcggcggcgcggtggtgggtggacggcaacgtcaaacatgtcatggcggtggcgtgctggtggaggcggtgaggcggcggttcacggccttcacctggtcctgtgcaggaataatggtgccggcgcgcgcacgaaactctgtccatgccttgcctggctcccatgtaggcagcccactgacactgatgagcctgcacgtttacggactgccgttgaaggcagacgccgactcggtccgtgcgggctgcagagcgatgcgagtgaacagcagcgccggtggtggtggtggagacgcggacgccgagcatcttccgagatggggcagagcgctgtcgaagcagcagcagaagctttcgccggagccgccggtgggaatgggaactcagtttttgctgcggggaaggtaa

SEQ ID NO: 6225 - DNA, 261 bp, Zea mays
  Peptide Sequence Number=SeqID_48004
atgggcgcggcggcggcgagctcgggtgagtgcggcggcgggcaagaggagtttggcggcgacgtgaaaaaactaagggagcagtttggccggattttcgccgccgatagggggtccaagatctatggcgccgaccccctggaactcgacacgtcagctgccacgtatgaaaatgatggcggcaaagaaggtggcgccactatgcgttgcctcggcgccaatgatgatggcgccgagcaaagggtccattttttgaaatga

SEQ ID NO: 6226 - DNA, 627 bp, Zea mays
  Peptide Sequence Number=SeqID_48005
atggggaagagaaagtcagctgctaagccacctcctaagaagcggatggacaagcttgacactgtcttttcctgcccattctgcaaccacgggagtagtgttgagtgccgaattgacatgaagaatctgattggcgaagcatcttgtagaatctgtcaggaaaacttcagcacaactgttaatgaatgtgtcaaaaaccgcatcacatcaaaattaaaactggatacaacactatacatagcactcactgagcctattgatatatatagtgaatggattgatgagtgtgagcgtgtcaacactgttgaaggcgacgatgatgcatggtgtatcagcgttttttctgtgagatgtttcagcgagggttgttcattcattggtcttctcggaaaagagaattatgctgcagtcaccagatgccgctgtgtgccgacaatacagttcggtttcatggacgggttgtcaagtgttttaccaggaacagttgtcggtgcagcagttcgaatgttccaagtatcagcctggagaacagggcgtttcggaaatttcggaactgctgagtattggagacgagctatagcgcttccttcaagaaatatattgaagaagcgctttacatttaaataa

SEQ ID NO: 6227 - DNA, 246 bp, Zea mays
  Peptide Sequence Number=SeqID_48006
atggcgccgcagctcgccgcagctggcccgaccttatacgcgcctcgctttggcaccgccctcccctgccgcgcccggacaaggaagccggtctctcggcgccgggccgcgctccccaaggatgaggattattacttgatcgatgcggatgagtccattggggatggcttctcgttcagtggaggcgagtcagggacttgggcaagctctgggctttatcagtcgggttcgattcggattgattga

SEQ ID NO: 6228 - DNA, 321 bp, Zea mays
  Peptide Sequence Number=SeqID_48007
atggggcatgatatccctccaaattctagaatgctaatgaattgtgaagcagctgaactattgcaagaaattcacgagcacatggccatactatcagaggaccccaagatcaaaattcctgaacctcttaaaaaatgtggggtcagtgatggagagatatgcatgatagcaaacattgggcctgagaccgttgaagaggtttacgcactagtgccatctctcaaggacaaaaatttgttggtccaggctaataggtcagctatcgaaggttcagtcaccgaggttcttaccgccctcgcaaacataaaagctgctaagtga

SEQ ID NO: 6229 - DNA, 495 bp, Zea mays
  Peptide Sequence Number=SeqID_48008
atgggaaccctgggtcaggacctaaccctacggcaagtactgaaccaaggagggttccgtaaacactcccccagctgggaggaacccttcaaggtgacggaaatatgccgacccaagggcgaccaccttgctacagctgaaggagtacctcttcctaacctctggagcatctctccaaagttcgcctccaaccttcacaaggttggtgatcatcctttcctccgaatgctggaggaagaggcaggtcaccagctcatgtggaagacggagccgcagcccaactcgctctccaccaccgcaaggctgatgaacatccttgaagcaaagcacctgtggaagggcgccacccccacggggccgtgcacctccagcaaaaggaaggcaagatcggcaacaccaacccgctgggaggttgaagatagaaagcacgaactctcacgcggcaagttcgttgaggaggatggcgccggcgcaaatccttccgccaaacgctga

SEQ ID NO: 6230 - DNA, 771 bp, Zea mays
  Peptide Sequence Number=SeqID_48009
atgatcgggtggggcgacgtgtacaaggtggtggcggcgacggtgccgctctacttcgcgctgttcctgggctacggctcggtgcggtggtggcgcatcttcacgcgggagcagtgcgacgcggtgaaccggctggtggccttcttcgcgctgcccttcttcacgttcgagttcacgctgcacacggacccgttccaggtgaactaccgcgccgtggccgccgacgtgatctccaaggccgtgatcgtgggcgtgatcggctgctgggccggcagcagggtgggctccgcgggcaagggcaagggcgccgtcggctggtccatcaccgggttctcgctgtccacgctaaccaactccctggtggtcggcgtgcccatggccagggccatgtacggcgagtgggcgcagcagctcgtcgtccagctctccgtcttccaggccatcgtctggctgacgctcctcctcttcgtgctcgagaccagaaaggccgccatcggcatgtacgtcgtccccggcggcgctgctgacagcgacggcggcgtgccggactcgccggtcaaggacaaggacgtcgaggccgctgccggcgatcgtcgtcccgccgccggccctgccgctgctgccaccgtcgtggtcgtcgtccccgtgaagccctcgctctgggcgctcatcaaggtggtggcgcacaagctgtcgcgcaaccccaacacgtacgccagcttcgtcggcatcacctgggcctgcgtcgccaacagatatggtgtattttag

SEQ ID NO: 6231 - DNA, 306 bp, Zea mays
  Peptide Sequence Number=SeqID_48010
atgggcggcgccgcccgaagccacggcagccctcgggccggagttttccccatttcgcgcagcaaggcgctaaaccctaattcgacgcactacatgacgctagagaaggcgaaaagaatggatgcgaagtcatcgagacgacgtcgcacgcaggctgtactcgacggggcgcaactccggcggaactcgcaactccggcgaagaattcccacggctacagcatgccccacctcgattaccccctcacagcgtcaatgcaaccagagaaagcctcggatggccaagctggagcccgaattgcactaa

SEQ ID NO: 6232 - DNA, 210 bp, Zea mays
  Peptide Sequence Number=SeqID_48011
atgacgaaggtgatgcttgccgaaggtgttcagagctcaagaaatggaaatcgcgatttgtttctgtgcttcgaggaatcgaagatcaagagttggcgatcaagtgatctggttgcctttggtgcaatctatgctcaggtaaacaagaaggagaaagacgtcgaggcggatctccaggagttccaggacttcgacgagtttaaggattag

SEQ ID NO: 6233 - DNA, 249 bp, Zea mays
  Peptide Sequence Number=SeqID_48012
atggcggcgcacattgacttcggcgagcgattgcgtggacagcagggtaggaaacgggaaattaagggcatgggtggggttcctgttggggcgaaggcgaagacgccacccttcgctcgatgccttcgccgtaatcgtcggatcaacagagacaagacaacaggcaggctcaccctttgtcccacacgccctgcgtggccgctgcgcgttacgggcctaatttgtaaaggcatccctgagagcacctag

SEQ ID NO: 6234 - DNA, 441 bp, Zea mays
  Peptide Sequence Number=SeqID_48013
atggccatggaggaaatggagctgctgcgtcgcccatggacatggagctcgccgaggtcggcccagggagctcctgcgcgcagaggaacatcagggggggaaagaagctcagccgtggctgctggaggtgctcggctagggagggagcatggagatggagccggcttctatggggaagaaggggaggacgccatgactgttggtcgagctccctgctggccgccgtggggaagaagacagggagtcggcgggagcagacctgcgctagggagaaggaggaagagagtggcggctgaaaaatttagaggggtgggagtgcaaaataaccaagtgcaaggggagagggtccgtatttataggcatgaggtaggattagggtttcttagtgggcctattgggctaggttgggctggcccaaaacacttaatcgggctgtgctaa

SEQ ID NO: 6235 - DNA, 120 bp, Zea mays
  Peptide Sequence Number=SeqID_48014
atgcaggccattgcttgtcagtttttttccttcccaggttgcgggggttgctatctcaggtgcttcttctctatctcaggtgctatctcaggtggaagagactttgttcaaagaaactaa

SEQ ID NO: 6236 - DNA, 189 bp, Zea mays
  Peptide Sequence Number=SeqID_48015
atggggtccaggcacagtgcttgctctgccgaggctgggtgccgagatgatgatgatgatgatgataatgctggtttctattgtgattatgattatggttttctggtattctttccgtttggaaagggtaaagaaggtgtcgaggcggatctccaggggttccaggacttcgacgagtccgaggattag

SEQ ID NO: 6237 - DNA, 657 bp, Zea mays
  Peptide Sequence Number=SeqID_48016
atgaggctaaccatagtgacccaaaaggtaatcaaggacaaggaaagaaagcacggcctcacgcatgcaagaaaggaaaaacaaacaacgtgggattgtggcgtacaggtggggccaacgcatggtttcgcttttgacttcttctctgttgaacggcacgcgcggcaagcggttctgccggccaggggaagggggcgcggtaggggtttcggcctagggagcggagcgtggagggtgctggagatggccacgcctgctcggctgctcctgcaggggccgcgcagggcccttgccgctgggggctggccggggaggctcggctggggccgaccgccgcgcgcgccgcgctggctgtgcaggcaggctgccgcgccgactggccgccggggcctcgatcatgggaacgcagagaggggcatggaagagagggagaagaaggggattcctcacctgcgcacgacgaacgacggaccaagcgcgcaaggaagacggcgattttggacggatgctccggggagtccggacacaggctcctactgcacggacgtcgatggcgagacgaggagcatcctcgcagccgagcagcacgcgggcaagcgcctctccgcgcgtgggctggctgctgctggcatgcggctgggcagagggaggcgctag

SEQ ID NO: 6238 - DNA, 405 bp, Zea mays
  Peptide Sequence Number=SeqID_48017
atggcaatgggtacccaaaactcgaacccgatgggtttttaccccattagggtctttgtggtggcaagatttgggaaaggttgcacattatccacagtagcagtcgtgcttctgaaattaccgctcgtgcctaggccttcccaatatcatttttatgttgatttcctgcgcacagttggtcgattcgcgcctttgcagagcaaaccaacagaaaatcctgcctcctccctccatctgcacgccaagaaagggagctgccactacagatctgttgcccctgctcttcatcctgttccagcaggacgtcctcccgcgcgtcagcgtcacagggcccgccgtcgccgagtagcccacaaatttgccggcctcgaggaggcaatccacgccgcctacgtcgttgcctag

SEQ ID NO: 6239 - DNA, 942 bp, Zea mays
  Peptide Sequence Number=SeqID_48018
atggcggaaaacacccacggtagtggtcgccacgtgcttggggacttgacaaatgttatttgcaagcgagcagccacatcagatctggagaagagtacaggtgggataaagatcagacggattgaaaagactgggactaggaaagagtacgatgcaaatgcaaaagctagcagtattgggaaaggaattgtatttggccatttgtttgatgatgttgccagagagaaatttcaaagccattctatctttcagaatagtagggttcaacacatagctgccgaagcagctggactcttatccaaggaagccaatgactcgaagaaccactatgcatcaatcggtccattagatctcagtgataaggagcaggattcttcacttgaatctgaagacgactatgatgatgaagataatgatgagacgaatggtgaattgctgcaccattttttcagctcagagctagctaataaaatgtcaacaaatgatggtgagtgcttgactcaggaggagatagttgggtcatctggaaatcagaaacctctgtcttcattggatgctacgacaggtggtgacttgccaatttctagtgctcagcatgcttctgtgagaactggtggtttggaagaagctgttgccccaaaatcttgtgcttgttctttctgtctcaaggtattgaagaaaagcatcaagtttgccaggtcattggaggaaaaatgtagaggaaatgaatatgcggccaatgtagctggatatgaatcaaagcgagctgtgggagtggagtttgaactatctcaacaacagagatcactctttctttatacagaaaatgcccttgtccgtgagtcaacgcagcttcattctgcttttgtgaaactgaaagaattgagagagaactgcaagacagatcttgagacgctcagcaattcttcaatgagaaaatga

SEQ ID NO: 6240 - DNA, 255 bp, Zea mays
  Peptide Sequence Number=SeqID_48019
atggctatgtaccgtcggcggcggcgcgcggtctgcttgacgtgggccagatctccgatgaacaagagcaaggagggcaggcgagcgggcgaacggtttcaaaatgctagggtttcacgacgcgcagaaagtacgcttgtcaagtcgttgcctcttagctttgatcggtcggcctatgctttagagatcagcacttcatttttggaggttgaagattcattgggtgcaccggtgggtgtagcccccgagctttga

SEQ ID NO: 6241 - DNA, 435 bp, Zea mays
  Peptide Sequence Number=SeqID_48020
atgggcaagagcaagaaaggcagaagttcatcgcaccactccagcgacaagcggaagcgcgagccaagtcccccctccaaggacttcggtgactctgagtactcggaggaggagttctcctccgaatccgaggggttgccagcctacgcctctcccccggtgttgtccgatgattcagacgattcccaggggatcgccgcggaggtgtggacgtacatccgggccgtcgagcgctccgggctcaagggctcggaggagtcagacatctcctcggacgaggaggactcctccgactcgtccgaggaggggagcggtagcgacggcgatgacgagggcgacggcggcgacaaaggcgacgacggcaagggcgacggcggcagcggcaaggacgacggcgacagcggcagggccagtggcaaagcgtcgctggcttaa

SEQ ID NO: 6242 - DNA, 417 bp, Zea mays
  Peptide Sequence Number=SeqID_48021
atgcggctgcggcgggacgcgatcgagcgcgccatcagggcgccgctgggcattgtgcgccgcgaccacgcgctcgtgcacctcctgtcggccgccgcggcgcgcctccgcctcgtgcacccgtcgtgggcatgggcgctcgcatcgccgagtacgtcttctccaactccgctgtggcgcgcagcttcatggtgtacctcggcaaggatccccgtgccgggcctgccccaggggttcaaccaggtggacctcgtcaccgtcggtgtcatcctcctctccgtctgcatctgctataggtccgttgctactgttgactgctacttattgtattgtgggatttcggtgccaaagatcatatcggccgtggagggggccgtcggcctcggcgaccatggccgggcggtgaaggactcctag

SEQ ID NO: 6243 - DNA, 2040 bp, Zea mays
  Peptide Sequence Number=SeqID_48022
atggcggcggcgaagctgacaggcaacgccgtggcggcggcgatggcgggggacaccaacctcaagccggtggtgcaggtcgtcgacctccggagcatcgcggtcaccggggccccgggctccgggcccaggttccgcgccatcatctccgatggcgtcgccacggggcacgcgctcttcgcctcgcagctctgcgacctcgcgcgctccggcgtcgtccgccgcggctcggtcgtgcagctcctcgactacatcgttaacaacgtcggccccacccggaacagaaacctcttgctcctttcctgcgctggcccgttcatcaccagctgcatcatcggcgttgctgatactgtcatggcaattgttattctgaacatggaggttcttgttgcagagtgtgagattattggaaatccagcactacctcctgaatctggagattctagttcaaattccctgagagcagaccagtttaatggagcacctccaaatggttcaatggcagggagtactttgaacaaagtgataaagccctctgacaatgctccagtaatccagagatcgatgacaggtaactctttgaacatggttcctaggccaagtgacaatgcacaggtcttccaaccaaccgtacagccatcctatcgtcctgcacccaaatacagaagccatggcacaatcatgaaaaacgatgctcctgctagaataatccccatacctgctctaaatccttatcagggccgctgggctatcaaggctcgagtaactgccaaaggagagatccgccggtaccataatgcaaaaggtgatggcaaagtgttctcttttgacctgcttgatactgatggtggtgagattcgggctacatgtttcaatgctcttgttgatcgcttctatgaagttgtggaagttggtaaggtctatgtggtatctagaggaaacttgaaacccgcaaagaaggactacaaccatctgaataatgagtgggagattttcttggaacctcagtcaactattgaactttgtcttgatgagaacagctctattcctgcccagcggtttagcttctcatcgattgataaaattgaaaattcagagaacaatgcaattgttgatgtcattggtgttgttacatctgtcaaccctagtactacaatacagaggaaaaatggtatggaagctcagaaaaggaccatcaccctgaatgatatgtctggtcgaagtgttgagcttaccatgtggggtgacttctgcaacagagaaggctcgcagctgcaagaaatggttgaatgtggggcgtttcctgtgctcgctgtcaaagctggaaaagtcaatgattacagtgggaagtctgttggcacaatttcttcatctcaactccacataaaccctgatcttgctgaggctcattctctcaggcagtggtttgattgtggaggaagagatgcttctactcagtctatatccagggattttactccttcagcatcatggaatgaggtccgaaagacagtagcacagataaaggatgatggtcttggaatgggggacaaacccgattgggtcacggtgaaggctgctatttcgttcatcaaaaccgattccttctgctacacagcttgccccaatgtgattggagacaggcaatgtggtaaaaaggtgacaaagtctgattcaggcaactggctatgtgacaagtgcaatcaagagtttccagagtgtgattacaggtatctcctacagttgaacattcaagaccacacgggaacaacttctgtgacagcatttcaagatcgtggacaggagatacttggttgctcagctcgagagctcaacatttttaaagagaacaaagatcctcgctacacagatgtcttgatcaattgcttgtatcagaactatttgttcaggctaaaagtgaaagaagaacaatatggcgatgtacgacaagtgaaaaacactgtggccaaggtggagagggtggatcctttggctgagagtaaatttctgcttgattccatttcaaggtttataccatga

SEQ ID NO: 6244 - DNA, 185 bp, Zea mays
  Peptide Sequence Number=SeqID_48023
atggcgctgcgctgcgctctcatggcattgcacgacgtctcctctgtgcgagacgtcggtgctctgctcttgcacgcgggcaaacaggcatttcaccacggcacgactggtcctttgaacgccatgtgggtgcctgaaccaccaccaccttcttcaggtggcactgtagcagaggtggtgtccga

SEQ ID NO: 6245 - DNA, 2949 bp, Zea mays
  Peptide Sequence Number=SeqID_48024
atggtggacaagaatgatgggtcagagggtattaaattcaacacatcaaacctcattcaaacaaccgaagaggttgcaagagcgtttatcgctgcggcctcggctgccactgcacagtctgcacggacatctgtagtgtattcatccaaagatgagagtggcagcccaatgcagaagcttcagcagcatttttcgaaaatcatgaaagggttttcgtccgcaccagacctgtcaggaacttacaatccggaagtccttacaacgcaaaagcggcagtggtcgaggtaccagatgaagtcattggttacaacctttagaagattggaattcatagcaggcatggggattagatcaggatcagagatacatcgggaacaagcttctggtagaaggaaaaaaggtgataggtgcatcagagaaccatcacatctgttcgagagcatagtgattgttgggcttccacctcacgcagatatccaggagctggaaaacattgcattagggagaaatgatgaagatggaaaaagatcaaaaaatttatttggcaatagtcaccaccaagttcacgcaataacaaatttggaaccacaggttctttttgcataccctccagagaagcctcttccactcaagtacaaggataccctctctttctgccttcccggaggtgtacagctggctgttcgatggggagagcttgtccccaccccagtgacctggaaggtgtcagtggcatggtgggccacatcctcgctgcggaagggtggatccattgtgctggcgtccggttccatccgtttcttcggccgcagtgtcagcgggtgtattgacatgggggcgcagtctagtgtgctgaggcggttttatggctgcggttgtgggggtcactgtggtggctggagcgatgtgaagagtgtgccggtgaaggtgtctgcttgtggtggcatgacggtggcagagagagccgtgcgtgaggctgtcgtggcgttgaggtcggcagtgtgtggtggtgtgttgcagtggtgtagtggcgacagcgtgctgggttgtttgtttggtggcggtggattccatagttggagttgtttctgtggcagcaaggcagtgatggtgtccaggttggcaatgcttcttccatttctcctgtatatcctgcatgcgtttagcagtttggatttcatgtttctcatggcctacaggctacaagttcatgctgtcgaacgtactccttcgttcagtgagctgaatgaaattctcctgggacaggaacagcttaaagaaagcaaccaatcatttgtgttccgcctacagagtattcttatggaagaacgtcttgaatggctcacagatggtgttagcatgctaacttccttatcgcttgaggaatcctgtgagaacgatatctgtgaaggaactgcagttacagcacagaaacattatttagatagcaacacaactgatgtggataaatcatctgaatctagcaatggagtttcgtcaacggagctgtctgatactgacagcagttctgggtgtagagaaaaccagcttgactttgtttctaaagaacaacagcaaaatagttcttgtgaagaacagagtaattttaaaagagaaatagtcacttgttctgatgcttccgaagtgtctgatcattttgttccagaagatacatcatctgatcagtctggagttaagcaccatgaacttcattctgcaccaagtatcccggatgaatctggtgcaaggaactgtgatgattccccgaaggaaaatgtggatgatgaggagcttgatctcttcattatagatactattttaccacttatgcgatctcgcctttgtgaagattgtgaatcatctccaagttcacagggttctccttctgaaggcagaaattttgacacccaagaatcggattcagaggagccatcttccattggtgatggagacttagttaaacacaacaacatactgcagtgggctaaggcaaaaaaatatggttctttgcaagttgtctgtcaatactaccagttacagtgtcctgctaggggttcaacacttgcttttcatcccttggagcatttgcattctttgagttttcaccggcctggtgaaacagttcttcacattgctggttctactattgagcttaggtcacgtgatacaagcttagaggttgctgagatgcgcaatgcactctttgctgaggaggaatcgactgctttgtccacatgggcagtggcatccatttgtggatgcctcaggttggaacatactcactcactgaaccttctcaaatactccttttgcactgagaacacaattaagaaccctctttatcacaagaaggcaaacattgttttgcctaatgacatgatggattttctggatgccccagttccatacatagtgggcgtacaaaacaagacatctgatgtgctcaaccggctaacaaatgccgtagtcattgatgccaacaggaatcaggttttagttactgtaaatggtgaagaaataggtctaactctggactttgtactgattaagtcctcttcagtcccacaactaccacagcacagagagttgctttctgccttgcgcccgtatcattcaatacttgttggcgaaagttatcttgcaagaaaacgccctgtttatgaatgcacagatgcccaggtggaaggggctaaaggtttcttggcagtgcttagagactaccttgacacactatgctcgaacttgagatctcatacaattaccaatgtgcaatctaacaatgacaaggtttccttacttttaaaagagagctttattggttctttcccaagccgggataggccttttatgaagcctttagatgttgagctaaactgtacatatcggcagctcagtgtttgtgcaaagagctcgaaggagaagccatataccgtcagaaaaaagtggtag

SEQ ID NO: 6246 - DNA, 672 bp, Zea mays
  Peptide Sequence Number=SeqID_48025
atgggagcctggcaggagcagacgggacgtgccgtgcagcatgcgggtggggcgtacgacgtgtgtgaggtgagcgaagcaaggagggcacgcgcggcagcgcgaccggtcagtgccttggacgtgattctccacatgtaccggtcagtgtctgggacagttctccggcggcacaggctgccagcgctgcgcaggccattcacagccgtgacagcatgcagggtgcgcgctgcagaatctgccgtgtccgcggctgctgctgtgcctgcatgcagtgctggctgcagccgcgcgacgagagccgaccgggcccccgctgctctcacagtcgcgtcgcacccgcccaccgcacggtccacgagaccagcggcgggtacggacggagacgcggcgacggcgtgcagtgaaaaggggagagcggcaacgctggctggtgtcagacgctcgccgcgggtggacgtggaccgtggacgggcgctgccactgtgccagtgccaccaggtgcagcaggaagaggagaggcgcggcgggcctactgtgccagttcgcattatttctatattgactgcgactctgcaggctgcagatatttacacctgcatgtttaacactgattctcttaggctatccacaaccgttacctctaaggctgtgtccaacaacgaccggtaa

SEQ ID NO: 6247 - DNA, 354 bp, Zea mays
  Peptide Sequence Number=SeqID_48026
atgccacaggcatatctttgcgaggaagtaggcagttggcgggaagaggaggagctatttgcagaagttgatgtgaagctagtcttcaaggaaatttcatctaaatatttacgaaagcgcattgtagagcaactggaagccaatgcgacaggagaaaattctgctatgccgaaacatgatattaaagaaactaataagggaggaaagcgaagtgatggacggagtccttgggaactttggcccatcaattctcaacgtggcttacctccaagagctcatggtagtgctctgttcacgaggggagaaacacagggtttacatgagtatctagccaagctctgttctatcctctaa

SEQ ID NO: 6248 - DNA, 357 bp, Zea mays
  Peptide Sequence Number=SeqID_48027
atggacggctcggacctgggcctctacgacacggcctcccacggcgacgcgccagcgtccgcgcctgaggacggccgtcgtgcctgcgggagaggagctggcttcgtccacgcctgccccgggagtcgtgtcgtgacctggacggctccgaccgggtcttccacgaacggcgcggcgaccggatctgcgacggagcggcacgggccaaggacggcgggggcttgcggccggcgcttcgccgttagccagatctgctacgtaccagcagggcagacacgcgcaggtcctcaggctctcctctcggtctcttctgcagctattcgagctactttctcttctatttgcatgcgtggatag

SEQ ID NO: 6249 - DNA, 837 bp, Zea mays
  Peptide Sequence Number=SeqID_48028
atgactcgtcttctactcctgtctctccttctatccgttgctgctggcgcctacgacggcgctggccagccgccgatcagccggaggagctttcctgaggggttcatcttcggggcatcctctgcttcctatcagtatgagggcggggtgacggaggggcgcagaggaccaagcatctgggacacctatactcatcagcacccaggcatgttttgtttttttgagaaaaaaaatatatttctacctccttcccacgctaataaaatcattgacagaagcaatggagacttggccatagattcctaccatctctacaaagaagatgtgcgcctgctgaaggatatgggaatggatgcgtacaggttctccatctcatggacaagaattcttccgaatggaagtctcagtggtggaatcaacaaagagggaatcagatactacaacaacttgatcaatgaactcttgttgaaaggggtgcaaccattcgtgaccctttttcactgggactcgcctcaggcattagaagacaaatacggaggatttcttagtcccagcatcataaatgactacaaggactacgttgaagtctgcttcaaagagtttggtgatcgagtgaaacactggataacgttcaacgaacctgcagcgttctgctcaactgggtatgcatctggggtgcttgcaccaggccggtgctcgccgtgggagcaggccaagtgcagcgctggggattcaggaagggagccttacaccgtatgccatcatcagctgctcgcccatgcagaagcagttcacctgtacaaagagaagtaccaggtcagagatggactaggatga

SEQ ID NO: 6250 - DNA, 909 bp, Zea mays
  Peptide Sequence Number=SeqID_48029
atgcacgcgtgcttccatggcggcggtggcggcaacagcaggatcaccaagtccgtcggcttcatcgtcaagagcatgaaggccctgtccctcctaaaagtgaagacggcgggcgacggccatccgcacgcgccgcgtcgtcggcggcggcggcatcggaggcgctcccccgaggcagacgagctgcaggacaaggacgtcgcggcggcatcgtcgtccgcgtcctcgtccgccaagatcgcgccggcgcagccgcacgaagccgccgacggtgaccttcggagagaccgcctcccccaggacgaggagctgcggcggcaaggaggagctaaacacgggcactgcgacaagtgctgctcgccgttggaagacgacgacgaggaggccgccgcgggtacggcggacgcggcaggcgacggggagtgggcggcggagccggagcccggcgtgctgatgacgctgtggccgcgcggcgacggctccaactacctccgcaggatccggttcagcgaggagtacttcggcgacgcgtgggcggcgcagacctggtgggcggacaactgcgaccgcatcgtcgagctctacagcgtcgtcgtccagcccgaacacccctcgcaggacggcgacgacgatgacgacgacgacgatccggctgcgcccgtaactccgtgccagtccgaggacgacgagcaccaacggcaggatggggctggggacctggactactcggcgtcgtgctcggcgtcggcgtcgggaggctccacctccaacttctccgggccgtccagcggcagcggcagcgggtctgccaacaaggtggactctccgattctcggcctcgtcaccgaggccgacagcatcacaagaacagcccggccgcagcacagccatacggcaacgggacaataa

SEQ ID NO: 6251 - DNA, 537 bp, Zea mays
  Peptide Sequence Number=SeqID_48030
atggcgaaggccgacgcccgtacccgaggccgggccgcctctcacgtccccactcccacatgggcgcagcgcactgaggccctgacccacgtcctgacccacccgtcccacgcgccgtcgctccagtcgcagctcttcctcgcctcccgcgtcccgtgcccgccgcggggcctcggctccaccacgtcgtacccgccgttcctctgccccggcgcctcgctcctccgctgggctctcgcctccgtgttcctcccgcgcgcggcgagcctctgcctcccgccctcgtcctggcggtcccggtgccccttccagctcccgccgccggtcgtgccctccgcggccatcgagccggcgcccgagcggtgggccgactccgagctcagggcctacgcgcgccggcggcgggagcggaggggcccgctgacggtgcggccgccggtggccgtggtgggagtggtgctcaccaccgtgcccaacgtcgtgatcgtcgtggccttcgtgaaggagtacttctggggcaggaccagccgtatctga

SEQ ID NO: 6252 - DNA, 1169 bp, Zea mays
  Peptide Sequence Number=SeqID_48031
atgagggagcagagcctcctggaggcgacgtgcggcgacctcttcgaccacatcgacgacctgctcgacttccccaaggaggactcggccgccgacgtgctcctgctggacgcgccggcgccggggagcccgctgtcgtcggcgcgcatcatcgacgtcggccgcgccggcagtgcgcccgctccccccgcgctggcgccgtcgcttcccgcgcagcaagacaccaccgccttcttcgccgccgcggggcccgacgtgttcgaccccagggacgtcggcgctcacctcggctcgtgcgacgacattgacatggacatggacatggcgcagctggagtggctgtcggggctcttcgacgacgcatccatcccgcacgagccggcgttccccggcgcggcgcccatcatcaagagctccgcgctggcggccggcgcgctgctgccgccggacaagatggaggacgcgctgctgttccgcagctccagccccatctcggtgctggagcacggcagcttcaacaacgccaacggcggtggcggcggctgctccgcgtcgtcggagtcgtcctcggcgtcctcgtcctcggagtctttctccggcagcgggagcgggagcggcgaaggccacgcgtggtcggcgcccgtgtcgccgccgcccgtgctcgtcataccggcgcgcgcgcggagcaagcgctcccgcccgtccgcgttcacgcgcgccggggcggaggcgcccaccatcctcgtgccgacgcccatgtactcgtccgggccgtcccactcggaccccgagagcatcgctgagtccagcccgcacccggcgccgcccatgaagaaaaagaagaaggccaagaagccgccggcgccgccccgcgcccgcctcttccgacgacaacgacggcgacgccgactacgaggaaggcggcgagcgcgcggagccgcagggcggcgccgtcaggaggtgcacgcactgccagatcgagaagacgccgcagtggcgcgcggggccgctggggcccaagacgctgtgcaacgcctgtggcgtgcgctacaagtccggccgcctgttcccggagtaccgtcccgcggcgagccccaccttcgtgccgtccatccactccaactcgcacaagaaggtggtggagatgcgccagaaggctgtccggagcg

SEQ ID NO: 6253 - DNA, 126 bp, Zea mays
  Peptide Sequence Number=SeqID_48032
atggagagtgcttttaagcaaatgaaaggggaatttgttggtttgctaattagaagggaggttatgcagggcagctgcaagatgactaacaagcaacatgaactggactatgaaaaagtaccttag

SEQ ID NO: 6254 - DNA, 2808 bp, Zea mays
  Peptide Sequence Number=SeqID_48033
atgaagaaagtgttcgatcagacggtccgggacctaaaaagagaggtgaacaagaaggtcctcaaggtgcctggaatagaacaaaagatccttgatgccacaagcaacgagccgtggggtccacatggatctctactggcagacattgctcaagcgacgaataactatcatgagtaccagatgatcatgcacattgtgtggaagagggtcagtgacactggtaaaaattggcgtcatgtttacaagggattgattgttttggattacctggtggcgcatggcactgaacgagttattgatgacatcagagaacatgcttatcagatatcagcactagctgatttccagtacattgattcttctgggagagatcaaggtagcaatgtacgaaggaaatctcagagccttgtcagtttagttaatgataaagaaaggatacaggaagttagagagaaagcactctctaccaaggacaagtacaggagtgcgtttgcccccagtggcaggagcccaggtggatatggtggtggttatgataatgaccgctatgaaggcagctatggcagtagatatgacaacagaaatggaaatgggaggggagactatggatacagggacgatgacagatatggtggacctggaggtacacccaatcgggaaggagatcgttattccagagattctaatgaacgctatggcagagattatagagaagatgaatacaaaggaagtcatagcaaccatgaatatgctgaaggagcaggtcgcaggagctatggtcaggaaagagattcatatggggatggtgaagcttattcatcccgtggtcgtggcagcaatgctgatgatcctactcaggatgataggcctatagagcgaaagctttctaaccagcaaatttcttcaccaccaccgaactacgaagatgtcacaagagatggccaggacaatcttcacgatgacagaaatggaggaagtgttcctgctgctgtatcaagggtgccctctccttcagttcctgcaacaactgttcctgcagtacaggtgaatggggttcatgacagcactgttgaagatgtacctgcaccaccaactgctcatgccgagcctaatggatttgatgagtttgatccacgtggatctgtaccagattcttcccctcctgtaaaccctgcatcagtagcgaatagcttggagatggatttgtttggatcagatcctattagttcgttggctttggtgtctgtgcctcaaccaacgactacatcaaatgttgaagcaccggcaaattcaggttttgaaacaaatagttttgtgggcatgcctcctgcttcaactggatttggcgagattgatgcttcaaatccttttggggatcctacacctttcaaggcagttcttgatgaaagtccagcactacctcagacacatgctgcaccagctggttctttccaacccactggacctggtacggatgtgaaccctttccagcctgcttcagccgcaagctttggttttggagacactcttggtgatctcacttttgcaccaaatgctgcacctgagctgcaagatatgtttgcaaacacagcctccttgccttcagaggtagcaccagcaaacccatctgtggttctccaacagccagttcctactaatttctcctctcaggtatctcagccagttgctggcacattgcatgctgctcctacagcatttgctccttctcaggctcctcccacatcatttgctcattctcaggcacctcaggctgcccctgcattttcttattcacaagggcctcatcctggtgctgccatccagtctcaatttccccagactgtcgccccatcatttcctccttcgcaggtgcctcaatctgtaacacccaatctgccaccaggccaatcgaacttttttttgcaatcagcatcagggtctggtattgacagcctgtctggggttcctacccagaatggagcaccatcctacattcccccacagaattctcagttcactgctccggcaaatcaacaaccattgcagccaagcttcatcccacaaactagcacaccagcactccagccggccttgatctctaggggggcatcccagccccttggtgtgccaaattcagtgcctactagtggcagcttcccgttgcagtcaagttcatcagctcccccagaaacaatcgtttctgctttgcaagtcaatcaaactgagccagtgaagaagtttgagcccagatctaaactgtggtctgatactttgagccgaggtctagtcaatctggacatttctggaccaaaagcgaatcctcatgctgatattggagttgactttgattcaatcaatcgcaaggagaaaaggcaggaaaagaaaatcaaccaagcacctgtggtgtctacagtcaccatgggcaaggccatgggagctggttccggcattggtcgggctggtgtaggtgcaatggcacctcctcctaaccaaatgggtgccgggaggggtatgggtcctggtgccggtgccggttatggtggtggaatgggaatgaaccggccaatgggcatggggatgggaatgaatcaacaacagatgaggatggggatgaaccaacaaccgatgggaatggggatggggatgaaccaacaaccgatgggaggaatgaacatggggatggggatgaaccaggggatgccgatgcgtcctccaatggggatgggtcctggtggaatgcccggtgctggctacaatcagatgggcgcggcgtacggtggccagcagccatacggtggatacaggtga

SEQ ID NO: 6255 - DNA, 498 bp, Zea mays
  Peptide Sequence Number=SeqID_48034
atggggctcggtgtatgcggctcgctctaccaagcttgggtggcaatgagactggtggttcttggttttgactctggtaatgctagtccaccacagccaaacaggatacttgctgagtatgttgatgtgtactcacccttgctctacacaccaaaccgccccccccatccccaggttgtcagcattgcaaccactgctcaggagaagataaagccgtggaaggagaccatcaggagttccaagattatgatgagttctaggcgtggtgatagtgacaggggcgacgacaagaagggaaagaggagagaaaagaagaggtaccacaagaagaggggcggtgatgcccatgtgtgccgcgaatgggactccgacgagagctccaccgactcctcctccgacgaggacgccgccaacatcgccgtcaccaaaggactcatcttcctgaaagttccctttgacccgggaacaggatctggatgtcgcctagagggggggtga

SEQ ID NO: 6256 - DNA, 987 bp, Zea mays
  Peptide Sequence Number=SeqID_48035
atggggattagatcaggatcagagatacatcgggaacaagcttctggtagaaggaaaaaaggtgataggtgcatcagagaaccatcacatctgttcgagagcatagtgattgttgggcttccacctcacgcagatatccaggagctggaaaacattgcattagggagaaatgatgaagatggaaaaagatcaaaaaatttatttggcaatagtcaccaccaagttcacgcaataacaaatttggaaccacaggttctttttgcataccctccagagaagcctcttccactcaagtacaaggataccctctctttctgccttcccggaggtgtacagctggctgttcgatggggagagcttgtccccaccccagtgacctggaaggtgtcagtggcatggtgggccacatcctcgctgcggaagggtggatccattgtgctggcgtccggttccatccgtttcttcggccgcagtgtcagcgggtgtattgacatgggggcgcagtctagtgtgctgaggcggttttatggctgcggttgtgggggtcactgtggtggctggagcgatgtgaagagtgtgccggtgaaggtgtctgcttgtggtggcatgacggtggcagagagagccgtgcgtgaggctgtcgtggcgttgaggtcggcagtgtgtggtggtgtgttgcagtggtgtagtggcgacagcgtgctgggttgtttgtttggtggcggtggattccatagttggagttgtttctgtggcagcaaggcagtgatggtgtccaggttggcaatgcttcttccatttctcctgtatatcctgcatgcgtttagcagtttggatttcatgtttctcatggcctacaggctacaagttcatgctgtcgaacgtactccttcgttcagtgagctgaatgaaattctcctgggacaggaacagcttaaagaaagcaaccaatcatttgtgttccgcctacaggtggctcatgattga

SEQ ID NO: 6257 - DNA, 1062 bp, Zea mays
  Peptide Sequence Number=SeqID_48036
atggcggaatcggcgatctaccggctgccggaggagtgcgtggcatacgccatctcgctgacgacgcccggcgacgcgtgccactcgtccgcggtgtcgccggccttcagggccgccgcggactccgacgccgtctgggcgcggttcctgccgccggaccacgccgacatcctggcgcgcgccgacgacccgggcgccgtcaccgccggctgcgcgtccaagaaggagctcttctcgcgcctctgcgacagccccgtcctcctcgacggcgccaccatgctggcagctgctactgctgctaactgcgtgcgtgtcgtatgcatgcggaagcagagctttggggctggagaggcggagcggcgccaagtgcttcatgatgtcggcgagggcgctcagcaggaaaaacgaccctttcgcgctggacgtgggccgctagcccgccaggattcaggtggcccattgttttttttttgtattactacacacacaaaccatgtgaccgatcgacccatcaggttcccggaggtggtgaagctgcaggacgtgtgctggctggagatcagcgggaagctcagtctgtcgctgctgtctccggggacgacctacgcggcgcacctcgtcttcgccatagccgacgactcgtacggcctcgagtgccacgtcgggatgccggcgcttaaggccacggtcaccgtcaccgtctccggcaagacaacgatggcggagcacgacatctgcctgcaccacatgcagggcgaggcggaggccgcggcgcaccggcggacgcagcagtacgtgcgcctccgcaggggctacggcggcggagggaaggcgacggtgctgacgacgacgagggaggccgaccccgacatcaggtgcccccggcggaggggcgacgggtgggccgaggtcgaggtgggcgagttcgccgtggcgggcgacgagggcgacgccgcggacgtggaggtgacggtgcaggaggatagcctgcgctggaagaggggcctcgtggtgctgggcgtcgacatccggcccaagcagcacacgccaacgccatgctag

SEQ ID NO: 6258 - DNA, 171 bp, Zea mays
  Peptide Sequence Number=SeqID_48037
atcttgccatatgtctatgatacggaggtagtaagtgaagatgcaaatttgagatgggcggaagagaaaaaacatgctgatgagtccgataaggtcttcgttaaacagccggaggcttttattcagtggcttaaggaagctgaagaggatgatgacgatggagaggaatag

SEQ ID NO: 6259 - DNA, 1698 bp, Zea mays
  Peptide Sequence Number=SeqID_48038
atggccacggcggcgaccgtgaaggcggaggtggagggtttgggctgcggcgatggttctcctcacaagcatgtcaagccaatgccgcagccgccgccgcagccgccacctcccgaggccggatgcaaaccagggtgtttacagcctctcacgaaaagtaggacacgtctcacctgtcccttgtggacaatgtctgctaagttcttggaagttctaagactacagctgtacaagggccttagttcattctctgatttacatcttaactggttgcaggacttgccctttgatgtgcttgatggacctagcccattgggtctgcgactaagaaaaagtcgatctctggtggaccttattcaatgtaagctttttcaggataaatctgcccatgaacagtttgatgggcacaacaatgtttctgatacacccatgaagaaagaggttagatctggggctccaacagctggtgaacggatgaaagcttcaaattttcctgcaaatgttttgagaattggtagttgggaggtaaaaaatttccagtttcctctttttctaagaacacgtgaatttccaaagcaactattttgcagctttcccaaacaaccccaccttaacactaataatatttctgagcagtacatttctcactacgaaggtgatttggtcgcaaagtgctactttgcaaagcataagcttgtttgggaggtcctacataatggtctcaagagtaagatagaaattcagtggtcggacattattgctttgaaggcaacctgcccagagaatgaacaagaaggggtcttagatctagtgttggctcgcccgccacttttcttcaaagaaactgatcctcagccaaggaaacatacactatggcaggctgcatcagattttactgatggacaggcaagctccaaaaggagacacatcttgcggtgcccctcgagtttgttaagcaggaattttgaaaagctcattcaatgtgatcaacgtctacgtgaattgagccagcagccagctgccatattgcaaaacccaggttttgaacctaagcgatctatttttcaaaatccaaatgaatcgaaggactgccttgatattggtggcttgaagtttgaacataaagctactttgcccaagttcactgctcccctctcaacacgtgtcttttcatcactgtccaataatgttggacgaccaataaacataggatttggtgctggacattttgggggcaatgttcctgaagaatcaaagaattgcaatcaatggaatcaattgatagtgcctggattggaggcactgcaaggtgatgaaaggagtgcaggtggtcctcctttgacaactaacgatgcaatttccaaaaaagcctgggaagatcttgttcaacaccttttcagcgacacaccgagtctgccagccttagatgataataatttgacgtcaagggttgactccctttactcgttgcttgagaaagacacagctccacccgccatgcgcgaccctgaatgcagtagtgatggtggggacatcggcgcaatccaagtggattctgatggctttaaggggaggctcgacccatcgcctccaggaatttccagaaacgattctctcgatgagctgcttctgaacctccccaaaatagcttctattccacagttcttgttcaacaggacagaagattctgatgaataa

SEQ ID NO: 6260 - DNA, 501 bp, Zea mays
  Peptide Sequence Number=SeqID_48039
atggagaagctcttggcggcttggcgtctctggacgagcctgtgtgtggatgtggagccgggcctcttcgcccgcgcctgcgtcgtcgcgcacgggctacagctcgacgtcgccgcgctcaacgccgtcggctgggcgggggagtccccatcctggcctgccatgttcgatcgtgcggccgtcgctgaggtcgagctcgccaccccccacccagctccttcctctcgcgattccagcctccctcaactaccgcatcctgcgattccagtagtccaaatgcatggtgccttccatccttccatcctggcggaggacgtgttcctggatgaatccatcctggcggaggacgaggcagcgctgctgatgctccagtgcgacgaggccctcacgtcccgccttgcgcagtggaagcgaaccacaatacccaccaatctcgccgccagatgctcctgcgctgtcgattcctctactgtcttgaaatcggtcgatttgggctactga

SEQ ID NO: 6261 - DNA, 177 bp, Zea mays
  Peptide Sequence Number=SeqID_48040
atggaggggatcatccacggcaagcaggcggtcggcggtgaggacgcgggcgcggccgggagcaggggcacgtgttacatggactataaaagggagagggtcaaacagccaaagaaagaagagaacagtcagcgagagttctccactccctcattcctacacaagcacatgttgtaa

SEQ ID NO: 6262 - DNA, 720 bp, Zea mays
  Peptide Sequence Number=SeqID_48041
atggcggctgtggcagggaccgaacgggtggacgacgcggccgagcggcggcggcgcgcccgcgcgctgctggacgccaccacccccggccgcagcctcgccgtggggcggtgcaagctggcgctcgagacgttccgcagcgaccgcgacggcggcctagaggaggcgcgcacgctccttggcgacgcgctcgtctgcagcaacgtgcaccaccccgccatctaccgcgcctggatcggcatggagctggaggccggcaccgacgccagcggcgtccgggagctcttcgaagggtggcacatctggtaccttcgcagcgccttcaagaacggggacgacgaggagaacaggcggccgagccaggacgagggcggcttctggtgccactacattgacttcgaactccgccacgggaccgccgccagggtgcggtgcgtcgcggagcgcgccgtggcgacgtgtccccgcgacccggctgtgcacgctaagtacgccaaggcggagctgcggctggggtgccccgatcgcgccaacgccgtgctcttgagcgccctcgacgccttcgccgcggacgccggaactcgggagtggctggagaaggaggtgacggcgtaccgcgactctattggccacgggagttggaggaggcttcgcgggctcttgtcgttgtgtcgccgatcacggccggcgccgggctacgagctactcggcgtggtgtga

SEQ ID NO: 6263 - DNA, 270 bp, Zea mays
  Peptide Sequence Number=SeqID_48042
atggcctatctcggtgggcagcaggctcctcattgtgaagggcaatctcagcgtggaagggaactcagtgcagagggcaagcttgccatgcgtgggagctcaacacggagggcaagctcgctgtggaagagatatcagcgtggagggcaagctcgctgtggaagagagctcagcggtactcagcatgcagcgacacgtgctgctgcctttgttcggggtgatgatgtcgttcataagctgttcactgatctggcctaccgctacagttaa

SEQ ID NO: 6264 - DNA, 249 bp, Zea mays
  Peptide Sequence Number=SeqID_48043
atggctgagcgacgccgccagggtctatgctacaacagtgacaagccgtttgtacgaggacatcactaccaacgcctcttctaccttgaggtgaccaccgacaacgatggggtggctgctgaggaagatcaccctccctcctacatgggaaccggtggagacattgaagaccttttatccaccttccagctcgaggaggacgagttgtttttagaggccggaagagatgttatgatcggcatccagtga

SEQ ID NO: 6265 - DNA, 1323 bp, Zea mays
  Peptide Sequence Number=SeqID_48044
atggcgcaaccagcttgtgaagcagtaatgaattggtttacgtcagctggaatggcagatttaattcaagggcctaatatgcagccaagtgaaagaataatgatgatgcgtgaaacttaccctctgtcaatgtcattgctttctggcttgtctatcaatctttgtctgaagcttgcttaccagcttgaagagaccatatttcttggccaggctgtccctagcattgctatggtggaaacctatgtgaggttactgcttatagcaccccattcattgtttcgtccccattttacggcattaacccaaagatctccatctattttgagcaaatctggtgtgtcattgctcctacttgagatactaaattacagattgctgcctttgtataggtatcatggtaaaagcaaggcgttgatgtatgatgtcacaaagataatatcaatgattaagggtaaacgtggagaacatcgtctttttcgattagcagaaaatttgtgcatgaatttgattctctcactgaaagacttcttttttgtgaaaaaggaattgaagggcccgactgagtttactgaaactctaaaccgcataacaataataagtcttgcaatcactatcaagacgcgtggaattgctgaagttgaacacatgatttatcttcaaccattgttagagcaaattatggcaaccagtcagcatacctggtcagaaaagacactgcgttattttcctcctctcattcgtgattttttaatggggagagtggataagaggggtctagctatccaagcatggcagcaggcagaaacgactgttattaaccaatgtaatcagctgctctcaccatctgctgagccaaactatgtcatgacttatttgagccacagtttccctcagcatcgtcaatatctttgtgctggtgcttggatgctgatgaatggacatcttgagatcaacagtgcaaatcttgctcgcgtcttaagagagttttcacctgaggaagttacagcaaatatctatacagtggttgatgtgcttctgcatcatatccaatgcgaggtgcaaagggggcatctagcacaggatttactatccaaagcaatcacaaatctttctttttttatatggacacatgaactccttccgctggatattctattgctagctcttattgacagggatgatgatccttatgctttacgccttgtgagagatgaggatattgatgaagattttagccttaagaagttaagatcaaagaagggtggaggaagtgacaccaagcatctggcgttctatgtgacaagaggatattatagaagttaa

SEQ ID NO: 6266 - DNA, 966 bp, Zea mays
  Peptide Sequence Number=SeqID_48045
atggggaacagcctcgggggcaagcgcaagggcgccaaggtgatgcagctggacggcacctccttccgcgtcaagcccccggcggccgcggccgacgtactgcgggaccacccgggcttccagctgctcgagtccgaggaggtcaagctcctgggcgcacgcgcgcgcccgctcgcctccgacgcgccgctccgccgcggccggctctacttcctcgttgcgctccctcgccgcgcgcccgcaggtcccatgcgccgcgcctggtcgggcaacctcaacgtcggggcccgcgagcgtctcgagtcgctcaagctcgcgcgccgctccacctccgacctctcctcgctttccgcccacgcctccgcgtcggcccccacctccccgcttcccggcggcgccgcctcccctcttcctcccaccggcagcggcgccacgcccgtgcgcgttaagatgcgtcttcccagggcgcaggtggagaagctcatgggggagagcaaggacccagccgaggtcgccgccaagatcatggagctatgtggcgcggccgtgtgcgacgcgcacgccagcgctcgggtcatcccggagcgcccgcccgggatactgcggagccaaaggttcgccaagacgccggaatggggcgccgggttcatgctgccggcggcggcggcggccaagacgccgcagcggtggcccacgctgccacgcaccaacgaggtacccctatgcctatcccccacgtacattgcattattgtttgttcccatgagacgtgaacacaagatcactaataagctagcttgcgtagtgaaactgctgttctccgctcataacggggaacaacgaacatacaagtgcgctggatgcaggaacatgatagacttttcgagtggcatctggagatgtttttttgacaaaaaggaggatacaatcagtgttattctaagcgttaaacgtacccacagatag

SEQ ID NO: 6267 - DNA, 1206 bp, Zea mays
  Peptide Sequence Number=SeqID_48046
atgtccatgggctccccggtgcagctcaggcggctgaagcctctgtaccagctggtggtgaacaacatcctggccatcgtggccgtgccgctcgccgccgcggtcctgctcaaggcgtcgtcgctcgggcccgaggagatcctggcgctccggccggcgcacatgttcctggccgcgttcctgcctgccgcggccacggtgctatacctgatgctccggccgcgcgctgtgtacctggtggactacgcgtgcttccgcaccagccccaactgccgcgtcccgttcgcgacgttcctggagcactcccgcgtgtggccgggcttcgacgagcgcagcgtccggttcatgacgcgcctgctggagcggtcggggctcggggaggagacgtgcctgccgtacgcgcagcactacatcccgccgtcgcgcgacctggagtcctcccgcgccgaggccgagctcgtcatctttctctgccatcgacgacctgctcgccaagaccggggtctccccgcgggacatcgacatcctggtggtgaactgcagcctgttcgcgccgacgccgtccttcgcggacatggtcgcgcaccggcgcgcggttcccgcctggcgcgcgtggtgcgcacgctgcgcggcgcgtcggacggcgcgtaccgctgcgtgtaccaggaggaggacgagcgcggcaacgtgggcatcaacctgtccaaggacctgatgagcatcgcgggcgacgcgctgaaggcgaacatcacggcgatggggcccctggtgctgccggcgtcggagcagctgctgttcgcgctgtccttcatcgcgcgcaaggtgctgaacaaccggatcaggccctacatcccggacttccgcacggcgttcgagcacttctgcatccacgcgggcgggcgcgccgtgatcgacgagctccagcgcagcctgacgctgtcggacgagcaggtggaggcgtcgcggatgacgctgcaccggttcggcaacacctccagcagctccctctggtacgagctcgcctacgtcgaggccaagggccgcatgcgcaggggcgaccgcgtctggatgatcggcttcggctccggcttcaagtgcaacagcgccgcctgggagtgcatccgccccgccgccaacgccgacgggccgtgggccaactgcatccaccggtaccccgtgcacattcccgacgtgctcaagcactga

SEQ ID NO: 6268 - DNA, 495 bp, Zea mays
  Peptide Sequence Number=SeqID_48047
atggaccatgctcccgtacgattttttgagtttcttgatactcctgatactgtgtctgatcctattggaccacagcacaagcttcttcctataggaactcttcccggggatcctggagtgtcagcaggcaccacggtgtcatctcttgtgtcgacgcccgcgctatacgtcccaccaggacgacacggtctaacctcctacacctcatgcgcgaactcgacgaccttcgcgccacacactgcctcgaccaggggcgacgccaggttcaagttccctggtgcgaagggtatattttcagcgggctttgcccctggcctcgacgacatccccttgttatccatctcaaccgccgccatgacctcgtcatcatccatggcccccctaccatcacccacatctgcccctagttccgccttatgcctactctgccacaccaacaatgtccttacccatccaccagatatcgttcccgcactcaccttcctcgctccctag

SEQ ID NO: 6269 - DNA, 2490 bp, Zea mays
  Peptide Sequence Number=SeqID_48048
atgccccagctccttacaacggaaacacctaggtttcagacgacacatcgccgcaaaatgaccaccggcgaggcagttgaaacacttgccgatcaagtcgtaaggtaccaaaggaaccaccctcgtcgagcgctgacggtgcctcctggacttcctaggctcgaccttggtccatccctccacagacttctcggtgctctctcagaccacgaaactccgggcattgtctcacgaaagcgagggagcagcgcgcagtctcaagtgggaggcacgttcgcccaccgttggaatttggaccgcccctgggtagcacagacggcagacgccaagggaagagagataagtctgcttgaaaaaccagaacttcagcaaagagtcaagaatttctgtaatactcgttctccagagcattggctgaaaaatcaacatccaaaaagagctgagctccagaaagctcttggcagccatctttcatggaaggaccgctatccacccttcttcgatgacattgctgcacgtctgcttcctgttattccactgattatttataggcttattgagaatgatgcaactgacattgcagacagagttcttgcattctattcttccttgcttgccttccacccgctaagatttacatttgtacgtgatattcttgcgtatttctatggtcatcttccaatcaaactaattggtaggatcctcaacctgctgggtgttagcactaagacccccttttcagaatcttttgctaaatatttagtgtcatcaaattcttcaatatgtccaccaccagaatactttgccaacctgttgctaaacctcgttaataatgttatacctcctttaagtagcaaatcgaaatcaaacccagcagacacaacacgctcgactttcaacaaacatcatgcatcttcacaacctggtggagttggtaacaccgatggccagagggcattttatcagaatcaggatcctgggtcgtatacacagcttgttttggaaacagcagctattgagattctctcacttcctgtgcctgctgctcaaatagtgtcctctttggtccaaataatagcacatgtacaagcaatacttatacagtcaaatagtggccaaggaatgtcaggtggtttggggcaaagttctgggctgccaacttctccttcaggggctgctgaatcctcaggtcccaaccaagcgaacagtgctgcaactggcatcaatgccactaactttgtttctaggagtggttactcctgccaacaattgtctgttttgatgattcaagcatgtggtcttctgctggcacaactcccaccagaattccacatgcaactatactcagaagcagctcgagtcataaaagactgctggtggcttgctgatggttccaggcctgttaaagagcttgactctgctgttggatatgcactgttggatcctacatgggcttcccaagacaatacatcaacagccattggtaacattgttgcccttctgcattccttttttagcaatcttccacaagagtggctggaatctactcatactgtcatcaaacaccttcggccagtcaattcagttgccatgttaagaatcgccttccgcatattgggtcccttgttacctcgtctagcctttgctcgacctttgttcatgaaggtgctaaagggagctaagaataccttggctttactcttcaatgttttgggtgacgtgtttggtaagaaccctcaggtctcaaatccaaatcctgtggaggcgtcagaaattgcagacataattgacttcttgcatcatgcggtgatgtatgagggccaaggcggtcctgttcagagcacgagcaaacccaagctggagatactgacattatgcgggaaagatgagcgacaaccgacacggtcgcatgatgcaagatttgtgccggttggccgattgtcaccgtgcagatctcttcgtaacagtgctgcacgtggaagccataatcggatagtgagcttggttctcgatctagagagctttagacgggctccaacaagggccggtaaagcgtcctctgcgctaaatataccggatgaatctgttcgctacgtctccagcaacatccggtatgaccttcggcaaattatagagtgcgtttgtgatccggcaaatgtggcgaactccgctaccactcgctatccattgtttactctgctctgcttcctgtgttcgctcccgcgcaaacagaaacttcctgtcgggtgctgcaccttctttgtggtcttcggcttcgacgacggtgaagctacacgaaggatacaagactacgcatttgtccacgacgaagctgcatgggggaggcaaggcaagacgactttgctccacgtcgtgcaacaccctgcttgtggtgccggtcggtttgctgcaacatgtgagctttgcgcgggccgccgatggtgtgcatccgcggcagtgctacgaccttcagctccttcgttgtcctag

SEQ ID NO: 6270 - DNA, 1587 bp, Zea mays
  Peptide Sequence Number=SeqID_48049
atggccgaatccggcgagtcgtccccgaactcagccgcggccacggacgacacgcaccacgagatgccggaggccggagcggctgcggcggcggtgcatgcgcagccgcgcccgccgccgccgccatccaaggtgcggctgatggtcagctacgggggccgcatccagccgcggccgaacgacaaccagctcgcgtacgtcaacggcgagaccaagatcctgtcgctcgagaggccgctctgcttcccggacttcgccgcgcgcctcgccgcgcttgtggggaacgccgcggacgtccgcgtcaagtaccagctgcccggggaggacctggacgcgctcgtctccgtcaccaacgacgaggatctggagcacctcgtccacgagtacgaccgcctccacgtccatcgccacgccacggcctcctccgccggctccagccgcggcggatccgcgcccaggctcagggtcttcctcttccccgtccagtcgcccccgcctccgccgcagccggccgggatcctcgagcctaaggttgagcagcgccaatggttcgtcgatgcgctcaacaccgtcctgctgccctcgtccaagcaggacccgccgcccgtgcccccgcagcagcagaagcaggagcaggagtcggtcttcgcgcagcagtcgccaccgccgcaggccaagcacgaggcggtgttcgtccagcagtccccgcctcagccgcagacggtggtgcagatgcagatgccgccgccgcagcacgtggtgctcgcggcggcgagccccgactacctgttcggcctcgacaatggcttcgtccatccccccgcggtgaaggtcaaggacccggcgggcgatcctcctgcggtcagggagagcgtgcccgtggagttaccagccaaaaacgaggaccgccatcccattcccaaccccgcgggcgacaacgtggctgtctcccctgcggagtaccagcgccagatcccggggctcgagaagctgcaggtcgccgacaacgccgcccaccaaccacctcctcctgcgccagcgcctgcgccggcaccttccctcgccccgactcccgtccccgccgcgctcccgagaaacggcagcgacgactccctgacccgtggctaccctctcgcgaccccccacccccgaactccagcgcggagtactaccttccaaagttcccggagaagccccccgtgccgccgccgccgcagtcatccgctccgcccccaccgacctatctgcaggtgcagggcagaccgtggccccgtgttcttcatcccggcgccccacggctacttcgccgccacggcctcgccaggtgcgacctcctaccccgccgtgtacgccgtcgcgccacccagtaccgccgccaacggctccgccgcgtcgcccgcggcgtcgaatgccacggcctactcccccgcccccacgcaggtcgcgtacgacagcaacggtcgcgccatctactacaccagcatgctcccccagtacccgtcggctgtcaatggcatgtcctcggcgggcgccgttctcgggacagagcccgtgaatccggtggccgtgaagccgaccgtgtcgtga

SEQ ID NO: 6271 - DNA, 2442 bp, Zea mays
  Peptide Sequence Number=SeqID_48050
atggcgtgcccagacattattctgccagggtcttccttgagaactatgccctatttcagacctatgcctgcattaagacaggaataccatgaatgtgcaacttgccatgcccctgcaaagactcgttgctccagatgcaaggctgttagatattgctctgggaagtgtcaaatagtacactggaggcaaggacataaggaaacatgccaaaagtggcttggtagtggttctagcagctttggtggatctagcactgaggctactgaacagatgccgttcttgactaacttaaattcacctcttccgggtggtgacattcacttgcgtgacttgaacttcgatactttatcagaaccatcctttcccacaactgatggttataatctagatactgatccatttttggcagacagaagcaacatgaataaatcaaatcaaggtattcatatgagcgaaaatggtgctgttggtgtatcttttgaaaagaataattataatgctgatgatgaaatccactcaccggaaaatttatctagaaacaaggtgtcaaacaactattttggttcagatgcaataagtggtaatggggatgcaatttatcctgccaaaagtaatgcacagcagcctagcagctgtgctcctgacatgagaaaacagccaaaagcaagcatcacagtttatcagcctgacataggtgtctatttaacttctgacatggtcagttcttgtgaggggtcatatgcttctgccagtgagccactgcaaaggagcttgtcatctggaagaactattgggaaagcaaacgcggtgaataagaggcctccatacccatcaagtaaggtggtttcagcacaaaagccacaggatagggtgtctacatcatatcaaaatgatggccatgagaagaatccttgcaacaaaaatgaccaaagatctacccccaaatgtgaatcaagtcaatcaacaagcagcaatctacaaaagtttggagcatccaaggttgaagttttaaagaagccttcaaaatttctcaaaaccagccttgtgggattgatcaatgataataagaggaacaaggtattgttcccatatgaagatcttgtcaagttttttcagtatgaagcccggggtatttcccctagaggtcttttcaattgtggaaacaggcatcttgtgatgtctatgcaagcagcttgcttggatgggctgggtggtgagaagcatgttgagccaagtttgcaggaaacaacactgatacaacagatgtttggtggccgtcttaaatccaaggttaagtgcctcagatgttatcacgagtctgaacgatatgagaatataatggatcttactttggagattcacggctgggtagagtccttgcaggatgctttgacacagttcactgcccctgaagatttagatggtgataatatgtataaatgtggaagttgtgctgcctatgttaaagccaggaagcaactgagcgtgcatgaggtgccaaacatattaacagttgttcttaaaagatttcagtcaggaaaatatggcaagatcaacaaatgtgttactttccctgatatgttggacatggttccttttgtgactgggtctggtgacaatccccctctttatttcttgtatgccgtggttgtacatgtggatacagaaaatgcatcattctctgggcactatatatcatatgtcaaagatatgcagggtacatggttgagaattgatgattcagaggtccaggttgtatcagtgaatcaagttatgtcagaaggtgcatatatgcttttctacatgaggtctttcccccgaccaccaagaatatacatcgagaaggggccgactgttccatccgcgaagcgccacacatcaaagtattccaagggctctaaacacgagcgcgagcagacagagttactcctctcggcgaacgatccagcatacggtgtttatgactttagacctgatggcgagggctacacgcaagatcagcaagcagagttgagatccagggatttccatcgcgccgacgatgccttcgcagactcggtcagcgcggacttctcggaggccacgtcaagcgaatggtcgctgtttaccagctccgacgagtcctcattcaccaccgagagcacaagggactcgttcagcgttgtggactacggcgacaacgctggcctggacccaatctcctcgatatttgggccaagctatgctccggagcatcatcccggtccacctggcagtttcgccgcgtgcacgaggctctcgccttccaacccacagacaaggtacttctcggagagcacagggttcgtctcggactactcttccagcggcattgtacatagaggaagggatccaggtagggcatacacctgttcagcggaaccgctcgcttcggctgcggcggcgcaccagcaccagcggtga

SEQ ID NO: 6272 - DNA, 960 bp, Zea mays
  Peptide Sequence Number=SeqID_48051
atgaccgcgtcaaaaaaaagccgcctcagagcgctcgggctccgcgcccgctactggtcagaggttcgaaggacggcccctcagaagggttcaacggccgcctcaggccactcgagctccgcgcccactactgatcagggggctcggactcgggctcgaccccggaagacgacgaactccgcttcgcccgacccagggctcggactcgggctcggccccggaagacgacgaactccgcctcgcccgacccagggctcggactcgggctcggccccggaagacgacgaactccgcctcgcccgaccccagggctcggactcgggctcagccccggaagacgacgaactccgcttcggccgaccccagggctcggacttgggctcggccccggaagacgatgaactccgcctcgcccgacccagggctcggactcgggctcggccccggaagacgacgaactctgcctcgcccgaccccagggctcggactcgggctcagccccggaagacgacgaactctgcctcgctcgaccccagagctcggactcgggctcagccccggaagacgacgaactctgcctcacccgacccagggctcagactcagccctggcctcagccgacggtctccgcctcgcccgacccaggggctcagactcgacctcggcctcggaagacagactcgacctcgacctcggaggagcctccgcctcgcccaacccagggcttggaccgaccacgtcacaggaggcgccatcattaccctaccccaagctaactcaggctacggggaacaagaccggcgtcctatctggctcgccccgataaacaagctccagcgctcctccgacggccacgacaccacacgaaccaggtgccaaaacctctccggctgccacgacgacatggccctcttacagagggttggccgcacggggaaggacgggatggcgctcgcataa

SEQ ID NO: 6273 - DNA, 2313 bp, Zea mays
  Peptide Sequence Number=SeqID_48052
atggacgctgccggggacgccatggagagaggcgaccgcgcgccgctcctgccagtgagtcaaggcccaaaggttcgggacgacgacagcctccaagtgccactgttgaaggataagaaacgtgccggcagcaaggcgccggcggttgttcttggtgagcaactgagcatagctcccagcatgttcagtttttcctttcgttctcctgggttcgagtgtctggagagcacggcgttcaacggcatctccacgaacctggtggtgtacctggagaccgtcctccacggcagcaacctggccagcgcctccgacgtcaccacgtggttcggcaccagcttcctcacgccggtcttcggcgccatcatcgccgacaccttcttgggcaactacaacaccatcctcgtctctctcgccgtctacctccttgggatgatgttcgtcaccttctcggcgttcctgcccacagccgcggcgctcggcggcgccacctcggtgttcggcgccaagaccgtcgccttcctcgggctgtacctcgtggcgatcgggcgcggcggggtgcagtcgtcgctggcgccgttcggcgcggaccagttcgacgacgccaacccggcggaccgggacagcaaggcgtctttcttcagctggttctacctctgcgtcgacttcggcatgatcgtctccggcctcgtcatcgtgtgggtccaggacaacgtcagctggggcctcggcttcggcatctccaccgcctgcctcgcgctcgccttcgccgccttcgtgctcgccacgcccatgtacaagcgccgcatgcccaccggcacgccgctcaagagcctcagccaggtcgtcgtcgccgcatgcaggaagatcgccctgaaggcgcccgccgacgccggcatgctcttcgaggtcagcgacaaggtggacgccgcccagcctaagatcgcgcataccgacgagttctcgttccttgacaaggcagctatcgtctccgaatcggacatggaggagatgtcgtcggaggaggcctgttcgtcgtcgtggaagctctgcaccgtcacccaggtggaggagctcaagatcctgatgcgcctgctgcccatatgggtgactagcgtcatcgtgtcctcggcgtacgcgcagatgaccaccaccttcatccagcagggtagcgccatggacatgtccatcctgtccgtgccggtggctgcggcgtcgatgggctcgttcgaggtggtcttcctcctcacgtgggtgctgctctacagcaaggtgatcgtgccggtgctgaggggcttctcctccggcggcgacggcgagccgtcccagctgcagcgtatgggcgccggccggctactcatggcgctctcgatggcggcctcggcgctcgccgagatgaagcgcctcgacagcgccgcgcgaggcgaggagatcaccatcgcgtggcagctcccgcagtacttcttcatggccggcgcggaggtgttctgctacatcgcgcagctggagttcttctacgccgaggcgccggacaccatgaagagcacgtgcacgtcgctctcgctgctcaccatcgcactcggcagctacatgagctcgttcatctacgccattgtagcggcgttcacggcgacgcccgacagtcccggctggatctccgacaaccttaaccaggggcacctcgattatttcttctggaccatggctgccatgtgcacgctcaacttcgttgtgtacagcgggttcgccaagaactacaagctcaagacgggctcggactcgggctcggccccggaagacgacgaactccgcttcgccccgacccaggggctcggactcgggctcggccccggaagacgacgaactccgcctcgcccgaccccagggctcggactcgggctcggccccggaagacgacgaactccgcctcgcccgacccagggctcggactcgggctcagccccggaagacgacgaactccgcctcgcccgaccacagggctcggactcgggctcggccccgaaagacgacgaactccgcctcgcccgacccaaggctcggactcaggctcggccccggaagacgatgaactccgcctcgcccgaccccagggctcggactcgggctcagccccggaagacgacgaactccgcgctcacccgaccccagggctcggactcgggctcagccctggaagacgacgaactccgcctcgcccgaccccagggcttggactcagccctggcctcagccgacgggctcggaccgaccacgtcacaggaggcgccatcattaccctactccaagctaacttag

SEQ ID NO: 6274 - DNA, 1782 bp, Zea mays
  Peptide Sequence Number=SeqID_48053
atgggtatgaaaattgacccaaactttgacctaaactcgtaccctaatagggtaaaaacccaccgggtttcgattttcggcacacgcatgagaaagctgcggagccagaaagcaggcccgccggccgccgccgcctccctccgcttcgccgcgctcctccagtcgtgcggccgcaccggagacatccgccgaggccgcgccctacacgcgcgcctcctgctcaccggcgcggccgccgcgtccaccttcctcgccaaccacctcatcaccatgtactcccactgcgccgacgcggtctccgccgtccgcgtgttcggcgtcgtgccccgccccaacctcgtctcctggacgacgctcgtctcgggtctcgtccagaactccatgcaccacgacgcgctcgccgccttcgccgccatgcgccgtgcgcatatcgcccccactcagttcgcgctctccagcgccgcgcgcgccgcggccgcactctccgccccgcgccccggcacgcagctgcactgcatcggcatcaggcttggcttcgacaatgagctcttcgtcgcgagcaacctcgcggacatgtactccaagtgcggcctccttcacgaggcgtgtagggtgttcgatcaaatgccgcaaaaggatgctgtcacctggactaccatgatcgatggctacgcgaagaacgggagcctagaggccgccattctgatttttcgggatatgaaatgtgagggcctggttggagctgaccaacatgtcttctgcagtgcattgagtgcatcgggagggctcaaggatggatggtttggtcgaagcctgcactgttgtataattaaggctgggtttgaactggagactgttgtgaggaatgcgttactggacatgtatgctaagtctggggatttggagaatgcctctcgtgtggtgagtattgatcctggaggttggaatgttgtgtcagctacctcactgattgacggttacgttgaggcaggtcgtattgaggaggctcttgagacatatactgagttggggaggcaaggtgttgagcccaatgaattcacttttgcgagcatgattaagggctgtgccatgcatgatctgctcgaacaaggtgcccagctgcatgctcaagtgctcaagacaaatttgatcagtgactcatttgttggttccacccttgtgtatatgtatggaaattgtggcctcattagtttgtcccttcagttatttaatgagattggataccgtactgagattgcctggaatgcggttataaatgtttatgcgcagcacggtcatgggtggggagcaatccaagcttttgataggatgacctcaagtggtatcaggccaaatcacattacatttgtctgcctgctgactgcatgcagtcatgctggattagtggacgaaggactgggatatttccactccatgaaggatgcacatggtattgagcctaaagcagaacattattcatgtatcattgatatgtatggtcgagctgggagactagatgaagcagaaaaattcataagtgagatgccagtcaaacccagtgcttatgcttggtgctccttgcttggagcatgccgtatgcaaggaaacaaggagttgggagaggttgctgctcagaatcttatgaaacttgatccaaataacaccggtattcacatatccctttctgggatatacacatcattgggccaatgggaggatgtgaaggcagtcaagaagtcaatgaaggatatcagtattaaaaagctgcctggttttagctag

SEQ ID NO: 6275 - DNA, 1623 bp, Zea mays
  Peptide Sequence Number=SeqID_48054
atggatgatggtgatggggagagtggtggtggaagctcgaagaaaaaggccaagcagcacgtggagcagctcaagcggctgcagcaaaaggatcctgatttctataaatatttagaagagtttgataaagatttgttgggatttgatgatgatgatgatgaaatcgagaacgaccgggagactggggttgaggagaaagagcaatatgtatctaaagaggaactgaagcatgtgaaaccgattacaatggaaatggttgattcctggtgcaacggagtagagaatgaaaagataggttctatccgttctattcttcaagcttttcgcagagcctgccattatggtgaagatcatggggacaattcaactccgaagctcagtgtcatgtctggcagcgtacttgataaagttatgcactttgttttgaaacacatggataaagtcctccgtcaattacttggtgccccaagctatggagggaagaaagaggtaatcagtgagctgatgctgagtaagtcatggaagaggcatggtaatcttatgaggatctatcttgccaatgcgcttcatatgataacagagatgaccgatgagcaaatgatagcatttactgtacaccgtgtcagagcatcagctgtttttctggcagctttcccatcgctcctgaggaagtatgttaaggctctgctccatacctgggctagaggacgaggtgcaatgcctcttgtttcttttatgttccttcgagacttgtgcattcaagtaggttcagattgccttgatacttgcctcaagggtatctataaggcttatttggtgaactgcaaactgtccaaatctatcagcggatcaaaacaacaacacattcaattccttggaaattgtgtcagagaattgtatagtctggatccacaaagtgcgtatcagcatgcttttgttttcatccgtcaactgggggttatcctaagaggagctcttactgaaagggggccaaagaaatcttaccaaaaaatttatgattggcaatacatattctgccttgagctttggaccagtgttgtgtgcggatgtagttctgaggaagaattccgacctctagcttatccgttgacacaaataatacatggtgtggcatgcctcgtacctagcgcacgttacttccctgtgcgctttaggtgtgtcagaatgcttaattgtattgccgaagccactggtaccttcattcccgtgtcctccctgctgcttgatatgcttgaaatgaaagaacttagaggacgtccagatggtgttggcaaagccgtgaatttgttcagtgttaaacaggttgacaagaaaacagtaaagacacgtgcctttcaggaagcttgcatttattctgtggtcgatgagctggctaaacatttgacccaatggagctactccattgccttctttgagatgtcctttattccacttgttcggctccgaagtttttgcaaaaccattaaagcggacagatttaggaaagagatgaaggatcttatctatcagatagaggccaatgtcgagttcattaagtcaaaacgagtggggattgcattttcacccaatgacccagctgtagagtcatttctgcaggcatga

SEQ ID NO: 6276 - DNA, 432 bp, Zea mays
  Peptide Sequence Number=SeqID_48055
atgggcaagagcaacaagcgcaagcgcgaaccgactcctccatcagaggagtttggtgactcggaatactcagaggaggagttctcctctgagtccgaggggtctccggctcccatccccctgcgtgagtcgtctgatgactcagacgactcccaggggcttgcggcggaggtctggacgtacatccgggccgtcgagcgctccgggctcgagggctcggatgagtctgggttctcggacgaggaggactcggacggcggcgaggacgaagatgacgacgacgacgacgacgacgacggtggcgacggcgacggtgatggtggcaacggcggcggaggcagcggcggcaaggttggcaccaagggcggcagcagcgtgggcagcaccagaggcggcggcggcaagggcagcggcggcagggccagtggctaa

SEQ ID NO: 6277 - DNA, 843 bp, Zea mays
  Peptide Sequence Number=SeqID_48056
atgcaggcggcatgcaaccgcactaagtgggcgcaccctttcgactccaacgcgtccagcatggaggcccaggcccacacgtcatggaccgggaaaggggataccccgaaagggatccttctccgcgaaggaaacgggccccgagcccccctactgatcagaggttcgaaggctggcccctcggaggggttcaacagccgcctaagagcgctcgggctccacgcccactactggttagaggttcgaaggccggcccctcggaagggttcaacggccgcctcaggccactcgggctccgcgcccactactgatcaggggttcgtaggctggccctcgaaggccaagtccggcctcaggcgccataggaagctccacctcacccgacccagggctcggactcgggctcagccccgaaagacgacgaactccgcctcgcccgacccagggctcagactcgggctcagccccggaagacgacgaacttcgcctcgcccgacccagggctcggactcgggctcagccccggaagacgacgaactccgcctcgcccggcccagggctcggactcgggctcagccccggaagacggtgaactccgcctcacccgacccagggctcggactcgacctcggcctcagccgacgatctccatctcgcccgacccaagggctcggactcgacctcgacctcggaagacagactcgacctcgacctcggaggagcctccgcctcgccctacccagggctcggaccgactacgtcacaggaggggccatcattaccctacccctagctagctcaggctacggggaacaagactggcgtcccatctggctcgccccg

SEQ ID NO: 6278 - DNA, 2376 bp, Zea mays
  Peptide Sequence Number=SeqID_48057
atgtcgggagaacacgccaaaagggagatggtcaccggggggaagcccgaatcttcgggaaagaagaatgatgaaaggactccgtcgaaagaggccggtgacaagcacaaggaggaatccgccggctccatcaagtcatataagaagggtgacaagaggaaaaagaagatgaagaaggtggtctactatgagaccgattcttcctcaccctcaacctccggtgccgagtctacatcctcaaagcaccaagagcgtaagaagtatagtaagattcttctacgctatcctcgtatttctaagcgtgctcccttactttttgttcccctaggcaaaccaccatattttgatggtgaagattattgcatatggagtgataaaataaggcaccatctaacctcactccacgaaagtatttgggatattgttgagtttggggcacaggaaccacaggtgggtgacaaggactacgactccgatgaggccgttcaaataaggcacttcaactcccaagccacctccatactccttgcttccttatgcagagaggagtacaataaggtgcaagagttgaagagtaccaaagaaatttgggacgtcctcaagacggcgcacgaaggagacgaagtgacaaagatcaccaagcgggaaacgatcgagggaaaactcggtcggttcgtcctcaacaagggagaagagccacaagcaatgttcaaccggctcaaaacaatggtgaaccaagtccgcaacctcgggagcaccaagtgggatgaccatgaaatgatcaaggttattctaagatctcttgtctttcataaccccactcaagtgcaattaattcgtggagatcctagatataaacagatgtctcccaaggatgtgattggcaaggtgggaccggcctggggcagggaaatccaagccaccaagctcccattggccgggcttgtgccaggtcggcgccgcgtggcgaaccccaccccaccccaccctatcgcgttatcgccaccggctcaccgctcacggtcacggccgaataaactcccgcggtgccgtgcctcgctttcgcatccccccgcggagaggagaggaagaagaagaacccagccaaatcctcagtcttcaggctgctcacagctcgtgccgtccactctcccccgaggcagtctcttgcgttcgctgctcgacatggcgctccaggcggcgacgtcctttctcccctcggccctctccgcgcgcaaggaggggtcggtgaaggactcggcgtcgttcttgggtgttcgtctcgcggcggatggcctcaagctggacaccaccgctctgggcctacgcaccgtgagggtgagcaggtcggcggacatccgcgcgcagacggcagcggtgtcctccccgtcagtgacccccgcgtcgccgtctggcaagaagaccctccgcaagggcacggcggtcatcaccggcgcgtcgtccggcctcggcctcgccacggcgaaggccctcgcggagacaggcaagtggcacgtcatcatggcctgccgcgacttcctcaaggcgtcgcgcgcggccaaggcggccggcatggacaaggacagcttcaccgtcgtgcacctggacctcgcctccctggacagcgtccgccagttcgtcaggaacgtgcgccagctggagatgcccatcgacgtggtggtctgcaacgccgccgtgtaccagcccaccgccaaggagccgtcctacaccgccgacggcttcgagatgagcgtcggcgtcaaccacctcggccatttcctcctcgcccgcgagctcctcagcgacctccagtcctccgactacccctctaagcgcctcatcatcgtcggctccatcaccgggaacacgaacacgctggcggggaacgtgcccccgaaggcgaacctgggcgacctgcgcggcctcgccggcggcctcaacggcgttggcagctcggtgatgatcgacggcggggagttcgacggcgccaaggcatacaaggacagcaaggtgtgcaacatgctgacgatgcaggagttccaccgccggtaccacgaggagacgggcgtgaccttcgcgtcgctctacccgggctgcatcgccaccacgggcctgttccgcgagcacatcccgctgttccgcctgctcttcccgccgttccagaagtacatcaccaaggggtacgtctccgaggaggaggccgggaagcggctggcgcaggtggtgagcgaccccagcctgaccaagtccggcgtgtactggagctggaacaagaactccgcgtccttcgagaaccagctctctgaggaggccagcgacgccgacaaggccaagaagctctgggagatcagcgagaagctcgtcggcttggcgtga

SEQ ID NO: 6279 - DNA, 303 bp, Zea mays
  Peptide Sequence Number=SeqID_48058
atgtgttggcggccggagacggggaagaagcctggcgcgcagttacgtggccaacggcgtggcaacctccccgacaatgatgagatggcccaagggaatcacggcgacacggtagaaaaactaggccacgcggcggaggaccgtcgaccagagttggagaagaaacgcgagctgtggatgcgctggcaagctttccgcgcggcggtttccgaactagccttctgcatcaaagttgtagtgccacctaccagctacaagtttgttatggaaatcattcacaaatttgcactggatctcacctga

SEQ ID NO: 6280 - DNA, 177 bp, Zea mays
  Peptide Sequence Number=SeqID_48059
atggaatcgaggatgatagcggagcgggaggcccgcttggcagatgagcaaaggatggcagagatgttccggtacatgcagagctttggtgtcgcacatggttttgctccactacctccgttgttccctccatttaactctgctcggttacatactcctaatagcaaaaacaaataa

SEQ ID NO: 6281 - DNA, 399 bp, Zea mays
  Peptide Sequence Number=SeqID_48060
atggccctcggctcttgtgccaccgctcaccgcatcgccgtaaattataatattgcaaaattcggcgcgagagatggcgggaaggggaggctggagctggactttgatcacgccttgggctgtcagcccacggagacccactacatgcggccggtggcgcgcacggtgaccttcgccagcaacaactccatctacgtgaccccaccgtcgccgtcgccacaaccgcagcagcagagcgcaccaccagagccacagcgaccccaaacgccgccccggcacgagcccgagcagcacgacggtgcacccgaatcccaaccccaagccgagcaacccgaggcacccgcgcattcggaagacgcgccgccacaggccgccggcgccgagccgaagccaccatag

SEQ ID NO: 6282 - DNA, 432 bp, Zea mays
  Peptide Sequence Number=SeqID_48061
atgtcgccagccaactctcgggcttcctctcctccatccccgagatcgtcgctcgtggagatctcgccagccaatgcccgggtgagaaacagggtcctcaatccccacgccgccattgaacccgactccaagctcgagttcgatatgcccgatgccttgcgtgtgtacaagatcgactgtgtcgagcgcttcgacgacaccaagtccgtcccgtcgtcccccaatggcaattccaccaacggcgtcgcgtccaaggacttcgctacaggcatctcctcccgactctacctacccgcgagagtggatcccgagaagaagctccccattgttgtgttcttccacgacggtgcattcatggtccacaacgcctccttcccgctgtaccacatctacatcgcatctgtcaatgtcgcggtgcccgctagccgctga

SEQ ID NO: 6283 - DNA, 762 bp, Zea mays
  Peptide Sequence Number=SeqID_48062
atggcgcctcctgttgacgtggccggtccgcgccctaggttgggcgatgtggaggctcctccgaggtcgaggtcgagtctatcttccgtggccgaggtcgagtccgagcccctgggtcgggcgaggcgaagaccgtcggctgaggccagggctgagtccgagccctggggtcgggtgaagcagagggctgagcccgagtccgagccctgggtcgggcggagcggagttcgccgtcttccggggcttagcccgagtccgagccctgggtcgggcggagcggagttcaccgtcttccggggcttagcccgagtccgagccctggatcgggcggagcggagttcgccgtcttccggggctgagcccaagtccgagccctggatcgggcggagtggagttcgccgtcttctagggctgagcccaagtccgagccctgggtcgggcgaagcggagcttcctatggtgcctgaggccgagcctgactgcctgtcagcctcactctatcaagtggcacagcagtcggtgcggcgcaggcggcgctgtccttctgtcaggccggccaccggtccatccagccttcgtgcgacttgggacaagggcgcaacgataatatcaggggtggttcttggtgaagacagggcatcaggcgacccagaactttgtgctgatgggggttaccagctgagaattaggagtcttgagggtacccctaattatggtccccgacaagatgataccatgcattattgcccagttttactgtaa

SEQ ID NO: 6284 - DNA, 1173 bp, Zea mays
  Peptide Sequence Number=SeqID_48063
atgaagaaaatgccagtaaagatgtttagatccatcagacataccaaggattttgatatgtctctcaactatgacaaagcttatgaactgcctccaggcattccatcacacaagtttgcagagtattctgtatcgggactgacagatgccagtgaaaaaagtggaattatcgctcttgatagagcagaagcagtaattgagataactgaatgggttgaagttccaaagaagatattgactccagagagtaacatcaccaatcagaattcatcttctaaagtaggagtagctaatagcacgacagatattaaggaaaatttgagttctggcagtgataataattccagcactcccattaatgggagtaatgttcaagaaattattacagagaaggtgctaaagaaaagaacatttagggttccattgaaggttgtggaaaaaacaactggtggtggaacaattctttcaaaggagttgtattctgaagcaaaaaataggttagaggcactcgataagaaggatgctgagcggaggaaaactgccgaacttaagaataacctagagtcatacgtatattctatgaaggagaaggtgcaggattggttgtacatggacggtgaagatgctcaagctaatgaattcaaagaacgccttggtcaacttaaggccattggtgaaccgattcttttcagattgagtgaattaaaagcccgaccagctgcctgtgaaaatgctcgattgtatcttgatgagctgcaaaagattgtgaacaagtgggagacaaataaacaatggctccccaaaaagagagtagatgaggttgtgagtcaagcagagaaagtgaaagcttggctggaggagaaggaaaacctgcagaaaaatacccctgtctatagctcaccagttttcacatctgaacaagtttatgagaaagttctggacttacaagataaggtctcaagtgtcaacagaattccaaaaccaaaacccaaggccgagaagaaaatagcagaggaagagcctgctagcaaggggaaaaccacatcttcggaatctgcacccaacgagggtgagtacaccgaaacgtctcaggaacctaaggctcgagaaggggatcattcagcatcagccaacagtagtgatttagatcctgaatctcacgacgagttgtga

SEQ ID NO: 6285 - DNA, 1257 bp, Zea mays
  Peptide Sequence Number=SeqID_48064
atgcagaggctattttttctaaatggtgatcaagatctttcttcatttctatcagtggaatttggtatagtgaagtttccagactatgtttgcagcatctcccatcgcatttttcaagaaagaaatgatctacttgagtacgaagacgctattcgagttgctcaggtgatggatgaatcccttgataataataaaatggacttggtgacaagatgcatcgatttatctgagaatcgattatgcattatgccaaaacgagaaaacgcgattacacctgaacgtctcccatcattcttttctcgcttttcagcgtcctgggtctattcgaaaatactcacattaggtgtctctgtttatgaaagagaccgcaggtatgaagatgcagtcaggattctaaagacactacttagcacagttgcttgtgatagacggcgaggatattgggcattgaggctatccattgatttggagcatatgggtcgttcaaatgagagcctatccacagctgaaggaggggcaattgatccatgggtccatgctggttcaaagttcgcgctgcaaaggagagttctgcgtttaagcaaacctccacgacgctggaaagttcccagttacgctgattatgttaagagaaatataagagaggtaagcattgaaggaaggccattgaattgcgagacaggagcaaagaatgtattttacggttacgatggggaactttgtggggtagaacagttggctttacaatattatgctgatgaaggtggtggttggcaagattgtttgttggaccttgtcaagatcttttctcttcgttccttactgttcttcacaactcttggtaccctacagtacgacttctttgttctcgtgcagacagatgatttttataaatctagagagaacattgcagaatctcagttgaagaggatacgggacggaatggccgaagagatgctaatcagctcatgggagctacatcaggggacatcctgccagggtgttaactgggcccgttattcgttaactgatctacgggctgttgttgcatgcgttggtggccaccgtttggcatcgctcctccgccatctagccgttgattacaggagctggtcgagtggaatgcccgatctgctgctatggcgtttccttgatgaaagaggtggaggtgaggctaaacttgtggaggtcaaaggacccagggaccagctgtcagagcaacagcgtgcatggattttggatttgacgtggaagtaa

SEQ ID NO: 6286 - DNA, 459 bp, Zea mays
  Peptide Sequence Number=SeqID_48065
atgaccgcgtctgccgaggcacgagcggttggggcgatcgcgatctcccgaggcgcgatctgcggcggtggtgatgacctttcaaggcgcgagcgaaccacaatttatggtttgcgtcccatgcgggaggttgattttggaccagagcgcttaggtggacgaggcagtcgggcgcatggcgcctccgggaggcccaactgcgagcgcatcacggcgcggtacgtgcaggaatacacccactggcaccgcgacgccgagaggcaggcgatgagcgcgcagcctgtgcctgccgagacgcgggactcgtccaagcagtcgaagaggcccgacgaccactgcctgtgccctggccgctccggcaacggggaaggacacgactggcgccgccgccaccccgtacgcggccggccggccgccggcaagctggggtacggcggcgggtcgaccggcctaatctaa

SEQ ID NO: 6287 - DNA, 345 bp, Zea mays
  Peptide Sequence Number=SeqID_48066
atggatgcggcggcggtccggcaccggacggtggaggcgaacggcatctcgatgcacgtggcggagtccggccccgacggcgacggcgcgcccgcggtggtgttcctgcacggcttcccggagctctggtactcgtggcgccaccagatggcgcacctggccgcgcggggctaccgctgcgtggcgccggacctccgcggctacggcggcaccgccgcgccgcccgacgtcgcgtcctactcagccttccacgtcgtcggcgacatcgtcgccctcctcgacgcgcttggcatccacaacaagccaccaaaatctgtcgaggactacctaactgagagcacctag

SEQ ID NO: 6288 - DNA, 594 bp, Zea mays
  Peptide Sequence Number=SeqID_48067
atgccaggtaactgtattgcaaaagaatatggtacttatgcacctaaggagaaagggaagaagcatacttttttttggctttgggtagcatgtaaggaggccctaacgagttacaacagccttgataacccagccgcaggtgcaccagtagaacagctaaatgagctcgaggaagttttcaagaaggctgcaaagactgatactccagcagaacaatttagattaacaaggcagaacgaggagaggagcaagaaggtggccaatgacctcgccgcggcgctgttcgtggtcaccgtggaggtgaagcaggtcaaagcgtggctctccgatgcgcaggatgagctggaggccagcaacatcgaggccgacttgacgacttacattggcgcaggaatgatctgcccacatattgtcaacatctctgtcctgcttggaggaatcctctcgtggggactccaatgttacatccggagaaggttcttgttgaccggaaaggaaacatcaagatttttaagggtgatactcagatccgagagtggctttctcctggtgcatgaaatcttctttggaggatttttgaacccaacccgatga

SEQ ID NO: 6289 - DNA, 705 bp, Zea mays
  Peptide Sequence Number=SeqID_48068
atggcgccggttatccttgccatgaacgtgcactgctacggctgcgccggcaagatccgcgaggtcgtcaagaacctcctcggggtggaggaggtgtgggtgtcggtggacacggggctggtggtggtgtccgggacgtcgctggacgcctggctgctacggtgtcggatccagaacagcacccggaggcccgtcaccgtcgtcagcgacgtcgccgcggacacggcgccggagccgcagcacgccgcgccgccgcttggtgggtactacccgcaacaccactacagcggggtgctgcacatggccccgccgcctcttccggccggcgcctatccctactactactactacggcagcggcgacggctgggtgcccgcgccgccgcagcacctgctccagtacgtgccgacgacgacgacggtcgacggctacttcccctcgcgccagtacgtgcccaacctggcccctctacgtactaataaagatctcgaaataaaaagttaccaaaggtacctggaagcggcagatgtagtaggtgggcccgtaggtgcggtggaagtagtcgatgggcgtgacggcggcggcggcggcgcggacgaagatgtggcgcatgaaggcgacgctggtgttgacaagcgccgccacccggtccggccggaacaggcagagcttgttactttaacctcggaacaaaaggctggatag

SEQ ID NO: 6290 - DNA, 1608 bp, Zea mays
  Peptide Sequence Number=SeqID_48069
atggcacgaaaaggaaatcaaagtaagagtggccccaatcatgcttcacctaagtggaaaaatacaactgatggtgatgcactaagtacaccagaaagaggtgctgcagatagtgaaaatccgagttcacatgttcaaggcagatcaaagggtcctgaaggaagcagtgagaagaaaggaagaggcagcaaaaggaacagcacaaacaacggcatatcatcctctggaaaaaaacaacaaatggacaccggttgtgatataaacagttcagaagaaaaggagattccgccagaagcaccaagcccccaaaatgatgacacaattgatccattttctcttacccttccttgtaatcttgttggccttcctccaccagtcctcaaacaacctctcatcagccctaggagcgaggcgattgcagcttctgcgtttgccttcataggtctaggttttgctatcctgcttatatcagtgcttgcagtgttcctaagggacaatgcagacaataaaaaattcaatggttcttcaaggtactcagagcgaagctctggtagacaaggcaatatctttgaagaatttcagccatcagcaaatagcacctaccaagccagatatgctcgagcttcagatcgagatcctggtgatccttcaacaagtggacctgagaaagagcttacctctgaagatgaagtggctcgtttactgaactgcactgaccactattcagcattaggtttccgtcgatatgagaacatagatgtatcatctcttaagagagaatacaagaaaaaggctatgttagtccatcctgataagaatatgggcaatgataaagctgctgatgcatttaaaaagcttcaaaatgcatatgagattcttcttgattcactgaaacgcaagacatatgatgatgagttgaggagggaagacctcttgaactacttcaggcagagtgtttctcaaaagaatggaagaaacagtactttccaacatgggttcagcccttcagaaggtgttgatgaaggtccttatggtctttccagaagaatagcttgtaaaaagtgcagcgactttcatctttggatttatactggaagagctaaatcacaagctagatggtgtcaggactgcaaggagttccatcaagctaaagatggcgatggatgggttgaacagtcctttcaacctgttctatttggcatgctgcagaagcctgatttacctcatgcatatgtttgcgcagaaagctacatatttgatgtcactgagtggttcaactgtcagggaatgagatgcccggcgaacactcacaaggcaaccttccatgtcaatgccaacatggcaaagcagagcagtggcaaggcgagtacctcaacgcagagggctggtaaggccccaagtggtgtaaacatggatggaggaggactcaacgaggaagagttcttcgagtggttccagaatgcagtcaactctggaatgtttgaaactacattcggggcacaaggcgacccgacttctcctggtaacggaagcaatgccaagagtagcggtagcagcagcagcaacaacaatagtaggaaaaagaagaaaggaaagaaacagtggtaa

SEQ ID NO: 6291 - DNA, 741 bp, Zea mays
  Peptide Sequence Number=SeqID_48070
atgccgtaccaagagaggcatgtcgcgcagcaggcgtccattgttggaaacatggaggcatttggcttgctgcagaaggctagccatgaggtggttgatggggagaatgcggcggtgagtgctcaggcagttgtggagtttggagctggaagagggtacttgactcaggtgctggtggactgttatgggattagaaatgtcttcttggttgagaggcggtcctacaaacttaaggctgatcgaagcttgcgtcaaaatgaagatgttaccttggagcgtttgagaattgatattgaggatttgaaactgcacggaattgaggcattgagggggctccaatatctagcaattggaaagcatttgtgtggacctgccacagataaatctttcctctcgggactaggtatcacagaagaagattttcatgccatgacatggtttagcagctgggctgtggatggtgatcatagctacccagatgctcctgtggaggttgaagacacgccctctgaagtcagaggaccagagaagcttgatcaggaggccgtcggaattgagagagtaatccgaagtataccagcaggggagagggccactctgggatccatgtgtaaagatatcattgatacggggaggctactatggcttgggcagaagggtctggttgctgatcttgtaagctatgttccatccagcatttcaccagaaaaccgtctgcttatcgcaaaatgtacatcttga

SEQ ID NO: 6292 - DNA, 555 bp, Zea mays
  Peptide Sequence Number=SeqID_48071
atggaggcggcggcggcggcggtcctgcaccggacggtggaggcgaacggcatctcgatgcacgtggcggagtccggccccgacggcgacggcgcgcccgcggtggtgttcctgcacggcttcccggagctctggtactcgtggcgccaccagatggcgcacctggccgcgcggggctaccgctgcgtggcgccggacctccgcggctacggcggcaccgccgcgccgcccgacgtcgcgtcctactccgccttccacgtcgtcggcgacgtcgtcgccctgctcgacgcgctcggcatccacaacaaggtgttcgtggtgggtcacgactggggcgccatcatcgcgtggtacctctgcctgttccggccggaccgggtggcggcgcttgtcaacaccagcgtcgccttcatgcgccacatcttcgtccgcgccgccgccgccgccgtcacgcccatcgactacttccaccgcacctacgggcccacctactacatctgccgcttccaggtacctttggtaactttttatttcgagatctttattagtacgtag

SEQ ID NO: 6293 - DNA, 1854 bp, Zea mays
  Peptide Sequence Number=SeqID_48072
atgcccgccgccgtcgctgctgctgcggccgctgcgtcggccggtgcggtcctgctctgcctgctcctcaactgccgcccacagccggcgctggacgcccagagggagagtgaaaggggggaggacgaggcgtcgccgctcctgtcgggctcggggccggggagcgaccgcgaggaggaggagccgtggccggacagggcacccgtgacctgctgcgaggcggccgcggtagccgcgcgcacggcgcggcgcacgtgggagctcaccgtcgggcggtggggcctccacgggctcgccttcggtatcaagcgccacatgaagcgccaggtggtgcttgactcacttcagagttcagacttcgtacggtcactgtactacgacactgcgcttgcggtgcccctggcgtacccagtacttgagcctgagtcaagatcggctggtaatttgcagcatgagtacagtggaaatgactgtctccaacttaaaggacatcagacatatactgaagtatcttctctccttgagcacttgaagctttgcatgttcttctcaaagaaatctttttcagcatttctgaagtttggtgggtacaaacaagaagacattcttattcacaaggctagggcgaggctcatgcagccttcttttgcattggtgtgtgacaaaagaaccaagtgcttgctgcttttcattcgaggtgctatcagcactaaagagcgcctgactgcagcaacttctgctgaagttccttttcaccatataattctatctgaaggaaagatcagcaatgtagttttagggtatgcacactgtgggatgcttgctggagctcgttggatcgcaaaacttgttattccccatcttcataacaaaatgcaggaattttctgggtaccacataaaggtcattgggcattcaatgggagctggcattggagcgattctgacttatattctccatgagcattatgagttcttgtcatgcagctgtctggcatttgctcctcctgcatgtatgacatgggagctggcggagtcaggaaaggatttcatcacttctcttgtcaatagaaatgatgtggtaccagcattttcgaaagtttcttcggagagcctgcgatctgaggtgatggtttcatcaaagctggatgatgtgcaggatcactttcaccatggtttattcgccactataagccagcgtgttgccttcatcaggtcccatatgctctccatctctcactcaacagggaagattgcagattacggctctagtatttctgagcctttgcttaaagatacaataccgcccacagcaaatggacacggcgttgactgcagccagcagcaacaggtggttgcctctgaagaaacggtcgttgtactggttaacaataacgaccatttcaccagtttgaaggccgctgattcaggcgtcacatcacaagaaggttcagacagcaacgcggcatcatcggacagtccacaacggccgcccccgccggcagacgaagccccgaaccagaatggcaccggaaaggataagcagaaagaaccggtctcagcgggctgctcgtcgtcgcgccagctcttccctcctgggaggatcatccacatggtcgcgctgccgccgcagcagccggacccaaactccgacgacggcacgagcagcggtgaggtcgttggcatatacgagacgccgaggggtttgtacgggaagatacggctcgcgcccaacatgattaaagaacattacatgcctagctatatacgtacgatggaatcgttgttggaacagctccagaaggacgacgatgatggcagtgtatgtacatgtaccgcaccaagtgacctgtga

SEQ ID NO: 6294 - DNA, 717 bp, Zea mays
  Peptide Sequence Number=SeqID_48073
atggctggcgatggcgagtgcagcagcatgcatgaacagagtttccggtggccttccgatcaggtcgatcggtcgcggtcgttaacgagagcggccgcattgactaaaaaaacgagaccggccgcccgcccgccgggttggtgggccaactcgcgacgcgcattgggcattggacgggacgatcaggccaacccaaacgcaaccgcagctacagcacagcacagcacagcacaacacgtcggcatgtatccgcccaaggccagcggcgatccggccgccggggcggcgccggtgactggcttccccgtcggcgggcctgccgcctcctcccagtggtcctccggcctgttggactgcttcgacgactgcggcctctgctgcctgacgtgctggtgcccgtgcatcacgttcgggcgcgtggcggagatcgtggaccgcggcgcgacgtcgtgcggcacggcgggggcgctgtacgcggtgctggcctacttcacgggctgccagtggatctactcgtgcacgtaccgcgccaagatgcgcgcccagctcggcctccccgagaccccctgctgcgactgcctcgtccacttctgctgcgagccgtgcgcgctctgccagcagtacaaggagctcaaggcccgcggcttcgaccccgtcctcggctgggaccgcaacgccactatgctgcctccgtccgcacaggggatgggccgctga

SEQ ID NO: 6295 - DNA, 333 bp, Zea mays
  Peptide Sequence Number=SeqID_48074
atggcggtgcgggtagcattagggaaatctagccactgggtgtggcagcaggaggtgggtgtaccaatttacttagaaggaacagaagctatggaagaggcaaaaagcaagaatattgaaaggatacattttagtggttcttgccttcttgacaccatggtgaagctaacaatgatagctcgtgtcaccgatggacgtccactagcagaagggggctgccaacataagttggatccaaattataatgctatgaagactctacaaactttactttttaaggaatattgggcgaagtctcttcaatacacgatccaagggctcatggcgccttag

SEQ ID NO: 6296 - DNA, 288 bp, Zea mays
  Peptide Sequence Number=SeqID_48075
atggaaatcatgaacctggtagatggctgcgggggaggggaacgcgtgagcgcaaggggcaccttcgtggttgctggtgggcgacggcgcgaagcgaacgtgcatggggccggggctgcgctcggcgccgccggtggcgaccgaggcatgggtggagaggttccagcggaggcggtggaagggaggttgacatgggtggtgcgacaatcgtgtggcggatgtcacggcaatcacgcggtggctgtcggggtgcgggggcatggctctgtcaaagaccttaacccgtag

SEQ ID NO: 6297 - DNA, 276 bp, Zea mays
  Peptide Sequence Number=SeqID_48076
atggccgaccgccttgacgtgttgctatatctcggccccttcgtcgattcgcttaacatcagcccgcacgatagtgtccagacgcttgtcaagtttctcgccagcaagccgctcgccacgcgcgcgacgccgtgtttggcccccaccgccgttcggccgccttccctgccgccggcgtcgagctcgcctctgcgggaccgtagcccccacccctcattggctctctgcgcgagcgtgatcgcgcctccgcatcccatgttcagtggagccctaaag

SEQ ID NO: 6298 - DNA, 2691 bp, Zea mays
  Peptide Sequence Number=SeqID_48077
atggatgtggagaaacctgcttccaaggggcatggtttctttgcgctcttcgattggggaaagaagtctaagaagcgcctgttcgtcgggagcacgggcagttctccaaatctgaagaatgctgcagatgggaaggatattgatgatagtacaccaagcacacggtcaaatttgatccttgaagacaccccaagcttgaaggaaagcactgaacatagctgctcatcttcagtaattgatgaagaggctcattcaagaaggagcccgactgttgtggctaggcttatgggcttggattctatgcctgcggcaagctcaaccgaatccaatcccatgccattaaccgtgcaaccacctttccaaaccaacagccatgaagattttattggcagaagttatgttggtagtccccttaagacgccgggtagtcctattgatcggtttaaagtggaagcactgcctcctagacttgccaagaggacagtatctgttgcacagtataagttgctgtctcccatgaaaaatcctaacaatatatcaagcaggaatgcagctgatataatggaagcagcatcgaggatcatcagacctggagtagaaaatatcagtccctacagagttcatgatgttgggagtgcaattgctgcacgtgcctacaacccaggagagctcataggagcccaacaaaggtcacagaaacttaatgaagcactgagaaaatgtgatggccctgcatcttttaggccgccaagtggaaaaccttcagatggaaggttgagaggttcggagggcacctcgacgtccaggatctcacaggcaaatgtatgtgttccagttggtccaaaggtaaaatccggcgatagattagatactgctcgagctatgcatgcccaggaaaaaagaggcatgagaaaaggtggtagaaagcttgaaactctcaagaaccctgaaaataacatggctaaaagaagtgggttgaaccgacaaaaggatagtaaccaaatcggcacaacaagttcatccagtgtgctcatgccaaacagcagaaaacagaatgctacagccaccaaacataaggtgaactcgaacccagcaacccccagtagacaacggagcaatatccaccagataaatgcccatccaagaaaggtgagggtggccagcacatttgctggaaacagtagtcaaggtagcagaaaagtggacttgcagccaaatgctcatgctaacgtaagaaataattctgtacccaaagcaatcccgaagccaagaagattacaagacaggagagcgtactctgatacaagccagtcaagtgatagtattaattctgagagaagccagaggcggattcggcacaatattgtgattgatgagcagtcatctttttcaacaaacaaaaagaaagtcagcactgagattgtttcattcacatttacctcaccagttgataagtcactacatggcatccacttccccaatcattcagtatttacctcaccagttgataagtcactacatggcatccacttccccaatcattcagtggaaaaacagtttttagggaatctgaacactgtgtcaacttcaagcaatacatcaaacactaaacttgatgtcattgatggtgattttttgggactcctgttggagcagaaattgagagagttgacatctggtgtgagatcgccctacactaagacaaccaaaggtgttcaagcgcatcacacttcaacagcttgggaagatatggcatcagcatgtgaaacatctagcattgcttctactgattatgatagggagtcgttacaatctttcaatgatggaaaagctactctcccccagaccgatcttgcttctagaagtctccagcctgtgaagaagtacgatcacgatgtcacggatcaagcagagccgcctgagcgtctcggccgaggtccactcttcacatgggaggcttctatttcaaccgaaacctgtagctcatcagagagctggaggagtgcaaagggaacaagattgtttggttcagccgaaggaggcagaacctgtgactcgacgcgctcgagcaagttcctagaagcggacgcctcgtcagagtattccgacacagcctcatcgatcacggtggctacgacagagatccctcgatcagaaagcaacagttcatgtcatatggatggtagacaggatctgcagtttataagagagatactgaaagccagctctcctgcccggcacatcttctcttatctggagcggttcggcgattcaggtgttctggatgcgcacgtattggaggaactaaacggggatattaggctgttgggtggtgaagagcgcaagggttacaggctgaggcggaggctgctcttcgactgtgtcaatgaatcgttgagcgcgagatgcgcttactacttcaacggtggctacggcctgtggttcacgggaacggcggtcctgcagagcttgtcggcagaagggatccaccgagagatgaccggcctgcaggtcggcgaggagtggatggtggacgagctcgtgtacagggagatgagtggtcctctggggagctgggtcgacttcaaggtggagtcgtaccaaggcggcggagacatggcggcagagctgctaggctccttgatcgacgaagtggtcgctgatcttctgaccaccggctcgttctcgtag

SEQ ID NO: 6299 - DNA, 531 bp, Zea mays
  Peptide Sequence Number=SeqID_48078
atggccgctcatcccgtcgccgcgcccaccgctcccccaccgccatgcccccgcctgcctgtgcccccgcgacatcccagccccaaatcgcgtctgcccctcgcatcctccacctccatcccctccccgagccattctctcgaccgtgatagccaacagcgacgacgcgagcacgacccacctccactgcctccgcctcgccccagacgtatgatcctctccccgccctcgcaaccgcccccgtggccccacccctcactccgtgagaccaacacccgcagcgcttgccaccgcccaaccatggagataaggcagtacgccacgaccagctgctccaaggagcatcagaagatttccgctcttggacgcatgtctgattttgtccccctactctgtttccttcgatccccaatccccttcccagcttcagaggaaccacgggttaagaagttttttgtccagcacatcgagattgtacaccattctaaagttattgtcttattgaagatgccttacaatctcttttggtaa

SEQ ID NO: 6300 - DNA, 579 bp, Zea mays
  Peptide Sequence Number=SeqID_48079
atggcgagcagtgagcacgtgcgcatggagcagacgcgcttggcagcgactccatgggcgcgaaaagaagatggggcgcgagcagggacggagaggatttgggcgcacgccaggggaagcgccatggagagagagggggcgcggcttgggaaagcagagaagagaagggtccgcgtggaggagaagccggggaggagctccgagctccgagctgcggccggaaccagaggcaaggcgagcaggcagccgtgggagcttggaggaggtagccacggtgtgcagggaagtcggcgcgcagaggaggaagagagccgagctgagggagagagagcatggagaagcgaggagcaggggaatgggcggcagggcgctcgcccatgggagccgcgcggtcaggcaaaggagaagcgctcggctggggataagaagccatgttcagcggtggtatttttccatgggctgcgcaacggtgaaaatatcagaagggaagagaaagcaatagaggatagagatgctggatattttccattttctctctcgcaaaagcgcttgccaaaatatcccggatctaaaatttaa

SEQ ID NO: 6301 - DNA, 150 bp, Zea mays
  Peptide Sequence Number=SeqID_48080
atggcacttcaaaagggacgggataagcatcaaggtaaagatcaaggggtgacaagggttaaggtgataacaggcaaacacaatcaaggaggtatcttagacaaaacttgcgaggcatcaaagaaggggaagcaatcaatggtgaagtag

SEQ ID NO: 6302 - DNA, 384 bp, Zea mays
  Peptide Sequence Number=SeqID_48081
atgggtggagctcagatgggggcaatgctgccatgggagaggagcttgggtgtcctccatggctgttcagatctcaggcgcagcaggggtttatttcaggcgctgaaacatggaggagcagaggaaggaaagagggagattgcagggggctccatagagaagcttctgtgcggcgtccattgcaggggaggtggagcttgtagggaggggcgccgtgcaggagaggggcgcagggaactcagactggagctggacggtgtcaagttccctgccatgggggcgctgcttgggagccatggctgctggccgagcagaggcgtcggggcctgggcgtctgctgcttgctgcgtttgcaaaagaaggtgtcgtggggagcttctgtag

SEQ ID NO: 6303 - DNA, 261 bp, Zea mays
  Peptide Sequence Number=SeqID_48082
atggggagggtggctgaaaaaacaaactggagcagagagggcgccgtaaagggggcatggcacagagggaaggcgagctcgccatgggagcagctagaggcggccatgggaaacatcaagggggcggtgcccagcatggggagatggtcggcggcgtccatggctgggggcaggggtgagctcatggctggggaggacgcggctggcgagctgcaggggaggaacagctctagcagcaggcgtccatgggaagggaggtag

SEQ ID NO: 6304 - DNA, 324 bp, Zea mays
  Peptide Sequence Number=SeqID_48083
atggcgacgaggtggcttcctccgcgggattgggcttgggatttgacaaggggaggtgaggtccccaaccatggacggcggagctttggctccggcgagcctgtaccggccaagatacgaatgactggtgctctggagtggttgacacctaattcgacccctaataaccatttcccctcgaccaatttcaaggttctagcccctaatctctctgcccacggtgacagcgcgatcaacggacaacccgaagcgttcacggtgatcctacatgttctagctcaactggccgggtcgagaagcatcacaagcacacagggatgctaa

SEQ ID NO: 6305 - DNA, 387 bp, Zea mays
  Peptide Sequence Number=SeqID_48084
atggcacaagctgaggctttacagactactgacatgacatctaaagtgacgccacacaattcaactacgctggaggagatggatcctaagcaggaaaataacaagttagtaaaagaaagtatcttctatactgtagaaacacttggtgtagtgctggcatacatggggtctctggaatctcttttaatgtatcataaggatgttgatgagaagctcctctatgaaacattcagtgtatttggagtgattgtaactaatcctaaggatgggttcaagaatggttctgatatgcctatagagatgatgatggcgagagtgacgaagaaaatcgatcggattcccatttatttttacgtgaaagatgagatcttaaacaactacttctga

SEQ ID NO: 6306 - DNA, 171 bp, Zea mays
  Peptide Sequence Number=SeqID_48085
atgaaagacttggattcatctgatgggggaacaaaccgactactggagcaaactagggttgctaagattggtggacacagggtggcaggggttccaaatggcggcactaagcgcacgcttcagcgcgctgaagcgctaagaggccgggtaacgcttcgatttcgggcataa

SEQ ID NO: 6307 - DNA, 1221 bp, Zea mays
  Peptide Sequence Number=SeqID_48086
atggatgtgccaaacgcaaccgtggaggccgagccactgctcgtgccacgcaggtccaccgaaggtggctcggcggcggcaaccgagtcgaagagacttctccggctcgctgggccactggtcctgagcttcatcctgcggaacgccgtccagatggtgtccgtcatgttcgtcggccacctcgggaagctccccctcgccggtgcctccctggcctcgtcgctcgccaacgtcacgggcttcagcctggtcgccggcatggccggcgccctcgacacgctgtgcgggcaggcgttcggggcgcggcggtacgcgctgctgggcgtctacaagcagcgctccatgctggtgctggcgctcgccagcctccccgtggtgctgacgtgggtgttcgtggagcagctcctcctggccatcggcgaggacccggacatcgccgcggaggccggcgcgtacgcgcggtggctgatcccgtccctcgccgcgttcgtgcccctcacctgccacatgaggttcctgcagacgcagagcgtcgtggtgcccgtcatggccagctccggcgtcacggcgctcgcccacgtcctgctgtgctacacgctggtgtacaaggtgggcatggggagcaagggcgccgcgctcggcgccgccgtctcctacagcgtcaacttggccgtgctcgctctttacgtcaggctgtccagcgcttgcaaggcaacatggacagggttctccaccgaggccttctctttctctggtctgcgggagtacgcgaagctcgccgtcccgtcggcgatgatggtttgcttggagtggtggtcgtttgagctgctcgttcttctctctgggtttttgccaaaccctaaactcgagacttccgtcctgtcaatatgcgtcaacaccgctattctgctgtacatggtaccgctgggccttggcacatctgcaaggtgttcgaccatcagggctgaacagaagattggatgtggcaaacagaagattggagcacgcgtaaacctcggcgccttttacatggttggcattccaacagggctgttgcttgcgtttgtgttcaacctaaatggaatgggtctttggcttggcattgtgtgcgggagcatcagcaaactggcgttgctcctgtggattgcactgcgcatagattgggagagcgaagctatcaaggccaaggacagggtcctccgttcgtcagggcaaacataa

SEQ ID NO: 6308 - DNA, 1398 bp, Zea mays
  Peptide Sequence Number=SeqID_48087
atggaggtgccaatgaactctacgcaatctggtcctcacttccctgtgcagcatcagtccctctcattagacatcaagggaaataaaacagatattgttatcagtaaatatgaagatacctttctgctgattgtggcacaaatcggctgcatgggaaccatactagctgccaagcatctccaagtcaagatccaaatcccagttcatcatcccgatcccgtcgtagttatgtcggctagaatcgagggaggcaccttctcctccgactcaacgcagtctccaatctggacgtgctgccctgttactacaccaccatttattgatctatcaccaggggagacattgaagtcaggcgtggtggagaagcaggttggtcgcaagcgccgagccaatatcgattccgccttgaccttggctcttgaatcccaaacccgagccctcctatcggagttggacaagaggctgcaaatcctcgacaacaaatgggaatctcgggtcagcactctggagtccaaggcgacggaggcggcgcaatccttgtccgaattctcgggcacccatcgtgctaatgtcgaggctcaccttaccgccgcggatgcatccacggacaccaaaatcgggcagatcgaggccgacctaggttaccgggtggcggcactcgaatctaccgtgggcgaagatctccactcctccatggattggcttcgatcggaagtgtcgaagatggagatccagtggtctcgtggcgcgcgcgccaacgacttccacatgtcgggcgtgctgggcgcgcatgggtcgacaccgggacgctcatcggtcgccggggatgtcgtcgacatctctcgttttgggcaccgtaatgacgcacatcaccgggatagtggaccttggcaccccaatgctgatgcccgctacccggtcacggtctgtcgaaccacaacttccatccatgtcatggcgacaattctgccagtcatgctaagtgtgctgacaattgccgccatgacatggatggaagttgtggttccgaataaaatatcttctaagtgtgctgacactatccagttacatgctgtccaagagttgtgggagatattttattcggaaccacatgaatcagagggcgagtttgaagattctgctaaaactttcatgatcctgctgtcgacagaggcaatgtctacaaagaaggctccatctcgatcctttcggcttcaaggccagcttcagggtgagaacatgttgatactcttggatttgggcagttctcactgccttttaaacgcttctcgcacttcattggtgtctgggttcatgagtttggagacacccctagtagtcacagttgctaatggcagaattatgcactgtccattggagcttccaaatgctacctga

SEQ ID NO: 6309 - DNA, 744 bp, Zea mays
  Peptide Sequence Number=SeqID_48088
atggcatttgggctgacgggggctcctggcacatttcagagggcgatgaaccataccctagctcccttattaaggaaatgtgcactagtattttttgatgacattctggtttacaacgcatcccttaatgagcacatcagtcacttggaacaggtgtttgaactgctctctgctgatgattggaaggaattgcgtagcttcttgggcctcgccgattattatcacaagtttatacgccactttggcattatctgccaacctctcactgcattgctgaagaaaggggttctgtacatttggaccagtgaccacacatgtgcatttcataccttgaagactgctcttactcaagctccagttctgtccttgctggattttgcttccccattctttatagaaaccgatgctagtgcagttggagtcagtgccgtgcttatgcagcattgtcacccccttgcctttcctagcaaggtgttgggtcccaaatctcatggcttgtcaacttatgaaaaggagtacctcactgttatcctgccagtccaacagtggcggtattaccacgagaatgcaatccgccgatccagaacgagcctttcgctgcttaggctagtgacttcagcgtgcaccttcgccatgttctggtttgctatctgcttcttccgaagtaaagatcaaaagctgctaggcttgtttagggagcttgctttggatgaaattagaggcagtgcaagtagtgggcattag

SEQ ID NO: 6310 - DNA, 1902 bp, Zea mays
  Peptide Sequence Number=SeqID_48089
atggcaccttgtcaggatcgtctccagtgcagagatctcccctctgttgaaaagatcttacgctcaggtggtgagggagggcttcagaatttggtccaagacaaatgggacttcgaggtcttctttaacaatgtagggtatgagctgaagttcactgctgaagggccccaacagcaagggtcagttttagcaggctcatcagctgctggaaactctgatgataaggactcttcaagggacagaggaaattctagaagaaaggaagaaaggaagggaggaggaagatttgacaggaaagggaaggaggctgaaatgaaacatgactcaagtcatggtgagtctcaagaggacatggaaaacatcgagagtttgggtttggacttggaaggttctataccaaatctccctattgctagatttcacccaaaggataagttcgctaatgtgcagattttgctggacagtcaactgtctgaagtggtcgacctggaggaagtgtgtaaaattccagatgatggctctatgatttttgaaaagattaaaaaaactttagagggtgagccccctgatcacaatgtgggaatggaatccagaatggtccgggaggggaaccaacagggcataaaagatgggttgatgttaagtaaacaacttaaaaacaagggagggctgaagatcgctgcaggaacagataagaatcgaggctccttggggcagcaaagtgaggttacagaggtcagttttgataagggagtggatgaagatggtctggagagtctaactgattgggatagtgatttttcgatgggagatgtggagcaaaggtggaacattgctgcaagtaagaaactgaagaagaaaaaaagcaaaaggaaataccccgtgatgagggcaagttctagaattcctagagatggcatttctattctggagaaagctactaaaagagctcaagagaaggacgctccacaagcgccggagctcccccagccgagcaccctcctctgctcggagcgtagccgcccctccccgccggcgcacggcggtgcggccgggtcccccttccccggctccgctcagggcgcgggcgcggacttcccagccagcggcctccttctcacagtcgccgcctcccctgtgcccccatccggcgcggcccagatccgcgctcgccgaccgcgtctgccgccggcgcgcccgcccctcccctccccgctggagcacgggcgcgacccccccccccccttcgccggcgctgtcgccacgggcgcagccatgggatccgctgccccagccccaccggatccgcgcgctccctccatgcggcatgccgccaaccggcctcccttgcgtggcccacccccgaggcgggtcctcccgtggatgccgccgccacggcgcgcggacgcacgcccaaccaccgccggctgcgctcccccacggccgtacctccctggttccggcgccctctcccttccccaccacgtcgtcgcggctctagaggcggatgtctctgccgagcaggccgcgaacgccgctgctgccctggctgcgcgtcccgccgcgcccatgggcgccagcacgccctcccctgccgtcgtcgtggccttccccttcctctctggcgccgacgtcaccggcccctacacgtccagcgacgccgccgcgtgcacggctagtccccccgcgcccacagcggccgccgccgctgcggccaacgcgcgcggctgggcaccaaccaccgtgcctccagcgtccaacctcttgtcctcgcgcttgcagcagctcagcgtccgcgccaaccggtcgctgttcggcgcgctgccgccgccgctggccagcatgcagtcgctccaggtggccttgctcccttccccaacactggccgccctgatccgctga

SEQ ID NO: 6311 - DNA, 234 bp, Zea mays
  Peptide Sequence Number=SeqID_48090
atggcgaagccaactacaccccaagttcctccaattagtcagctaagggcgtcccataccactctcatggttgcactgttttcctgggtggtcatccagcgaacaggtccttatggagagagcactggcataaagctaaccacaataacccaaaaggtaatcaaggataagatgctcagggccttcaaccatgtagaacttgaagatgtggatcacttgatcgtcgaagcttga

SEQ ID NO: 6312 - DNA, 1050 bp, Zea mays
  Peptide Sequence Number=SeqID_48091
atggagaaggagagagaggcatcggtgcctatgaggactctgcatgactatgtcccgctccaccatgttgtgctgctcctgctcacttgtgtccacacgcaggcagcatcgtcagccatgtgcggcctagcgggtcgtctcagccacgaggcgtacatcgtcccgcgcgcgccggtggagccattgcccatggaccagctgcctcgcccggtcatcttccacgacggccgcctggtgcgccggccgacgccgctggcggcgctgctggtcgtgctgtggttccccgtgggcttcgcgctcgcctgcctgcgcatcgcggcgggggcgctgctgcccatgccgctggtgtactacgccttctgggcgctgggcgtgcgcgtgcacgtccggggcgccccgccgccgccgcgcgccgagcgcgccacgggccggaggggcgtcctcttcgcctgctcgcaccggacgctgctggaccccatcttcctgtccaccgcgctggggcgccccgtggcggcggtcacctactcgctctcgcgcctctccgagttcctctcgcccatccggacggtgcgcctcacgcgggaccgcgcctccgacgccgccatgatccgggacctgctggcggagggcgacctcgtcatctgccccgaggggaccacgtgccgggagcccttcctgctgcgcttctcggcgctcttcgcggagctcacccacgaggtggtgcccgtggccatggagaaccggatgagcatgttccacggcacaacggccagggggtggaaggggatggacccattctacttcttcatgaaccccagcccggcatacgtcgtcaccttcctcaacaagctcccgcccgagctcacctgcgccggcggcaggacaagccacgaggtggccaactacatccagaggctaatcgccgccacgctctcctacgagtgcacaagcctcaccaggaaggacaagtacctggcgctcgcaggcaacgacggggtggtggccacccccaagccgccggcgccggccaagaaacccaatggctgctaa

SEQ ID NO: 6313 - DNA, 252 bp, Zea mays
  Peptide Sequence Number=SeqID_48092
atggaggatgtagatgtgattgcttcctctgttcaccttagtgggaaggcggcgatgtcgttgctcaccaatcttggtggtgaagatgacagagtcgacacccttgatctctatgatgaaggcatcccaaacttgatgaagcctcccacaccaaagttcatgttagagaagcaccatcttcgatgggacaccggcaaggagggcctctggggcccaccgatcctcatggaagttgatgtcactataccataa

SEQ ID NO: 6314 - DNA, 726 bp, Zea mays
  Peptide Sequence Number=SeqID_48093
atggaggaggcggtggaggccgtggtcgcggccggagtggagccgttcccgacggtggacaagtgcgacgcgtcgggccgcggcgcgcacgccgtggtggcggacctggacggcgcgctgctgcgctcccgcagcgcgttcccgtactacgcgctggtggccttcgaggccggcggcgtgccgcgcctgctgctgctgctgctgctggccccgctggccgcggcgctgcgggcgctggcctcggagtcggcgtgcgcgcgcgtgctggtgttcgcggccacggcgggcgcccgggtgcgcgacatcgagtcggcggcgcgcgccgtgctcccgcgcttctacgccgccgacgtgcacccggccgcgtggcgggtgttctcggcctgcgcacggaggcgcgtcgtgctcacggccgcgcccaggatcatggccgagccgttcctcagggactgcctcggcgccgacgccgtcgcgggcaccgagctcgccacgtggcgcggccgcgccacgggcatggtggacagccgcaggggcgtcctcgtcggctggagcagggccgacgcgctgcgggagatattggccggcgacgacgacgacgacgccgcgcccgacgtcggcctcgggaacagccgctccgactaccccttcatgagcatgtgcaaggagagtggagcattgttgatagagtttgtggttgaggactcactagagctagtggaaaactag

SEQ ID NO: 6315 - DNA, 444 bp, Zea mays
  Peptide Sequence Number=SeqID_48094
atgacgattgaggcacccgctccggcctcggcactctacaacgctcctcctggtggtcaggcgccttccgggggccatggccctcgcacctcatcgaccgggggctccgcccgttctcctgccaccacccctgcggcccctcatccggcctccaccaccgacggcaagcgtcacccccgcaagggcggacgcaggggtggcagctctacgcatggaggttccaccggccgggggcggccagggctggccgtcggtctacaacccctggaccggtaccatctccatgtggccgggtcaggccccagtacctcccatcctcctgtgccggcgccagctctcctgactgcacccacctacggagctccatcgccacctgccttcggcatgcccccatacagcgtgcccccgacgaccccaactccacctcagcgtgcccccgactga

SEQ ID NO: 6316 - DNA, 213 bp, Zea mays
  Peptide Sequence Number=SeqID_48095
atgtgtagcggtgttcagggcctctgcctagtagctggcagagagagacgcctaaaagaggaggcaacaggtcatgttggtggtggtgcaaatgatgtgtttggctcgggtgttctaaggagaggtgtagggacacgagagacgcaactggacaccatggtgaggaagaaggtgggggcaaaccaagctgggaggacactcacgtgtgtataa

SEQ ID NO: 6317 - DNA, 336 bp, Zea mays
  Peptide Sequence Number=SeqID_48096
atggcgccccacatgctctgtgacgacggtggctctcagcctcttacggaagcaagaggacgtcagcaaggactcaaccgctccgacagctgtccctccgctaggctccatcgctcctccgacggccacgacatcacaccagctgggcgccaaatctctgaggctgccacaacggcatgttcgaaggccgacccctcggaagggttccacggccgcctcaggctactcgggctccgcacccactacggatcaggggttcgaaggctggcccccgaagggttcacagccgcctcagacacagagcaagggatgaccatgggtacgttcgatacataa

SEQ ID NO: 6318 - DNA, 321 bp, Zea mays
  Peptide Sequence Number=SeqID_48097
atggtcaatgcggccaaaaatgggccggcagtaatggcggtggcaggcgggcaggagcagcggccctgtcgtcagccgagctcacgtcccatccgggggcagcaggagaaccctctctcacggcgtgaagacaacgcgcccgcgctctgttcctcgaacggctcacgcacgcgcaacggtcgccccgtcgcattaactccgcggcgggacaggcggcgcctctggcaggagaagtgggcgacgcttcgccttcgccataatgaccacatcaaaaaagggaccgagaaagggggataccccgaaaaggatccttccccgtga

SEQ ID NO: 6319 - DNA, 633 bp, Zea mays
  Peptide Sequence Number=SeqID_48098
atggctccccttgtgacgtggtcggtccgaaccctgggtcgggcgaggcggaggctcctccgaggtcgaggtcgagtctgtcttccgtggtcgaggtcgagtccgagccccgggtcgggcgaggcggagaccgtcgtcttccggggccgaggccgagtccgagccccgggtcgggcgaggcggagaccgtcgtcttccggggccgaggccgagtccgagccctgggtcgggcgaggcggagttcgtcgtcttccggggctgagcccgagtccgagccctgggtcgggcgaggcggagttcatcgtcttccggggccgagcccgagtccgagccctagggtcgggcgaggcagagcttcctatggcgcccgaggccggacttggccgctgtcagcctcactctgtcaagtggcacagcagtcggagcgacacaggcggcgctgtcctcttgtcaggccggataaggtgtcaggccacctttgcattaaatgctcctgcgatacggtcggttggcgcggcgatctggtcaaggttgcttctcggcgaagactgggcttcgggcgagccgaagcttcttgattttcacactgagaagctgacaagaagctccaacaatcaggggctcagggcttag

SEQ ID NO: 6320 - DNA, 402 bp, Zea mays
  Peptide Sequence Number=SeqID_48099
atggacaattcacttatattatattctaacagcgacgacacccttgctgggccccacaatgctcgaggattagagcagcgtggccgggtcgttctacgtgacgcggtccctgcatcacgcgagggttgggcggtggtagagatctccctaagggtcgtgacgatggagctacggttgaaggggaggcagtcgggctcgagaagtatgaccctgagtcttgtgactgcgtgcgagagcttaaggaggaggtcttgggtggtgaaggcgacgacgaggctcgcctcggcgatcttctatgaccaatttctcctcggtgacgcctgctggtctgcgggtttcgacatgggcacatggcatggcggtgcctacaaaagcggacctctgacgggggtgctcaaatga

SEQ ID NO: 6321 - DNA, 465 bp, Zea mays
  Peptide Sequence Number=SeqID_48100
atgaaccaccaacctcttaccgactttgaggtcttccatgatacaggatggaggggctcgagagacagccaacctcctgtggcctcccatatcctccttgggaatcaacattcaacaatgaggtgtggggcggtctccgacatgcgcctacataaggggcaacaagggttttgcggccatccacaggaacctgtgctattgaaggtccacatcaacacgtcttctatgttctgggtgagctccatcgattgcaagtccagagctaggtattggaagtccattttccttaatgtgttaatcgtcaaagcattggagaactattttggtggaatctctgcgctaaactacataaagaaaattgtcgtggatgcttctacccttgatgaaggcactttagcacttggatatgatgtccgctattactggggccagcctaagcaaggacagtttcataaaaaagcttag

SEQ ID NO: 6322 - DNA, 849 bp, Zea mays
  Peptide Sequence Number=SeqID_48101
atggacacgctcccagaaggcgtcgtgcagcacatcctctcgcagctcagcaacgcccgcgacgtggccggctgcgccgccgtcgcccgctgctggcgcgactgtgtggccttccttccgtcgctctattttccgcggggcgcctttgaggccttggccggcggaccggcgtcggccgtggccttcgccgacgacgccatcggtcggatggtcgacgccgccgcgcgcctcgaggagctcgtcgtgtactgccccttctccgcgtccctgctcccgcactggctcgcggcgcgggccgccacgctgcgcgtgctcgagctacggatggactccgccgccgctgacaagtcggggcacctgaatctcgattctatcggggtggccgcgggcctcgaggagctcaggctgtgggggctcacgatgacgcgcgcccccgcgtgggggccggatggagcggctccgcgtgctggagatccggtcaacgacgtcctcgccgcctgccccaacctcaccgacctctcgctgctcgggtgccagtgcgacggagaggcggtcatctcgctagcctcgctcgagcggtgccggctcgacttcctcggctctggcaactcctctctcaggttcgccgcgccccgcgtcgagtcccttgaggtccagggtttctcatttatctatctgcaaggtggcaaccgtctcaaacatctcacaatctccaagaacactggtagtgtgcatcatgtcgagatggggaagctcccggagctggaccagctctcgctgcgcggcgtccagtggagctggggcgccatcagctcggtgctgcagtgcgctagcgaggtgaagcacctg

SEQ ID NO: 6323 - DNA, 1332 bp, Zea mays
  Peptide Sequence Number=SeqID_48102
atggggtgctcgctgctggtcagtatggcgtcccttgtctgcctcgtcctcttgccggtcatcttctgtcctgattgtctggtttatttcaattctgcagttaaggggaaaccgtctaaggccatagtggattcgcttgcagtgtttgggttgtaccttggttctcaaggacagtttagtggccctggcaccatatttgcactgccattggacataggaggggacatgggtggattttgcaaaggtggagggcattctcactcgcatgatcatgagggtcatgatcatgctcatgctcatgagcatgcacatgcacactcactgcaagatctatctgtgggtttgtctgtactatttggcattgtactgttttttattgtcgagaagattgtgaggtatgttgaagacaattctcaaaatggggctcatagcatgggtcatgggcaccatcatcataatcataaacggcacgattctagcgataaagccaaattgaattaccaaaagagtgatactgatggtaaagacattgatcatgctgaagaggaaccttcggttaatgataccactggaaaaataagtgatggccatgaatcagaagctactatacgcaagaggagctcatccaaagccactgatggagaagccaccaattctggaagggatcctgcccctgaaaaagcaccatcaatttcaaactctaacttagtgtttggctacctcaaccttttctcagatggtgttcataacttcactgatgggatggctctcgggagtgcctttctgctgcatggttctgttggtggctggtctaggactttatttctgcttgcacatgaacttccccaagaggtaggagattttggtatccttgtgcggtcaggcttcacggtatctaaggccctattcttcaatttcctctctgcgttggttgctcttgctggaacagcactagcattgtctttgggtaaagatccgggacattcctccctgattgagggtttcaccgccggtggtttcatttacattgctgtcgcgggagtcctaccacagatgaacgaccagaaaacaaccatcaagagctcagtagctcagctgatctccctggcaatggggatgctggtcgctctaggcatttctctggatcaacagcatatagtggaatccctgtttcctagccgaggtgaggcccttttggcggctacacccgcttgtcctggccccgtgcacggtgcaccggtgggtatgcatgccaccaccacgtcggtcaagatctgcccgtgcttcggcctggaactctggctttgccggactccggacgttcatagctga

SEQ ID NO: 6324 - DNA, 297 bp, Zea mays
  Peptide Sequence Number=SeqID_48103
atgggggccgtgcagtggcaagagacaccgcagaaggagcagttctgggctcccgcgccacttaccaccaagtcctgggcagacgtcgaggacgacgacgactacttcgccaccaccgcgtcgccacgccccttctggggcactgccggtgagcccgctaaggaagaggacgacgtcgatgatgttgtgcgcgccgcccttcaggagcttcgaatgcgatgggttgggttgcctagccttggtgattgtggattgggtggctcattagtgttttgcgttgttgatcactggggttag

SEQ ID NO: 6325 - DNA, 678 bp, Zea mays
  Peptide Sequence Number=SeqID_48104
atgtcgggagctcacgctaagaaggaaatggtgaccgacaagaagcccgccacaagccacgggaaggctctatcgggggagtccggcaataagaagagggaggaatcacctccccgagtaaagtcgcaccggagtggcgacaagaagaagaaaatgaagaaagtggtctactacgagactgattcttcgtcgccctccacctccggctccgacacgccttctgtcacttctaagcgccatgagcgtaagaagtttagtaagatccccttacactatcctcgtatttccaaacgcacccctttactttccgtcccattaggcaaaccaccggtttttgacggtgaagattattgcatgtggagtgataaaatgagtcaccatctaacctcactccacgctagtatttgggacattgttgagtttggtgcgcaggaaccatccatgggggatgaaggctatgactcggacgaggtaacccaaatctggcacttcaactcccaagccactactatactcctcgcctctctaagtcgagaggaatataataaggtgcaagggttgaagagtgccaaagagatttgggacgtgctcaagaccgcacacgaaggagataaggtgaccaagatcaccaagagagaaacgatcgagggggggctcggtcgcttcatgcttcattaa

SEQ ID NO: 6326 - DNA, 1599 bp, Zea mays
  Peptide Sequence Number=SeqID_48105
atggacagggttgtttcccaggaccttttcattattggggctaccaataggcctgaccttcttgattctgcccttcttcgccctggtcggtttgacaagcttctttatgtcggtgtaaatactgaggcatcatacagggaaaggatccttaaagcacagacgcgcaagtataagctgcacaagaacgtttctctcttgtcagttgcgcagcgttgtccaccaaacttcactggtgctgatatttacgcgctgtgtgcggatgcatggtttcatgcagcaaagcgatcagttgaaacattcgaaaccgatccttcaagaagtaatgacgccagtgccgaagaagtcattgtcgagatcgacgattttatcacatgccagcagcgatgcctccttgttcgtgctcggcaagtcggccggtgtgagcaaaatccgtacgtcatcgtctccagtggtgccattctccgtggctctgcacacggtcggggactcggcggccttgctggatcatttgtgccgccaaacgggtttacctgctccgcctccgcccagccagcgccgccgccgctgccgctagcgctcccctcagattctagaaatcgtcgtgtcctgatcctggatctaattgttttatcggaaatgattgcttcagtgaagtccttcccgagggatgacccaaagaagccctgtcacctcaccgccttccttggctacaaggctggaatgacacacattgtggtgaggtcgagaagcctggctccaaccccccgtggcctacgaaccctcaactctgtctgggcccaacaccttagcgaagaagtgcggagaaggttctacaagaactggtgcaagagcaagaagaaggctttctccaagtatgccctcaaatacgacagcgacgcaggcaagaaagaaatccagttgcagcttgagaaaattagaaagatgaagggtttgaagcagaagaaggctcacctcatggagatccaggtcaacggtggcactatagcagacaaggtggactatggttacaagttctttgaggaggtccctgttgatgctgtgttccagaaggacgagatgatcgacatcatcggagttaccaagggcaagggttatgaaggcgtggtcactcgctggggtgttacccggcttccccgcaagacccacaggggcctccgcaaggttgcctgtatcggtgcatggcatcctgctagggtgtcgtacactgttgctcgtgctggtcagaacggataccatcaccgcactgagatgaacaagaaggtttacaagattggcaaggccggacaggaaagccatgacgcctcaactgagtttgacaggaccgagaaggacatcactcccatgggtggtttcccccactacggtatcatcaagggcgactacctgatgatcaagggttgctgcgtcggccccaagaaaagggtggtgactctccgccagtctctgctgaagcagacgtctcggttggccctggaggagatcaagctcaagttcatcgacacctcgtccaagtttggacatgggcgcttccagaccacagacgagaagcagaggttctttggcaagctcaaggcctga

SEQ ID NO: 6327 - DNA, 552 bp, Zea mays
  Peptide Sequence Number=SeqID_48106
atgaccaaaagttatgggaagaagatccccatgaatatgttcgcaagggctatggtgaatttactgctctctgtatatcaatcttggttagaatgggttattactgataagaatcatgtggtttttgtttttgtctcagttcagcagtatatcatcgaagatttgtacagtccccgaacagctgctatggactttgtgagtgaattgattagaaagcgagggaaaaacaatctccaaaagttcatccatttcattgtggatatttttaggaggtatgatgaagcacctgctgatcttaagccatatcgccaaaaagatggtgctcttctcgctattgggacactccgtgataaactgaagcaaacagatccatataaaacagagcttgagagtatgctggcagcatgggttgctgggcagtatgcccatatcaacttttcagaccagaacaattttcgtcaggctatgcactgtattgtctcaggaatgtgtgatccagatcttccaagcaagaactgtgttccagacctcatgagcgaaggggcaggttag

SEQ ID NO: 6328 - DNA, 708 bp, Zea mays
  Peptide Sequence Number=SeqID_48107
atggcgagcgagtgcctcctccccgccattgcagccgaccccccccccacctcgacccagctccccaccgctttcctccaccgcagatcgatagatcagcccgctacctccctcccaagccctgtttcgcctcggcagatgcgctctcctaccgcgcccccgccctgtccacctctgccttcgccgccggcaagaacacacaggagaccccgcccagcctcagttattgtggttccagaaccttgcgctgctgtcccctgccaaccggccacccctgctcctgccaaatgggacatcatgcttcctcctgcagggaccctctgtgttgtttcggatgcggaggcccaggccataaagcttggctctgtcccaaggccaagacctcccagaatacggctgccccgcaaccgccccccagactccacagcgacgacttccctccgctcgttcaagccaccatgccttgaccaggcgatccagggacgcgccccagtgaaaccttcgccgtcgctgcttccaccggacatggaggcagagctagagaggctctcgacccacgccgtcgttgcctggctggggcgggaccgacctgaggtgagcgccgacaggatgaagagggcgttctaccaccagttctgcgtgcgccccgacaacatctccgtagcaagataccacccagcggacttcgtcgtcaccttctcccattag

SEQ ID NO: 6329 - DNA, 1158 bp, Zea mays
  Peptide Sequence Number=SeqID_48108
atggagacagcacaaactgggatgtgcaccggatctgtagacagcgtccatgtttcccagtttctccaacaaaggctggaacaagagacaagtcacctagagggagaatttgatgaatccactgtcagatcattgcatcatcgggtggttcctgtaacaattgaggatcagctggcagaggatgtgccaaatggtactcaatttgatggtaccatggattctgggtattacacaaatctcctagttaatggtattgaagaatctcaagcaactcgtagtgatgtaagaatccagcatggtcatgcaacaaccaagagttctcagggtagaagcaaaaattttagagatgaggaggacattcttcttgtgtcagcttggctgaatgtgggcatggatcctattcaaggagttgatcaaacacatggcacactatggagaaggatacatgaatatttcaatgcaaacaagaagtttgactcaaatcgttctgaagtatctttaatgaatcgttggtccggtatacaacatgatgtgaatctgttttgtggatgtctgtctagggttgaggctaggaatcacagtggttggtcaattgatgacaagatcgcaaatgcatgtgtaatgttcaaggtcgaagacccaaaggataagaagttttcatacctgcattgctggaaaatcttgaaggacaagaccaagtggatggataggcggaaggaaattggaagtgcaaaaaaatcagccactaagaaacagaagacaacgacaaattcttctccagcatcagttgcaaatgcaattgtcgtagatgcccctcttgggggtgctgatcatgatgaaccatcatgcagacccgacggtaagaagaaggagaaacaaaagctacgacaacgttcgtccatggaagttgtagactatctaattgcaaagaagaaagattctgaccttgaaaaggacttgaagaaagaggagaggtgcaataaagcctttgctctacaagaagaaaggatcaaattggacaaagaaaagtttgcgttccaaagacagctcgaagaggacagaataattggtttggaccttagcaccatgaactataaacaacagcagtattatgaagatcgtcagaacgagattcttgcaagacgtttcaatatctag

SEQ ID NO: 6330 - DNA, 312 bp, Zea mays
  Peptide Sequence Number=SeqID_48109
atgaactggaagcgcaacaaggtcgccggcaggtgcaggaaagaagagacgcgggagcggctgattcagcaggcggcggcggcggatccggatggcgggggcagcgtgccgcggggctgcgtggcggtgctggtcggcggccgggaggacggcgcggagccggaggagcgggtggtggtggacgtgcgcgcgctgctggacatggcggcgcgggagttcgggtacggccagaagggcgtgctgcggatcccctgcgccgccgacgagctccgccgcgccgtcgccgccgacaggcaccggtggacgcgctag

SEQ ID NO: 6331 - DNA, 516 bp, Zea mays
  Peptide Sequence Number=SeqID_48110
atggctccggtcggcggtcgcgctcggccgctcgcgcaggccacaggggcgcagggcgcagaggcagctccggtagcgctcgcgcaggggaggccgcggctccgatctgcggtcgccgcctcgccggtcgcgctcggccgctcgcgcaggccgcactgccgcaggggcgcactgccgcactcgccggtcgcgctccggtcggcggtcgccggtcgcgctggagcagtggagcctggctggccgccttggagatgggagtcgggatggagatgggagtcgccgaggcaggatcgggacacggccacacgagacaggaaagacggcggccgccggctggctggaatatggaaatgggtcgcgcggccgcgctttaggcctctgctggcctgcaggctgcagctgccgaggacgcatttcgggccttttcgtgccggtgaccgttggcgccgagtagtcgttgctccgctggctcaccggacagtccggtgtacaccggacatgtccggtgaattatag

SEQ ID NO: 6332 - DNA, 2209 bp, Zea mays
  Peptide Sequence Number=SeqID_48111
atgacgacacactcgcgaacgaagtggaggtcgagcttgacatgcttcgtgcgctggtgctggacgggctgggttggtggagaggtacacggtgccgaagttgtcatagtagacaagggtgctccacgtcagcagactgtgcaactcctagagcagctgacgaagccatgccgcctcggcgatgctgttagccacaacgtggtactcgactttggcgctagagcgagagacgacaacatgtcgcttcgaagaccaggagacaagactatcaccaaggaacatgacgaaggcccagtcggcgtcgatgtagacaacgaggtcgttagtcgtagatcgtcaaagaaggaggctaaagactatggtgcctcggagcgcattgagtttgtcagtttcactgcccacggcatgggatcttggagacaaaaactgcctgggttaggcgagggctcaggctcaggctcacaggctgctgaggccggcggtggtgggagaggtttccgtggccgtggtggcttctaccatcaacagcagtccccacaaggtggtcgtggtcgtggaactggctactacagtggtggtggtggtggtagaggtggacgtggggcagtcccgtccgccatagctcccgagctgcgccaagcaatgcaaacttcaaatgaacctgataacatcccagcgccagaggcaggctcccagtcccaggatgcgccgtcaccaagcgaagaggctgtggatcagctgaaaggcttgtctgtacaggacattgtgcaggcgtttccagtgtcgagcaagttccctcaccgcccaggaaatggaagcgttggcaccaggtgtttggtgaaggcaaatcacttctttgctgaattattacctgccaagaaggatcttcatcagtatgatgtttcagttaccccggaagtgacatcgcgaattgtgaaccgttctgtcatggaggagctggtgaggctgcacaagctgtcatatttgggaggtcggcttccagcctatgatggtagaaagagcctgtacacggctggacccctgccattcacttcgaaagaatttcacatcactctactcgaggaagacgatggttctggagtagagaggcgtaagaagacatacaaggtagtgattaaatttgccgcaagggctgacctccggcgtctggagcagtttttagctggaaggcaggcagaggctcctcaagaagccttgcaagttcttgatattgttctgcgggagctgccgacaacaagatatgcaccgtttgggcgatcgtttttctctcctgacctggggaggaggcgttcccttggtgagggaatagaaagctggcgtgggttttaccagagcattcgccctactcaaatgggcttgtcattgaatattgatatgtctgcaactgctttctttgagccattacctgtcatagattttgttgcacagcttttaaacaccgacgacatctactcgaggcccctcttagacgctgaacgtgtcaagataaagaaggccttaagaggcgtgaaggtggaagttacgcaccgtggtaacatgcgacgcaagtatcgaatagctggtttaacatctcaggaaactcgggagctaacttttcctgttgatcaaggtggcacagtgaagtcagttgtacagtattttcaagagacctatggctttgccatccagcacacctacctgccctgtctgcaggttggcaaccagcagcacccaaattaccttccaatggaggtctgcaagatagtggagggacagaggtactctaagagattaaaccagagtcagataagagctcttttagaggagacatgccaacgcccacatgatcgtgagcgcgacattattcagatgatgaatcataactcttaccatgaggatccttatgctaaagagtttggcattaagatcagcgagcgtttggcttcgattgaggcacggattttacctgctcctcggctcaaatataatgaaaccggcagagagaaggactgtttgcctagagttgggcagtggaatatgatgaacaaggacttcgcgctggagcctatccttccgcctatatacgcgcatcctgataaagtggagagagctctgaaagccaggttccatgacgcgatgaacttgctcggaccacagcgcagagaacaactcgacttgctgctcgttggaatactccctgataacaacg

SEQ ID NO: 6333 - DNA, 2526 bp, Zea mays
  Peptide Sequence Number=SeqID_48112
atggcctccaagctgagtttcaagagggcagacagcatcgcggaaagcatgcccgatgcgctgaggcagagccggtaccagatgaagaaatgcttccataggtatgtttccaagggaaggaggctcttgaagaaccagcagctcatagaggagctggacaaatcactggatgacaaagtcgagagggaaaagcttgttgaaggcttcctgggttacattatttgttccacgcaggaagcagtggtgctaccgccctatgtcgcatttgctgtcaggatgaatcctggcatctgggagtatgtcaaagttcattctgatgacctgtcggtcgaaggaatcacaccctctgagtacctcaagttcaaggagacattatatgacgagaactgggccaaggatgacaactcactggaagtcgatttcggtgctcttgacctctcaacaccccatctgacactgccatcgtccataggaaacgggctccagtttgtgtccaaattcatgtcctccaagctgggcgacaagcctgaaattagcatgaagccgttgctggactacttgctttcgctaaactaccgtggcgagaagctgatggttaacgacaccatcgatactgtgaacaagcttcagacagcgctgctacttgcggaggtatttgttagcgggttgccaagatacaccccattcctgaagtttgagcaaaggtttcaagagtgggggttggagaaggggtggggtgacaatgctgaaaggtgcaaagagacgctgaattgcctctctgaagtgctacaggcgccagaccctatcaacatggagaagttcttcagcagagttccatccatattcaacatagttgtcttctccatccacggctactttggccaagagaaggttcttggcttgccagacaccggtggccaggtggtctacatcctggaccaagtcagggcccttgaagaggagttgctgcaaagaatcaagctgcagggtctgaacgtgacaccaaagattcttgtgctgactaggctgataccagatgccaagggtacaaaatgcaatgtggagctcgagccagttgaaaatacaaaacattcccacatacttcgtgtgccattcaagactgaaaacggcaaggagttgcgccagtgggtgtcccggtttgacatctacccttacctagagagatatgcccaggattcttgtgccaaaattcttgacattttggagggcaagccggacctgatcatcggcaactacactgatggcaacttagtggcgtccctcatgtcaagcaaactaggggtcactcaggggacaatcgcgcacgctctagagaagacaaagtatgaagattcagatgtgaagtggagagatctggatcagaagtaccatttctcctgccaattcactgcagatatgattgccatgaacactagtgactttatcatcactagcacataccaagaaatcgctggaagcaaggagaagcctgggcagtacgagcaccactacgcattcacaatgccggggctctgtcgctacgccacgggcatcaatgtcttcgatccaaagttcaacatcgccgcacccggtgcagaccagtccatctacttccccttcacgcagaagcagaagcggctgacagatttgcacccacagattgaggagctgctctacagcaagcaggacaccggtgaacacagagggtatctggcggacagaaacaagcctatcatcttctcgatggcaaggctggacaaggtgaagaatatcaccgggctagtggagtggtacggccagaacaagaagctgagggacctggtaaaccttgtcgtcgtcgcgggcctgctggaagcgtcgcagtccaaggaccgggaggagattgaagagatcaacaggatgcacagcctgatcgacaagtatcagctgaaaggacagattcgctggatcaaggcacagactgaccgtgtccgcaacggtgagctgtaccgttgcattgcagacaccaggggtgcatttgttcagcctgcactctatgaagcgttcgggctgacggtcattgaggcgatgaactgcgggctgacaacctttgcgacgaaccagggagggccagcggagatcatcgtggacggtgtctccggtttccacataaacccaacgaatggcagggaggcaagcaacaagatcgccgagttcttccagaagtgcaaggaagacccaagctactggaacaaggtgtccactgctgggctccagcgcatctacgagtgctacacatggaagatctatgcaactaaagtcctgaacatgggctcgacgtatggcttctggaagactctgaacaaggaggagagagtggccaagcagcgctacctgcagatgttctacaacctccagttcaggaacctggcaaagactgtcccaaggctgtttgaacatcctcctccgcaagccccagcaggcgcagggcctagtacgatgacggatcatgaccagcttgatggggcagaagcctgctacttctga

SEQ ID NO: 6334 - DNA, 1248 bp, Zea mays
  Peptide Sequence Number=SeqID_48113
gtcggaggaaggaacacggtgctggctgatgcggtgtcaagacgcattcccttggtgactgacaggcctaccatcatattcggtgccgatgtgacccatcctcatcctggagaagatagcagcccttccattgctgctgttgtggcttcccaagactggcctgaggtgacaaagtatgctggtctagtttctgctcagtctcataggcaagagctgatagaggatctctacaacgtcacacacgatcctcagaaaggaaccgtttgtggtggcatggtcagggagcttcttatatccttcaaaaaatcaactggtcaaaagcctcagaggatactattctacagggatggtgtgagtgaagggcagttctaccaagttctactgcatgaactggatgctatccgaaaggcgtgtgcatcgctggaagcaaactaccaaccgcaggtgactttcatcgtcgtccagaaacgccaccataccaggctgttcgcgcacaaccacaacgaccagaattcggtcgacaggagcggcaacatacttcctggaactgtcgtggactcgaagatctgccaccctacagagttcgacttcttcctgtgcagccatgctggcatcaagggcaccagccgtcctgctcactaccatgtcttgtgggacgagaacaacttcacagccgacgcactgcagaccctcaccaacaacctttgctacacctacgcgaggtgcacgcgctctgtgtccattggtaggtttgtcaaagttatatccattgctgaatcgatgcacgagcaacagataaaccaaaagatgcatatgccttccttgcagtcccgccggcgtactacgctcacctggccgcattccgcgcccggttctacatggagcctgacagctcagacagcgggtcgctggcgagtggcgcccgtggaggcggagcgccctccagctcgtcaacgtcccgcagcacccgcgccaccgccggcggagccgttagacccctccccgcgctcaaggacagcgtcaagaaggtcatgttctactgctgatgaaccggagcatgaagatagtaggcagccctgcctgaaatctgatccgcttggtgctgttgtttgccgtgctcagaagacatttgcttggtgtttgtttgatgaagggtggctagagtggtggattcgcttcctgcttgtactgagggacgaccgtaactctacgatagcaaacaaaaagtttgagatcaaactcaactaa

SEQ ID NO: 6335 - DNA, 333 bp, Zea mays
  Peptide Sequence Number=SeqID_48114
atggagaatgacggcaaagcgttgccttggagctcaagtaaagagaacaaagaaccacagatgctagaggccggcatgcagatggttagtaaaggactaaaggtggtccaaactttcaggtctagtaaagatgaccttgcccaacttgcaagcaagatatatgttgagataaataagcctgttgctggtgttgggggttatctgatagatgtggagtgctcgtacattgatgaatgggtgggaactgagcacaatgttgaacttgctgcatgctatcatcttctgcttgatggaaaaggtgtaaaaagggttgattttctagatgttcgatag

SEQ ID NO: 6336 - DNA, 558 bp, Zea mays
  Peptide Sequence Number=SeqID_48115
gcgcgcctgctcctgcgcacatccctctgcctactgcgcccactgcctgctccctgcgcgccaggacctctaccgagctccccatggcggcttccccatgcctcgctccagcccctgttcctccccgaagcttggccctccatggcgtcggatcccctgcaagctcgcccaagtcgccaccgtcgaagctccctgcgcgtgctgcttcttctctgctcctccagccgcgccctacctttctctctccctcgcagcttctcttccctgcgagatcctccctgcgttcctgctcgccatggtgctggtcgtcgtcgccctcctctggagttcgccttggcccgcgcttcctgcatcgcgcccagccgtgccttctcccatcgccgcgcgtccctactccttggtctcccttatctccttccccagcgccagccgtgagctcgcccatggtgcccactcttccccaggtccgatgttggttgccttcaacgtcgctgattcctccatgattcttgtcgacgaacttcgcttcatcgattcctcgccttcggttcggctcat

SEQ ID NO: 6337 - DNA, 369 bp, Zea mays
  Peptide Sequence Number=SeqID_48116
atgctgggctgtgccgtgtgcggctggccggctgggcacctggcactctggccggcaagggcgcaaggcggcaacagcgagcacgtagggccgcaggggacaaccggcactcaggaattttcctcccatgggttccgcatacgccgccgagaggacgccgatcgatggagaatgaggtgctgcgtctgccgcgtatcctccgccgggtgccgggccatgggcgtcgcgggacgggccaatccgacgtcgtcgctgcgcagccgacgctgcctccgcatgcggccgtcttacgccccgttctccgagcccttcactgaacccccggcacccgccgcaccatcataccctgctgccgcgcacagtgcgtag

SEQ ID NO: 6338 - DNA, 1575 bp, Zea mays
  Peptide Sequence Number=SeqID_48117
atgttcttcgacgggtcgctgatgaagacaggagcaggcgcatgcctgctcttcatcccgcccctcgggaagcacctacgctacgtgctagccctccatttctcggcatccaacaatatggctgagtacgaggctctggtcaacgggttgcgcatcgccatcgagctaggggtccgacgcctcgacgctcgcggtgactcgcagctcatcatcgaccaagtcatgaagaactcccactgccgtgacccgaagatggaagcctactgcgatgaggttcggcgcctggaagacaagttctacgggctcaagctcaaccacatcgcccgacgctacaacgagactgcagacgagctggctaaaatagcctcagggcgaacaacggttcccccggacgtcttctcccgagacctgcatcaaccctccgtcaagatcgatgacacgcccgagcccgaggcaccctcggctcggctcgaggcaccctcggctcggcccgagtcaccctcggcctccgagggtgaggcactgcgcatcgaggaggagcggagcggggtcacgcctgatcgaaactggcagaccctgtacctgcaatatctccaccgaggagagctacccctcgaccgagccgaagctcggcggttggcgcggcgcgccaagtcgtttgtcttgctgggagatgggaaggagctctaccaccgcagcccctcaggcatcctccagcgatgcatttccatcgccgaaggccaggagctcctacaagagatacactcgggggcttgcggccatcacgcaacacctcgagcccttgttggaaacgccttccgacaaggtttctactggccgacggcggtggccgatgccactagaattgtccgcacctgcgaagggtgtcagttctacgcaaggcagacccacctgcccgctcaggccctgcagaccatacccatcacctggctgtttgctgtgtggggtctggacctagtcggccccttgcagaaggcacccgggggctacacgcacctgttggtcgccatcgacaaattctccaagtggatcgaggtccgacccctaaatagcatcaggtccgaacaggcggtggcattcttcaccaacatcatccatcgctttggggtcccgaactccatcatcaccgacaacgacacccagttcaccggcagaaagttcctagacttctgcgaggatcaccacatccgggtggactgggccgccgtggctcaccccatgacgaatgggcaggtagaacgtgccaacggcatgattctgcaaggactcaagcctcggatctacaacgacctcaacaagttcggcaagcgatggatgaaggaactcccctcggtggtctggagtctgaggacaacaccgagccgagccacgggcttcacaccgttctttctagtctatggggccgaggccgtcttgcccacagacttagaatactgttccccgaggacgagggcctacgccgaccaaagcaatcaagctaatcgagaagactcactggaccagctggaagaggctcgggacatggccttactacactcggcgcggtaccagtag

SEQ ID NO: 6339 - DNA, 315 bp, Zea mays
  Peptide Sequence Number=SeqID_48118
atgatgagaatatctatgatacgctgttttcccctctcttattatgatgttatacttgtggtcatcaagagggctcgagcggtttctcgagtgcctctccgtggttatgagattgatggtttcggttatgactatggtgctgctagtccactacagccaaacaggatacttgctgagtatgttgatgtgtactcacccttgccctacacaccaacccccccatccccaggttgtcagcattgcaaccactgctcaggcgaagatgaagctatggaaggagacttccaggagttccaagattacgacgagttctag

SEQ ID NO: 6340 - DNA, 1431 bp, Zea mays
  Peptide Sequence Number=SeqID_48119
atggacgccgccgcgagggaagcgcagcagagtagtggtctggaatggcgggtgacggtgccggagggcgcgtcggtgaccgtggagcacgaggccgggcctgccgcgagggcgttggcgtggctgctggcttgcttcgccaaggcgtggagcagggtcgccgggttcgcgaggaaggtgtggaggatcggggcggatgatccccggaaggcggtgcacgggctcaaggtcggcctggcgctcgcgctggtctccgtcttctactacacgaggcccctgtacgacggcgttggcggggctgccatgtgggccatcatgacggtcgtcgttgtcttcgaatacactgtcggtggcagcgtgtacaagtgtttcaaccgagtggttgctacggcgagcgccggcgttctcgcgctcggcgtgcactgggcggctgacaagtctggcgagctcgagccttacatcctcagtggctcgctctttctgctggctgcggcggccactttctcgcggttcatcccgacggtgaaagcgcgcctggtggccgtgtcggggtaccgcgtcgacgagctagcggcgctggcgcagcagcgggtctccaccatcgctatcggcatcttcctgtgcctcgccgtcagcatgctcatctgccccgtgtgggccggcaaggagctgcacctcctcaccacgcggaacatggacaagctcgcggccgccgtggtggcctgcgtcgagagctacttcgcggaagggccggccagcggggcgggggcgggggcggacgggtacaagtgcgtgctcaactccaaggcgtccgaggacgcgcaggccaacctggcgaggtgggagcccgcgcacggccccttcggcttccgccacccctacgggcagtacgccagggtgggcgcggcgatgcgcgcgtgcgcctactgcgtggaggccctgagcagctgcgcgggcgccgaggtgcaggcgcccccgcacgtgaagcggctccttcgcgacgcgtgctccgcggtggccgcacggtgcgcgcgggtgctccgggaggcgtcgcgctccgtcgccaccatgtcgacgtcctcctcccgggccctggacttcgcggtggcggacatgaacacggcggtgcaggagcttcaggccgacttgcgggcgctcccgtccatgctggccgtgaagctgggagagacgtccctcatggacaccatgcccgtcttcaccgtggcgtcgctgctggtggagatatccgcgagggtcgagggcgtcgtggatgccgttgacgcgctggcaacgcttgccaacttcaagcagaccgaggacgatgatgatgacgacaagaagggagaagccgagatgacgatcaaagtgcacccgctgaacgaaccggacaccgccgaggagtcacgggaaaaccagacaagcaaggcttga

SEQ ID NO: 6341 - DNA, 295 bp, Zea mays
  Peptide Sequence Number=SeqID_48120
atggagtgtgagagaatgagtgggaggatcacaaatgagctcaatgcacaggtccacggcgcgggtggtctcgcggtggagacaccagttccggcgaggaattccaccggtcctgggcgacacttcgactgcggcactcgctctttgcacaccgagtcgcccagcgagtcaacggagaggggaattgtgttgaagtggggaaaaggccctacaacagatgcccctcgccggtgcggctgtggtggcgaggtgcgcccagtcgcccaggtggttagtggtcctctggtggctgcga

SEQ ID NO: 6342 - DNA, 1467 bp, Zea mays
  Peptide Sequence Number=SeqID_48121
atggacgccgccgcgagggaagcgcagcagagtggtgtggaatggcgggtgaccgtgccggagggcacgtcggtgaccgtggagcacgaggccggccctgccgcgagggcgtggacgtggctggtggcttgctttgccatggcgtggagcagggtcgccgggttcgcaaggaaggtgtggaggatcgggacagatgatcctcggaaggcggtgcacgggctcaaggtcgggctggcgctcgtgctggtctccgtcttctactacacgaggcccctgtacgacggcgttggtgggtctgccatgtgggccatcatgacggtcgtcgttgtcttcgaatacactgttggtggcagcgtatacaagtgtttcaaccgagtggttgctacggcgagcgccggcgttctcgcgctcggcgtgcactgggcggctgacaagtttggcgagctcgagccttacatcctcagtggctcgctctttctgctggctgcggcggccactttctcgcggttcatcccgacggtgaaagcgcggttcgactacggcgtgaccatcttcatcctgacgtacagcctggtggccgtgtcggggtaccgcgtcgacgagctagcggcgctggcgcagcagcggctctccaccatcgctatcggcatcttcctgtgcctcgccgtcagcgtgctcatctgccccgtgtgggccggccaggagctgcacctcctcaccacgcggaacatggacaagctcgcggccgccgtggtggcctgcgtcgagggctacttcgcggaggggccggccagcagcagcagggcgggggcggacgggtacaagtgcgtgctcaactccaaggcgtccgaggacgcgcaggccaacctggcgcggtgggagcccgcgcacggccgcttcggcttccgccacccctacgggcagtacgccagggtgggcgcggcgatgcgcgcgtgcgcctactgcgtggaggccctgtgcagctgtgcgggcgccgaggcgcaggcgcccccgcacgtgaagcggctcctccgcgacgcgtgcgccacggtggctgtgcggtgcgcgcgggtgctcggggaggcgtcgcgctccgtcgccaccatgtccacgtcctcctcccgggccctggacttcgcggtggcggacatgaacacggcagtgcaggagcttcaggccgacttgcgggcgctcccgtccatgctggccgtgaagctgggagagacgtccctcatggacaccatgcccgtcttcaccgtggcgtcgctgctggtggaaatatccgcgagggtcgagggcgtcgttgacgccgtcgacgcgctggcgacgcttgccaacttcaagcagctggatgacgacgacaacgacgacaagaagggagaagccgagatgacgatcaaagtgcacccgctgaacgaaccggacaccgccgatgagtcacgggaaaaccagacaagcaaggcttga

SEQ ID NO: 6343 - DNA, 192 bp, Zea mays
  Peptide Sequence Number=SeqID_48122
atggcgaacttgtcctacccgttgttccctttcttggagctagaggaggagggcaaaggccacgaccacgccgcacggggggggggaggcgagctggagctcctgacggtggagcttgaggcgtcggggcccgtcagcgagaagagagggaggagcgacaacatcgattctaagaatcgaggccagatctag

SEQ ID NO: 6344 - DNA, 366 bp, Zea mays
  Peptide Sequence Number=SeqID_48123
atgggcaaggacaagaaaggtcgaggttcgccgcgtcactccggcgacaagcagaagcgtgagccaagtcctccctcggaggacttcggtgactccgagtactcagaggaggagttttactctgagtccgagggaccgcctgggatagccgccgaggtgtggacgtacatcctgtctgtcgagcgcgccgagttcgaaggcttagatgagtcggaggtctcctcggacgacggcgacgacagcggtggaggtggcgacgacggcaagagcgatggtgcaggcagcggcggcggcaggagcgacgacgacggcaaggacgacagcagcaacagcagcaaggccagtggcaaagcgccactggcttaa

SEQ ID NO: 6345 - DNA, 1050 bp, Zea mays
  Peptide Sequence Number=SeqID_48124
atggcagtagcgcccatggactgcggtgctggttcgattagtctaggccacaaggttttatgccgtttcggagtacccaacagcagtagattgcgatgggtgggatatgacaggaaacaaaggacagatcagttgattgctagagccgtatccgtggatcggacacaactagacttctcgaatccggactggaagacgcagtttcaagaggatttcgataagcgcttcagcttgccacacttgacagatgtaattgatgtggaaccgaggccaactactttttctctcaagagcagagcccctcttgagaacgcgaatggtaccatgcaaggatcatggaacggctatgtcaatgatgatgacagagcacttttgaaggttattaagtttgcctcaccaacttctgctggagctgactgcattgaccctgattgtagctgggttgaacaatgggtgcaccgtgctggtccacgcaaacaaatatattttgagcctcaatatgtgaaggctgggattgtgtcgtgtggtgggctctgcccaggtctcaatgatgtcattcggcagattgtgcttacacttgaaaaatatggggtgaaaaacattgttgggatacagcatggattccgtggattttttgaggatcacttatcagaagtgccagctaggaggcttgatatgctatttgtgcttggtggaaatggaacacatgctggagctaatgctatacatgatgagtgccgcaagagaaaactgcaagtatcgattgtatgtgtccccaaaactattgacaatgacatattactgatggacaagacctttggatttgatactgcagtggaagctgcacaaagagctatcaactctgcatacattgaggcacattctgcatttcatggcattggactggtcaagctgatgggaagaagcagcggcttcatcacaatgcatgcctccctgtcaagtggccaagtagatatctgtctgatacctgaggctaaatatgggctgataaaggccaatgggttctacccaccaattaatcctgattag

SEQ ID NO: 6346 - DNA, 705 bp, Zea mays
  Peptide Sequence Number=SeqID_48125
atggaaagcgctatctactggggtggtatggagaaaaaacgaagggatcaaactctccagatgaagcagaggttgtgtcttgaggactttgctggtttgggtgttgtggtgactgattttgctgaggaactggcagagacaacgggtgaagctacttcacctaagtctctaatggcagctcatgcgaggaggggtggcaaaacatgcgctataggatgtcgaaatcggggtggcatctcccgcggggcgaacgctgtgtcgatttatgtctacttcacagagagcttgcttagcgacgagcccctgacgcttggactggctggtgctgacgaggggatgaaccttgtggccaaaccacgcagtgagcccaccaaggcggttgtcgatgttgtggtggatccatgggcgagattttgctcggttgttgatagtggtagggacccaagactgtacatagacgtgaagttccctgacatagcacagtgggggatgcgttttattgtaacaccttaccaaagagagtcatcggactgtgccttttttgtcatgttattcatggagttctacaacagagcagatcgggactttgaaactatgatcaacgatgaaaaagtacaacaacatcttgctcagggcacgtatcctctactccatgttgtttcatttcatgaacaaagcaaaaaaggcatttccctattaccctag

SEQ ID NO: 6347 - DNA, 447 bp, Zea mays
  Peptide Sequence Number=SeqID_48126
atgaggcacgagatgctagagatgtatattgcaaaagtgtgtcctgagtgctattggactagggtatttataggggtagctggggttagtttagctgcaccagttgacaccaaattctattgtggcgctgtccaaatatgtgtgggtgatgactacattttgtggggtgtcttcgagtggggttttgcaaaacattactgtctgcattggcaaaagaagaaagtgggcggtaaagtggtgcagtttggaagctgcacatttactctgaagactggtaaaactggtggggtggtttatgagcttgtgccgtgtgaaagaatagatggggtagttggtttaagtcttggttttatgtggaccttcaagaaggggtgcctggtgtggctcaaccagtggccagtgttattatggcgcaggacttcgtcgcctgtcttgacttcaaagtag

SEQ ID NO: 6348 - DNA, 594 bp, Zea mays
  Peptide Sequence Number=SeqID_48127
atgaggcaaggggtgtgcgcgaggcactggcgggtctctaagaagggagctgggcgcgtgggcgggcatcgtggtcgagaaatccgacgaagtgcgcgagtgcgcacgcgccggtccatggcgagcgcggagggggcagaactgacagtcatagagcaccatggaggaccagtttttgcacggatacacagtctagatggcgtcgtccatccgagtggccacgacgggctagtactcgtgcttgacgctggccacagcaatgcagtcggcggtggagaggaggtcggccaggtccgcgaggtacaggaagtcatagtcgacgaagaccgcctagctgtagtagcccgaataggccacacgtccagcgggtcaacgagcgccggaccaggttgtggtggcacacctcatctgcctcgtgctcccgcgggttgtaccccacgaacacatggaatggctcctccaccgccggcaacatcgaatttggatgcggtggcgccagcatggctagacgtgtggggtgtggtggatctactaggtgggatggaacggaggagcgctaggatggatggaacgggaggaggaggtaggggatga

SEQ ID NO: 6349 - DNA, 2088 bp, Zea mays
  Peptide Sequence Number=SeqID_48128
atgagcgcctgcgggggcaccatccccgcgtcgcgcttcctgcgccgccgcgccgccgtgcgggacctgggcggggacgcggccgccggcgacaccgacgccttctgggccgccccgccccgcctctacgacttctcccagcagcagcagcagcagcacacggcccaggccgcgcggcgatcgccctcgccggcgccgaccagcccgtgcctcctcgcccggaagcggcaccagcagtccccgtcgcctcctccatccccgcggcgctcgccttcgtcgcccgggacctgcctgctctccgccctgcaccgcacctgcgtgggctggggcgtcaccaggcgcgccgagtaccccagacggcaccgcccggtttctcccgcggcttgtgggcaggttacggggatgcacacgcacgggcgggcggcggctcggtgcgtggacgaggacgaggagagcaccagcaagaacagcaagtgcctgttggccgtgggcaagaacgagctggaggaggaggtgggtcaagaccacgagagctgcctgcaccgccgccgccgcgccaagaaggccccgtgggccgtcaaggaggagcaggagacgtcaggtgaggcggcggaggagggcgccaagcgcgccaagaggaccccactgaagcatgaggcggcggcggcggcggagagcaagcccgccggcgccgccaccgccaccgccactcccgactccggctcgccacgcggcaacggcaaggtcgaccggtgggcggcgtggcggtacgcggcgggcgaggcggcgctggccaacatcctgcgcgagcgcggcgccaccgccggcaatcccacgccgcgggccgtcctgcgggcgcaggcgcgccgcttcatcagcgacaccggcctgctcgacaacctcctccgccacgtcgccgacaaggtccccgccggcaccgctgaccgcgtccgccgccggtataacccggccggaggcatggagtactggatcgagccggccgggctggcggccgcgcggcgggaggccggcgtcgaggacacgtactgggtgccgccgcccgggtggaagcccggagaccccgtgtcgccggaggcccgcacgctcgaggtgcagaagcaggtggaggtgctcgccggggagcttgccgtcgtaaagaggcaaatggagcagctcgactccaatctggtgcaaatgagcaaggaagcctacatctcatggaaggggtatgactgtatggtcaaggccaatggcaagctggaaaaagaggtgctgtccttggaggagaagtatgagactgcggcacaggtgaatggggagctgaaagagctgctgctgctactgaaggataagtatgatactgtgcttgagaagaatgagaaactggagggccagatggttgctctgtccacttctttccagtccatgaaggaagagttgctcctgcagagaatggaagaacaccctctgctgatgctagcgcaagagccttgggaaggtgacaagcgagaagccggtggtgcgaacaaggctttggtggtgtgtgcaggcgaccagctggccggcgctgatgccttcgatggcagcttcagcagcaaccacagtgcctatggtgacgagaagatggtgctgaggaaacgtatctgcgtgcgggagggagcatgccagtggcctaggtctgctacttccagtggcgctacggctggcagccctggggacctgccggagccgctgacaccgggtgcggatctgatcgtcactgacttcgacaccatgatcgatagcctcgcgctaccgtccatggaggagtacctacaggtcgatggtctccccacgccgacgtctgcctcgtccaccaccgcatctcccaagctccagctcctcccctcaccagcctcgccgagccaggtccagcctctgccgtcaacaaccatggtcgtgggcgacttcaacatgcagctccggcacatggacacgtcgtcgtcgtcgtcatcaggaccgtgcggtgccaaggcgctgaagctcgacgccggagctggaggtggcgaggttggcactgagctggtcctggcgacccccacctactga

SEQ ID NO: 6350 - DNA, 568 bp, Zea mays
  Peptide Sequence Number=SeqID_48129
ggagatgaggagagcagacatgtcatccggcgggttcgacacagaacagggatccgcatttgcgtcgacggcaggcaacgtatgctacagcatggaagtaaaggacgcggttctgccgccatgggtggtctctgggctgtgcgccgccatgagcttggacgcgaccagctttgatctgacgtacgtacgcgcaaccactcccccgccggacactgactctagttctgcgctgagcttttgtcgtgggttctctcgcaggatcgccacggagccgtcgtcgatgggcttgaacgtggctctcgactccatgggcaccaccaccacggatgtccagcctgaaggatccaccccctccagctgctctgcgcccacgacgcccttggtgggtgccgttcctgacgcggccctcgtccctgccctgcactccgcctcgctgcgccgcctcacctacacggacggcggcggcgcagcgcaggcttgttcttttgagaatttggagcctgccctggcctttgtcgtacaaggacgacgtgtcgttacacgcttggttgggttggatggtaactaa

SEQ ID NO: 6351 - DNA, 363 bp, Zea mays
  Peptide Sequence Number=SeqID_48130
atgtggtactgtagcttcgacctcctcctaacggtgttctgcacctacctgtggctgctgtacgggtccctctacctgtggcgccggctccgcgcatgctaccagcacgcggtcctccgccgcggcctcggctacgcgaccgtcggcctcggcgtcttcctgtcggcgatcttcctgtacagcttcgcgagcgtcatcccgctgctgcaggccgtcggcgtctggctcttcgcgctgctcgtagcgtactgcctctaccgggtcattgtgctgcacatcgaggaggaagaggaggagaaggagggcgccgtgctagtagcacagccccacaaacacgctgtcgtcatcaggcctctagtttga

SEQ ID NO: 6352 - DNA, 267 bp, Zea mays
  Peptide Sequence Number=SeqID_48131
atgacctcagggcggatgctgctgccacaaggccctcgcccatgtccccactcgaggggcgagaacaagcagaaggccgtagagttggagcgggtgaaagggcggaccgccatgcaggcggcatgcaaccgcaccaagggggcgcaccctttcggcttcaatgcgtccagcatggaggcccaggcccacacgtcatgtaacaggcgcgccggttactacgtgcaaggaaactgcaccgccacttgcgccagtaccacacctccttga

SEQ ID NO: 6353 - DNA, 384 bp, Zea mays
  Peptide Sequence Number=SeqID_48132
atgcagcactgttcttccctcacgcaacctggcgacggcggcgaccgcgcccgcacgaaggtgtcctcgccggcgggtctaaccctaccggcactagttctacgcattccggagaacgagtcggacaagatggccgaggtcttaccgacgccgctgacgagtcgaggtaggtccacggtacaacgcgagttcggcgaagggccccactccggcgaggaatcgatggcgatcccgacccaaacaccacccgcagaggacccgcacagtttccctgggatcaagcgcaacttcacggctagcaatgggttccgattctgggcgtggttggatttcctactgcggcggtgcggtggagttctctgcgtgttctctgattgggagtga

SEQ ID NO: 6354 - DNA, 1545 bp, Zea mays
  Peptide Sequence Number=SeqID_48133
atgggcagcggggtccgggcgctgatgcgccggaagcaggtagactccgagcggacgcgcgccgccggcagcgcccaccagctccgcaaggagctctccgtcacccagctcgtcgccatcggtgttgggtcgacgattggagctggcgtctacgtccttgttggcacagttgcgcgggagcattccgggccggcattgacgctttcatttctgatagccggaatagcagctgcgctttcagccttctgctatgcggagctggctagccgttgcccttcggcaggaagcgcctatcattattcgtacatctgcgttggcgaaggagttgcatggttgattggctgggctttgatacttgaatacacgattggtggatcagccgttgcccgtggcatttctcctaatctaagttcatttgtgcaaggagttgtgacggtcttaaattgctttgtgatgttatttgttatcatagccggtagctacatcggcttccaaacaggatgggttggctacaaggttgctggcggatttttcccttatggagcgaatggaatgcttgccgggtcagcaactgtcttcttcgcctacataggatttgattcagttgccagcacggctgaggaggtgaaaaatccacaacgagatctgccactgggaatcggaacagcattgtcgatttgctgttccttgtacatgttggtttcagttgttattgttggtctggtaccatactttgctatggacccagacacccctatttcatctgcttttgccaaacatgggatgcactgggcaatgtatcttgtaacaactggtgctgttcttgctctctgctcaaccttgatgggatctatattgccacagccaagaatattgatggccatggcacgagatggcctgctaccatcattcttctctgatgtccataagacgacacaagttccagtcaaaagcacagtagtgactggcatctgtgcagctgctcttgctttcttcatggatgtctctcaactggctggaatggttagtgtaggcacgctactcgcgttcactatagttgctgtgtccatcttgattcttagatacgttcctccagatgaggtacccctcccatcttccctgcaagcatcattccgcttgagccaagaaaatgacgaggaaaagctgaggggtacccttggagatgatgatcatgagcaaggctcagctgaaataagtgatgttgtagtagaaccaatcactgaccccctgatcgagaagcagctatacgcaagcaatttgagtgaggcaaaacggcgtaagaccgcggcatgcagcatcacatctgtttgcataggggttctgatcctcacgacgtcagcctcggcaacattcttgccctttggcggcacgtggatgcgagtgggggtgtggctagtgatgggggtgttcgtctacattttctatggccgcacccacagctcgttgacggatgtcgtgtatgtccctgtggccgaggcgaatgagatatacgggtcatcctcttcgttagggtttgtggcgtaa

SEQ ID NO: 6355 - DNA, 123 bp, Zea mays
  Peptide Sequence Number=SeqID_48134
atggcacacctcgtagaggtcacggtgttggaacctggcgtgcgcatgtgtcgcagatgtgcattacagatgtttgttcaccagcgaacctgcagctgtcgaatctacagagaccagaggtga

SEQ ID NO: 6356 - DNA, 267 bp, Zea mays
  Peptide Sequence Number=SeqID_48135
atggcggcggacgatgtgtgcgccgcgaccatcatgtctgtggagggcatcgtcaaggtctccgtccactacgacatctcctacttcacaccggccaagctccatgatgaagtggagatggatggtcgggtggtggagcagaaagggcggatgactgcggtggcggtggagatccggaagaaggaatccggcgagctggtggccatcaggaggcagtggatgacggcctccaggcccaaatgcgttgctgctcacagcaagatctga

SEQ ID NO: 6357 - DNA, 207 bp, Zea mays
  Peptide Sequence Number=SeqID_48136
atggctgctactaaggaggcagatcactgcatcaaatatctggactgttttgtgttgcaaggtcaggtcataattgttgagaagtgcatttctgttttcactgatgaaaccaccatttctgttttcaatgaatctgttgaactgaactgcaaaaatagaaattgttctattttgtttgagtgcacaaacagaactcaacggaactag

SEQ ID NO: 6358 - DNA, 300 bp, Zea mays
  Peptide Sequence Number=SeqID_48137
atgagctcgccggcgaggtcgaccatctcggccgccgaagacgtcgctgattccatcgacgcgctctaccgcaaggacgaggccctggctgaactcaagtctgaggtgatggaggcgctgcagagggaggtgaggtctctcgacgaagacaactggatgttcgccgcaccgcggtcccgcatcaacctcgtctccaggcctgacacatgtaaggatttttcaagtgattgtgacttcaatgtcatgatatgcatgattgccactttagttggagacagcaaatacatcgataattattga

SEQ ID NO: 6359 - DNA, 555 bp, Zea mays
  Peptide Sequence Number=SeqID_48138
atggtgcgcaaggcaaaggttgagttcgatgagcagccaccggataacttcgacccgaagaacccatatgcggacccggtggctatgctggagtaccgggaacacctggtgcgggagaagtggatccagatcgagaccgccaagatcatccgggagcgcctccgctggtgctaccgcatcgaggggatcaaccaccaccagaagtgccgccacctcgtggaccagtacctagaggctacacgcggcgtgggttggggcaaagatgcccgaccgcccgagttacacgatcaggaaaggagcaagaagacggaccagaggaggcggagggatggagagggatcggggccttcgacggcacatatgggaacgagtacgagatgggaacgggactgtcgagtggtggcggatcgggagcagatgttggcggcggagaagaagcctgaaatattcgtggaggttgagaagagcgcaaacggtatagggccacgcttctctgtgtctcaaatatcctacccttcaagttgggccccaaaacgtttagacaaattttattga

SEQ ID NO: 6360 - DNA, 309 bp, Zea mays
  Peptide Sequence Number=SeqID_48139
atggccggttccaaggaccacttcgatgttttacctaacaatatcattgagccgattatggagactctgtcggctgaagatcagcaggaattcgagaagcataaggagcagctgatcagagaggttaaggcaaagtacctggccaatttcaaggtggtcatgcatcaaaaagccattcggatacaggagactgacctggcgtcattccgacctactgcaattatccccaatgccaacatagttggcctcgaagatcccaaggcgaaggcctctaggattttggcccagaaggctatgagcaaacagtga

SEQ ID NO: 6361 - DNA, 468 bp, Zea mays
  Peptide Sequence Number=SeqID_48140
atggcgcgcaccaagaccacccagcgcaaagcaaccgaagctcatggtgtaccccgacatcagctggctcctagacacgaggggagcagcagtggaagcaacaacccaatagcggatttggaggccatgctggaaattatagaacgcgacacaaccattgactgggccgtaaattcgcgctctttcgcctgggattgtgaggccaaggctctagcccgggtagcgcaactaagtgcatccctggaaaatctgcaagcatattgtaacacgctgcataaagaggtgcacgtgttatatgaccagctgcatccaaatgtgccaccagaagttgcagcaatgggagctagaccatctagaatggctaatagaggatctgatggggagttggacctttttggagcccctccttccatgaacctcgcagatgaacgatctcctgaagctggcagtggagcgtcccaagactag

SEQ ID NO: 6362 - DNA, 1185 bp, Zea mays
  Peptide Sequence Number=SeqID_48141
atgttcggcgccctccgagggcaacatggcgctttcccccctcctccttgcggaaaggcgacacaggggcgtatcgccgcctgcgccgcaccgactgctgagccactcgacagagtgaggctgacagcagccaagtccggccctaggcgccatggaaaactcctcttcgcccgaccccagggctcggactcgggctcagccccagaagacgacgaactccgcttcgcccgaccccagggctcggactcgggcccagccccggaagacgacgaactccgctccgcccgaccccagggatcggactcgggctcagccccgggaagacgacgaactccgctttgcccgaccccagggctcggactcgggctcagcctcggaagacgacaaactccgcttcgcccgaccctagggctcggactcggccctggcatccgccgacggtctccgcctcatccgacccaggggctcggactcgacctcgaccttggaagacagactcgacctcgacctcggaggagcctccacctcgcccaacctagggcacggaccgaccacaagaaaacaaagagccctatggtgaggatcatgaagggaatatgggagacaatgcaaaagaacgcaacggccacacagaaggcagtggacggtgatgtgcagtcagattcgatcaagaaagccatgtccttggttgtagagtgcggagcaccagaggggagtgcagagcatttcatggcgagccagctgtttgcgaaatcagcctatcgtgacatcttttttaccttaacaaccaagaacatgggcacaaagtaccacttggccgagtttcgacaaggatgtaacccttgcggaaagaaggagcaagaaaaggaaagtcttcgtgactattataaaaagttccacctcgtgaaatcacagttgccctcggtcgatgacaaaattgccatcaactatgcaatcaacgaccttcacgcaaatgtactttatagtcattgcataagggaccccttgtccaacctcaaagagctatatcatctcttcaagaaatatgcccatacagaagagctccaccaaagaaaggtcgagtcgcagcgaaagtcgaaagagactccacagtccagcacgacatggaccagagttccacagcaagaccccccctgctgccaagagtgcggccaacaactctag

SEQ ID NO: 6363 - DNA, 411 bp, Zea mays
  Peptide Sequence Number=SeqID_48142
atgtacaatgtgcagtactccgtttctggtgtccccgtgccctccatgcaacttggtaggaaccaaatcatttcagggctcacgcacatccgctgtgggtatgccaacacgaagttcttcgacagtcagtctactacacaactagttactcagtggtcagtgcctcactgggcttcacgcggtgtcaaaatagaagggagattttcctggaccccatggaggcagggaatgagtgagaagaagggagaaaacgtaggtccagcgctaggcagcggcgagtgggcgtccagagatgatgccggcagcggcgggaacagagcacgcacacgccggagggtgggcaggcagggacaggcattgaagacgcacgcatcaacaatcggcaatcatgcagctccacggtcggggtga

SEQ ID NO: 6364 - DNA, 354 bp, Zea mays
  Peptide Sequence Number=SeqID_48143
atggattctcaggcgccaacaaactcagatggtgaccaaggaagaccgccagatctcagatggacgtccgagatccaacgatcggcgaggtcaggacgaccggtcttgagtgcggtggcgccgctcgacccacggcgaggtgtcgccggaaacaaggaggacggccatggcagggctctagaggattggggaaaggctcaggcgcgtttagggcgtcatggtggactcaaccgtgggcacagcgctgaggcggaactcattgaggcagtgggcgcggcagagactccacggcggccgcagaacgagcggcggaccatggagagtggcggtggagcttccttggtgcgggtgtag

SEQ ID NO: 6365 - DNA, 462 bp, Zea mays
  Peptide Sequence Number=SeqID_48144
atgcagaaaaccccatggggtaaccctgaatctaacccgcggtccttcccctattggaacagtacccgcgatggagaaaagggcggcggggcttaccggcggcgagatagcttcgacgaagtggttgacaacgtaggggaggttgtggcaatcacgttgatgtgcgggtcgttggcgggggtggccggcgctcaggtggctcaggcgggtggcgtagagctcgctggaaccaagagctggatctggacagtgagggcaagtgcggagtggagtgttgcgcattcggggtggctttataggagcgggcgcggtgcacggtcgggcatggaccagcgtgggcgcgcggggctagcgtgcaccggcgcgtcagtcgtggtcgagcacgtggcacattgcttatgctcttgttctaacactgataggcttcatatcttcacgaatttgggcaagatcgccgtgtaa

SEQ ID NO: 6366 - DNA, 222 bp, Zea mays
  Peptide Sequence Number=SeqID_48145
atgacgcgacctcccccgaacgcccccgctaatctcgccaccagcggattggagaagaggggccccggaatttgtcaccggagtgcagtcttcaccacgggcgcgcctaccatcgtggccgagcgtcaacaatcgggtaatcgaagaacccgccgtccacatacattgttcactaagtctaggattttaagcgagcaaccccctgacctttctggaaaatga

SEQ ID NO: 6367 - DNA, 174 bp, Zea mays
  Peptide Sequence Number=SeqID_48146
atgagagaccgtgccatgttccatctccgcgcgattttctcgcgagcgccctctgctagcctgccttctcctggtcaggcgctgcctcaggcctattttcaggaaatgtcatgtcctctcaaggtagctaaacgagccagatactttgtagttcgacaacctcaatccttttga

SEQ ID NO: 6368 - DNA, 315 bp, Zea mays
  Peptide Sequence Number=SeqID_48147
atgaccgcaagggccagtagcggctcccatatcgactacacccccggagcggccatcctcgggaaccttgatttcgtcatcaagcaagagagcaaaatggtcggaatggcacctacctggcctcctctgcccgagagccccgacacagttttagaggtcgttggtgacctcaggatcgtctcgcgcaagcgacctttcttcgcgtcctacacggagctttccgggttatacaacgcaaaaacgatgtcctactacggtggctcaagcaacagccacgacgccttccgtgtcgactacgccacgccctggcgatga

SEQ ID NO: 6369 - DNA, 513 bp, Zea mays
  Peptide Sequence Number=SeqID_48148
atgccactgaacctctccccaccaagccaatccctgaacatcggtggaagatgggagaaaaagaaaagaaaacacacgccactgctttggcaaagggaggcaggaagcttgaggcagcaactgcataacttgcaagagcaccatcggaagttgttgggtcagcagctctctggcctggacgtgagagatttgcagaatttagagaatcagctggagacaagcctaagaaatattcgtctaaagatggaccaacttattttttatcagattcaagaattaaacaggaagggatacctcatgcaccaggaaaacatagaactacacaacaaagtcaaccttcttcatcaagagaacattaaattacgtagaaaggcgtatggacaaggagtaaatgagcatccaacaagtactacagttagacacagtattctgaatacagagaatgaagatgttcggatcaatcttgagctgagtgtgcaaggggacaaatcagaaacaccaagtatagggtga

SEQ ID NO: 6370 - DNA, 426 bp, Zea mays
  Peptide Sequence Number=SeqID_48149
atggggagagggaagatagagatcaagaggatcgacaacgcgacgagccggcaggtaacgttctccaagcgccggggcgggctgttcaagaaggccaaggagctcgccatcctttgcgatgccgaggtcggcctcgtcgtcttctccagcaccggccgcctgtatcacttcgctagcaccagatttcaacccagctgctttgccgagtgcttcatatactcgacaaagtctagaaaatactcgacgaagtctttgccgagtatgactttcagcaaactgtacatcgacaacggtttctttatcgaataccttttgtcgaacactcagcaaaagctttgtcgagtgccacctggtactcagcaaagaaaagtcgtcatcatggcgccaagtaacggtgacagagcctttgccgagtgtcctccgtga

SEQ ID NO: 6371 - DNA, 126 bp, Zea mays
  Peptide Sequence Number=SeqID_48150
atggaatctgtgattgaaagatacgaggaaagagaggggcaccatcagactatgagcgcaagtgctgaggccaaggtacccgatgaggggcccagatcccatatgggcaggctccagaccccctag

SEQ ID NO: 6372 - DNA, 312 bp, Zea mays
  Peptide Sequence Number=SeqID_48151
atgcccccaattgccggtgtctttctccggacgtgctcgctgaccgacgggccccagtcgcccaccccactcggtgctgtcctggaacatgtggcacagttgctaattttggtgccttctaccatatcacttcggatgctggtatactatcctcatccaatccatctcatgtctcatccttcgtctgtcgttatggacaacatgaccatcctcacgttcacctctgacattgtggacaacatgaacatcctcctgttcgcccgttgtgatagctctaggcccatgccttcgttcatgttggctaccggctaa

SEQ ID NO: 6373 - DNA, 390 bp, Zea mays
  Peptide Sequence Number=SeqID_48152
atgcccaaagacatgtaccagtccaagaaattgcttgaaggtcttggtatggagtatgagaagattgatgtttgccaggacaaatgcggcggcgattttctctcggtgttcgcgcaagaagggtggttgagggaagaaaggagcaggaggagttcctacttatcccccttggactcagctcgggatatgggagagggtcggccacgatttaccggcgacggcagcgagtttctcgcgcgaggtgggcgagcatcacgacaatcactgagttgggggatgacaacgtgggtcccgtgcgacagtgtaatgggtgaggcgaacgcggctggcgcgtatgaccagggggacccgcatgacagggcgaacggcgtgcaagtcaaccgcagctga

SEQ ID NO: 6374 - DNA, 1461 bp, Zea mays
  Peptide Sequence Number=SeqID_48153
atggcggcagcgtggaggccgcgtgacaacgatgacgacgacgaggacgatgcgggcggcggagccgatgatgatgatccgcacaggagtggccctaggcctacgcagacccgtgttgtaagaggatttgtggaccaagaaagtattcaacaaatattccactatctggaaccacttattagtagggtggtgcgagaggaaatccagaacatcttttcgcattgtcacaatgatcacatgccaatcaggtctcttcctctacgcatccgagaggcacatgtcttgccccatctgaagctagtctttgctaagcagcttaagcaaccaatcttcacaaacaacaaaatcgttgatatagcgaacaacccaattgaaatccatctcatggacacgacaaccaactctatgatcccaccagcagatactcaccttggaccatcatcagtagtaagactagaagtgctggttctgaacggtgattttcagtgtgaggaccgtgatgtgtggacggctgaccagtttaatgcagtggttctgaaggctagagaagggaagagaccattgctcgtgggctcactcaatgtccctatgaacaatcatggagtggctgtgattgatgatgtgttctttactgataattcgagctggataaggtgccggaagtttcgaattggtgtgcgcatcatgcccgcggatcatcttggatcaagagtcaaagaggcagtgagtgagagcttcaccgtcagagatcatcgtggtgaatcgtacaaaaaacactatcctcctttgatgactgacaacatatggaggctcaagaacattggaaaagatggaccaatcgataagaggttgcagtctgaggggattaggaacgtccaggacttcttgaagcttaacaccatagatcctgaaaaactccaagctctcgtcggcatgtcagataagcaatggaacacaacgctgaatcatgcaaaaacgtgtgacatgggacggaaatgttacactttcaagactgtagggtgtgacattacctttaaccccataggagaggtcttacgggcaagaattggagaccatacatttcctctgcaagaactgcacccatatcaactgttccatgtgaagcaactggccgctcaggcataccagatgtgggatcaactggaagaagtacccaatgaaaaattatttgctgcaaataagagctttgttccaagaagtagttctgatcaggagcggactgagagccaagcagagagcatgatcagctcagggtcgcagaatactaagtatcttgactacacaggaactgctacctctggtgccgcagcaatgccgaacagctgcagcacatcagattctataggagctgctccagctgatgatgccatgctctggagaccgagcataccaccagaatgtaacttcagctggcaggactcagcagcttgttgggattaa

SEQ ID NO: 6375 - DNA, 606 bp, Zea mays
  Peptide Sequence Number=SeqID_48154
atggccggaggaaaagtaaacaagaaagggtgccgcctagccgaaggtaaacgcaagcgtccagcaagccctccctcagaggactttggtgacttgaagtactcggaggaggagttctcctccgagtacgaccgctctcccgctccggcgtcccccgtggcgtcgtccgatgactcggacaactccatggggttgtcggctgtggagcaggcgtacattcggtccatcgagcatgtagggctcggcgggtcggatgactcggaggaggaggaggactcctcggactccgaggagggtgacgacgacgagggcggtggcggcagtagcgagggcggcgacgacagcagcggggcggcgaaggcgacgacgaaggtggtagtggcggcggcggtgacgccggtggcaatcaacagcaacaacaacagtagtagtagtgcagggctcggcgggtcggatgactcggaggaggaggaggactcctcggactccgaggagggcgacgacgacgagggcggcggcggcagtagcgtgggcagcgaaggcgatgaccaaggcagaagtggcggcggcggtgacgccggtggcatgtgccaccgacttaaatag

SEQ ID NO: 6376 - DNA, 1056 bp, Zea mays
  Peptide Sequence Number=SeqID_48155
atgaagaggacctctactggggagcggaagcagagtggcctttgctatgatgggaagatgaacgccatagggctggtggaatacaccaaaatcgagcttcactgtcgagccaggctgagtgggtacagtataaaggtgatgggcccacgtgtcagtcttgcaggtcctcgggagcttagtggtgctgtggacttaattagtcgctacaagctgctgaatcatcatagtttcttttgcaagaagcctttgccattggcaatttcagatacaaattaccttaacaatgttgtgggtgacacagaaattcgtaagggggaagggatggagttggaccaactctttcagaactcatgttcaagtgagaagactgcttacattcagccatttgacatggaaacactaggacaagcatttcagctgcgagaaactgcaccagctgaaaaaggtacaccaaccatatctgggaaatccaaggtcaagtccaaggataaagtgaagaaacataagaaacacaaagagaaagatagagacaaggagaaggagcagaagaaacacaaacatcggcataaagatcggagtaaagataaagataaagataaggacaaagacaaagaaaagaaaaaggacaagagtgggaatcatgatttaggtggtgatcattccaagaaacatgagaagaagagaaagcaagaagtaactggaagttcagcaaatgtccaaaatcacaagaaaagggctcaggtgtcgtggccctgccactgtttagctcaggggagaggagggggcatggacacaggcaaagctgtagcaacgacaaggagctactggcggcggcacagagaacttggagttgtagttcgtgaactggggcactgttgggcggctgatccacatccggccgtccatgactgtttcgtcgaccggtccgcatgcaacaaaaacgagatttgccggtgcctcacatggttcagctttggcttcatcattggcgtcgacatcttcatgctcactgagttcactgttgagatctccatgagcagtggccatgcttattaa

SEQ ID NO: 6377 - DNA, 666 bp, Zea mays
  Peptide Sequence Number=SeqID_48156
atggcttgccctaacctcattctcaaatcaagagagcccactcttgatcagctaagtctagcctcgagcgccataggaagctccacctcgcccaaccccagagctcaggctcaacctcgacgccggacgacggactccgcctcgcctgaccccaaggctcggactcagcctcgacctcggacgacggactccgcctcgcccgaccccagggctcggactcagcctcgacctcggaagacggactccgcctcgcccgaccccagggctcggactcagcctcgacctcggaagacggactccgcctcgcccgaccccagggctcggactcagcctcgacctcggacgacggactccgcctcgcctgaccccagggctcggactcaacctcgacctcggaagacggactccgcctcgcccgaccccagggctcggactcagcctcgacctcggacgacggtctccgcctcgcccgacccccgggccaggactcagcctcgacctcggaggagcctccgcctcgcccgacctcgggctcggaccgaccacgtcacaggagggaccatcattaccctactcctagctagctcaggctacggggaacaagatcagcgtcccatccggctcgccccgggaccccccggggtcgaaacgccgacaggcggctag

SEQ ID NO: 6378 - DNA, 954 bp, Zea mays
  Peptide Sequence Number=SeqID_48157
atggcagatgccgttgagaggcggcagcccggtggcatggagaccaccaagaccggttccgagggaacgctcggccgcgtcgtcaggagccaagtgtttggcaacgaggacgacgaccgtgctgggcacggcgacggcgacgaggtgagcaagccgcgggcggtggtccacacactgacgtgcgagcgcaagccattgttcgagggcttcgcgctctggcggagcatcggcagaattcatatgggcggcatcagttaccacgacttttcaggccacaagggaaccatcaacccaggagacgttcagtggctgacggcggggcgcggcgtcgtgcacgcggagatgcccgccgccggccagggagtacagaggggcatcaacatctggatcaacctctctgccgccgacaagatggtggagccgaggtaccaggacctggcgagccacgacatccccgccgccgcggcggacgccgctggcggcgtctccgtcaaggtcatcgcgggcgagtgcctcggcgcgcgctccccgctccggccccgcaccccggcgctgtgcctcgacgtcgccctgcggcccggcgcgcgcctgcgccagcctgtcccgcgcgggtggagcgcctgcgcgtacgtcatccacggcgaggccgccttcggcactgcctccggcgagggtaacggcgcctccacggctaccgcgcgcacgctcgtcgtgttcggtggcgacggcgacggcgtggagctgcggggcgatgcagcgggccagggcgcgagggtcatgctggtcgcagctcggtcgcacggcgaggcggtggcgcgggacggccccttcgtcatgaatacccgggaggaggtggaccaggcgcgggaggactaccgccaccgccgcaacggcttcgagatggccgacggctggacctccgatcacgcctccgcagctgaaaagcattcatag

SEQ ID NO: 6379 - DNA, 201 bp, Zea mays
  Peptide Sequence Number=SeqID_48158
atggagaggagacggatcaaggaccaggggcatgcaagcagtggcggcagacatggcggtgacgtgcgttgtgtgtctgtgtgtacggactttgcagtggcggcgccggcaggctggcccgtggagcaaatggacaacgggaaggcgtgcggttatgtctatgtggtgatggttctgctggtggccacggccggcgtttaa

SEQ ID NO: 6380 - DNA, 354 bp, Zea mays
  Peptide Sequence Number=SeqID_48159
atggcttcggtcgacattggaggaaggaaggaggagcagagggaggaagatggccggagaggagctcggagccgatgccccgacggcgttgacgaccgtggaggcgcgagcaggggcgcgcgtcggccatggggacctcctgctcagcgcccgagcgaaggaggggccaagccgcaggggaagctgcaggggagggtgtgtggcgccatgggagagggaggagatccccagcttgctgtcgtgtgggagaaggagaagctccacgggagagacggctgggagaaaaagaaagggtggcggctggttgatttaacaggacaccgctggtgttggggacttgttctcaaatgctaa

SEQ ID NO: 6381 - DNA, 219 bp, Zea mays
  Peptide Sequence Number=SeqID_48160
atggcgaccggccggcgtctcctccttgctgactggaaacggagaacaggtggcgtcatcgcggcggacgggacgagcggtggaggcgcacgtgtcgcgcatccgggacccggggttcgacgtggcggcgtggcgtcggtgtcagtccctttcgtgctcgccagtggtgtcaccggtgcaacgggccttggtgtctggtctcctttagccatgccctga

SEQ ID NO: 6382 - DNA, 405 bp, Zea mays
  Peptide Sequence Number=SeqID_48161
atgaggttgtctgttcgtgtgatcgaggcccgcaacctgcgggccatggactccaacggcttcagcgacccgtacgtgaagctgcagctcgggaagcagcgattcaagaccaaggtgatcaagatgaacctcaacccgacttgggatcaggagttcagcttccttgtcggtgatatcaaagatgtgctcaagcttgatgtctatgacgaggacatcctccagatggatgacttcctgggccatttgagggtgccattagaggatgtgctgtctgccgatgacttgtcgcttggtacccggtggtaccagcttcttcccaaaggcaaaaccaacaagaccgtcgactgtggcgccgccggcgacctttcgccgccccctgcgcacgcgcggaccgtccggccctag

SEQ ID NO: 6383 - DNA, 468 bp, Zea mays
  Peptide Sequence Number=SeqID_48162
atgaagaaaggaaggatccagaccggcggcagcaaagcccaggtcgtcttgttgtcacgcccatgcccggagacgtcgctggcgcggtgcctgccaatgctgccagtgatccggagtacgtacttggctggcctccgatccaagaaaagaaaccgacttgctgtgacgggcgccgcgcgacgtgctccccatccatccatccaatcatctctcgatgagatcatgggaaggaacgtcgcgatcgttggcgtggattccgctggccccgtgcctgcctgtttcgtccctgcaccgccgccagccgcttctaccgccgacaggctaggcggtgaagatgagagagacaacagcgagatgaaatcaacgatgacacctgttggcgccgatccgggcgccaatcaccgcgatgagaaccgatggcggtgctctctgcagaggcacggatggtctgtggccagggccaaatga

SEQ ID NO: 6384 - DNA, 564 bp, Zea mays
  Peptide Sequence Number=SeqID_48163
atggagcccgcggtggctacagcgggtgaagggcagcggttcaagcggattccgcggcaggcgtggtcggggaacctcgaactgggtcctctgcttaatgaaagcttagatcactggccacatctaaatgagctggtacagtgctacaaggctgattttgtgaaggatgactgcaaatatggacactatgagagtgttgcatcaccgtctttccaaaatcaaatttttgagggacctgatactgacatagaaacagaattgcagctttgcaatgcaaggcattccaagtctgaggatgctactgaagatgatacaccaagcacctcagggaggcaaatatatgaaactgaatcatctggttcgtcttcaaaagtgcactgtagtttgtcaccattgccagcatatgaggctgcatttgattgggagaatgagaggtctttgatatttggccaaagggtgccagaaaaacctttcagtggaacgatttgcttgtataacagagatagaagagagaggctgtcagaggacttctatttccatatgcttccaacagatatgcaggtt

SEQ ID NO: 6385 - DNA, 678 bp, Zea mays
  Peptide Sequence Number=SeqID_48164
atgatgcatgtctcttgcagtgtgcagcaggagtcatcagatggggctgaaagaaatagattccttattaactatgttgattttgctttcgatgacttcggtgatcggcaagcccctgtgtatcctggtctgactactgtttggggaagtcttgctcggagtaagataatccaagctcctaaaataaccaaagagttgaagtctttccttgctgcctcaatcactctggagcttctactcatccaccgtgtctcaaaagaatggtcttcctattggggacagaggccttgccaacatccaatcttcaagagctcaaaccagaattgtttggcaaagacgcagtcaaccagtgaagatgtcccaccactgcaattgaaagaaggtgtcttcaggtgcatcatgcagctctttgattgccttctaactgaggttcatgagcgttgtaaaaagggtttaagcttggcaaaacgcttgaacagcacacttgctttcttttgctatgatcttttatcaattattgagcctcgccaagtttttgagctggtttcgttgtacatggacaagtttgcaggagtttgtcaatcagtccttcatgactgcaaattgacattcctgcagataatatgcgaccatgatctattcgttgagatgcctgggcgggatccttctgataggtag

SEQ ID NO: 6386 - DNA, 204 bp, Zea mays
  Peptide Sequence Number=SeqID_48165
atggaggtgaccagtagacttgaagttctccaggagagcactacgccgagtccagcgtattgcgagtgggtcgacaagaccagcccggcgctgagttacttggggttcgctcttttcgagtgtagaagcggcgaggtagatttcctgtctctcacgctcctgcctactctttcgatcgcccccgagccacgcacagaattgtga

SEQ ID NO: 6387 - DNA, 2031 bp, Zea mays
  Peptide Sequence Number=SeqID_48166
atggatacatgtggaacagggttacatgtttctctttttaacctgaggcaattcttgcaggaactttgggaagaaaatctcagtactgccgtgagcctcgaagtgttgggaataactgagaagttttcagttgctgcaggcgctcgaagcatcactactgattacgcgaagctagattgtgtaacatcaatcttaatgggtcttttatctaggaaccaatccttggctttttggaaggctttccttcctgtggtctacaatatatttaatgttcatggtgcaacactaatggcaagggagaatgaccgcttcttgaagcaaattgcttttcatcttttgcggcttgctgttttccgaaacgattcgattagaaaaagagctgttgttgggctgcagattcttgttaggaactcattcaactatttcaaaaacactacaaggttaagggtcatgttgacaattactttgtccgagttgatgtccgacgtgcaagtaactcaaatgaaattcgatggttctcttgaagaaagtggtgaagctcggcgccttaggaaatcactggaggaaatggctgatgtgagaagcaaggatctgttaaaagattgtggcctccctgttactgcattggaggcggcccctgaaggctcctctgataataggtggtcttgggtagaggtgaaacatttgtctaaatgtctagtccaggcccttgatgctggtctggaacacgccctcctggagatgcaatcatgggctgaagcagcacaatgtgcagttgctgtagctggcgtgatcatgcaggcacttgttggaaggaatgatgctgtgtggagcaaggagcatgttgcttcgctgcgcaagatttgccctattgtcaacactgatgtgagtgcagaagcatctgcagctgaagtcgagggatatggtgcatccaaattaacagtggactcagcggtcaaatatcttcaactagccaataaacttttcacacaagctgaactctaccatttttgtgcaagcattcaggaactcataattcctgtgtataaaagcagaagggcttatggacagctggccaaatgccacacatcgctcacaaacatctatgagtcaattcttgaacaggaggctagccctataccattcattgatgccacatactaccgagttggtttctatggtgagcgttttggcaagctcaataaaaaggagtatgtatttagagaaccacgggatgtacgtcttggtgatattatggagaagcttagtcatatatatgaggctaaaatagatggaagtcacactttacacataattccagactctagacaagtcaacgctgatgagttgcagcctggcttctgctatttacagatcactgctgttgatcctgtgatggaggatgaggacttgggtagcaggagggaaagaatattttctttatctactggtactgttcgtgcacgtgtttttgaccgttttcttttcgatacaccattcacaaaaaatggaaaaacacaaggtggtctagaagaccagtggaagaggcgcacagtgctccaaacagagggttcctttcccgctttggtgaaccgtctgccagttatcaaatctgaatctctggagttctctcctgtcgagaatgcgattggaatgatcgaaacaaggacagctgcattgagaaatgagctagaagaaccacggagttctgaaggtgatcaactcccaaggcttcagagcttgcaaaggatactccaaggaagtgtggctgtgcaggtcaacagtggggtattaagtgtgtgcactgcattcttatctggtgagccagcgactaggctcagatcccaagaactgcagcagctcatcgctgcattgcttgaattcatggctgtctgcaagcgtgcaatccgtgtgcatttcagattgataggggaagaagaccaggaattccacacccaacttgtcaatgggttccagtcactcaccgctgagctatctcactatatccctgctatactctccgagctatga

SEQ ID NO: 6388 - DNA, 573 bp, Zea mays
  Peptide Sequence Number=SeqID_48167
atgaagctcatggatgacaaacattctacattttttctcataaactatctctcgtcagttctcatccaagagatctttctgaccttagaccatgatgatttatctcaacgagcgaaggctgctcggattttggttgtccttatatgcaaacatgaatttgatgcacgctatcaaaaaagcgaagacaaattgtacattgctcagctgtattttcctcttatagggcagatccttgatgagatgcctgttttctataatctgaatgccattgaaaagcgtgaagtgctagttgtcattttgcaaattgtgaggaacttggatgatgcaactcttatcaaagcatggcaacaaagcattgctagaaccagattgttcttcaagcttcttgaagaatgtataatccatttcgagcacaacaaaacaggagacaacatgctacttggtgctagttctcggagcccagatgtcgagcatcctgcatccccaaagtactctgaacgattgtccccatcggtcaacacatatttgtcggaggcttcgaggcatgaaataagggtaattgttctccagtag

SEQ ID NO: 6389 - DNA, 375 bp, Zea mays
  Peptide Sequence Number=SeqID_48168
atgaatgtgctcccgttgaacgcggatcgagctaatctagggagggaaaaggcaaagctaaaggtgtcccgagtagctaacggcgagcggaactcaccaaggctacggacgggcgcgggcttgacagcgatcatagacggacagcggccttcggtgagcggcgacagagctacctggtcgcgtgcggagagcgagagaggcggcgagagggttcggctgagggcacaagtgagcgaggggaagtgggcgagtgggcgcagggctcaaaaggggcgaggacgtgcggaggtggctggagatcgcacggtcgtgggcgcgtccacggtgggagaacatgggcgggagtttgaggacgagctgacagggaatttctaa

SEQ ID NO: 6390 - DNA, 162 bp, Zea mays
  Peptide Sequence Number=SeqID_48169
atggcatcagaagggggttacctgaactaccgatctgtgatgtcagtgctcacatttaatatcgccatggaatcaaattatgagtaccaacaaatctctagccatggttcaaaagatgctccaaccataggttatctacatgtgttaatgattagggattag

SEQ ID NO: 6391 - DNA, 1296 bp, Zea mays
  Peptide Sequence Number=SeqID_48170
atgggggacaaggagaacgcacctcccttgggggcccggggcgcggcggcgccccggctcacgcgggccgcggccaagcgagctgcggcggcggcggcggcggcggagggtccgggcgacgccaagcggcggcgggtggcgctcggggagctcccggcgctcgccaacaacgccggcctccgcgcgccgtcctgccccgtcaagccctcgaagcctgcgtccaggcccgggaggcacgcgaggaatgttgcgccggaggcccgcgggccctcctccgcccacgaggccgagcgctgcgcgtcctccccgccgcgcaccgccgacgccgacgccgagtctaactccgtctccaaccccgcgccgcgcgccaccgcctacgccgactcctgcgcttcctcctcgccgccgcgcgccgccgccgccggggcgcccgccgacccccagctctgcgggtcctacgcctccgacatctacacctacctccgctccctggaggtggagccgcagcggcggtccagacccgattacatcgaggcggtgcaggcggacgttacggcgcacatgcgcggcatcctcgtcgactggctggtcgaggtcgccgaggagtataagctcgtcgccgacaccctgtacctcgccatctcctatgtggatcgcttcctctccgtcaatgcgctcggccgcgacaagctgcagctccttggcgtcgcctccatgctcattgctgcgaagtatgaggagatcagcccgccgcacccggaggacttttgctacatcacagacaacacctacaccaaagaggagctcctcaagatggagagcgatatactcaagcttctcaagttcgagttgggcaatcctaccattaagaccttcctgaggcggttcacaagatctgcccatgaagacaagaaggttgctaacccattcttatttatgcgctccatcttgttaatggaattcttggggagctacctggctgagttgagtctactggattatggctgtctccgattcttgccatcagtagttgctgcttcagttatgttcgttgctaggctgaccattgatccaaatgccaatccttggaacatgaagctgcagaagacgacaggctacaaagtttctgaactcaaggattgcatcgtagccatacgtgacttgcagctcaacaggaaatttccatcattaacggcaattcgagacaagtacaagcaacacaagttcaaatgtgtgtcaacgcttcttccccctgttgtggtccctacttcatactttgaagacttagctgagtag

SEQ ID NO: 6392 - DNA, 531 bp, Zea mays
  Peptide Sequence Number=SeqID_48171
atggggcagggaggcgctagggcccaggctggtggccaggtagcctcgagcccacggggaacgttgccagctctgcggtcctacgcctccgacatctacacctacctccgctccctggaggtggagccgcacggcgtccagacccgattacatcgaggcggtgcaggcggacgttacggcgcacatgcgggcatcctcgtcgactggctggtcgaggtcgccgaggagtataagctcgtcgccgacaccctgtacctcgccatctcctatgtggatcgcttcctctccgtcaatgcgctcgccgcgacaagctgcagctccttggcgtcgctccatgctcattgctgcggcattgcacaattggggattgatttgggtccggcgctcacaggaagtatgaggagatcagcccgccgcacccggagacttttgctacatcacagacaacacctacaccaaagaggagctcctcaagatggagagcgatatactcaagcttctcaagttcgagttgggcaatcctaccattaa

SEQ ID NO: 6393 - DNA, 534 bp, Zea mays
  Peptide Sequence Number=SeqID_48172
atgaggataaaaaattaccgaggaactgcaaagcgaaagcagataaatctgcacaccaaaacggtccaaagcgccagctgcatcggcggcctgacgagcctggtctccctcgacctctctaccagctacgagttctacgatctactcgatgacagtttcctgctgcacagagactcgaactcagatgcgcgactcacgatccaaatcttcgagaccttggtcgcgaacctaagaaacctaagggagttgtacctcgtggtcctctccagcgacgacgacgtcgggccgtgctggcgttggtgcagcatcgtggccgcatcgtgccccgagctccatgtgctcagcttgccacgctgcaggctctctggccccatctgtggccgcgccggcgggagcggcggccaggggcaggggcgaccacggcgggcggggtcgaggctggtgcgtcggcgggcacagcttgcgcgggtgggagcaggcgttcagcggcggcttcgatttggtggaagagacacgggagtgagaaaggggtga

SEQ ID NO: 6394 - DNA, 315 bp, Zea mays
  Peptide Sequence Number=SeqID_48173
atgggcgcgttcacggtgggggaacgtaggtgggaggttgaggacgagctgacaggtggggtcggcggggcagagagagaaacgggtgcgcgtgcgaaaggaacgacaccgatagggctggcccactggacagcgggagggagagaggggagagagggcgcgcggattggcgccgacagggttttcaattcaaattcaaaccaagtttcaaattcaaaccaaatcaaacatgtgcaacaattcaaagaatatttggaactcaacatgatgcaacattacaagactcatatgttttgtcaaaaagaaaataaataa

SEQ ID NO: 6395 - DNA, 1473 bp, Zea mays
  Peptide Sequence Number=SeqID_48174
atggatgcagtggcgaccagcgacgccgtactcctccttgccgccgtagctatctccctgctcatcactgccactttctggagcaggcatcgtcgtcagggcgaagcgccgagcccgccgtcgctaccgctgctgggccacctccacctgctcggcaacggcaagccgctgcaccactcgctggcggcgctggccatcgcgcgcggcaccgggggcgccccggcgccgctcctgtcgctgcgcctgggcgcgcggcgcgcgctgctggctcaactacggatacaccacggtggggctggtcctcgcacggcgaccactggcgcgccctccgccggttcatggccgtcgagctgttcgccgcgtcccgcctcgccgcgcgcgccgccgaccggcgcgccgaggtcgccgcgctcgtcggcgccgtggtccgcgacgccccccgcgccgggcgccgcggtggcgctccggcccaggctcttcgagctggtgctgaacgtgatgctgcgcgcgctcaccggcgcgcccggccacggcggcggcgacgtgcgcggcctccaggagatcatcgaggagaccttcgcggtgaccggcgtcatgagcgtcggggacttctacccggcgctgcggtgggtggaccgtctgcgcggggtcgacgcggccctgctccgtctccaggcgagacgcgacgcgttcgtcgccggcctcgttcacgacggacgccgaagccacaatcgcaaagctggcggtggcggtggcccaacagacacggagaagaggagcaccattgacgagctcctgtcgctgcaggaaactgatcctggctactacaccgacactgtcatcaaaggcattgtctcgatactgctcagtgcgggcacagacacgacggcgctgacaatggagtgggcaatggcgcagctgctgatgcaccgggacgcaatgcagaaggcgagagccgagatagacgccaacgtcggcacatcccggctggtagacgagtcggacacgactcacctcccgtacctgcaatgcgtggtgaaagagaccctgcggctctgccccgtcggcccagtcatcccggcgcacgaggccatggaggactgcgccgtgggcgggttccgcgtccggcgcggcaccatggtcctggtgaacgcctggctcatccaccgggaccccaggctgtgggaggcccccgaggagttcaggccggagcggttcctggacgccactgccacggtcgccgcccccttgctgccgttcgggcttggacggaggcgctgccctggggaagggatggccttgcgtctcctcagcttgactctggcggctctcctgcagtgcttcgactgggaggtcggtgggtgtgttgacatggccgaaggcgttgggctgtccatgcccatggccaagccgttggcggcagtctgtcggccccgggagttcgtccagaccgtgttgtctgcttcaacatga

SEQ ID NO: 6396 - DNA, 546 bp, Zea mays
  Peptide Sequence Number=SeqID_48175
atggccggtccacggcgggtggcgggctctgcggcggtgagaccgccggcgaggccaatgggtgaaataggcgaggggaaaaaggtgtgtcgttctcgcggtgaagtggcggagctcaagagctacactaatttgactagaatccaacagagaggggaaggggggagctcaccggagatggagatgacggcggcgctagctcaattgagctcggggaagggggaagagatggccaaggctggggtgaggaattggggagctcgtggcggtccttttttaggcgcccaaggcggggaagggggtgagaggtggcgagcaccggcaagctcgccacagcggggatggtggcgcacagtggtgacgacgggatggctcgggcagacggggcgacgggatggctcaggtagatggggcggtaggatggctcaggtagacgcaagccaccaaaccgagatggtgagcgcgataatggcggggcgacggggcgggaagtggccagcggcgatcgtgtctctagcccggtcacaggcgcgaggaaggcattga

SEQ ID NO: 6397 - DNA, 294 bp, Zea mays
  Peptide Sequence Number=SeqID_48176
atggcggttgcgccgaggagggggatgacagttcataacttccctgaggtttcatctactggaagggaaatacatcttcaacttaaaatagatgccctattcctaaagagagagggaagagaaaagagaaaaagaaaaagactaacacttgaatttgtggatgagagcaaagagattttagaccccaaaagtcaggttgttacaatgagctatgaagctacgatatcttcgtatggcgacaacttagcagtgatggccaaatcctttgtcatggttatcaggaatgtcacataa

SEQ ID NO: 6398 - DNA, 174 bp, Zea mays
  Peptide Sequence Number=SeqID_48177
atggcgtgggcggcatgggtgatttataggcattcctgttatttagttggcaataattctgctgcaaccaccaccagcaagctctcgtgtcgctgccctcctgccgcggcccagctctgcaaccacgccggctgcagggagaagcccaagcaggtggatgtggaggatgagtga

SEQ ID NO: 6399 - DNA, 885 bp, Zea mays
  Peptide Sequence Number=SeqID_48178
atggtgttgtgggtcttcggctacggctccctcatctggaacctcggcttcgacttcgacgacaaaatcctcggcttcatcaagggctacaaccgcacctttaatctcggtggtgacacagtattacatgtgcaatttagatatggatttggacgactaaaatcatttactgaaatgtcagcatggtacaagcctacaaggagaaagtttatccaaaaaacaagacttctaatttatatcgatatttatgacatgtgtttacctgttttgtcaagaaccattcaggtcataaacccctacgacaggggccacgagggctcatcttcgccactgcccctactcccaccttctgttaacagtattattcctggcccgattaaggaggtctctaactgtgtctatgagaacgagcatgtcctgctcggtgctgttccattccctagcgatgttctccggctaaagacgcttggagtttgtggtgtggtgacacttaatgaatcatacgagaggcttgttcccacatccctatacgagattagttttgcacaggcactcgtttgtggtatgctggttctactccctggatatgagcccttgggcctccagttcgggcaacaagcatatggcaaagagaaggcaaaggatccttcagagttcatcactcatcgagccaaagattttgtgtcaagcatgaaggacattgaaacccggtttatgtgtatagttgaagcaggaaataaggtttctagaatgcttgaaaccaagaagatcttgcttgacatatgtgctaaaataccaggtacaaaatacatggtgatccaaggtgaacctagagtggtcatccgaggaaagaagtttattgcatttgcaagcttcgtgtcctag

SEQ ID NO: 6400 - DNA, 447 bp, Zea mays
  Peptide Sequence Number=SeqID_48179
atgccttctatcgactccgcgctggcgtctaccatcaccaccatccaggctgccctagaggcctcgaaggagcgcgagcgcgccgcgacccgcgcactggatcaggagcgcacattgggagccactctgactgcccagatggctactgcacaacgtctcatcatcggccccctccggtcgttattgagacaccaccgcccaccccagaggctcccaacacctctagactcgacgccgatcacatcgccgctctccacgcccaggtcgccgaacgtttgtatccgtgaacccttaaagcacgttgtgattggtttgagtgaccaacgtatccaaagagagggcgtgcaatccggaggccgggctgccacatacgcagctggcaagcgttcgagcgcatctgcgcatacatgctcacttatagatggccaaaaagcacgagtcccgtga

SEQ ID NO: 6401 - DNA, 150 bp, Zea mays
  Peptide Sequence Number=SeqID_48180
atgggcaaggcaaggcaaggcttgctatccaagcgaggtgaaaagaagcagcataggaaggaactcattgcaaagaagcgtcaacaacgagctctaagcagaggagttgacttagggcaaattaatagtgttagtcactgctttacttga

SEQ ID NO: 6402 - DNA, 378 bp, Zea mays
  Peptide Sequence Number=SeqID_48181
atgtcctcagatcagagcaccgtggatgtcaccgggagatacaacgttgacgatgaacttgagcaggaggtcgtgggtcagcatggtgtcgatgccattttgaaagggaaatgtgtcccttggggcatttctattttattttgggactacgagaagtcaagtaaaaaggagcaaaagaaaattgaaataagaaaggagaaattgggttgttctgcagagcaccgggcggtccagtgccatccaccggacagtccggtgcacggtttggccaaacaagccactctcggcaaaaccaagactttgtcggctataaatcaccggacagtccacaccgagcgccggacagtccgatgtgctaattgggcaacgaatagttga

SEQ ID NO: 6403 - DNA, 471 bp, Zea mays
  Peptide Sequence Number=SeqID_48182
atggcggcccgcctgagggtggatctcgacgcagtcacgaagaatagtgttcatggccccatcaaagtccacgaaggtgtctcggacaagctggccgtcgtgaaggaggaactgggcggagccaggaaggaggtggcgccgacggccagggcaaaggcggggccggagaagtcgggagctacggaagcagcgggcaaggcaaggctcatcggtggggaggtgggccaccaggggctagtggagggccaccgggggtcgtcgccgctcgtggagtgggccgagcccaccgaggtcgagcatgtcggagagggggctaggcacgccggaaagaagaccagcggtcgtacggcagcggatggcaacctgcttgcgcccgagcggtgggaggacgcgcctatgcccgacagcgggtggctgaaaccacccgagggtccgaaggtggccgaaaaacggtggcccgggggaagatag

SEQ ID NO: 6404 - DNA, 327 bp, Zea mays
  Peptide Sequence Number=SeqID_48183
atgtccctgagccagagggggaattggttgtgtttgaggctttctttgctgctggtcttcgcttgccagctcatcggcgacgtcgaagggttgcccagcttgccgcctgccatcttgtgctcgcactgctacgtggcgtttccacaatttgaggtggcggaggaggatcaagatgaggaagcccttcgctacgcagcccgcctgagcagtgggcgcgacttggtggaagagttcatcgcttatggggtgtggcccttggcacatgggtgggttctaggcgagattacaccgcaccggatgccaaccctgggtgatagattggcgtga

SEQ ID NO: 6405 - DNA, 570 bp, Zea mays
  Peptide Sequence Number=SeqID_48184
atgcagaggcccaagcttgcccgcaagcgcgccgatgacatggagctggagctaaagaatatccatgaccatcgtgaaaggacggagtcctccacctgtgctggggtcgaacgggcgcacatgctttttgtggatgcgtaccatgaacttggtgcgcagaccgctccctttgacgaattggggaaggaggtggggctccgctttctggtgtggctgcaagacgagctggagttgctcccgtccattgtgacaggtctcatgtcctacgcgtctctcgttacttgcgagggggctgcaaatgctttgtttcgagagggatgcatgcattttgaagtcttcgaccgggagaatgaggacttcgatcatggagtattccagattgaagatgacgtggcaggggtgctttatgataggatgtgggccccccacgaccttggcatcgtccgggaaagggcggaccgagcgctggcgcatgtgatgaacgaggaagacatggaggacctcgccggccttgaaagctcagtgtcccggagagtgcttcagccgatgcgggagccgaagagcaaatga

SEQ ID NO: 6406 - DNA, 411 bp, Zea mays
  Peptide Sequence Number=SeqID_48185
atgactgaaacgacggtgacgaggtccaacggggctgcccaggagttgtcggtagacgactacctagtggggggcgttaccatgtttgacgcccagacagggctgccgcctattggggcggaggctgggcagttgacggcggtgccgtcaacagtggctgccggcctggtgggtgcggcgaagggtgatgcggcgaagggcggcgcggggactttggaggacccgtggtcaaggttttgtgcgcaccgccagaggcgggggcaaacttgcttctgccgccgctgttgctggcgtggctgtgtcagctatgcaacagctacgatttgttacttccttcgcccagcaagttgcctcaggggtgctgacctcgcagtttgttttcgagaggagacggctcgagggaaggattga

SEQ ID NO: 6407 - DNA, 693 bp, Zea mays
  Peptide Sequence Number=SeqID_48186
atgcataataatggtctttccccaaacgtgttcacttataacgtactaatcaatgggtattgcaaagagggcaacgagaagaaagcattggaggtgtttgaggacctgtctcggaaaggggtgctaacaccgttcctgcagaacaaggagaagaaagtgctcctggttgtgatccctctgcaggctatagcttacatccctgctgtgatcttcttgtctgttgatgccgcatactaccatgctgtgctcttcctagttgtgtggtcgatgcattctctgagggagtcatttaagacatacgtcaaggaggccagaacccttgccaagctcacgctctttcgccagttctatgttgtcatgattggatacttgtacttcaccaggaccattgtgtatgctcacaggacaataactaactacaagtacagatgggtgagtgtggtagccgaggaggtgtccaccatggcattctacatgttcatgttctacatgttcaggcctagcattggcactaacactggcctcaatctcattggttcaggaattggtgctggtcttgttacctctagtttgggtgctgccagcagtggccaaggcaatttctcattctttctttgggatcctagtggtcatgtgaagagcagcttggggacaacctgtatttcaaggagtggggaatgtcaggtatactag

SEQ ID NO: 6408 - DNA, 408 bp, Zea mays
  Peptide Sequence Number=SeqID_48187
atggactccgcctcgcccgaccccagggctcgacctcgacctcgactgcgggcggaatcgcgtcctcacacgaccccgggctcagcctcaggaggagtctccgcctcgcccgaccttggactcggaccgaccatgccacagggggatcatcattaccctacccctagccagctcaggctacggggaacaagaccgacgtcccatctggctcgcaccgcggagtacatgagcttgccagccagccagtactcggtgctggacgccgagcgcatcgaacgcgtcgacgactccaccttccggtgctacgtgtaccgcttccgtttcttcgcgcttgagctggagggatcaccgctcgtggaggcgcagaatgataaattctcaggtaaggtacttttcttgcgctcctga

SEQ ID NO: 6409 - DNA, 213 bp, Zea mays
  Peptide Sequence Number=SeqID_48188
atggacccatccctttccatggcggtcacagaacggcggcgcagcgccccgcacggcggtgcctcaccagcgttctgcccccccttgaggatcggtgtcacgccgcagccagaggtgcttgctgatggcgaggctgaggccaaggcctgtgcagccggcggcgacgaccaccaaagggccgacgagtggtccctcgcctccttctccggctag

SEQ ID NO: 6410 - DNA, 555 bp, Zea mays
  Peptide Sequence Number=SeqID_48189
atgactggcaaggtggaagtagggagcatagagctgctaatccacaagggggaaaccgggagtatcgagatcagcaagtttgtgaagggtttgaagggggagttgcagggacatgttttagctcaactgcctcggacagtagatcgagctattctcctggctcagattcagcaagaggaaaaggggacaccagagcaggagtgggctctagtgagttggctaaggagagaaaagtacgagccaggacaccaggccaagtgtccaaaaagaggtggaactcaattacatagtctgacaatggaggatatggggttgacattgttagatgaggtgctgcagcagttagacaaggaggatagggagatggaggaagcaaagcctgcttcacatgtcagggttaaggtggctaatggggagttcatgttgagctcgaggagggtgaaagggaaatgtgcctttgggccatttctaagtattttggtgattgagtgccagcacaagtacttaaatgtgaatctctgcccatggatgaacaaagtgcaaatcaagagctaa

SEQ ID NO: 6411 - DNA, 426 bp, Zea mays
  Peptide Sequence Number=SeqID_48190
atgggggcaggtctggtcagcttagaaggtggcctcagtgagcgccatggctggacgagttcgacggccggtgagggaggagcactggacagcagcgcgcacagaccaagcaaggtggagatgggtgatcgcgaccatggacgagcgcgccgtccagcgaaggaagtcgacgacgaggtgtccctggtcggacagggagagaaaacggaggtagagactgagcacttcgcagctaggcaacgacgaccgcagactaaggcacagaggttgaagacaacacaattggcgtggtggcaagcgcaggacgccgggcatggggcacagccggcgacactgttgcaggaagacgctaagcatgggaaagcgaacagaagataccagctgttctggagacgcaaggaaggctcaccgcggagactaaactag

SEQ ID NO: 6412 - DNA, 249 bp, Zea mays
  Peptide Sequence Number=SeqID_48191
atgaaggagtcgcccatcgacggagagtggggcacacacgaggatggcgggggcggccacataggattcgtgaatggctatggcactgaggtaacacatctcggcgtcataggctatgacgccgagcttaacgatgaagactcaccggcagcagggagcttgtcgtcatggatagcgcacagccatcagcagcacatgcgtcatgcaaaaaatcagtgcttctgccatcacatacaatggaggagctga

SEQ ID NO: 6413 - DNA, 357 bp, Zea mays
  Peptide Sequence Number=SeqID_48192
atgctcccagcgcgccacaagctcctgaccccaggggcccgcctgcaagtcgccactgcacgcgcatctggaatgtggcccccaccatcggtgcagagggaagaggctggcaccaatggctcaccggtcggcacacggtctaatccgttcttttgggctgtgcgcgtttgcctgatgggccgatcacagaagaaattcggcccagagcgcaggtatagatcacaaaaaaaatttcttgagctcttctctattttcaccatttacattttctctaacaaattacaaattgggtactacatgaaggaggcgcgtgatataattaaaattgctaatgaggcttgttggggtcgattgtaa

SEQ ID NO: 6414 - DNA, 162 bp, Zea mays
  Peptide Sequence Number=SeqID_48193
atggcgagcctgaacctcacagaggcatcatggaggacttcgccatatttgcaccgttggattgagtttcatgaaggaagacaatctcttagccgcgaggagaagcttacagaggcaacatctcagcacatgtcgttgggtagcagccgaacgaatgtgtga

SEQ ID NO: 6415 - DNA, 576 bp, Zea mays
  Peptide Sequence Number=SeqID_48194
atggcagctagcaatccatgcatccaccttggccttttgtgtgtaacatctgcatgggctagacacacaacaatcattactaggggccatccctgggctttgtttattcattgttgttctgggagtgagtgtcccggggaacagcatgctcagcatggtgacagttcggtgtgggcactgcacaaatctactgtcagtgaatctgagagcactcatgcactcagtcccagaacaagatcagctccagtgcggcggcggccaccatctggagctgggctcttcgtcgtcctcaaggttccggctgccgatgatgatgtcgtacgcgccgcagaacgagcacttgctgcaggaacagacactgaacaacgctcgtcggaagagattcgcaggatcaaggcgaacaaccccgacattagccacagggaagccttcagcacagcagccaagaactgggcacattatccgaacatccatttcggcttaaactccggccgagagggtggcaagaataagctcgtggacgaggctgtcgcggcggtggcggtggctccgaagaagatccaaggtttctactga

SEQ ID NO: 6416 - DNA, 459 bp, Zea mays
  Peptide Sequence Number=SeqID_48195
atggccaactacaagaaagacatgaacgaatgccagttcaccatcaccaccgcggaaggaagcagaaacattgccaagaaaactggaatcagattggaggagttttggctgagttcggccagaacagcaccagcctgtggtgcaccggacagtgtccggtgcccaggctggcccgacgacgaactcgtcgctctcgggaaaaagcgaaggcgccgcggctataattcaccggactatccggtgagccaaatggcactcgtggccaatggtcgtctgcccgatcaacgggcgacacatggccgagccaacggtcggatggtcacaccggactgtccggtgtgcaccggacagtgtctggtgcgccaacgagaccaaagacccaacaaccggattcgccaaaaaaggaaggagatcatgcaccggacaggaactgttcatgtccggtgcaccacccgatag

SEQ ID NO: 6417 - DNA, 243 bp, Zea mays
  Peptide Sequence Number=SeqID_48196
atgagtattcaggaggtcgatgaattggcgaacgacaaggcaggcaactccctggcggcacaacaagcacaacctggggttggacgacagcgatccgagcgagagattgacggccggagacattgcacgatgagcgccagggagccgggatgggagcaacactgtgggaccgtggaagccggcatcctggccgaaggccaaatggagaaggatgatgtccgagcgtggagaggagggtgctga

SEQ ID NO: 6418 - DNA, 471 bp, Zea mays
  Peptide Sequence Number=SeqID_48197
atgcctgctctaccagctgctgaaggtgacaaaacaaaatctgacgatatagttgaagtgggtgttgcgcctcctaaggtgaaggaaagcgaaaccattatatttgctaaaacacctattgttgttatggaatcgggagcaaaagaatttccaaagacagaagaacaaatgaaggtgcaagatcaatcgaaggcaatatctagcccagcagggactcctagaaggggaaaaagaatgaccaatgtgttagaggttgttcttagacctgcaaagatggtgccacctgccgcaccgaaaatttctaaagataaagttcgcgagccgaagatggctattggtgtgaaaactgtccccggatcgattgcagatgatccttcgggatccggttcggcaaggattgtgcttgacagcttgacggaggaaggaaatttaccaacagctgaaaccatgttggctgaagatctggtgtaa

SEQ ID NO: 6419 - DNA, 3045 bp, Zea mays
  Peptide Sequence Number=SeqID_48198
atggcagatgaaacgcgccagcaccctagaggccatggtgagactggtggaaaccagcaggcaccacccgtgccgcaaccgccttccatggaggcgatattggccgctcagacggaactgctacgacagcttgtgcaaaggcaacaacccctgccaccacctcacaatgggcataacaaccaccaactccaagtggcaagctatcaagatttcttgagtacccaaccacctctgttcaacaaaacagaagaacccttggacgctgatgcttggatacgcatcattgagtccaaatttactttacttacggcagattgcccggaggaaagcaaggctagatttgctgcgcaacaattaagaggaactgctcgtctatggtgggacaattaccatgccatgctcccagcagatcacctagttttatgggaagaattcaagatagctttcagggcacaccacattccagaaggtctaatggagcgaaaactgacagagtttcttgcgttgacccaaggcaaccgcacagtactccaatatgcccaagtgttcaacaatctgagccagtatgcagggtatcatgcagatacagatgccaaaaagagagatcgtttccgtcggggtctcaataccaagcttaaagaacgcttgaacccagtaaaaatggacaactacaacgaattggtgaatgtagctatatcgcaggaagattgtatcatggctcatcgagcagagaagaagcgaaaggccccggctgtaccaccaagtgccccgaatcaaaaatttaggctcgtccctagtgcacggcctggagctcctccccaaccatcaccatctggacgttgggtactgcgaccaccgcaacaacagggtaatccccggtttaccattccaccatcccaaaacactaggccaaattatcagcaaccgaatcgcccaggttctggaaataggtgttttacttgtggaagtacaggacactttgcaaaagaatgtcctcagaatcgccagcagaaacaaggacaaaactcaaatcaaagcaagggcaagaaacccacagtccaagtcaagcaagggaggatcaatttcaccacacttgctgaccttcctgaaggggcgccagtcatggcgggtaacttccttatccaaaatcgacccgcggttatattgtttgattctggtgcttcacacagttttctcagttcaaggttcagtgttaaatgccaactggtaatatgtcatacaaaagggtcgtatatgatcactacacctggtggtagaatttcatccaaccaactcacccgtcaagtaccaatcaaacttggaagtaaaatcttccatgcagaccttattatattgggattagagggtatagatgttattttgggagtggattggatgaccaaacaccaagtcgtaatggacatagcagctcgagtcctagagttcaagtcacctgcatatgggaccctcaccttgtacctacctgtcgagcagagcataaactctagcaattgctccatgatagagtctaaattaggggaaattcctgtggtccgcgagtacgccgatgtctttccggatgacttgccagggatgccaccagatagagacatagagtttgtcattgaactgcagccaggcacggcacccatttcaaaaagaccctatcgaatgccgccagttgaattggcagaactaaagaaacaacttcaagaattgttagacaaggggtttatccgccccagcacatcaccatggggctgcccagctctctttgtaaagaaaaaggacaaaagtctaatgttatgtgtggactaccgccctctcaatgcggtaactattaagaataaataccctttaccccgcatagatgttctttttgatcagttagctggagccagagtattttctaagatggaccttcgctctgggtatcatcaaattaagattcgacccagtgacatcccaaaaactgccttctcaactagatatggactatatgaatatctagtcatgtctttcggacttacaaatgctcctgcctacttcatgtatctcatgaattcagtgtttatgcccgaactcgataaatttgtggtagtttttattgatgacatattggtatattccaagaatgaggaagaacatgtcaagcaccttcacaccgtgcttcaacgtttaagaaagcatcaattgtatgccaaattctctaagtgtgagttttggctagacaaggtaaaatttctagggcacactatttcttccgagggtattgccgttgacccagtaaaggtacaagaagtaatggactggaaacctcccacttcagttcatcaaataagaagtttcctaggcctagctggttattaccgtcgtttcatcccaaacttttctagaattgccaaaccaatgacagagttgttaaggaagggagttaaatttgtgtggaaccaacaatgtgaagaagcctttcaccttctaagagaacatttaaccacaacaccggtcttagctcagctcgacaatgccaagccttttgatgtgtattgtgatgcttccggtattggactcggttgtgtgcttatgcaagagaaccgagtcattgcctatgcttcacgtgcacttcggccacatgaacagagttatccaacgcatgacctggaattagcggctgtgattcatgctctaaaaatatggagacattatcttatgggcactcgttgtaatatctacacagatcacaaaagtctcaaatacattttcactcaaaccgaattaaacatgagacagagaaggtggttagagctaattaaggattatgacctcgaagtgcactaccaccgtggaaaggcaaatgtggtagcagacgccttgagtcgcaagacccaatgccactgtctgaccatagattctcatgtcgccactttgtgcgatgagttgagcaagttaagcatggaagttgtttccccgggtactctggattacgtctcagtggagacaaccttgcaggatcagattatcatgacacaactcagtgacaaggga

SEQ ID NO: 6420 - DNA, 1038 bp, Zea mays
  Peptide Sequence Number=SeqID_48199
atgatggaagaggacatggaaaatggaaggtcgtatcaagaaagaccaaggactttttcaacagtacgaagcaagtcatctatcccgctggtgggtgtaaatatggagccaacaaccaaggccttacgtttgttgatgaggataaatccccgtgccttgattattctttctcttttggtattcagtggtgtgctatatgtgggagccagtacatcaccaattgtggtctttgtgttctgtatatgtactctcagtctattcttctctctctaccttacaaagtgggttcttgctaaggacgaaggaccaccagaaatgtctgagatatctgatgccataagagatggtgctgaagggttttttaagacacaatatggaactatttctaaaatggcatttattctggcctttgtcatccttggcatttatctctttcgcactactaccccacagcaggaggcgtctggcttgggaagggcaacactagcctatattacagttgcttcttttcttcttggagcattatgttctggaatagctggctttgttggaatgtgggtgtctgtgcgtgcaaatgtacgagtttcaagtgctgctcggcgctctgcaagggaagcattgcagattgctgtccgtgctggtggtttctcagccatcgtagttgtttgcatggctgtatttggcgtggcaatattgtactcaacattttatgtttggcttggagtagattcacctgggtcaatgaaggttactgacttgcctcttctccttgtgggatatggttttggtgcctcttttgttgccctttttgctcagttgggtggtggaatatacaccaaagctgctgatgttggagctgatctggtcggaaaagttgagcagggaatacccgaagatgatcctcgtaacccagctgtcattgctgacttgttcatcttttgctacgatatattcttgtataacaaaggaaaactactcaggttggtgacaatgttggagattgtgctgcccgaggcgctgatctttttgagagcatag

SEQ ID NO: 6421 - DNA, 843 bp, Zea mays
  Peptide Sequence Number=SeqID_48200
atggcggctcttgatcatgtggtggtggacgagcatgggtttgcccactctgtgtgtctgcactgggagggctttcccgctattttgtgggacctattgaggactgtcggttacaccactcctccccactacgttggatatgagttcgaggagcacggagtgcctcgctgtcgggtacaactcacattgtggtctcatccggtgtaccctgagtggccttctttggacaccgagacggagggctttcgcctcggcgacacatgggaggcatcagctttgcatgcgcttgtggccttctgtgagtacatggggttgtttcccctgaagcagcaagatgaccccttatggttggacaggattgccaacatagtcctcttgggtttcagttgcccccaggaggcgatcctcatggcaacccgatgcatcagggcactgcaacacctccaggcactgcagagtcaggccatgacatatttggtggccctcgctcagacaactcgccagatccttagtgagagacaagttcgcatcatcaatctttctacagaattgtccgaccgaaagctacaaattgaggcgatgggagttcaggttcatgagcttcaggagcaggtaggtgtgcaggccatgactattgcagacttggaagatcagctccatgaccttaaccttgagctggaggaggctaatgatcacattgagatgcaccaccaggaacatgttgagatggaggctgaccttgaagatgctgatatggatgaggaggaggaagacccagaggagattgagggtgtttctgagttaaccaccgagagtggagcaccactaccaccagtcgactga

SEQ ID NO: 6422 - DNA, 123 bp, Zea mays
  Peptide Sequence Number=SeqID_48201
atggaattctctagtggtgtgttatcccctctgataccagctgtggcggaaccgccctgcataatccaacttaagtgcattgacttccaccccgagggtgacgacacactaaaatgggattaa

SEQ ID NO: 6423 - DNA, 1266 bp, Zea mays
  Peptide Sequence Number=SeqID_48202
atggagggcggtaacatactgttcaagggtgaacactttcccccgggtgaacgattccctacctgggacgggatttctactcgttggcttctgtacacggaacaagcaccttctgcatggctgaattttgcattgtgtggcttggtggggatcgtcacagcatatgcttttgtttggatttcgaagtattacacggattataaacacgagccagtccggcttttagctctttcgagttccacaggacatggaactaatattattgctggagtaagcttgggaatggaatcaacagcactaccagttctagtgataagtgttgccattatatcagcatattggctggggcagacctctggcttggtggacgagtctggcaacccaactggtggtctttttgggacagctgtagcaacaatggggatgcttagcactgcagggtatgttctcaccatggacatgtttggtcctatagctgacaacgctggtggtattgttgagatgagccagcagcctgaaagtgtgagggaaatcacagatgttctagatgctgtgggcaacacaactaaagctactacgaaaggatttgccatagggtcagcagctctggcttccttcctcctgtttagtgcatatatggatgaagtagcttcttttgctcaattgccattcaaggaggttgatatagcagtcccagagatttttgttggtggtttattaggctcgatgcttatattcctgttcagtgcatgggcttgctcagcagttggcaaaactgcacaggaagttgttaaagaggtcaggagacaatttattgagaggcctggtatcatggactacaaagagaagccggattatggacgctgtgttgcaattgtggcatctgcatccttgagagaaatgataaagcctggagctctagcaattatatcacccatggccgttggcgttgtcttccggattttgggccactacactggtcagcctcttcttggagctaaagttgtagcctccatgctgatgtttgcgacggtcgctgggattctcatggcactcttcttgaacactgctggcggcgcctgggataatgcaaagaagtacattgagactggcgctcttggtggcaagggcagcgagtcccacaaggctgcggttactggcgacacggttggagacccattcaaagacactgctggaccgtcgctgcatgttcttatcaagatgctcgccacaatcacgctggtcatggctccgatattcttgtga

SEQ ID NO: 6424 - DNA, 939 bp, Zea mays
  Peptide Sequence Number=SeqID_48203
atgtatatgcatccatctaaactgctcattttgacggtggtggtcaccggcgccgctgcggcgcatgaccacccttccgctagcactccggcggcgcagttctggcagcaggccctcccgggcacgccgatgccggaggccatcgctgacctcgtccagaaaggcatcgaccactcgccgctggtggagcgatacccttcggcgcccggcctcagcgcgtgcggcgcatggagcaacctgtgcacgcgcagcgtggcggcggggacgggcatcttcttccacgaggcggaactgcgtccgggcagcgccatggcgctctccttcccggcggaagtggacacacccatcctcccgcacgccgtcgccgccgccgctccattcgcgaacctgacggccgtcttcgccacgttcggcgtcgccgggggctccgccgaggccgagcacgtgcgggacacgctcaggtggtgcgaggcgccgccgcggccggccggcgagcgcgtggccgcctgcgccacgtcgctggaaagcacggtgcggagcgccacgcgcatgctcggcgccgccggcggtgacggtgtgtgggcggcggccacgtcggcgcgcctccgcgctggcctgccgcgcgggcggtacgtggtcggggcggtcgccccgctccacggagaccaactcgtggcctgccaccgcgtgccgttcccgtacgccgtgtaccagtgccacatgacgacgaggaagacggacagggcctacgtggtctcgcttcgcggccgcggggggccggtgctcgacgacgtgctggcgttctgccaccgcgacacctccggctggagcccggaccatccggcgttccggatactgcgcgtccgcctaggcacgccggtgtgccacttcgtaccgtacgggaatccagtcttcggtaggaaggccagcacaacatag

SEQ ID NO: 6425 - DNA, 516 bp, Zea mays
  Peptide Sequence Number=SeqID_48204
atgacggattttggcgccgggctccggagtaaaactcccgcgtcgtcctctctccaatcccgcggctctcgtcttctccaccgcgctctcgtctcctccaccgcggcaatcgtctcctccaccgcggcaaccgcgccccctcgcccaccggccaccgcgctcctcctcctccggctgccgcacgccccggcccctccaccagcgaccgggcggcccgccccatcgcgcctgcccctcgaccgggcgccgcgcgcccgtgcagctccggcggcgcgcgcccccactgcgcggcagcctcgcccccgccaccgcccccggcccgagagcctcgagcccgcgacctccccaccgcgccctatccccgacaccgcccccggcacctccaccgtgccccggccccctgcaccacgcaccggagcgagccccagctccctccaccgcgcgccgcagcaagcaccgactctctccaccaccgtcccccgccgcagccgcaccgagctccgcctcgcctcctag

SEQ ID NO: 6426 - DNA, 357 bp, Zea mays
  Peptide Sequence Number=SeqID_48205
atggcggcacccagtcggtcacggccgggacaggaagcggacgacggcgaaagaaaaacccaggcgctgtcggacctcaacaatccccagcgatcccggcggctccgcgcggatcttggtgtttgtgttggaattcggttgagggagcaccgcgaggaccgcgcggtttctgttttacccgccaggcgcgcgcgttctgttggacggggtgaggaaagagatgacaagcgggccccacgagtcaatgggaaacggcactgcgcagaggggcccgccacacagtggaagaacggcgcaagagagagggcacgcgtgcttcgattgggctgggagcgcgcgagggggggaaaaaagtaa

SEQ ID NO: 6427 - DNA, 324 bp, Zea mays
  Peptide Sequence Number=SeqID_48206
atggcgcgagctcaacaacagcggtgggtgatcctccgacgacccccattcaactgtcctgagcccaatcattcgcgcggactagtgcagaacgtggcggaggtcaaggcgaaactagaggagtacttctcacctgctatggtgcagtggggaactcgagccatggccgaggcgcggtgtggacggaaccctgacgcggcggcactcacacggctctctgctcacagcgatgaggtggtgatggcacccccgggcccttttctcccttccctcgctaggtcagcgcttgatgcctgcacgagggttcgtggctttatagtttga

SEQ ID NO: 6428 - DNA, 1389 bp, Zea mays
  Peptide Sequence Number=SeqID_48207
atggaggaggacccgctcatccagctggtgcacgtctggagcaacgccgcctgcgacaacgccgccgcctcatcctccggcgagggggacaaggagaacctccggcccgagcccgacgttgaggcggagatcggccacatcgaggcggagatcctgcgcttgtcctcccgcctccaccacctccgcacctcccagcagctgcagccgcctaagtgcgcagaggtcgcacccgcgcccgaaacgaaggcggcggcagcgcgcccgcggccgcgggggcgcagcctgggaccgctcgacatcgtcgctgccgtcaaccccaacctgctcaccactgacaagcagcagccgccgcgcgccgcgcaggggttgaagccgatcaagcaggccccggcggcggcgcgagggaggggcttcagcctcgcgccgctcgacaccgttgccgcgaaccctagggtcccctccgccgcgccgcagaggaagattcagggcgagggcggcggcgcgtggccgaccctgaggccgatcaaggagccccccgtgcagcggcgcaggggcgtcagcctcggccctttggagatccaccacggcgtcggcagcaagcccggggcgacggtggcggcagcgcgggtcaagccactctccaacaagctcggtgccgtccgagaggaaggccagcgttccaagcagcacgccgtccccgccagaccgtggccgtccagcaatgccaagcacccactggatgccaagcaaagcaccgtagcaagcagggccaaggcgaggagcgggagcatgagtcccagcaggttaaggaggcagtccacttccaaggctaccgagacaagagcaggcaacgccaaggctacagaggcaaggggtgggaacgcgacactcggagataacaacgtggctgatgtgctcacgctcaaatgcgcggtggccgatcataacaggaatgtatctactgggaagaggccggcggggagctccaaggtcagaattgtcccgagccgctacagcctcacgcccggctcgtccctgatagctgctcctgtgacacaagggaagctatgcaagcagcccctctcaggatccgctcgtgctgcaagccacagggaggagatgggagcaaagctcactgagccgtctaacgacgagttgtctcctgaatcacttgccaaggttgcagagctgctcccaaggatcaggaccatgccgccttctgacgagagcccgcgtgactcggggtgtgctgctaggcgtgttgcagatttggccgggaagcgatccttcttcaccgccgcagccgacgatggcaatcccgttacaccctaccaggcacgggtggttgaacttgaaacacccgagacagcagcagcagcagaagcatga

SEQ ID NO: 6429 - DNA, 651 bp, Zea mays
  Peptide Sequence Number=SeqID_48208
atgcccttacttatactaccagccgagccggcggtgatcgcgcgcggtttccggcgatgtggtgggcagcacgatgcgaggcgacttccctcgaaagaacgtgtcgcgtcgtgccactggccggtcatctcgtattctcgttggcttggcaaggcacaaggttcattccattccaccgccgcgggagctcagcgaacaaacggcgaccgcacgcgccgcgccggcaccacgccgcccactggtttcggtgggctcggtccgggcgctttcgctgggttcggcggcggcgctgccgccactcgcggcagccagccagccgtcgagcgggtgtccggtagccggcgagcgcgaggcatgtgcaacgggcgggagtgcgggcgcgagcgcgcgttccgcgcctccctgcacgagcgcgacgcgaggccgaggccagggccggagccggcggcggcagctgcgcctgcgtgccggcacgacgcgaagacggaggagggcgagacggtggcgacgttgcgggccaagggggaggggcgcgcgcggacggccggggaggagcgcaatcaggagtggaggcagaggcctcggcttcgggaggcggagattgagaggacggagaaactgatgcacctgctcctttggggacccaactga

SEQ ID NO: 6430 - DNA, 1086 bp, Zea mays
  Peptide Sequence Number=SeqID_48209
atgagcacaggagcgggggccggcctgctcttcatctcccccctcggaaagcatctacgctacgtgctacgcctccacttcccggcgtccaacaatgtggctgagtacgaggccctggtcaacgggttgcgcatcgccatcgagttaggggtccgacgtctcgacgctcgcggtgactcgcagctcgtcatcgaccaagtcatgaagaactcccactgttgcgacccgaagatggaggcctactgcgatgaggttcgccgcctggaagacaagttctacgggctcgagctcaaccacatcgcccgacgctacaacgagactgccgacgagctggctaaaatagcctcggggcgaacaacggttccccccggacgtcttctctcgagacctgcatcaaccctccgtcaagatcgacaacacgcccgaggcaccctcgggcccagcccgaggtaccttctgctcagtccgagacaccctcggctcggcccgaggcatcctcggttcagcccgaggtaccctcagcccccgagggcgaggcactgcgcgtcaaggaggagcgaagcggggtcatgcctaatcaaaactggtagaccccgtactgaaatatctccaccgaggagagctacccctcgaccgagccgaggctcggcggttggtttctactggccgacggtggtggccgacgccactagaattgtccgcacctgcgaagggtgtcagttctacgcaaggcagacccacctgcctgctcaggctctgcagaccatacccatcacctggccttttggtgtgtggggtctggacctcgtcggccccttgcagaaggcacccgggggctacacgcacctgttggtcgccatcgacaaattctccaagtggatcgaggtccgacccctaaacagcatcaggtccgagcaggcggtggcgttcttcaccaacatcatccatcgctttggggtcccgaactccatcatcaccgacaacggcacccagttcaccggcaggaagttcctggacttctgcgaggatcaccacatccgggtggactgggccgccgtggctcgccccatgacgaatggcaagtag

SEQ ID NO: 6431 - DNA, 303 bp, Zea mays
  Peptide Sequence Number=SeqID_48210
atgacaagcgtactagacgccgttgtagagacaacaagagcgttgactcctgcacctatgaagaaagttgctgaagcttctacagctcacaccgaaaccgaagctgggccttcgatgcttgctgagatgaagcctgccacaactgagcaaagggccgaggaatttccagatatcgtcatagttctggtgaaaaatgtggccaaagaggccaaatcccctgctctcgaagcactgtctgaagatcttgactatattattcgacatgctttggggaaaaaattatccgaagaagaagttttttaa

SEQ ID NO: 6432 - DNA, 1953 bp, Zea mays
  Peptide Sequence Number=SeqID_48211
atgggggagggggtgaaggagatgctggctccgccgatccagctggccgacgaggtcgccaagcagtgtgctgccgcgcggagcttccgtgccgagtgcgcagaacttaaggcccgcgcggacaagctggcggcgctgctgcggcaggcggcgcgggcgcaggaactctacgaccgccccgccgcccgcatcttggccggcgccacccaggcactgtccagagcctccaccctcgccacgcggtgcgctcgggggcacccgcgcctgcgcagcctcttcacgctcagccccgccgccgggttcccccgggccgtggcggcgctcgacacggcgctcgaggacgtcgcttggctgctccgcatctcctcgcctggcgccaccggcgacggggacgacgactcgctcctgggcctccccaacatcgctcagaacgagcccatcctcttcttcatctgggaccatgtcgcgcgcctgcacacaggctcccctgccgcccgcgctgactccgccgccaatcttgcctcgctcgcccgcggcagccagcacttcgccaagctcattatcgaggaggatggcgtgccgccgctgctcaaacttctcaaggacggcaccgacgagggccaggaggccgcggcacgcgccctgggcctcctgggctgtgacggcgagagcgtggacaagctcgtgcaggccggggtttgctcctcctttaccgccgcactcaaggagctgcccatgcgcgtgcaggtagcagtggctgaggcgatcgcttccttggctgaccagagctccacctgccaggaccttttcgcgcagaacaatgccgttcggtaccttgtcgggcaccttgcttctgggactatccaggagcacagcaggtactccgtcagctccagcagctacaagagcagcgcagccactgctgccacgacacagcagcccatgaagtttctccactctgtggtgcttgccaagacgctcagcatgcgccacagcagtgaccgtgacaccaccagcagtggcgctgatgagctgccaaggatgtccaatggtacaccaggagaaaggaacccccaaatgcaatcggtggtacactcggctatggctgccaagacaaacacaaatggcttattggttccgttgttcaggcctcagctgggcaccagtggccgtggtgctcgagaggtcgaggatcccgaaaccaaggcacatttgaaggctatggcggcaaaagctttgtggaagcttgctcataaccatttgggtgtgtgcaagagcattacagagtcacgtgcgctactgtgctttgctgtgctccttgaaaagggtgatggcgatatgggcactaacgtgcagtacttctcagcaatggccatcatggagattgcccgtgtcgctgaacacagcctcgtgctgcgccaatcagcattcaaacccagttccccagcagccaaggctgttgttgatcagctgcttcgtgttgtccgcaggggtgaatacgatgcattgcttctcccatgcatcactgcccttggctgccttgcccgtaccttcacagcaagtgagaccaggatagtgcctcctcttgtgcagcttctcgatgagcgtgagcctccagtcattaaggaggctgttgttgcgctcacaaagtttgcatgcactgagaaccacctacatgtgaatcactgcaaggccattgttgatgatggtggtgcgcggcaccttgtccagcttgtctacctgggtgatgaggtgcaaattgaggcgctcatactactctgttacattgcattgtatgtgcctgagagcgaggaactcgcacaagctggtgtgctggctgtgctgctttgggcatcaaagcaggctcacatggttcaagacatgcgtgttgaggcactgcttccagatgccaaaggaagacttgagctgttccagtctagggcctccaggtga

SEQ ID NO: 6433 - DNA, 495 bp, Zea mays
  Peptide Sequence Number=SeqID_48212
atgtcgcgtgcgagctcatccaacagattgcaaggttttcccagcttcgaccatgtccctctcgtccagtgtcctgattgcacccggtcagagccattggttaggctcaggacgaaaaaatcagaaaacggcaactacggcagagaattcgtaaagtgcgaaagcaaatcacaacccggcaagatccttaagaagtgcaacttttttatgtggatggatgagtacatcgaatggttgcgcttgagtggtatgactaaacagacatggtccagttttgagcaagaacaaggtgctacgcaattgatggtgaataattgtggagcagagttatgtggtgcagataaaggagatgtgtctgtgaagttggacattctagcaattgaattgatgaagataaatggcaacctcaacaaaattatttacattttagtcatttgtgcttttatgatatttgttgttttactttttattatgaaccaaggtggtaagcactag

SEQ ID NO: 6434 - DNA, 126 bp, Zea mays
  Peptide Sequence Number=SeqID_48213
atggtgaggggtccaccaggcggcgtcatgcgtgaacctgtattctggtcaatgcgcaagagaagagttaaggttttgatccttgaattccaaacaaaatgccacaccaaccaaatatcagtatga

SEQ ID NO: 6435 - DNA, 348 bp, Zea mays
  Peptide Sequence Number=SeqID_48214
atgacgacgcagcgagctccggcagtcagcagtggccgcacgccaggatgcactacaccacgacggcaacccactcctgcacaactctacggcggtgatcggctcctggttatcttcacggcgtcacggaggatcttcctggtcacccaccaaggatacaacgcggctaggattatggatgaacggcgacaagcagcttcatgtgcccggcggcatgcacccctagcgccagggtgttggcaagtggtggacgagatgaggcagtcgcggccgcccaactggcccaagcccaatgcccccaacggcccaactcagcaagacggcaaccctaaatcagtaaatccctaa

SEQ ID NO: 6436 - DNA, 762 bp, Zea mays
  Peptide Sequence Number=SeqID_48215
atggatcagagctgggaaagcaatgggaaccaccatgtcagcagtggttctcagctggcggacgccagcctaaacccagacatggagctccggaggttgaagcagaacttcgactcgtggaagaaagctctactaatacttaagacgataccgcctccttccccgcgcagccgcccccatccccgctggttagagtacgagcagaaaatgaaagctatggaggaaatgtggcagaagcaaatgcgttcactgcaatcgagcctttccgtagcaaagaagagccttgctttggatgaaacacctaggatgccggactcatcagtggatcagagctgggatagcaatgggaaccaccatgtcagcagtggttctcagctggtgccacacactggtgggcgcgaaatgaacgctggcctcagcgtcatcagccgcctggcagaagaatttgagcagcggagccaggttttcgctgatgacgccaagttcctggttgaggtcaaatctgggcaggcggacgccagcctaaacccagacatggagctccggaggttgaagcagaacttcgactcgtggaagaaagatttcagtggacggatgagggagacgaaggtgatcctgaacaagctcggcattggcaacgagtcatcgcccaactctgtgaagcggaagtggtggggcaggctgaacacctcaaggagggcgagttgtatagttctcccacaatggcttccttttgaggggtcaaggaccactgaattgtga

SEQ ID NO: 6437 - DNA, 465 bp, Zea mays
  Peptide Sequence Number=SeqID_48216
atgaaactcaacgaggaacagttgaagctggggctaaggaacagtctcgcagtagtgaatctgaagctccttgccgccaagacgcatcgctgtctcagcctttacgactctcttcctgatctcctcatccttacagatcagaaggggtacgacctcaccctatcgctggactccgccgaagccgatgcggtggcgatcacgggggcagaggaggctatggaagctacccgtggccaaaagcctagtgactttgaggtgtacaaggaagatcacaaaggaccagacccaaacaactccaaccagctctgcagccagacgaccacggatcggctggctacacctacaacgggtgggagtgagtctgaacccatgggaactggatttgttgactgcctcttcacgaacactccttctggtggtggcagcgggcaaagctcaaaccatccaaatggtggttatccctaa

SEQ ID NO: 6438 - DNA, 2163 bp, Zea mays
  Peptide Sequence Number=SeqID_48217
atgcgccgcctgcacttcctcctcctcctcttcctccatgcaacctcctccgcagccgcgcccgcggccgctagcggcggcgtcgggtgcgaccggcagtgcggcaacaccacagtgccgtaccctttcggcttctccggcgcctgtcccatccgcctggactgcaacgtcaccacgccgcagctcgtcacgaacagctccgcggcgtcgccctacccgatcctctcgttcgacgccaccgcctccactttcctcgtctcgctgccgccctcgtgcaaccgcaccgtcggagaggccagggcggcgctcgacggctcccgctacggcgtcacgagccacaccgggctcttcctggcccgtggctgcctcgggaaagcggcggccaccggcaactgctccgtgtccgcgaccatcatgaaaaccgcgctccgcacggcggggtgcggcgacaaaggcgccatctggacgtgcgtggccgcgccgctgccgccgccgcagggcctcaacgccacggctgctgctgcggcgtgggacggggaggcgggccagttcctgccgtggaagaaggtggaggacgctgggtgcgaggacgcactcacgtccgcggtgtccgcgttatcgccggaggggctgccgtcggtggatttcggcgccgcggagctggggtggtggctcgacgggacgtgcgccaacgctaccgcgggcggccagtgcgcgcggaacgcgacatgccaggacatcgagacgtcgagaggcacgaggggccaccgctgcgcgtgcgtggtcgccgggatgtccggtgacggatacgccgccggcgatggatgctactacgtcgccgagcgttccgcgaagaagattgtcctcgtagttgcagcaggtgttgcggcgagcgtggcggcggccaccggcgcgcttctgctgtgctggctgcagtgccggcggcgcaaggccgggcgctcggcgtcggagcggctggcggcgatgcggctgctgtcggaggcggcgacgtcgagcggcgtgccggtgtactcgtacggcgagatcgcgcgcgcgaccaactccttctcgcacacacaccgcctgggcacgggcgcgtacggcaccgtgtacgtgggcaagctcccgggcacgggcagcgcgccggcgctggtggccatcaagcgcctgcgccgacgccaccaccacgacgaggacgaggacgcggctgcggaggcggcgctgctgctgaacgagatcaagctcatctcctccgtgagccacccgaacctggtccgcctcctcggctgctgcctcgacggcggcgagcaggtgctcgtctacgagtacgtgcccaacggcacgctctcccagcacctccactccgcgggcgccagcaccgggggccgcggcgcgttgacgtggcgcgcgcggctcggcgtggcggtggagacggcgggcgccatcgcgcacctgcacggcatgcggccgcccatcttccaccgcgacgtcaagtccagcaacatcttgctcgacgccgcgctgcgccccaagctggccgacttcggcctgtcccgcgccgtggaccgcctggaggccgcgcgctcgcacgtgtccaccgcgccgcagggcacacccgggtacgtggacccggagtaccaccagaacttccacctctccgacaagagcgacgtgtacagcttcggcgtcgtgctgctagagctcgtcaccgctatgaaggtcgtcgacttcgaccgcccgcccgccgaggtcaacctcgcctccctcgcgctcgaccgcatcggcaagggccaggtcgccgagatcgtcgacccggccctccttggcgccggcgaggactgggtcatgggctccgtccgccacgtcagcgagctagccttccggtgcctggcgttccagaaggacgtccggccgtccatgcgcgaggtggccgccgagctgcagcggatccggtccgccgccccggacggcgccgatcccgaggagcccgcggggtctaggctccggcctgtgagtatgatggacatccagatcgacgtgagcttgggcggcccggacacggcggcaaagaaggcggcttcgcccgtgtcggtgcaggaggtgtgggtcagcgaccggagctcgccgtccaccaacggctccatgccgcgctttgctgcgtag

SEQ ID NO: 6439 - DNA, 1236 bp, Zea mays
  Peptide Sequence Number=SeqID_48218
atggccctgctgccgttgcccccctgttccccgtgccaccgccgggccgcgcctttgccggcgcccacggtcgcctcggcgcgccaccgcagggggagcctgcgcctcgctgcagccggtgcctgctccggacctaccgccgcgcggaagccccgtcccaccgccgccgacaggaggaggtgcgaatgctttgacctccatcggcggttagttccttacgcggaggcttactgctggcagaagtccattgtcgagaggaggaaaaggttgatagacagcggcgaagaccactccgacaccttgattgctttgcaacatccaccggtctacacattgggcaccgacagcaaggaggaatacctccattttgacaaggaagatgctcctttcgaggttcatcgtattaatcgcggcggtgaagtgacgtaccatggccctggacagcttgttatgtacccgattatgaatctgcggtaccacaaagaggatcttcactggtacttcaggtcactcgaagaagtgatcatccgcgcacttaaatccgccttctctataacggcagcaagagtagaaggtctcactggtgtttgggttggggaccgtaaagttgcggcgatagggatccacggttctcggatgatagtttatcacgggctcgcactaaacataacaactgaccttgctccattcagaatgattgatccttgcggcataaaggaccgcggtgtggggagcattaaggagatactacaaagggtgtctgatgcggaagagatcgatgacgcgtcactgatggatatagtgtatgattccatgatcaaggagtttgcggaactcttccagctcagtctagacttcagccctggttgcagtttccatttatattcgaaatgttctggtttacgttatggcttttgcttccttcagtttctggaaggacagatgactagcctctcggagcaccgcgaggtgcccgcttcagctgcaatcactgtttcaaaggcgtcgcctagacatccaggcgcccaaaaggttggagactttgggttgacaaggttcaagcgcaacactctggtttctggtggtgtacgcgacactcttccatggatggcaccagagctactgaatggcagcagcagcaaagtttatgagaaggcaagtatgcatcgtggtgctatcatattctttgcaggattcagtgcttatatagcttcatgctctgctggttccttgtaa

SEQ ID NO: 6440 - DNA, 1206 bp, Zea mays
  Peptide Sequence Number=SeqID_48219
atggccctgcctccgccgcccagcatgaaccgcgtgccgtccaccgcctcgtcgtcggagccagcaccggccagaccattctttcgccatggcgccgctccagtggaggtggtcgcgacggggaagatgacaaggacgaaatggattcatggatcgcagaaaacgctgatgcgcggcagtcggcagataacgattcgtgggaatgagatcagatatatctggtggcagggtggggggaacacaggaaagatggagaagcatatggcggaaaccatgatcgaattcgacaggcggatccccgacgccctccgcgccgccttcggcatataccgcgcatcgcggccgaccaccggccaacaggacgacgcagctaacctcgccgcggtgctgctcgcgccgctcgacgacgacggcgccagcgaccccaaagccattgactgcgacaagaatcccatggccatggactgcgccagcgatcccatagccatgggctgcgacctggcgatggagttggggtcatgctacataaagaagcacgacgaggacgatcacttcgggcacgccgaggcctgcgttattggcgtggcggacggcgtcggcgggtatcgtagccagggcgtcgacgcgtcggcgttctctcgcgggctcatgaacaacgcctacgcggaggtggcgaaggcctccgtgcctggcacgcgcttctgcccccgcgcgctgctggagcgggcgcaccagatgacggccgcggcgcatacgcctggcgcgtccacggcggcaatcgtctccctcgtcggcagcaccctcaagtgggccttcgtcggcgacagcggatttgcggtgctccgcggtggcaggatcctgcgccgctcgccaacgcagcagcactacttcaactgcccctaccagctcagctctaggcaagacagaaccagggtcgccgacgcgttggtcggcgaggtagcggcgaaggaaggcgacattgtgattctgggcacggacgggttgttcgacaacgtgttcgacgacgagatcgagggcatcgtgcggatgggcacgacgctggggttcgcgccactgaacatggcggaggtcctagcgggctttcgcttgcgaggctgcgggctgcgactacagagactcgccgtacagctacttgggccggagacagctagggaagagtctcatgacgggagggaagctggatga

SEQ ID NO: 6441 - DNA, 357 bp, Zea mays
  Peptide Sequence Number=SeqID_48220
atgggcaagagcaaaaagggtggaagtttgtcgcaccattccggcgacaagcggaagcgtgagccgacccctccctctgaggacttcggtgattccgagtactcgaaggaggagttttcctctgagtccgaggggtcgccagccatcgagcactccgggctcaagggctcggatgagtcagaggtctcctcagacgaggagaactcctctgactcgtccgaggaggggagcggtgatgacggtgacggtgagggcgacggcgacgacggaggcgacggcaagggtgatggcagcaagggcgacggcaagggcggcgatggcagcagcagggccagtggcaaagcgccactggcttaa

SEQ ID NO: 6442 - DNA, 1269 bp, Zea mays
  Peptide Sequence Number=SeqID_48221
atggacgctacctttggctgctgggccggcgccggccaccatgttgacgagtacttgtcgcgccaggctgctggatgcggtcggctcgacatggtggacgaggccttcctcggggcgtgctttggccagctccagtgcgacggggcccttactactgccgccggtggcgtcgacgccggggcgtgccagctggtgagctcgaatgcgggtgccgtccaaggcggcgccggtatggacggtgacccgctcgcgttcttgagcgcggggacgggggacgtcttcgacgcgggccttctcgacgcggcgctcgcgttcaccagggagctcggcgtcggcgtcgtcggcgacggcggggccgcgtcgaacggcgccttgctctccagctacgatagcggcaccaccggcggcaacatatcctcaggggagtcaaacaactacagcggcggcggcggcggccatgacgccgaggtggtgtcaccgaccacggcgccgccgccgccgttgacgtttacccaccacgcgtcgtccaactcccaggcccagcaggcggcgcaccacgccaaaaggaaggtgaccgatgagtacccggcgacaacgacaacgacaaccgcagcaccgccaccggcgttcccgctgcccggcggcggcggcggcgcgaagcggcgtgcagcgacgagcatcagcttcggcggcggccacgtccccagctgcggcgcggccgcggccgggtacgagccggacatggaggcgatggcgcaggtgaaggagatgatctaccgcgcggcggccatgcggcccgtgaacctcgggcccgaggccgtcggcgcggcgggggcgggcgcggagaggccccggcggaagaacgtgcgcatctcgagcgacccgcagacggtggcggcgcggctgcggcgcgagcgcgtgagcgagcgcctgcgcgtgctgcagaagctggtcccggggggcagcaagatggacacggcgtccatgctcgacgaggcggccagctacctcaagttcctcaagtcccaggtccaggcgctggaaaccctaggcacgacgacggcgaccaacgccaacagcagcgcgagcgccaccaccagcaggagcagcgcggcgagcaggtcgccgcagtacaactattacggcggcggcggcaataataataatcctgccggctttcttggattcagtaacgttatttctccggctggctcatcagtcgtcacaaactcgatcgatcggtgtgtggtgcctggtctggccgcctag

SEQ ID NO: 6443 - DNA, 381 bp, Zea mays
  Peptide Sequence Number=SeqID_48222
atgagcgaggtgttcgagggctacgagcggcagtactgcgaggcctccgcctcgctctcccgcaagtgcaccgctgcctccgccctcgatggggtggtcctatccgcagagaagaagaagcagaagctgtccgagatccaatccggcgttgaggaagctgaatcgctgattcgtaagatggacctggaggcaaggaacctacagcctagcattaaggctggtttgcttgcaaagctgagggagtataaatctgacctcaacaacgtcaagagtgagcttaagaggatctcagcgcccaatgctaggcaggctacccgggaggagctcctggagtctggaatggctgatactctcgcggtgattaggtttgcattgaaatga

SEQ ID NO: 6444 - DNA, 561 bp, Zea mays
  Peptide Sequence Number=SeqID_48223
atggcctgggcgcgcgcgggtgcccggcctggcacggccccggcggctccatgtggtgcggcggtcacagtcccggctgctccgttcccggtgcgtgactccggtgcagatccagcgagagcacgtgggtggtcaggcagcctgacggcatgctggctcggccagccagcacagcccggatggcgcgcggttcggcgtgcctacggcgagcgagcatgcagccctgccggcgcacgcgcgggcgtgcgaccccaccgcgcgggtgcggccacgacgcacagcgagcgtgttggcacaggcgtggcccggcgcgggtacagcggcgctggccacagcgcgcgggcgcggcaccaaggcgcagccacgacgctcaggcaacgtcatgctttagaagtcaaaaaggaattgtttgcatcgtacatacaacttctggacattgtagcccatcctttccttcttgcgagcgacatattcttcttttttttcttctctgatctcgcgagcagtgctgataacgtgttgaagcgcagtgaaaacgagatacagagtaataacaaatga

SEQ ID NO: 6445 - DNA, 444 bp, Zea mays
  Peptide Sequence Number=SeqID_48224
atggagggagtgagtaatgggggagagtgtgggaaggagaaacggtcgcatttgaagctctttacgccgaaggagcggatggacgcggcgtgctcggggtcggctcgggtcgggctcggcgcgcatggcgcggtatcgtgcctgggcgcggtctttggcgctgctggcggtgtcgggtgcaggggcgtcgagcacgggctcggtcggcttcctgtcacgagtgtgtcggggttgcggcggcaagcggctgggcaccgggcggctcggtggcgaggatgcgcgaggtggctagagcgtcgggtcctgcgggatcgaccgcggtcgacgtcgggcgccgggctcctagcggcttcggtcctgggagagagaggcagggagatggccgggtggggccggtgcaagagagagaaggggagagaagcaaggagaggtggcggcggctaa

SEQ ID NO: 6446 - DNA, 747 bp, Zea mays
  Peptide Sequence Number=SeqID_48225
atggctgacacaaaaggcgggggcatggagtcctctgtgccaatgataatgggtggcagaaaggctattgcttttcaggatcgatatggtgacagtgagagaggagactcgcaaggggccatggacagagcaggaggacctgcaactgggctcaaccggacaggcaagagctgccggctgcgctgggtcaactacctccaccctggcctcaagcgtgggcgcatgtctccccatgaagagcgactcatcctagagctgcacgctcggtggggaaacaggatagcacgccgcttgccagggcgcactgacaatgagatcaagaactactggaggacacacatgagaaagaaggcacaggagaggaagaggaacatgtctccatcgtcgtcctcgtcttcgctgacttaccagtcaggctacccagatactccatcaaccattggagttgagggacaggagcttcatggtggcagtggctgcatcacaagcatcctgaagggcacccctccggacatggatggctatcccatggaccagatatggatggaaattgaggcgccacagatgccctcggaggagagctttgttggggggaaccataatgtgtgcagcagccttgccaccccgctgccaccaccaactgtctgggaatactacccagatgcctgctggaaggttgacgatgagatcaagatggcaacacaatttcaatttggttatagtgaaggagttgggccctgcttctga

SEQ ID NO: 6447 - DNA, 204 bp, Zea mays
  Peptide Sequence Number=SeqID_48226
atgagggtctataatttgcatggagaaaagttaagacttaagagaaaaggagtactggatgaaagatttgctcgaagagtcgtgccctttattgaggtacaaagttcgaagcaaggcggagtaggtgagggcacgactggtgacgtcagggagggtgagggcgcggccgatgacagcgtgatgctggggccgtgcccggcctag

SEQ ID NO: 6448 - DNA, 753 bp, Zea mays
  Peptide Sequence Number=SeqID_48227
atgccggattatgcactcttctgcttgtggtcagccgccccctcccccttcgcgccggcccagctggcggcccagccgccccccttccccctttgggcccaagcggcccagccgcccctcccccccaaattccctctctctcctctcccgtgggccccgcccgtcatcccctcccccaactccctctcccctaaccctagccgccgccgccctagcgccgccgccgcgccctcccccgcccacggtgaggcttccccctcctcccccttctccctcccctccctcctccttccccctctcgtcggtgccctcccccgcgccatgggcgcgctcgcccggccccggcgagcccgtcccgcgccggccccgccctgccgtgccccgaccccgccccgccgactcggccacggcgccccgcccctccccacgcccggctcggccgtcccccggcgagcccgcctcggccccgcctcgccgtgcccgcgccggccccgcctcgccccccggcgagcccgcgccgccacgacttcgtcccgagctcgccggcgcccggcttcgccccggccgcgcccggagagcccgcccccgcctcgccgcggccgcgcccgcccccctcctgcgagcctgcccctgcgtcgcctcgccccggcgagtcccgccccgccctcgacatggactcgtgtcgtcaagtcgccccttccagttcccgtgaccaagcttcggacatcctcgctcaccacacatgatccctga

SEQ ID NO: 6449 - DNA, 450 bp, Zea mays
  Peptide Sequence Number=SeqID_48228
atgaataaatccatgaagtgggctgtcatcaagcgctctggtggcgcactagacagtgaacaatggatgtacggtgggacatcggacagtctacgcagagaggcccgcaactacgcgctctcgggctgtaacaccggattgtccggtgtgcaccggatagtctgggtaacggtcgactcctacagaccccaacggtcggctgccgtggccagggcatcggatgaacagtggatgtctagtgtacactggactgtccgaatcactaaaagctctcttgtggggtttggtgctttggatgacaacccaattaaaggactagcagagtcaactgatcaagccaaggatggaggcaagaagagcttcaaggtaccgagtgcacgggagaaggtcaaagaggccaaggaacccaaagccaggggtgaagaagaagacttgcaaagtcaaggttga

SEQ ID NO: 6450 - DNA, 486 bp, Zea mays
  Peptide Sequence Number=SeqID_48229
atgggcaaaggcaggaggggtcgaggctcgccccgtcatgctagtgacaagcgaaagcgcgccccaagtcctccctcggaggacttcggcgattcagagtactcggaggaagtttcctccgggtccgagggatcgtcggctttcgcttctcccctggcgtcgtctgatgactcggacgactcccaggggttagccgctgaggtctggacgtacatctgttccgtcgagcgcgccgggcttgaggggtcagatgagtcggaggtctcctcagatgagagctccttcggctcatccgaggagcggagcggcgatgacagtgatgatgagggcagtggcagcggcgacgacagcggtgacggtgacggcggcgaaggcgacgacgacggcggcaagggcggtggcgaaggcggcgatggcagcggcgacggtggcggcgagggcgacggtggcggcggcaaggccagtggcaaagcgccactggtctaa

SEQ ID NO: 6451 - DNA, 336 bp, Zea mays
  Peptide Sequence Number=SeqID_48230
atgggggttgtgcgagctacgacggcagggagaggaagtggacggcaccgcagcagggacggccgtagtgcagtctgctcgcctgctcctgctcggcacttcggttttggtagctttcaatttcagttcaataaagatatgaagagtcaaaagagaccaagaacaacacttcatcgtttctttaagccagttgattctagcactttggtagctgctgatgtccacgctgaaactgaaagtcctactaatccaacaaatgctactgctactgctcaagtcgaggctgatcaagagttaccctactccaaggttaacccaaattcactgcctcaataa

SEQ ID NO: 6452 - DNA, 453 bp, Zea mays
  Peptide Sequence Number=SeqID_48231
atgagccgactcctccctcggaggacttcgggcgactcgaagtacttggaggaggagttctcctccgagtcagagggctctccggtctacgcctctcccctggtgtcgtctgatgattcagacgactcccaggggatcaccgcggaggtgtggacttacatccgggctgttgagcgcgccgggctcgagggctcggatgagtcggagtactcctcagacgaggaaaactcctcggactcgtccgaggagggcggcggcgacgacgatggtggtgacggcgacgacgacgaaggcgacgacgatggtggcggtgacgacggcgatggtggcggtgacaacggcgaaggcgacggcaatggtggcagcagcgacggcggcggcaggggtggcagcggcgacggcggcgatggcggcaagggcagcagcaggggcagcaacaaggccagtggctag

SEQ ID NO: 6453 - DNA, 3144 bp, Zea mays
  Peptide Sequence Number=SeqID_48232
atggaaggggcggcggcggcggaggtgggcggcggcggcgaggatgtgcagatcaagggcgccaaggagagtgggcagcccgcggcggcggcgcagcagccgccgccgctgccgtccggcagcgaggcgctggagatgccggccacgccgcttccgcgggacatggactggtccgagcacttctccttcttcacctcgccgggcgggttcgcgggcagctcggacggcgcgaggggcctcgccagcgtcggcctgtccaactccgagtccaggccggacagcgtgacgcagcgcggcgtggaccacggcgcggaagagagggtggaggagctcacattgaagaactgcattagcgctgatgctgcccagcccgaagcctctgctggtgggagcacgagcggtggggataggcctgctgttattaagggcctgtggggtaacttcacacggatggcccggagaaccagctatttggccagcagggaaaacgccgcactgagctatggcgacattgcaagctcgagggctggtgatgcttctagcagggaaaatctggcgacgagccttgccaacaatatcatctcaaggaacaacgatgtgtctggcaatgaggcacctacgagtcgtgtcggatatgtgaataatgagttcaagacgccatttcacagccagcagattctcttgtccccttggtctaatcaggacaacgctcttaaagtaagcagcttctcgaataggattcttgatcagatgagaagtaagactgtggcacccccatctggggttctagggtcaccgcttaaaagcaaatcaaaaggtaaaggggttgcataccaacgtgcacgggaggagatccgagtgcaagctaatgcaagacccagagaccctctggacaagatcccgacaattcctacctcaattcatgattctgtggccagagtggacatgcttttcagtactagtggagatgtttcaaaatcccactctgagggaactagcctgagggaactgattaagcctgggcggcaaacgatgtccaagtttgagaaattgcatttgtttaagcagatccttgatcttgtggataactgtcatgcacagggttttactttacaacatttgcgaccatcatattttacgatcctatcttcaaatcaagttaaatatatcggttcttataccacacaagatttgccaacatcaatcaaacaagagtttgctagagaagatcttgtgagtagaaaaagagcttttggccatagaattgattaccaagactctaatggccatggaaatttgatgctgaagcatcaaaaggttggtgagcaaggcttagttgctgtcaggcggctggcaaatacatttttgactgacaaaatacgcgacaatcaaattgaagataacgatccaggtatttcaaggcaagaaaattttagttacactaccagagaacattttaagttcgtcgaatcatatggcagcaatatgtccagtgctcagcatgtatctagttctggaacccaacaaccagcatttgaattgaggaatattgaggaaagctggtacaaaagcccagaggagctcagtcaatttaaaggcacacccccatcaaacatctatagccttggggttcttctatttgagaaagtcccaaggaggctggcttctgcctttggttactgcatccagatccttgttcaagaccaaaagcaaaataagtcaccagtttccatcagtgaagatgacactgaatctagtttgctacttaacttcctttctcaattgaaagaagaaaaggagatgcaggctgccaagttatcggcagagcttggaagcttacaaacagatatcacagagattgacagaagacactcagcaggaatgagattgagtttagaggatatggatgtactgccaagttctagtttgccaggagcttctgtgagtgccctacagggtgcattgctgtcaggtttgctaccggcatcgtgcaagtcgagcatatatgaggagagggtaatgaggaatttggtgcagcttgaaaatgcttactactccatgaggtcctctgtggacacctgtgaaactaatgtaatcaaacgtccagataacgaggctttgagggtccgtgaaaatttccatcagcgtcacagtgattctgatgcaaagggagagaaaacagaccgtcttggatgcttttttgatggtttatgcaaatatgcccggcacaataggtttgaagtacgaggaattttgaagaatgcagatgtacttagctctccaaatgtcatctgttcattgagttttgatagggatgaagaatattttgctgctgctggagtttcaaagaaaataaaaatatttgaatttgatgcactcttaaatgatcgtgttgatattcattacccactggtagaaatgcctagcaagtccaagctgagctgtgtctgttggaacagctatataaagaactacctggcatcaacagactatgatggtactgttcagctatgggatgctggctctggtcaaggattcacacagtttacagagcaccgcaaaagggcttggtctaaaaactctattgatacaatccgaaacgtggccaatgtatgctgtgtacaattctctccatactcctcccgcatgctagcttttggttcagctgattacaaaatatactgttatgatctgaggaacacaaggataccttggtgtactatttcgggacatggaaaggctgtcagttatgtaaggttcttggatccagaaacacttatctctgcatcaaccgacaacacattgaagatatgggatcttaaccagactaattgcagtggattatctgctgattcttgcagcctgactctgaatggtcatagcaacgagaagaattttgtagggctatctgttcatgatggatacataacttgtggctctgaaaccaatgaagtgttttcttactacaaagatttccccatgccaataacttctcataggtttggttccattgacccgataactggacaagtgacaaatgaagacaaccagcagtttgtgtcgagtgtttgctggagagggaagtcaaacatggtagtggctgccaactccagtggcagcatcaaagtgcttgagcttgtgtga

SEQ ID NO: 6454 - DNA, 345 bp, Zea mays
  Peptide Sequence Number=SeqID_48233
atgaagaaggggggatcgacgggtacatttatagcgcagggaaaggagtccgcgtcgaggacaattggttggcggggaagggaggaccccgagatccccgacgacggccatggcgggattgcgcgcgtccgtcgcggactctgttccgaggtggacggacgagctgacaactgggaccccacatggcggtggcaagcgatggtatacgcgcggccagggagtctggtagatggacccatggggcagtggtcgagtcagcgcggtggagttcggaaatgggttgtgcgcgcacggagacaaacgaacggtgggctgaattccggttccaaggcccaatacaggtag

SEQ ID NO: 6455 - DNA, 1095 bp, Zea mays
  Peptide Sequence Number=SeqID_48234
atggcagcggatggaaccacgccgcgcgtgtcggcctcgtcgcctcccaccgtcgggacgctcctcaccagggcctccgcggcgcgcgaccgcgggtgctcctcgccgcggtcgctgctgtcgcgcatcctgcacggtggccgaggccgcagcggcgccgggttcggatgccgcatccgcctcctcccgcgctattgtgccagcgccagcgccgcggcggccaaggaggacgccatcgcagccgcgaagcatgaggaggaggacgagccggcggaagtggaggcagcccagccggcgcctcgagagccggggggccctcgtagttctcttgggaagcaggacgccctgccggcgagcctgggcctgggcgccagcctggtgctgctgctgtccaagagcgcggcggagctgagcaggatggcggagctgcgcgcccagatggagcgcctgctcgtcgacgccagggcggacgcgcggagctgcaccggccgacccagcgcctccggcggccgttccgactgcgccagcgccgtcaagggccccgtcgcccgcgctggcggcgaggatgaagatgatggcgccctgtcccggtccgatggtgacgggggccgtgacatggaccggatggaagctgagcttgaggcggagctgtcgcgcttgcagttgcagggagcctcggacgtcgaggacagtccgcctagccgacggcgtgatgatcaactcgtggtgcaggcgggaccgaagagcggtgcctcctcaaggagacactcggcgatctgctccgaagacgacagcgacgacggagagacagacaacagcggcgacgaaagccaagacgacgaggaggagtatgagcatgacgctgatgaggggaacgtgatcaatggccccgcccacggcggcgtgtcggcccgcgagctgcagctgaggctgcaccagctactgcagtcgcggcacgaggcgcggatcgcggagctggagtcggcgctggagagcgcgcgctggaagctgcgggagacggagcgcgaggcgtgccggtggcgcgacaccgccaagctcgccacccgcttcgccgacgagtcgaggctcaggtag

SEQ ID NO: 6456 - DNA, 1449 bp, Zea mays
  Peptide Sequence Number=SeqID_48235
atggcgcctacacttgtttatcccgtgactgccatggagaagtttgatgtcacgccatcgccggcaccggcggcagggcagccacgagcgctgccgctcacgttctacgacctcgttttctgggccatcccgcccgtacagcgcctgttcttctacgacagggccgacctgctcgacgtctccgacttcacgctgggcgagctgccacggttcagggactccctcgccgccgcgctacaccacttctacccgttggcggggaagctaacgtgcgagctggtccacgaggagggcgccgcgccgccggaggtcgtgttctcggacggcgactccgtcccgctgaccgtggccgtcagcggcgacgacttccgcgacctcgccggcgaccacgctcgcgacaccgcgaggctccgcgcgctgctccccgcgctgccgcagcacggtggttcgtctcggtcgcactcgcagcagggcgtcctcgccgtccagatcacggtgttccctcgcgccggcgtctgcatcggcaccacggtgcaccacgccgtggcggacggctccagctacgcgcacttcctccgcacctgggccaccgcccaccgcctcggtcccgagcgcagcggggcggtggcggtggacgtgccgcccccgctgttcgaccgcggcgtcgtacgcgacgacgcccgcctgcgtgaggcgttcctgcgcgaccacctagcgctcggcacagccggcaggggcggcggcgagcgcctctgcgactgggacctcagtcggcgccccggcgtcgtgttcgccacgttccggttcaccgagaagcggctccgcgcgctagggaggcgcgccgaggcggagacctcggcgcggtgctcgccctacgcgctggcgtgcggcgccgcgtgggcgggcatcgtgcgcgcgcgcggcatcggcaccggcactggcacggacggggctccggcgcccgacgcgctgttcgggttcgtgacggggtgcaagccgcgcgcgagcccgccggtcccggccaactactttggcaactgcctcggcctctgccgcgtcgcccaccacgcgaagcgtggcgagctcaccgcggtggccgcctcggccgccatatggcgggcgatcgaggggctggccgaggcgggtagcgtgttccgaggcgcccggggctgggtgcgctgggtgcgggagtacgcctccgcgcgtgcggtgaccgtggccggatcgcccaagctggggctgtacgcggccgcggactttggcggggcgtggggccggccggcgaaggtggagatcgcttcggtagaacgcacgggcgcgctggcgctggccgagagtggccgcgacggggacggcggcatcgaggtcgggctggcgctgccacgcgccgagatggagacgtttcgcgcgttttacctcgacctgttggccagcctcgacctcgattga

SEQ ID NO: 6457 - DNA, 294 bp, Zea mays
  Peptide Sequence Number=SeqID_48236
atgaggcttatgttatcttgcatcggggtgctcgtagtaggggttacaagcgtcgcgcacgagagagagggtccggccctgagtggcgcggtcggtccgaggtcgaggtcaggcgaggcggagacttctcctaaggccgaggctgaggtcgggcgaggatgtgacttctcccgaggccgaggccgaggcccgaggtcgggcgaggatgtgactcctcccgaggccgaggctgaggccgaggctcgaggtcgggcgaggcggagaccttctcccgaagccgaggctgaggcctga

SEQ ID NO: 6458 - DNA, 501 bp, Zea mays
  Peptide Sequence Number=SeqID_48237
atgtacaatctttctctgagacagttaatcgtggattacaatagctggggagccaaggacaatcatttgagggttaagggacctgtcaggatccctacaaaggttctccacgtcaccactcccaagtccccaggcggtaaagccttaaggcagcctccgtattcaggacagaaggtaatacagttcttgccagatgaaaccaccctacaacattgtgagttccttcaaggtaactctggtctgttcttcaccaatcttccaagggatgatgttgagaggatgtttcgagaatttgaggagcatgattttgcaaggacaggatgtactgcggtagatacggttgagcttaaggaaggccctctggaacagttcacacatgagatggagccctttctacgcaagcaaggacttccagttcgcttgaacaaagcattatttccccagggatgtactccggacgaaggttataatgatagagctacgaaggttatacctccctaa

SEQ ID NO: 6459 - DNA, 366 bp, Zea mays
  Peptide Sequence Number=SeqID_48238
atggcgtgcggcgccctcaagcgcggaggcgcgcccccggcggtgcggcgagcgcggctcgtggccagcgcgcagccgcggcgcgaccgacctcagcccctggccatggcttcctgcgccccgacccctgtatccgcgagcaacctggcgcggcggctggtagcccggcgagcagccagccaccctagccctagcgcgcgtcccctgtcccagccgaggaccccgatgatgatgaggaggatggttatgtttatgcttatggtaatggttgcctttggtgcaatctatgctcaggtaaagaagaaggagaacggtgtcgaggcagatctccgggagttccaggacttcgatgagttcgaggattag

SEQ ID NO: 6460 - DNA, 348 bp, Zea mays
  Peptide Sequence Number=SeqID_48239
atggaggggatgggagccgcgacagatgggattgctggccacgctcggtcagcgtgccgcgcgtggagcaagggagggcaggggacgagaggccctgagggcacgcgccgcgggtgggctttgtcgactagcggctgccgggacacatgggcgaggggaaaggggaccatggccaggggaggtagagggtggggcatcgggcagggcagagggctcctcacctcgacggggaaacagcagctacagtccatggatgaaccttcaactcgccatggatcatcggcgactcgtcggagtagtgggcggttggggaacgtcagtggggttgcgtgcaggggcttcgagtga

SEQ ID NO: 6461 - DNA, 204 bp, Zea mays
  Peptide Sequence Number=SeqID_48240
atggtgactggccacggtgatgcagggttccgcggcaaagaagaagcgccgacccctccgtcacagtcgaacgcagatgcgcacgcgcagaggctacgggcggcgctctcggccgattcaaagctccgaggcgccggcgttggtgaagaagagctcgagctgggggctcccaagctcggcgacggaagtgggctaacagtttga

SEQ ID NO: 6462 - DNA, 243 bp, Zea mays
  Peptide Sequence Number=SeqID_48241
atggtgactggccacggtgatgcagggttccgcggcgaagaagaagcgccggtttcaatcccgaagcggcgtataccggcgatcccaacagacccctccgtcacagtcgaacgtagatgtgcatgcgcagaggctacgacggcgctctcggccgattcaaagctccgaggcgccggtgttggtgaagaagagctcgagctaggggctcccaagctcggcgacggaagtgggctaacagtttga

SEQ ID NO: 6463 - DNA, 1287 bp, Zea mays
  Peptide Sequence Number=SeqID_48242
atggaacgcgagagcgatgccggcttcttccaccacgacgacgcgcaggtggaggccatgcagcggcgcgtggacgcggcggcgcccttggccgacgacccctacaccatcttccgcctcccctcggccgtgcgcgagcgccggcgcgacctgtacgagcccaaggtcgtgtccgtgggcccgtactaccacggccgcgccggcctgggcgtcgcgcagcagcacaagtggcgcctcctccgcgacttcctctcgcggggggagaaggcggccgccgccggtggcctcggcgcgtacgtgcgcgccgcgcgcgaggtcgaggcggacgcgcgccggtgctacgccgaggggttcggcctgggcgccgacgagttcgcggagctgctggtgctcgacggctgcttcctcctcgagttcttcctcaagaagggcgaggggcagctcgccgcgcccgggggcgccaagtgggcgtggcaccacatgtaccacgacgtcctcctgctggagaaccagatacccttcttcgtcgtcgagaagctacacggcgtcgccttcgccggcgccgaccgcgaccgcgacgcgctcctggacatcttctgcaaggccttcgccggcgacctcccgtcgagccgcgtcatccggccgcgcagcgacaagaccatccaccacctgctgcacctgcactacgagtgcaacatccgcagcccagccgccgccgacagcgacaaggcccgcagcagcagcttcggcgacgccaacggcgcgtcgctggccatctggaagcagccggcgatcccgtcgccgcgctccggcgaaggcgccggcgccggcgccggcagcaaaggccgtctgacgtcgatgatcccgccggcgggcaagatggaggaggccggcgtggcgttcaagcgcaaggcggccccgcgggacctgttcgacgtcagcttccggtacggcgtgttgcacgtgccggcgttcgtgctcgacgagggcgcaaaggtgctgctcgcgaatctggtggcgttcgagcagggaggcggccgcgcggcgcggcagctggacgggggcaacctggtgacgggcttcgtggcgcttgtcgggtcgctcgtgaactcgcggagggatctggaggtgctccgccggtgcgggatcatgcactgcatgctacctgatgacgacgccgtagcctacttcaaccacgttgtacagtataccaccatggactacgaccggaaccttctcgccagcctattccgagacgttagggagcactgccattggaacagatga

SEQ ID NO: 6464 - DNA, 2230 bp, Zea mays
  Peptide Sequence Number=SeqID_48243
atggattctgttccagggaaggagaacaacggcattgcccctaacctcaatggggtcgtgtctccagcgaagcagcagctggaggggaaggaagcgatgcggtatgcaaacatcctccggtcgcgcaataagtttgctgacgcgatcaacctgtacaccattgttctcgagaaggatggcaccaatgtggaggcccttatcgggaaagggatttgcctccaggcgcagaacctaccaagacaggccattgagtgctttacagaagctgtcaaaatcgagccaggaaatgcgtctgctcttacacattgtgggatgatttacaaagatgagggtcacttggttgaagcagctgaggcatatcaaaaagctaggatggctgatccttcctacaaacctgcttcggaatttcttgctattgtgttgactgatcttggaactagcttgaagcttgcgggtaatacagaggaggggattcaaaaatattgtgaagctctggaagtagacaaccactatgcgccggcttactacaaccttggagttgtttattcggagatgatgcaatttgatatggctcttagttgttacgagaaagctgcactggagagaccattgtatgctgaggcctattgcaacatgggagttatctataagaatcggggagatctagatgcagcaattatctgctacgagaggtgcttgaccatttctcccaactttgagattgctaagaataatatggcaatagcactaactgacttgggaacaaaggtaaaaattgaaggtgacatcaatagaggtgtagcatattacaagaaagctctatactacaattggcactatgctgatgccatgtataatcttggcgttgcatatggtgaaatgttgaattttgagatggcaattgtcttttacgagcttgcgctgcacttcaatcctcgctgtgcggaagcatgcaacaatttaggagtcatatacaaagacagggataaccttgacaaagctgttgaatgttatcaaggtaagatggattctgctgctagcatgattgagaaggctatacatgcaaatcccacatatgctgaagcatataataatctaggtgttctttacagagacgctggtagtattactttagcaattcatgcttacgagagatgccttcagatcgatcctgattcacgaaatgctggccagaaccgtttgcttgcaatgaactatattgacgagggctcagatgacaagctttatgaagctcacagggagtggggaaaacgctttatgaaattgtatccacaatatacaagttgggataactcaaaagttgctgaccgcccattgatcatcggttatttgtctcctgattactttactcattccgtgtcctacttcattgaagctccccttacacaccatgattccacagtttgcaaggtggttgtctactccggtgttgtgaaggcagatgccaagacacttagattcaaggataaggtgttgaaaaagggtgggttgtggagagatatatatggtattgatgaaaagagggttgctagcttggtaagggaggataaagtggacatacttgtggaacttactggtcacacagcaaataataagttagggacaatggcatgccgacctgctcctattcaggttacctggattggctaccccaacacaacaggtttgccaacaatagactaccgaatctcagactcattgactgatccacctatgacaaagcaaaagcatgttgaggagttggtgcgccttcctgaaagctttctttgttatactccttccccagaagctggtcctgtttgtccaacaccagcaatttcaaatggtttcgtcacttttgggagctttaacaatctagcaaagattacaccgaaagtgttgcaagtttgggccagaatattatgttcagtccctaactccaggcttgtggttaagtgcaagccattctgctgtgagaacataaggcagaaatttttggccacactggaggagttgggtttggagtcattacgggttgatctgttgccactcatccatctgaatcatgatcacatgcaggcgtattctttgatggacatcagcctggatacatttccctatgctggtactacgactacatgtgaatctttatacatgggggttccatgtgttacaatggctggtgctgttcatgctcataacgttggtgtcagcttgctcagcaaagcgg

SEQ ID NO: 6465 - DNA, 1224 bp, Zea mays
  Peptide Sequence Number=SeqID_48244
atgttcttcgacgggtcgctgatgaagacaggggctggcgcaggcctactcttcatctcgcccctcggaaagcatctacgctacgtgctacgcctccacttcccggcgtccaacaatgtggctgagtacgaggctctggtcaacgggttgcgcatcgccatcgagctaggggtccgacgcctcgacgctcgcggtgactcgcaactcgtcatcgaccaagtcatgaagaactcccactgccgcgacccgaagatggaggcctactgcgatgaggttcggcacctggaagacaagttctacgggctcgagctcaaccacatcgcccggcgctacaacgagactgcggacgagttggctaaaatagcctcggggcgaacaacggttcccccggacgtcttatcccgagacctgcatcaaccctccgtcaagatcgacgacacgtccgagcccgaggcaccctcggttcagtccgaggcaccctcggcccaacccgaggcaccctcagctcggctcgaggcaccctcggttcagcccgagaaggcacccgggggctacacgcacctgttggtcgccatcgacaaattctccaagtggatcgaggcggtggcgttcttcaccaacatcatccatcattttggggtcccgaactccatcatcaccgacaacggcacccagttcaccggcagaaagttcctggacttctgcgaggatcaccacatccgggtggactgggcggccgtggctcaccccatgacgaatgggcaagtagagcgtgccaacggcatgattctacaaggactcaagcctcggatctacaacgacctcaacaagttcggcaagcgatggatgaaggaactcccctcggtggtctggagtctgaggacaacgccgagccgagccacgggcttcacaccgttctttctagtctatggggccgaggacatcttgcccacagacttagagtacggttccccgaggacgagggcctacgccgaccaaagcaaccaagctagtcgagaagactcgctggaccagctggaagaggctcgggacatggccttactgcgcggtaccagcagtccctgcgacgctaccacgcccgaggggtccggtcccaagacctccaggtgggcgacctggtgcttcggctgcgataggacgcccgagggcggcacaagctcacgcctccctgggaagggtcgttcgtcatcaccaaagttctga

SEQ ID NO: 6466 - DNA, 135 bp, Zea mays
  Peptide Sequence Number=SeqID_48245
atgaacgggtgggctaaggtgactcactgcaatgcggttaaagcaccaaagcacgtggcgcaaggtcacgaggtggctaactccgaacaactgacagagcacattcaggggtcattttctccaaaatttatgtga

SEQ ID NO: 6467 - DNA, 207 bp, Zea mays
  Peptide Sequence Number=SeqID_48246
atggggaaagcgctagcgccgggcgccgagtgggcctcagggcaggccggcggagtggcgctgggccgcacgggagaccacaaggatgggggaggaagagcggggtgggcctcgtgggagcgctgggccgcgggggagctcgagtgggccgcgggagcgggccatgaagccgagctgggcagaggggagatgcttgagaccgattga

SEQ ID NO: 6468 - DNA, 354 bp, Zea mays
  Peptide Sequence Number=SeqID_48247
atggaagactccgctggccaggaggtttgcgccgttctcggcattggggacaacatcaagggcctcttggccacgctgtcgcgcgtcgatgccatcatctcctatgattcgtcccctcgctcaacctgcatcctgtcataccctatctcgtaccgagtcccagattcacggtggctgtgtggtgctccgcacacggagaacttcttggccctctgcactagcggctactacgacgacactgtgttccaccgcaacatcaagggcttcatggtagcacactatgcaggggccaacagcggacccaacgccaacggcagccggttcttcatcacctacgccaagcaaccgttctga

SEQ ID NO: 6469 - DNA, 207 bp, Zea mays
  Peptide Sequence Number=SeqID_48248
atggcggccgatttagacgccccacccgcggcggctgaagtgtggcgcggtgtggtacccgggatgagcagcgggctcgggatgctcaacctcagccggaaccggaacgcgctgggcggcggcatcaccgacgcgttcacgccgcgctcctacttcacgctgctggacggctggacctgtcgcggaaccggctcacgggcggcgtga

SEQ ID NO: 6470 - DNA, 471 bp, Zea mays
  Peptide Sequence Number=SeqID_48249
atgggggttgatggctggtcgactaggggacacgagggctcctccacaaccggccacactgcgactgcgcggctggacagcgaggcgggggcatggcggctggggcagctggagaagctcgacggggcattcggccgagtggggaagggcagggaggttttgaccgagtggccgaggacgggcggcgagctcgggctccggcgacggtcgagcgggcgcgactactccagcggctccggcgaggcggtggattggaggtcccggattcgaggtggaggcgaggtgttggtgggcggcatccgcatgattgctctgcgggaggcaagacgtggtggtggggctaccgagccccgctgccgtcgatctgaagctccttgcacccccgccgtcctccgagcccccccggagttcgcactcgagcgccctctggtgctcctgcgccagcgtgatgcccatggccgagtccgctag

SEQ ID NO: 6471 - DNA, 171 bp, Zea mays
  Peptide Sequence Number=SeqID_48250
atggccttgatcagtgcgatagttccaagaggatgtggtggcattcaactcttgctaactccaatcaaaagcttgaactattttaagctactgtatttgggatggttgccagaaataaggacgaattattcacgcaaatcatattcagaagagcagaagactggaagttaa

SEQ ID NO: 6472 - DNA, 192 bp, Zea mays
  Peptide Sequence Number=SeqID_48251
atggctccccgcgactcgctgaaatcatgccacaccctggtgcacaagattttgggcattacagatatcaaagtgtttcatgttagcaccgagaaccagctagccgatatctttaccaagcctctagatgagaagaccttttgcaggatgcgtagtgagctaaatgtattagattcacggaacttggattga

SEQ ID NO: 6473 - DNA, 552 bp, Zea mays
  Peptide Sequence Number=SeqID_48252
atgggtagaggcaggagaggtcgcggttggcctcgcctcgctgacggcaaatgcaagagcgccccaagtcccccatcggaggactttggggactcggagtactcagaggaggcctcctccgagttggaccgttcgcccgctccggcttctcccctggcatcatctgaggactccgatgactccatggggctctccaccgcggcccgggcgtactggcgctccatcgagcgcgctgggctcgaggggtcggatgagtcgggggtctcctcggataaggcagactcctccgactattccgaggggtggagcggcggcgacggtgatgacgagggtgacgacagtggcgacgatagcggcgacggtgacgatggcgacaacggcagtgagggcgacagtggcaatggcagcggcgacgacggtgacggtggcaacggcggctgcaagggcgacggtggtgacgacgacggcaaaggcgacatcagtggcagcagtgacgacggcaagggcgacgacagcggcggcaaggccagtggcatagcgccactaatttaa

SEQ ID NO: 6474 - DNA, 1986 bp, Zea mays
  Peptide Sequence Number=SeqID_48253
atgctgaataagagaggaaactcggaacttgctaacttactgtttcttgtgttcattaagttgcttggcacaaaacagctctaccatgaagcttcagcccttggcaggctctttggtgagatccgtgatatcaaggaggaattggagagcatgcaatcttttctacaaggagctgagagattcaaagatactgacaacaacactgccaactttatcaagaagattcgtggccttgctttcgacattgaagatgttatcgatgagtttatctacaagatggaggacaagcatggcagttttgctacaaagatgaatcgtcggattaatcgtatttggacatggcgacgtctcacgtccaaattgcaaaagatcaaactgaaactagagaatgttgataagagaaatgttcgatatgacatgagaggaattgctagagaagatggaagcagtgatgctcatcatagatctaccgaccagatttcttacttccccaaagaggaaaatcttgtgggcattgatgaaaacaaggagttattgatgaattggctaaggggtgatctacatcagcaaagtgtaattacaacagtatgggggatggggggagttggcaagaccactttggttgcacatgtttacaacactgtgaaggtagactttgacagtgctgcatggataactgtttcaaaagcttaccaagtggaggacttgctgaagcagatcatcaggggatttcagaaaagtgatttgaaggatgacgtctggggtgttgacatctggttcaagataagagatgcttttcctaccaatagcactagcagaagcccaacctactctgattgggaaagctttttcaaggaactagagttgcagatgacaaataatgtgattcttaatgttaatgttcttctaaagggtgcccagattgtggagctgccagatgaggttttcaacttgtttaatctacggtttctcagccttcgaaatactgaggttacgaatatccccagcacagttggaagattacaaaaacttgaagtcttggatgtttataatgctaaactgttggctttgccagagagtgtttcgaagcttagaaaattgagatatctacatgtagctactgttccaaagataaatactaaaggggttgtgacctggattggaatccaggtgcctaaaagcatcaaatacctgacaggcttgcaaaccttgaggcttgttgaggcgagctcagagactttatttcaccttggtgctttgacacagttgagaacttttgccatcacaaatgtgcagagggatcagtgtgccgatttgtgcactgttataatgagcatgaagcatcttgttagcttagcaattatggctataagtgaggaggaaatacttcaacttgaagaactttgtttacccccaactctttcaaagcttgaattaggagggcagctggacaagaaagcaatgccccagattgtatcatccttttcagatcttggtaacctcaccttattggccttggcattctccaaacttgatgaggactcattttcatgcctcttgacgttgcatggtctacgtgggctttgggttgataaggcttatgaagggaagaggcttcactttaatgctatgtcttttccaaatcttcgacagcttgcaatatcagatgcaccgcagctcaacagcgttgtaatcgaacgaagcgcactgcaaagccttgttcagctgacacttgtagattgtccagaactgaaggccctgcctgatggcattgagcatcttagaacacttgagaaattatatctgcgaggagcatccaaagagctcacaaagctatttcagtgcaatgaagaaacacatgagtccaatgggaatcttgagaagatcggtcatatccgaagggacgtgcctccatcttgtggtttcgatgatgacggcaatgatgagttgcaggccacaatacgtgcttcgagagaggagaaataa

SEQ ID NO: 6475 - DNA, 750 bp, Zea mays
  Peptide Sequence Number=SeqID_48254
atggccctcgatccggcctgtggcggttactgccacaccggccggttttgggggagagggtgggggatcggcgcgagcaacgtcgatggcggcgctcggcgctcggcttgcccccatcgctggcgctcggcgtggccttctctgcaaggcccggctgcgaccgaggcgctcggcgagcagggagtaggcgagcccgccctcaccctcatgtggcggctccctggtggaacccccgcgcgcatggaaccccggtgcgggtcctcgggcaagctgccctcggcgcgggcacggggaaggccccgaccgacgcgacccggccatgggcgcgggctctcggcagcggcggcgcggcccacctcggcaccgctccccagcgtggggagccacgccggcttccctccaggcgcggctcggcccggctcccaccgtggacctggtggcgcgctcggccggcacatggtggccggacccggcatggacgcggcctggggcgaggcacaagcctcggcgcgacccgagcccccgtggtggcgctcggcgcggcaggccccgggcacggacgcctggcggcgctcggcgcggctcccagaccgggcccccagcggcggctggagctggccgctcccttctggcaccaagggcggcggctggatccaaggcgcgcacgacccaaggctcggcgaggcgcgcaggccaggcggcggctccctggcagatcctggcggcggccaggaaagccctggtggctag

SEQ ID NO: 6476 - DNA, 189 bp, Zea mays
  Peptide Sequence Number=SeqID_48255
atgattacctatgaggtgtccgtggcatcgacggcgtgggcatccagggacagcgcacaggaccagcagctgcgagacaggaccgggacagcgaaggttttcggcgaacccgcacgctccgtgtgctgcggtagccgcatcgtcaccgggggcttcccatatcgcctctccaatggcttcagcggctaa

SEQ ID NO: 6477 - DNA, 885 bp, Zea mays
  Peptide Sequence Number=SeqID_48256
atggccttctcccttcattcacttctaccttgcctcatctgcccgtcgtcgttgtctcccccactcacgcgcctccgcgcagccgccaccctggaagacgtcatcctctcaacgccagagacgaccacgggggagcaccgggtgcagctcggcttctcgtcctccatcgtggagcaattccttctgcgaccattcctcaccgggatattcttcgacccagcgctcgacaagtcgtcccgcctcttcgagcttgtgttcaagcacctcaccctaggtgacaacgtcctgtcagaggacggcatcggcgccatcgcggcgcagctcgcctgcccacggagtggagacaggggcgaagaaggcggcgaccacagtgttctccccctctccaacaaggtccttgttgggctcacgcgcctccgcgcgaccaccaccctggacgacgtcatcctcttgccgtcgaagacggccacaaggatgtggatgacgggggcgccgaggatgcgaggaggatgggggcagggtgggggccgcgcgcgtggtggcatgggaaggcattgcggcgacgatgctggatctgtgcgttggatgcgatgcgggggcaggggaggatggggcgaggtcgagggtatggcggtgtggggctacggggctagggtgagcgtgtgtcggggcgagggcgcggaatggcggatctgctcgatatcaaggcttggcgggggctggagatcacgcggctggccggggcgcggtgaggcgggggtgtcggggcggtgtctacgggtgcgagatctcggcgcgggagcggggatgattacggaggtggtcgagggcgagaggcagaacggtgcacggtgtggacgcctacacaccgtgcttatagagtag

SEQ ID NO: 6478 - DNA, 252 bp, Zea mays
  Peptide Sequence Number=SeqID_48257
atggcgggccactggtccaggcggaggtcgaagcgcctggggcagggcgtggtggagatgaacctcccacatcgcttcttcaggttgggcacgtcgaggcccctggaaagcgacggccattggtccccggggcaacgggagggcggacaaggaggccgacgcggcgtgggatgggtaagcatagtggaggaacaactgcttgacagggggagcggggatccaggttgcgagcgccgcgccgccgccgcttag

SEQ ID NO: 6479 - DNA, 642 bp, Zea mays
  Peptide Sequence Number=SeqID_48258
atggcgcctcctgtgacgtggtcggtccgagccctgggttgggcgaggcggaggctcctccgaggtcgaggtcgagtctgtcttccgaggccgaggtcaagtccgagcccctgggtcgggcgaggcggagaccgtcggctgaggccaaggctgagtccgagccctggggtcgggcgaggcggagttcgtcgtcttccggggccgagctcgagtccaagccctggggtcgggcgaggcggagttcgtcgtcttccggggctgagcccgagtccgagccctggggtcgggcgatgcggagttcgtcgtcttccggggctgagcccgagtccgagccctagggtcgggcgaggcggagtttgtcgtcttccggggtcgagcccgagtccgagccctgggatcggggcgcacgtcaggataaggtgtcaggccatccttgcattaaatgctcctgcgatacggtcggtcggcgtggcgacttggccaaggttgcttcttggcgaagactgggcttcgggcgagccgaagaccactaagctcactctcgacagccgagaggactttgtggtcgacctgtcctcagagttggtggagaaggacctacaggtggaacagttgagccagcgcatcgccaccctggagtag

SEQ ID NO: 6480 - DNA, 162 bp, Zea mays
  Peptide Sequence Number=SeqID_48259
atgggggcgacaaacgcaacccgagatctcggcacgagtttcggatcaagggcacatcccattgaccagatcacgacgggttccaggattgagcggcgagccatgcgaagatacgagcgcgtggggaggctttgggctaaattgtacaaattcaaaatctag

SEQ ID NO: 6481 - DNA, 237 bp, Zea mays
  Peptide Sequence Number=SeqID_48260
atgaagctgtggaaggagacttccaggagttccaagactacgacgagttctaggtgtgggttagcggcaacccccagtcggctgcctgtgaaggccgcggttatctacgtttcgttttcgcactttgatttattgattagatcggcgtattatgcgaaccggtacgcactactggccatcggatcaagatcctacgtctacgatgaaaacaaagtcatgaactcccatggccgttga

SEQ ID NO: 6482 - DNA, 201 bp, Zea mays
  Peptide Sequence Number=SeqID_48261
atgtctaacgactgggtgcttcttatacatgatgacggaattataaaagtcagcctgaaaaaggtccagaaccaagggtcctggacaccaggatgtctggggattgcgacgtcgcaccgtcttgatgagtatctccgagaagatgagttccaagaggaaatggatgaaatgcgagtggttttagggagctcaagtggctag

SEQ ID NO: 6483 - DNA, 1026 bp, Zea mays
  Peptide Sequence Number=SeqID_48262
atgtgccgcgaccaggcaatcgaggagtccgtgcacaggcgccgaactgacgcgctgcatgaggactttcgttgttatgctgccaccatgggtcatcccctacctcctagggacccattcctagtgaccccagaccatccggctccggtcacttccttcctcctccctacccgggtcagggacccattcctagtgacccaaggccttctagcaccggttaccaccaccatcctccttctcctcctcattaggcccggccgcgctacggtcgctgctccggccgccgcccagcgacgagcgtcgggcgaagcagtccggggcggcggcgggggccggcggcgccttggggctgttcaagatgttcaagctcctgcccgtgctcaccacgggctgcaaggtggccgctatgctgggacggcacaacaaccaccgggccctactggccgaccactcgcccacggtgacgctgttcgggcaccggcgcgggcggctgaatctggccatccacgaggacacgctcgccccgcccgcgttcctcatcgagctgcccatgctggcgcccgcgctgcaccgggagatggccacgggcaccgtgcgcctggcgtcgagagcgacacgcgcggcggcgccgcggcgcgccgccgccgccgcccgctgctggaggagtacgtctgggcggtctactgcaacgggcgcaaggccgggtacgccatccgccgcaaggacgcgtccgacgacgagcgccacgtcctgcgcctgctccgcggcgtgtccatgggcgccggggtgctgccgccgccgcccgacgacagggcgggagcgcgcgccacggccacggccacggccacgcccgccgcttgccccgatggcgagctcacgtacatgcgcgcccgcgtcgaacgcgtcgtcgggtccaacgactctcaggcgttctatatgatcaaccccgatgatgccagcggcaacaccgcccgtggcggcgattgcgcgccggagctgagcgttttctttgtgaggaacaagtga

SEQ ID NO: 6484 - DNA, 354 bp, Zea mays
  Peptide Sequence Number=SeqID_48263
atgccgtacaccggatatcctctagcgccttcccacaatcgcgcttctgcggttctgccgccgacgtccgcgccgccgacgtccgcgcccgcgtccctcgctgctttgccctctccaccctccgccatcaccgccgcggcgtccttctgtaccggatccgtcgcagccaccactccgcagatccgctgggttgacgtccacggagctgctccggggatgtcgtcctccgcttccagcgtcgagggcgacgccgccggagagttcacggaggtcgtaatcgtgcgtcacggcgagacgtcatggaacgcctcgcgcatcatacaggcgctactccagaactcctttctcaagtga

SEQ ID NO: 6485 - DNA, 339 bp, Zea mays
  Peptide Sequence Number=SeqID_48264
atggggagctggagcttgtggcagccatggcgagcagcaggtcgcctggctgggcatcccagcgggagtggagccgagggtgcagggcatggaggccaccatagctggggaagaacgacgatggggtggtcgccgacggaagaagacgacccaggtgccatggctgcagagagccagagaccaaggcgccgcggccatggggaggaatggagaatgggctcggacctgagccatggatggggtgctacctgctccatgctccaatggagaaggaggaatagccatgggagaggggctctcgcagatacagccatgggagaagagaggggtgggctgtaa

SEQ ID NO: 6486 - DNA, 225 bp, Zea mays
  Peptide Sequence Number=SeqID_48265
atggcgagcagcaggtcgcctggctgggcatcccagcgggagtggagccgaggagagccagagaccaaggcgtcgcggccatggggaggaatggagaatgggctcggacctgagccatggatggggtgctacctgctccatgctccaatggagaaaggaggaatagctcatgggagaggggctctcgcagatacagccatgggagaagagaggggtgggctgtaa

SEQ ID NO: 6487 - DNA, 658 bp, Zea mays
  Peptide Sequence Number=SeqID_48266
atggcttgggagcagttggccctcgacaccgcttcctacgtagtgaagccatcactcgacccactatcgggctcgtgggtcgtgtggctccagggcatatgttacggttttgttcgccccctcgtcgtcgtcaccctgtgcctccatggggttctggagccactcttccaaaaccacccagatgccctcatttcttgcgggctcctccgcgagggacactacctgctccctggctctaaagatgtttcagttctgctagcgggcttcgtggatgtccccccatttctgcctttggtgctaccttttctcgaccgagttgccccgcaattggtagacgctagacgccctggcgagggtgacccaaatcggatgtgcgaccatccatatgcgtggggcacaatccaggggggtgcccctgggaccctcaaagttaggtatgggtgtcccaaggatgaggagaaaagaatggtcagagctattgcagcgatgtcggttcttcatgatcatggggtcacgctggcggcccgtggcaccgagaccttctcgatcgacgaggatggagacgacgatgatgatgcgaacgcaggctccgagctttgggccattcctaatgcctcccttgatgcctcaacggttgatcccgtcccaactttacctg

SEQ ID NO: 6488 - DNA, 3360 bp, Zea mays
  Peptide Sequence Number=SeqID_48267
atggatgacgctttgctctcggcctttctgcaatccctttaccaggtcatggtgtaccttctgaaggaggagcagtctgaacgccatctcgaggaagggaggaagcaattagtctctaagctgggcatgatccaagctgccctcgggaccgccgagaagaagacgcagctgtccgcgtcggaggaggcgttcttcgccagcctgaaagacgtcagctaccaagggtcggaggcgctggacgagtactgctacgaggtccagcgccgcaaggtgatccgtcccgccacccgtctgcgtaacagcaccgtaactaccgtcttgaatccttcacgcgcgatgtttaggcataatatggagaacaagttcaaggattttgccgacaggattgatggcatcagaaatatacaagagatgctcctggacctccaagcgcagaatggtcagccatgtgatggtggcgggaacgagcggacctccttgcttcctccgaccgtggtgtgcggtagacacggcgatgaggagaagatcgtagagatgcttcttcgacctgacccgaagcccggcaatgtcgtggcggtcttgccgatcgtgggggaggcctacatcgggaagacaaccgtggctcagctggtcctcaaggccgagcgtgtggcgaagcacttcgagctgaagctgtgggttcatgtgacacatcagttcagcatagaaaggatcttttcatctatcatagaatccatacagtgctctcaatttcaaagccatagcctcaacaccctccacacgagcctggaccggctgctgcgagggagaaggtacctcctcgtcctggacgactactggaacgagagctgggaggactgggacatgctcaagcgttcgttcctcagcggtgctccaggaagcaagatcatagtgacgacgaggagcgagaatgttgctgggcttgttcgtacgttaggcccgcacaggttgcagcgtctggaagaagaggactgcttgtcattgttcagccagtgcgcccaaggcacggagcatcatgcacatgtcccagacgacacaagactgaaggaagaagttctacgcaagtgcaggggtgtacccttcatagcagcaagcttgggatacaccattagactgcgccaggagaacgacagaagcaagtgggcagatattttgcgggaggagaaatgggactccagcaccagccatttcaacagagccctacggctgagctacgtgcagctggattaccatctcaagccctgcttcgcgtacagctccatcatcccgcataagttccagttcgagaaggaatggctcatcaggcactggatggctcagggcttcatacctgacgccggcagcgacgatacagtcgaggacaccggaagagcctacttcaagtctttagtcagccagtccttcttccagatagcgcacgtcgaccgcaccggggaagagcacaggtacgtcctgtcagagatgatgcacgacctcgcctcgaatgtctcgggcgcggactgcggatgctacctgatgggacgacagcgctacagcgttccagtgagagtccggcatttgacggtcgtcttctgtaaggatgcgagccaagacatgttccaggtgatctcctgtggcgagtccctgcacacgttgatagctctgggtggttccaaggatgtggatctgaagatccctgacgacatcgataagaggtacacaaggctacgagctttagatctgagtaactttggtgtgactgctctgcctagatcgatagggaagctgaagcatctccggtgcctccagcttcaaggcaccaggatcagatgcttacccgagtcgatctgtgagctgtacaatcttcagacgctggggctcaggaactgctatgagctggaagagttgccacacgatctgaagagcctttgcaagctaaggcacatcgatctgctaatggctcctgatgatcctcgccacaaagtctgcagcttgagatgcatgcccaaggatatagggttgctgacgaaccttcaaaccctgtcaagattcgtcgtaagcgagaggtctgtcgtccaccctcacagaggtgggataggggagctggccgatctgaacgacctccgtggggagcttctcatttcaaacatgcatctcgttaaggacgtgcaggaagccacgcaggcgcagctgagttccaagcggttcctccagaagctggagctctcgtgggacaaccaagaagaagctacgcaaccttccaagaagatcctccaaaagctgaagctttcccctagcagcaacgagattgaagaagccgaggcaatagtagatcgcctaaaggcacccaccagcatcaaggagctcaccatctcgggttacaccggcatggcatgccctagctggcttggttctgcaggctacgcggacctggtcactgtgagcctctgcgatttcaagaggtgtgacactctcccttgccttggattactgtcccatctggaaaatctccatcttaaaggctgggatagcttggtctccatcagttgccgtgagttttgcggtgactgtttcggggaaagtggagtacgccggagcttccgatcactgaagaagctgcattttgaggggatgaccagactgcagcgttgggaaggggacggggatgggagatgcgctctgtctagtcttctcgagcttgttcttgagaactgctgcatgctggaacaagtgactcacagccttccgtcgctggccaagatcacagtgacagggtcagtcagtttccgtggcctccggaatttcccatcgctgaagcgcgtgaacgtagacgctagtggcgactggatatggggatcatggcccaggctttcttctccaacatccatcaccctctgcaacatgcctacagtgaacttccccccaaggatcggacagttgcatacatctttgcagcgcctggagatcagccactgcgagcagctgcagcacataccagaggactggccaccgtgtaccctgactcacttctgtgtgaggcactgtcctctgcttcgtgaactgccagagggcatgcagcgcctgcaagcgttggaagacttggagatcgtttcttgtgggaggcttaccgaccttccggacatgggtggtcttgattcgttagtaagactcgagatttcagactgtggttcgattaagtccctgccaaatggaggcttgcctagctcagttcaggtcgtgagcattaacaactgccctctgcttgcaaactcttgcatcaatgagggaagtgcctatcgtgcaaaggtcaagagggtattagtatggattgatgggcttctgcttgaccgcttcttgtga

SEQ ID NO: 6489 - DNA, 198 bp, Zea mays
  Peptide Sequence Number=SeqID_48268
atgaaggtgatcggttttggacgctcactggaggttggtgatgcttatgataccctcaccatgcgggttcgcggccgggatcgagggcaattgcccactggagcccttactccgccgcgaagctacggttttggatgctcaccagaggttggtgattcttatgacaccctcaccatgcgggttcgcggccgggattga

SEQ ID NO: 6490 - DNA, 372 bp, Zea mays
  Peptide Sequence Number=SeqID_48269
atgcgccaaagtctagcgtcgctcacaaggtcgctagcgagcagattctgccttcttcttgaccaaagggaagcgtgggagcattccgtcagtgatcttccagtagcaaaaagtgggaccatcgatgcccgcgccagtgccgcgttgatccaaaatgcctacggcgccctagtcggagcagcgaggagtgatgcggattcgatgacccttgcacgtgttcagagcacgaaagcgagctctcaccttcgtattctggagcgagggaaagaggtcgtcgaggcccaagtcgcggtcttggaggaggagctgggcagtcagaccaagaaggaggagaaattcctaccctacatgcaagataacaccttttattag

SEQ ID NO: 6491 - DNA, 495 bp, Zea mays
  Peptide Sequence Number=SeqID_48270
atggctggaggagctcctgctctaggggaggtcggccatggtgggcgtctgggagatgggagagctgctcgcctgcaggggacgcgcccatggggaggaggtcagggagctccggcgttgagggagctcggcggcatgggaggccctgcgctggctgctgttgtggtgctcggtgtaggagcacggcggccatgggaggtgctggcggatccgccaccggcggtgcggatccagggagaagagggccgtccgattccacgcgcacccgcgccgcgcgccgtcggagctgggggctgcgcgccgaggctgggcagccacgcccgcgccgagctgcgaggggccgcgcccgtcacagccgcgccattggaaggggccgccccgggagggaggagcctcccgggggcggcggcggctcaggtgggaggcggctgctcctggcggctgctgggtgggagagagcccccggcggctgcagtgggaaggaagaaaacctaa

SEQ ID NO: 6492 - DNA, 831 bp, Zea mays
  Peptide Sequence Number=SeqID_48271
atggcctcttgcgacctccttgatgtcgaccctctggagcttcagtttccgttcgtgctcgacaagcagatcccctgcccgctgcggctcgccaacaggactgaccgtaccgtcgcctttaagcagagttcaagaaacagctcagttttggagccttttcttttgtcaactttggtggagaacttcggggttctttacgcattctgtgctcctgcagtcacgatgcaggcgcagacggtggtgcctccggatttgcagtgcaaggacaagttcatggtgcagagcgtggtcatcagtgatagcttgtcagccaaggacataacctctcaaatgttcgcgaaagaggggggtaatgtgctccaggaggtaaaattgaaggttgcttatgtgatgccacctgaaccaccatcagagattgcagaggagcacgatggtttagatcgagttttagtgcctatgcagaggatcgtggataatgggaaaagtacttcagagctatcgagtggctccgtgtcattgaggtcagctgaggagtttggatcacctgttggtcgaattgtgaagagtgaggagtttctgaaggctgcaggacctgctatggaaacaaaaacatatgcaggacctggtgaacaatctcatcagctgtcagctataattacaaagctgactgaagaaaagaattctgctcttgagcaaaacagaaagcttcaagttgaattgtcaaggaaccattctagacgattaactgttggacttgatgtgcactcaacacttattggggtcttacagatccagtgtgaaagcctaagaatagttaacttctcaagataa

SEQ ID NO: 6493 - DNA, 846 bp, Zea mays
  Peptide Sequence Number=SeqID_48272
atgacaggagctggagcagcaggcactacaagaaatttgtccttttatgacaaaatacctaatgacaagccgagcccggttgttctgaatcccgattcggttcggctcccttgctctgtcgtcgcttccgaggcgtgctcggatctcgttagagtagagggcctcgcggctcgcttcgagtggtgcatcaacttcagcctagatggacgataccttgccactgctggagaggaccacgtgatccatgtgtgggaggtgtccaagggagaccgaaagggcgagttactcggggaagcttcggtggcaaaggagaatggtggtggttgcagtccatttctcgcgattgttgggaatgattcactggagatggctgcattgtcgttcacctacactgaagggggctatgtggacaagaagagaaggccgaggaagcagaacaatcacaagtctgtagggtccgatcatctggttgttcctaagtgtgtgtttggtttcacagacaagccagtctgctcacttctggggcatgctgccgatgttcttgatctgtcatggtccaaatctcagaagaagcttcagtacaaaagtcagatagatttaagaattaggaaaaagaagtcaggccagaagaagataactggcttccagcaggagatagagtctgtgaggagctgttcccctgtgctcccgctggaggagccccctgcaccaccactgagcgccccagccgctggagtagctactggaggagacccagacgacggaggtggcgacagcagctcgagccatgacaccgccctttctgaggagcaggagttggaaggatgggttgcccaacccatgtag

SEQ ID NO: 6494 - DNA, 276 bp, Zea mays
  Peptide Sequence Number=SeqID_48273
atggagagagagaaagagacagtcgaggcccaaatttcatcccttaaggttgtggtgacacatcggacggaggaggtggagcagctgagggcctctctcaaaggtatgtctgacaaacttaccttggcggagaacaacctcatcaaggcacaatgtcgtttgggggagcttgacatggaatacagctaccttttgagggcggttgacaccgtcccattacgaggatgggatagacttagacaacttgggtcttgtatattccaagggatgggctga

SEQ ID NO: 6495 - DNA, 810 bp, Zea mays
  Peptide Sequence Number=SeqID_48274
atgggagggcacggcgggttgaacatcctgccgcagaagcggtggaacgtctataacttcgacaaccgtgagaaggtgcaaaaagacgaggccgccgccgcccgggaggagcagctccagcgcgaggcggaacgccgccgcgagtcggatctacgcctcgctgcactacgccgtaaccgcggcctggtccaggcggagacgccccccgctcctccatctcaccccgccggccccgctgatccggcggacgcccttccttccccggcggacgcccttccttccccggcaacggatggagaccacatcaacctcttctcaggtggatcaggcgtcgccactgatttcgatgcgctcgcctcggccagtggtgggaggggcgcggctcgggagcgggagcctgatgccgaccctaaccctaagaagcggaagaagaaggaagaggaggtgagggttgtggggcccgatgaggagaagtacaggctgggctacggccttgccgggaagggcgtggcggtgccctggtacatgtcgagccctgcagcggcagcggccaaggaggggaggggcagagatgcaagggagggtaacggggtgaagaggagtggagggaagaagagcatcgaagagctgagggaggagaggaagaagagagaggccaaggagaaggaacgcgagcgagccatccttgttgctgcagggaggaaggagagacaggtggatcgggggcgccagtcaagaccgggggctggcaaagagcgtagctgtgcgaggttgagggaagaggacctggaccgcctggccaaggtttag

SEQ ID NO: 6496 - DNA, 441 bp, Zea mays
  Peptide Sequence Number=SeqID_48275
atggcggccccgacccccggcgacgtgccccctcggcgcggtccggccccctgcgcgcagtcccacccctcgacgcgacccaggccccctgcgcgcgacgtcctggcccccggcggcgtggctccttggccccctcgcgcgcggccgtcccggccccggtgcgtggcccctgccctcggcaacgtggaccccggcgcggttcctcgcgcgtcccgacgcggctcgcgtggcctcggcgtggcctcgcgccccccgttcacccaacacaggaagtggggtgtagttcgcttcgccgtcgtgccgttaatggggctcggtgtatgcggctcgctctgccaaggtggtgacgagtatgatggttatgattatgcttatggtactggtgaagatgaagtcgtggaggaggacttccagaagttccaagagtacgatgagttctag

SEQ ID NO: 6497 - DNA, 303 bp, Zea mays
  Peptide Sequence Number=SeqID_48276
atggacaccacgtgtcctcaccgtgtttcattcaccgtcgccgtagcaaaccaccggacgctccaggtcgtccacgcagctggttggaggctctcatgttgcaccatcgtaaaggagcacctagaagaagaatttgaagtggaagtggaagaggagtctgctcctacatctgaaacttctctgactaaagttgtctctgaaggtcctccagaagatccccagctgggtattaatggattcggatcaccaaacttctttgatatgaagattggatcttcgaccctcagcatagataacaagtga

SEQ ID NO: 6498 - DNA, 363 bp, Zea mays
  Peptide Sequence Number=SeqID_48277
atggccgccagtccctgcgtcctcctccactgcgccccctcctccctcaacgccggcgctccctgtcttcttcccctgggcgcgcccccttccggtatggcagtggcagccgtggcgctagcctctgctccctatgctgacctccaccttgccatgctcgtcgagaatctccagcagggcgccatcgtggcctcgccgggctcctgctcgccggcgagctcatgtgctcatggcgcctttccctgccttctctctgtccccagcgaccagcagcaaggactccctctcctccactgctcaacagccctccagttcaatctccactccccgtcgcgtgtcgtcgctctcgtgctcgctgcgtag

SEQ ID NO: 6499 - DNA, 207 bp, Zea mays
  Peptide Sequence Number=SeqID_48278
atgaccggccggccggctgccgtgccgctgtcgttgccacgcgcaggggctagggaggggccctcgggcgaaggagttgtgcaggcgtgctgggacaccgtgccgccgagctcggctgagggccgcgcggggaagctcaggctggaacacggcgagggacgggtgcttggcaagatgcggggagtggggcactcggtggttttttag

SEQ ID NO: 6500 - DNA, 1179 bp, Zea mays
  Peptide Sequence Number=SeqID_48279
atggggtcccacctaatcgagactggcataccccgtacctgcaatatctccaccgaggagagctacccctcgaccgagccgaagctcgacgactggcgcggcgcgccaagtcgttcgtcttgctgggtgacgggaaggagctctaccaccacagcccctcaggcatcctccagtgatgcatatccatcaccgaagggtttctactggccaaccgcggtggccgacgccactaggattgtacacacctgccaagggtgtcaattctacgcaaagcaaacccacctgcccgctcaggctctgcaaacaatacccatcacctggccgtttgctgtgtggggtctggacctcgtcggtcccttgcagaaggcacccgggggctacacgcacctgctggtcgctatcgacaaattctccaagtggatcgaggtccgacccctaaacagcatcaggtccgaacaggcggtggcgttcttcaccaacatcatccatcgctttggggtcccgaactccatcatcaccgacaacggcacccagttcaccggcagaaagttcctggacttctgcgaggatcaccacatctgggtggagtgggccgccgtagctcaccccatgacgaatgggcaagtagagcgtgccaatggcatgattctgcaaggactcaagccgcggatctacagcgacctcaacaagttcgacaggcgatggatgaaggaactcccctcggtggtctggagtctgaggacaacaccgagccgatccacgggcttcacgcagttttttctagtctatggggccgaggccatattgcccacagacttagaatacggttccccgaggacgagggcgtacgacgaccgaagcaatcgaaccaacctagaagactcactggaccagctgggagaggctcgagacatggccttactacactcggcgcggtatcagcagtccctgcgacgctaccacgcccgaggggtttggtcccgagacctccaggtgggcgacttggtgcttcggctacgacaagacgctcgagggcgtcacaagctcacgcctccctgggaagggccattcatcatcgccaagattttgaagcccggaacatacaagctggccaacagtcaaggtgaggtctacagcaacgcttggaacatccgacaactacgtcgcttctacccttaa

SEQ ID NO: 6501 - DNA, 342 bp, Zea mays
  Peptide Sequence Number=SeqID_48280
atggggaagaaattgtcagagctcgaagctttaaatgctgaaaaagacaagcgaattgagtcactcgacgatgaactaaaaggtggaaaggaaatcaacattgaagaatcaatgaagaatagggagaaggcccgacaagcagctgaaaaatctggaaacaatagaaagaatctgcaagggaagaaagttgaagtttcgacttcacaggtgatcattgaagtaaagcatactgaagccaaagcagtagctgctagggctacaaaggaggtcgcagatgatgttgctcttaaaatctatgagcagatctatgatgagatgatgccgggccacaaagaaaattga

SEQ ID NO: 6502 - DNA, 537 bp, Zea mays
  Peptide Sequence Number=SeqID_48281
atggcgctttccccctcctccttgcggaaaggcgacacaggggcagtgaggctgacggcagccaagcccggccctaggcgctatgggaaactccgcttcgcccgaccccaaggctcggactcgggctcagccccggaagacgatgaactccgcttcgcccgaccccagggctcggactcgggcttagccccgaaagacgacgaactccgcttcgcccgaccccagggctcggactcgggctcagccccggaagacgacgaactccgcttcgcccgaccacagggctcgagctcgggctcagccccgaaggacgacgaactccgcttcgcccgaccccagggctcggactcagccctggcatcagccgacggtctccgcctcgcccgacccaggggctcggactcgacctcggccttggaagacagactcgacctcgactcagccctggcatcagccgacggcctccacctcgctcaacctagggcacggaccgaccacgtcaacaggaggcaccatcattaccctgccccaagctga

SEQ ID NO: 6503 - DNA, 174 bp, Zea mays
  Peptide Sequence Number=SeqID_48282
atggggaaggcggtcataaacatagaaaaagaacaccaaagctcatctacatttctaaggatgcaagcatatgtatgcgagagattgggcgaaaatgttcattacctctcttcgatgtgtattaacgagagagtcatcagggttatgatatacctgacaatcatgacaagctag

SEQ ID NO: 6504 - DNA, 375 bp, Zea mays
  Peptide Sequence Number=SeqID_48283
atggaccagagcggcaccggctgggcggactcaccggtggccaaggctggcggtggcggttcgccgggattggggcacgcggcaagcgctctggggctgggcagggagcgagggcgctcggccaccatgctagcttgtcggggaattagggactggggctctgcacggggtggtcggccgggggccggggctagtgccgcgccatgggaggtgctgagcagcacacaaggactgggaagaagtaggggcaggcgcttgaccgtggccacagggcaatgcggtgcagatgctcgcagcagggtgcacgaccggacggagcgacgaggcagggctgagcgacgccagtggccagcaggtggggtgcgactaccatag

SEQ ID NO: 6505 - DNA, 300 bp, Zea mays
  Peptide Sequence Number=SeqID_48284
atgcaggtcgtgtgcaaccgcactgcggtggcgcacccttttggcttcaacgcatccagcatggaggcccaggcccacacatcatgtaaccggcgcgccggttactacatgcaggaaaccgcaccgccacttgcgccaatgttgcgccttctcggctgcggaactggtgccgcgacccgaggcaaccctgtgcatggcccaacagtgccaatcgagcacaacgatcacggggaccgggaaagtggatatttcgaaagggatccttctccgcgaaggaagcgggcccctgtaacaccctga

SEQ ID NO: 6506 - DNA, 219 bp, Zea mays
  Peptide Sequence Number=SeqID_48285
atggagccaaggaaagagatgggtacaagctcgggacgacgccattccttcgctgctgtgaagccccatgctggagccgctgtccatggccagcagcatgttccagaattgtcatcgccaagtttgccctcgccgccggagtcgcagcaaactcctacaatgccacacatgccggagtcgcaaaatcgctctccaaatctggcatggtctgatttttag

SEQ ID NO: 6507 - DNA, 495 bp, Zea mays
  Peptide Sequence Number=SeqID_48286
atgtccggtgcaccagaggactccaactcaaactcgccaccttcgggaatttctagaggcactcacgctataattcaccggactgtccggtgtacaccggacagtgtccggtgcgccaaggaagaacggcctcgggaactcgccagctttgggaatcgccaacggctagtccgctataattcaccggacatgtccggcgggcccacaaggcagatgctccaacggtcggaatccaacggaactggtgacgtggctggggcaccggacatgtccggtgtgcaccagactgtccggtgcgccatcgaacagacagcctccaccaacggtcatcttggtggtggctgcctgttcgatggcgcaccggacagtctggtgcgccccggacatgtccggtgccccagccacgtcaccagttccgttgggattccgaccgttgggagcatctgccttgtgggccccgcctggatgtccggtgacccaggacaagtcctgtaa

SEQ ID NO: 6508 - DNA, 783 bp, Zea mays
  Peptide Sequence Number=SeqID_48287
atggcatcggccgtggcgccgttctcaacggagtccggggagaccattcgtgccacgctctttccccgcgatggcatcgggccagagatcgccgagtctgtgaagcaggtattcaatgttgcaggggtaccaattgaatgggaagaacactatgtcggtacagaagttgatcccaggacagagagttttttgacttgggaaagcctggagtcagtgcgtagaaacaaagttggcttgaaaggacctatggctacacctattggaaagggccatcgatctttgaatcttacattaaggaaagaacttgggctctatgccaatgtcagaccttgcaacagcctcccagagtatgctttccattatgccaaggcaaatggccgggaaagagtctctgcgatccacaaagccaatattatgaggaagacagatggtcttttcctcaagtgttgccgcgaagtggctgaaaagtaccctgaaattcaatacgaggaggtcatcattgacaattgctgtatgacgcttgtgaagaatcctggtggcatttgtctggctgaagctgttcatggttctgctcctgatattgctggcaagaaccttgcgaacccgactgctcttatgctgagtgctgtcatgttgttgcgccacatgcaattcaacgacaaagcagaccggatccacaacgccatcctccagaccatcgccgagggcaagtacaggactgctgatcttggtggaaaggcatcgacatcagagtttacaaacgcagtctgtgatcacatctga

SEQ ID NO: 6509 - DNA, 234 bp, Zea mays
  Peptide Sequence Number=SeqID_48288
atggccgttggaagactgctgtcgcatggcgcaccggacagtccgattggtgacccagttgaagcacggtacgaggagtcgactgaaaggggttcctctgtagatcaactggtctactgcatcaatcgtttcagggagactgctttgtccaatgaccaaaagtttggccatatcgacatatctgagaaacagaagctaaggcaaaattgtaaactaccgctgaaatggcattga

SEQ ID NO: 6510 - DNA, 270 bp, Zea mays
  Peptide Sequence Number=SeqID_48289
atggggaggtggccggtggagaagatcgcatcggcggcggccacgccggagaggaggggaaggcccggcgacgacagttctgctcgcagcagagagggcggcggcgacggtgtccaggctcgcgctagtgcctgcgcccagggtcgcagcggggcacgcagccaaggcagcggcggcgtccgcggcctgttcaacggcgacgtccgcctccatgtccgcggtcagttcttgtatgcaggctgcacaggagaagacaacatcaagttctaa

SEQ ID NO: 6511 - DNA, 567 bp, Zea mays
  Peptide Sequence Number=SeqID_48290
atggattcatctttggcattggtttatgaaaatgactcacaagatcttccaataaccaatccagtatacctcatgctaggcacatcatttggttcctcggctaaaggaaccgggcttaaagctcttgaatttgccctctccatctgtgacagtgttgatatgtatggcttcaccgtagacccaggttacaaggaatgttctgtgcttacagctgaagttatctttcaggacaaggtacttctcagagaaaatcatgtgcagctggtgaaaatccattcaccgatgcgaggaggtcctggcaggacagtgaggtggcttcctaccaaggctaccatcgaggctgctagagttgcttccgagaagttgttgaagagacctggtgctgaaagtgatgatcctctggggacttgcaccatgataaagaagcacaagaaagggaaggcaccaaacagatctggtctacgagatgctgccatgaagcacctcgaggacatgaaaggtgccaccacgtatcccttagagcagaatgcagggggtggttacctctgcatgatcaatgatagatag

SEQ ID NO: 6512 - DNA, 201 bp, Zea mays
  Peptide Sequence Number=SeqID_48291
atggccaccgttgattgtgcgccgaccgttggcgctggtgagagccattgggccacctggctcaccggacagtccgatgaattatacccagagcgcctggccaatttcccgagagcgaccagttcgaccactgagcagtctggcacactggacaatatccggtgcacaccagacagtccgatgctgcccagactagcctaa

SEQ ID NO: 6513 - DNA, 111 bp, Zea mays
  Peptide Sequence Number=SeqID_48292
atgaatgatatctgtgaagaatgtgaccgcctgctcaaatttaatattggtgatgggccagacctcgattcacttgaagaatttgtcgatggcgaccatcagaactggtag

SEQ ID NO: 6514 - DNA, 363 bp, Zea mays
  Peptide Sequence Number=SeqID_48293
atgtacaactgcgtccagtccgagcgcaactggagcgtgcagctgctagctcaaacggcgaggcgcaccctcctcacctcgctgggcggggagaagggctccgcatggaagaggacggacggagccaccaaggtgcgaattgtaaatggtcgaacgacggtcgttttgaatcccaaacacgccgagcgtcgttccgcattctgcctcaaaaggcgggaggagaaaaagcaaggaaaaatactgttaagaggttcgaaggttcagcccttggcagggtatggaagaaccgccttaggactccagggctccgagcccaatactgatcaagggttcgaaggttggccccttagaagggctccataa

SEQ ID NO: 6515 - DNA, 300 bp, Zea mays
  Peptide Sequence Number=SeqID_48294
atgatcctgcggggtttgaagctgaggatcttcaatgacctgaacaagttcgccaagcggtggcttatcgagctcccctcagtgatctggagcctgaggactacttcgagccgagccacaggattcatgccgttcttcctcgtctacggggccgaggccgtcttacccactaacttggagtatgggcccttcatcatcgccaaggtgctgaagccaggaacatacaagctctataacaaagaaggagaagtctacgacaatgcgtggaatatagaacaacgacgtcgcttctacccttag

SEQ ID NO: 6516 - DNA, 306 bp, Zea mays
  Peptide Sequence Number=SeqID_48295
atgggctttgaagaagggtggaggaaggttacttacctagagaaagcgctcgaggcagcttggcacggtgcgaggggtctccggttgtctgaacgacgagaaaccgcaacggtggcgaactctgacctgcgcatgggagaggttgagcacggaccgggcagagggatcggtggaagggaaaaccactgcgggttctcggtgcacaaggctctggcgaagctcaccgtggccgagacgacggtagaggaccgacaaggacggcaggatggtggagcaacagagggggcggcgctgcaggctgagtga

SEQ ID NO: 6517 - DNA, 336 bp, Zea mays
  Peptide Sequence Number=SeqID_48296
atggaccatatactacactcatcaaccattgttttaggagacccagaatgttcgacaaaactccatcaaacacacaggtacctcatgaaggacccatgtgtgatcttttgtggtctgacccagatgaccgatgtgggtggggaatttcacccagaggagcaggataagaatgtagtcacagtcttcagtgcgcctaattactgttaccgctgtggtaacatggctgctattcttgaaatcggggaaaacatggaccagaacttccttcaattcaaccccgcacctcggcaaattgagccagacacaactcgcaaaaccccagactactttctgtaa

SEQ ID NO: 6518 - DNA, 1323 bp, Zea mays
  Peptide Sequence Number=SeqID_48297
atggccgccgcgacaaccgcgggggccggagccgcgacgccgcagccgccacggcagtacaagctagctccgcagagcgagctgcgtgtggaggtgctccccgacgcgcccctccgagtgcgcctcgtcactggcaccgcagagatcttcggcaccgagctgcctccggagggctgggtccccgtccctccccgatccaagatcgccattttcacctggcacggcgcgacggtggaactggacggggtgagcgagagcgagtacacgtctgacgagactccaatggtaatttatgtcaacacgcacgccattctggatgcccgcagggcaagggcgagaacagccgcagctcaggggggcgataaggaggcatcacagtttagcatattcctagagatagtcagaggacctagagtgattgttgtggggccaacagattctggaaaaagtactctctgcaaaatgcttcttagctgggctgccaaactgggctggaagcctacgtatgtcgatttagatattggccagggatctataacgatccctggatgtatttctgctacaccaattgagaaacctatagatataattgatgggattcccttggagatgccactggtatacttctatggtcacccaaatccaagtattaatgcggatgtttacaaagttcttatgaaggagctagctaaaacattggagaaacagttctctggcaatgctgaatctagggcagcaggaatggttatcaatacaatggggtgggttgaaggccttgggtatgagattcatattgttgccctttgtgtattacttctcaacgcaattgaaaccttcaaggccaatgtagtactggagaaactctggaagatgttgaaagatgcagttcaaagcaagtccaacattgatgttgtaaaacttcataaatcagagggtgttgtcctcagaaattcaaaatatcggcaaagaacgagaagcttccgaatcaagcatagttgtgtcactgtacaccatcatgctcttagcctctttctttttttcccctcttctaatgttgttcttagttcttactaccgttacgaggaatacttttatgggattgcaaatgatcttgcaccgcactcaaacattgtcaatttcagtgatgtctcggtgtataaaatcggtggtggccatcaagctccccgttcagcattacctatcggtgcagagcctgtggcagatcctactcgacttgttgctgtcaacatcagcacggatatgatccatacagtgcttgcaatttcctatgctaaggaacctgaagaaataatatctaggtaa

SEQ ID NO: 6519 - DNA, 390 bp, Zea mays
  Peptide Sequence Number=SeqID_48298
atggcatcggcgggccgctgggcgtggatggcggaggtggcgggcgaggagctggcgaagctggaggcggcgcacccgggccgcttcgccccgctcaaggccgagctcgagcgcctcgtggccgaccccggcttggacgaggcagcgttcccgctcgtctcaccgcgcgccggcgccggcgccgtcattgatcccactccggccgcctcgtcccagcctgctgctgctccttcgaccacggtgcccgtgtgcactcaaggcgtttgtcaatattatattggtgaaggcgttgagatccaaactcaagatcgtcgagaacgtgttgggccaaagctttatgcaaggcttgttcctagtagctgtcgggggttcctaaagtgcattgggtaa

SEQ ID NO: 6520 - DNA, 315 bp, Zea mays
  Peptide Sequence Number=SeqID_48299
atggccgactcgggcaaggaaatccacccaggacagcggatttactcaccggagctgaccctccgccgcgggttcgctgcatgccatgggcagagccctccgcgccgcaccatccggtatgtcaccatctaccgagtttgcagtggcatgaattttgttctgcacgtttctggggacaatttgaccgtcggccttcgggtgccgttcctacgacaatggcgtcgccgtgggaggattctcgccgccgtctggtgttcgactggggaaggcaatgggatcctgaccgttggatgcatcaagagcgatggagattag

SEQ ID NO: 6521 - DNA, 1485 bp, Zea mays
  Peptide Sequence Number=SeqID_48300
atggtctgggtgttggaccccgtcgacacagtgcgcgggattcagaagcgttacatcttcgctgccgggacgtacaaggtcggccgcaaagattgtgatgtcattgttcaaactgacacatctatatcccgagtccatgcggagattgcaattgaaaagatggttgcctgggatccacattctggtgcacctgccagtccatcatttgttcgtgtaatcgaccgatcaaagtatggcacatttgtcaacaaagtacatggaacccagggcagccgtctgcataaagatgaagatatgatgcttactgatggggatgctgtgacgtttggaactggtgcatatgctactcgtaagtggagcaatgaatgtacacatgttcttgttgacggatcatgttcgttgacacctgagctcctcgatgcagttatggcaaagaagcagatcatgttgggagactggtttgaggcaatggctgaaaagaacatacacacagagatcccttcttgtacacaatacattccaaacttgactctagatgggatggtgatcaaaatggtggatatcaacctcattcagaatttcctagaaggctatacttttatcctggggtcatcagataaatatcaatttggtgagaagctccatggattactggaatcaactggagcaaaatacgtgcacattgacgacttttgtgcaaacagccaggactcagcagctggagacactgatcatcaaattcttgtagttcctgcacgatatccattggaattcagcaagatacgtgtgctgtttactttgtcaaagatcagtgatattaagctatttgcagctatattgtctggccgcctggaagcaacttctattgaaccacctgctttcatcgttacatcctcgaattccacggatgccactattgtggcggattcggatgttgaaatggagacagcaacttctaatcctactggtgctgccaacaagtctcaacatcacaccgagaatatctctgacgatgaaaaacaaaccacaaatataaccaacgaagttgcaaggaagggtaacgttattcacccaaaacacccagagagcgttgaagatttgaaaccgatggaggaggatgtgaaggtcatagagaaaacagcaacgtacaggtccacgggtagagacgaggatgctcgcattctaagcaaggcgccaaaggatgaaaaattagacaccagcagggatggggcttctgatgtcatatttagtcagaatctggtcgtcagaagaagcctcccccagtcagctcctgccgcaccagcagaaatcggaggcgttaacttcaagcgcttcaggaagagggaaatggtgtctggaaacagcttcaaggacctcattccgtttgcgcgggaaccatacaggcaagtgctcaaaaggcttccgtccaagaaaagagcagccgctggaagttcgattcacaccctactcaccggccacagatga

SEQ ID NO: 6522 - DNA, 129 bp, Zea mays
  Peptide Sequence Number=SeqID_48301
atggtcgactcgggcggggaaatccaccaaggacactggatttactcaccggagctaaccctccgccgcgggttcgctgcatgccatgggcagagccctccgcaccgcgccatctgttttactatttaa

SEQ ID NO: 6523 - DNA, 258 bp, Zea mays
  Peptide Sequence Number=SeqID_48302
atggtgctgcaatctgaaggacatggattagatgggtgccacacgctgcttttatatggatctaatgattgtggccttgaacactctcgccagacatgtctcgtgtttttacatggattagatgagtacatggatctttatttaatcctaaggatcctgctacaagcctacaagagcttacctcattatatctttgtgagattacagcaaaaatatccagcttttatatattttattgctacacagatgaaatggtag

SEQ ID NO: 6524 - DNA, 1452 bp, Zea mays
  Peptide Sequence Number=SeqID_48303
atgggcgagacaatctcgttcgcccctcggaaggccatcaagtcccaagtcttggcggactttgtggctgaatgggtcgacacccagctcccggcagttccgatccaaccggaactctggaccatgttttttgacgggtcgctgatgaaaacaggggcaggcgtgggcctgctcttcatctcgcccctcgggaagcacctccgctacgtgctgcgcctccatttcccggcgtccaacaacgtggctgagtacgaggctctggtcaacgggttgcgcatcgcaatcgagctaggggtccggcgcctcgacgctcgcggtgactcgcagcttgtcatcgaccaagtcatgaagaactcccactgtcgcgacccgaagatggaagcctactgcgacgagctcgaggcgccctcggctcagcccgaggcgccctcggctcagcccgaagcaccctcggcccccgagggtgaggcactgcgcgtcgagaaagagcggagcggggtcacgcctaatcgaaactgcgatgcatatccaccgccgaaggccaggagctcttacaagaaatacactcgggggcttgcggtcatcacgcaacgcctcgagcccttgttggaaacgccttctgacaaggtttctactggccgaccgcggtggccgacgccattagaattgtccgcacctgccaagggtgtcaattctacgcaaggcagacccacatgcccgctcaggttctacaaacaatacccatcacctggtcgtttgctgtgtggggtctggacctcgtcggtcccttgcagaaggcacccaggggctacacgcacctgctggtcgccatcgacaaattctccaagtggatcgaggtccgaccccctaaacagcatcaggtccgaacaggcggtggcgttcttcaccaacatcatccatcgctttggggtcccaaactccatcatcaccgacaacggcacccagttcaccggcagaaagttcctggacttttacgaggatcaccacatccgggtggactgggccgccgtggctcaccccatgacgaatgggcaagtagagcgtgccaacgatatgattctgcaaggactcaagccgaggatctacaacaacctcaacaagttcggcaagcgatggatgaaggagctcccctcggtggtctggagtctgaggacaacgccgagtcgagccacgggcttcacaccgttctttctagtctatggggccaaggtcatcttgcccacagacttagaatacggttccccgagggcgagggcctacgacgaccaaagcaatcaaacaaaccgagaagactcactagaccagctggaagaggctcgggacatagccttactacactcggcgcggtatcagcagtccctgcgacgctaccacgcccgaggggttcagtcccgagacctccaggtgggcgacttggtgcttcagctgtga

SEQ ID NO: 6525 - DNA, 240 bp, Zea mays
  Peptide Sequence Number=SeqID_48304
atggcgggagtcgggggagaaccgttcgtgttcaaccccatccccttccaattgagtttcaacaccaactccatcacccgaatgccgagagctcagcctctcggctctgagagcccaactcgagccatcagtcgtggccctctcgcttcaagagggaagcctcggtgcatcttgcacataccagaccaagggcaccaacggtgcatgatcgtctccgagataaccgccagccctaggtag

SEQ ID NO: 6526 - DNA, 1662 bp, Zea mays
  Peptide Sequence Number=SeqID_48305
atgaagacgggagccggcgcgggcctactcttcatctcgcccctcgggaaacacctacgctatgtgctacgcctccatttcccggcgtccaacaatgttgctgagtacgaggctctggtcaacgggttgtggatcgccatcgagctaggggtcaggcgcctcgacgcccgcggtgactcgcagctcgtcatcgaccaagtcatgaagaactcccactgccgcgacccgaagatggaggcctactgcgatgaggttcggcgcctggaagacaagttctacgggctcgagcttaaccacatcgctcggctctacaatgagactgcagacgagctggcaaaaatagcctcggggcgaacaacggttcccccggacgtcttctcccgggatctgcatcaaccccccgtcaagatcgacgacgcgcccgagcctgaggcgaccttggtccagcccgaggcaccctcagctcggcccgaggtgccctcggcctccgagggcgaggcactgcgcatcgaggaggagcggagcggggacacgcctgatcggaattggcagaccccgtacctacaatatctccgccaaggagagctacccctcgaccgagccgaggctcggcgggtagcgcgacgcgccaagtcgttcgtcttgctgggcgatgagaaggagctctaccaccgcttcccctcgggcatcctccagcgatgcatctccatcaccgaaggtcaggaactcctgcgagagatgcactcaggggcttgcggccatcacgcagcgcctctagcccttgtcgggaatgctttccggcaaggcttctactggccaacggcggtggctgacgccactagaattaaggcgcccgggggctacacgcacctgctggtcgccatcgacaaattctccaagtgggtcgaggtccgacctctgaacagcatcaggtccgagcaggcggtgacgttcttcaccaacatcatccatcgcttcggggtcccgaactccatcatcaccgacaacggtacccagttcaccggcagaaaattcttggacttctgcgaggatcaccacatccgggtggactgggccgccgtggctcatcccatgtcgaatgggcaagtagagcgtgccaacggcatgattctacaagggctcaagcctcggatttacaacgacctcaacaagttcggcaagcgatggatgaaggaactcccctcggtggtctggagcctgaggacaacgccgagccgagccacgggtttcacgccgttcttcctggtctacggggccgaggccatcttgcccactgacctggaatacggctccccgaggacgagggcctacagcgatcaaagcaaccaagctagccgagaagactcgctggaccagctggaagaggctcgggacaaggccttactacactcggcgcggtaccagcagtccctgcgacgctaccacgcccgaggggtccagccccgagacctccaggtgggcgacctggtgcttcggctgcggcaagacgcccgagggaggcacaagctcacgcccccctgggaggggccattcgtcatcgccaaagttctaaagcccggaacgtacaagctggccaacagtcaaggcgaggtctacggcaacgcttggaacatccaacagctacgtcgcttctacccttaa

SEQ ID NO: 6527 - DNA, 339 bp, Zea mays
  Peptide Sequence Number=SeqID_48306
atgcaggcggcatgcagccgcgccaagtggacgcgcttctccgactcccaacgcgcccagcctggaggcccaggcccacgcgtcatgcaaccggcgcgccggatgcttcatgcaagcaactgcaccgccacttgcgccaccacctcgcctcctcgattgtggaaccaataccgcgactcgagaggctcgggggatgctctcgcaaacccggcttcggccgaaccgttaacagcgtcaacataccagcccgagaacttgggccccgaccgtacacccgggctatggccagttcgcatgagggaacaaccagaccggccgaagcgttactcaaggcattaa

SEQ ID NO: 6528 - DNA, 870 bp, Zea mays
  Peptide Sequence Number=SeqID_48307
atgcccggcataccaagggatgtcgccgagcactcgctggatatccgggccggagcccgacccgtcaagcagcctctgcgccgattcgacgaggagaagcgcagagtgataggcgaggagatccacaagctaacggcagccgggttcatcaaagaggtattccatcccgaatggcttgccaaccctgtgcttgtgagaaagaaagggggaaatggcggattgacattccgatgtctcaaagcgaaaggcgtcaagctcaatcccgagaagtgtgtcttcggggtgccccggggcatgctcttggggttcatcgtctccgagcggggcatcgaagccaacccggagaagatcgcagccatcaccagcatggggcccatcaaggacttaaaaggcgtacagagggccgaggaagctctcgggaacctgaaggcgctcctcacaaaggcgcctatcttggtgcctccagctgacggagaagccctcttggtctacgttgccgcgaccactcaggtggttagcgccgcgattgtggtcgagaggcaagaaggggggcatgcattgctcgttcagaggccagtttacttcgtcagcgaggtactgtccgagaccaagatccgctacccacaagtccagaagctgctgtatgcagtgatcctgacgaggcggaagttgcgacactacttcgagtctcatccggtaactgtggtgtcatccttccccctgggggagatcatccagtgccaagaggcctcgggcaggattgcaaagtgggcggtggaaatcatgggcgagacaatctcgttcgcccctcggaaggccatcaagtcccaggtattggcggacttcgtagccgaatgggtcgacacctag

SEQ ID NO: 6529 - DNA, 363 bp, Zea mays
  Peptide Sequence Number=SeqID_48308
atgctcaagaagtttggaatgaaggatgtcaagcccgtcaagactcctatggaaacaaacagacatctctaccttgacataggaggggatctacctttgatcttgctgggtaatcagatgttgattatgacggatatttcttcgtttttggtgcataatgccaaaggggagaaattaataggcaaaagcagaaggaccgcaccactactattctttgtcttccaaattggtgttgttgcatttgcaaaaaccctcttgatagctaagatgagaaaaactacttatgctaaaggggagaacgttttcaagggagcttttatttggccaaaggaaaagcattttaaaaagagggagaatctttaa

SEQ ID NO: 6530 - DNA, 609 bp, Zea mays
  Peptide Sequence Number=SeqID_48309
atggggacctcgtccgaggatttgatcaaggcgaccgacggctcggaggttgatttggcgtccgcttcctctcgaccttctccctggcaacgtttgcccgggcatgggccagggtcattgacgagttcacgtttgccatcacgatcgccttggttgttttgggaggctagacggtctctgcaacaatgtgttcatgtccatctctctcgccagcatgtacgacaggtgcagttggttgatttatttaactgtttgcaaatttataagtgtcgtagattaacacatgtcgcttgttgcagattccctggtaatgttgttggcgtaaatatgcctgcgtcatcagctcctacggcaactactcttgctcctgaggacacagggaagatgaccaagatcgctgctactatcatgagtcttttgatcatgcatatagcaactaatctgccactaagcaaataccaggatcactatgtacctatcgttagtggtcaactgtactatgctgctacgatctttcagagagttggattctctagggcatttgatgtcactcatgtgtcaattcttcttattactgaagttgagaaggacatgcctcgtgcaggttga

SEQ ID NO: 6531 - DNA, 972 bp, Zea mays
  Peptide Sequence Number=SeqID_48310
atgatgagcaacttccaagccactacttgcaagcctcacagtaggatcattgtgaagaaacctatagcaagtcttggaagcacatgtcagtatccattatattcacatgctctcggattccacacgttgcaagagaaggtgtacccaaggctagttctcatttctgctagccacaaaaggcttacttctgtatgtgccttaagtggaaagggaagctctggcactgctgatgactgtggagcagcgttgcttgccaacttggtggagcgcagggctggcagccggtgggtggtggtgctcgtttgtgctgtatcgaagcttgtgcaggtcaatgtttacaagtcgggcgaccagctggtcgataatttagtaaaaagtactgcattacctgctggctgctacctagagcagatcagcatccaaacaaaatgcagcagcagcagcaccatcttcgtccagcctttgatggaatctttgaagaaagctgtggctgatgcaaaaaagccccgttccatacaagacttactgaaggagcaggtggctaaactgagagaacaagcgtctggtggaggcagagggaatgggaatcgccgtggaggcagtggtggttctggtggcccagatgatgaatcgttcaaggaaacattggatgaagtagtgcaagttatcttagccactgttgctttcatacttgtgtacatccacataatcagaggggaggagctttaccgtcttgccagggactacaccagatatctcgtcaccggtaagaggactgcccgactgaagcgtgccatgcaaaggtggcgcaacttctcggagagcttcatgcagaaggcaggctcagaagacgaccaatatgagagaccagctgtgtcaaaacctgcatggtggcaacagcctcagaaatttgtgcattttgtggaggacctttgcaggggaaactggcgtccccatgctcaggagtcttag

SEQ ID NO: 6532 - DNA, 528 bp, Zea mays
  Peptide Sequence Number=SeqID_48311
atggtgttttctgcccaggcattctgggattattcagaaaaaaaattggtagcgaaaacaaaggcagaatgttctgtcacaagtgaatggtcccctgatggtcgtcattttatgactgctacaacagctccgaggcttcaaatagacaattgtataaaaatatttgaccacaacggatctctgcagtttaagaagatgtttgaaaggctgtatcaggctgattggaaacctgaagcagctgaaagattcactgacattgctgacctgacaacatccttgatttcagcacaaggttccaagtcagcacaaacatcaagcaaggcccctgcaattacagcgccaaaacctacagcataccgcccacctcatgctaagggttctgcagaacttcaggacaagctctttggtggactagctcctgctgggggggagatgagcaaaaatgcattgcgaaacaagaagcgcagagagaaacagaaggaaaagaaagctgctgaagcgtcaggctctcctgctgatgaaagttga

SEQ ID NO: 6533 - DNA, 1770 bp, Zea mays
  Peptide Sequence Number=SeqID_48312
atggcggtggagaagacgctgctcggcgcgagtgcggggaggaccgtgctggtcacgggcggggcgggctacatcggtagcgccgggcgtcggggatcgcgagcgggactgggtagcgccgggcgggggctgcgccgtggatggcgagcgggactggggtggggggcgaaaatcctggcgttcatgggcgggcggggtagagaggcgggggcagtctacactcctctcttaatagttagtagagaagagatattaaacataagaaagaaggggaagaaaccccggagccaccagcagttgaagcagcgaaccagtgaccgcccgttctcacgtttgggaattgaggtcgacggccgccgctggggttgttgcactcgctcgcactgcacctacacgtacacgtacacgcacacgcacgctcaggcagtcaggctggctttccgtctgaactggcggtggggggatgcttcatgctcgtggcctagggcgcctggcgtgtccctttcgccgcgccgcgccgcgacagtacagcgcattgatggacagaggttgacacggagatgggcgccgccgcgaggctccgactgcggcgagaaacgctcatccgggcgcgatgcgttgcgttggggctgtgacttggcgtcttggttggacaggagccatgaaaaagcgaacgcctttttccgctgcgctgctgtgttcagtccgtcatcgcgcatttcagataaaatgctcgatgggctgacgtggagcgaatccaggaaggaacagagggctagtccgctagtatctgttgataaaagcctaaaaggtgtgcggttggagaccaacagctcagcgactgatacagtgggctttgcaagcggcggcgcgcgcagctctgccggctctgatttggctcttccggctgccgtgactagtgcagttcgtgctgtagatgctggaggccaaggtcagtgtcctcatttctcctgtggtgatcttggcaacatatccaaccctttccgtaggccaggtgacccagaagagtgcggtgtaaaagcatacgagctggtctgtagcaacggcaaggctacaatccgcatcaacacggggacattttgtcaccagcatcgactatatcaatcattccttctgggttgtggacgccaatttggatatgcacaacagctgccctcttcctcgctgggatccgttacttgcaatatgcatgtcggatacgggtccgtatacaagggcctactactcgcagcaggcaatatgtatgttgccgtcaagatgctgggcaactccaactgcaatgggggcgagttcattctccaccatcgcaattttgtcccaaaggtttctgactttggccttgccaagttgtaccctagagacaagagctttgtgccagcaagcgccatgcggggaactattgggtacatagctcctgaaatgatatctcgtagctttggtgccatatcaagcaaatctgatgtttatagttttgcggaacaagaagctggcgagatttctgttgcggcagacatgcatgagttggagaggaaactgtgcatcgctgggctacgctgcattcaaatgaagccgcaggatcgtccgaccatgggcgagatcatagagatgctcgagtgtggcactcatggcctgggcctgcaaatgccttctaggccattcttctgtgaagatgatgatcctaatatgcctgcagcagattcttaccatttctcatcggagcttactgcaatatctgaggaagatggttga

SEQ ID NO: 6534 - DNA, 786 bp, Zea mays
  Peptide Sequence Number=SeqID_48313
atgaagatccagtgcgacgcgtgcgagggcgcggctgccacggtggtgtgctgcgccgacgaggccgcgctgtgcgcgcgctgcgacgtcgagatccacgccgccaacaagctcgcgagcaagcaccagcgcctcccgctcgaggcgctctccgccaagctcccgcgctgcgacgtctgccaggagaaagcggcgttcatcttctgcgtggaggaccgggcgctcttctgccaggactgcgacgagcccatccacgtcccgggcacgctctccgggaaccaccagcgctacctggccaccggcatccgcgtcggcctcgcctcggcttccgcctgcagcgacgcctgcgacgcccacgactccgaccaccacgccccgcccaaggccaccatcgagccaccgcacgccgccgtctccgccgcggtgcagcagctgcacaaggagccgacgctcgggttcaaggagctggagtggttcgccgacatcgacctcttccacgagcaggcgcccaaagccagcaggacgttggcggatgtgccggagcttttcggataccaggcggcgaacgacgcggcgtactacaggccggccaaaccgccgtcggcggcgctggggttcgccagagcgaagaaaggcccggatcgaggacgacgtcagcagggactcgaccgctccaacagctgtccctccgccaggctccgccgcacctccgacagccacgacatcacgccagcagggtgcccagatctctccggctgccacattggcatgtacctagggcgctag

SEQ ID NO: 6535 - DNA, 480 bp, Zea mays
  Peptide Sequence Number=SeqID_48314
atggcggctctcggcccccttacggaagcaagaggacgtcagcaaggactcgacggccccgacagctgtccctccgccaggctccagcactcctccgacggccacgacatcacacataccaggaaggaccagggccctcttagagagggttggccgcgcggggacgaggacgagacgggcgctcgcgtgaggccactcgctccttcccccgtgtggacgcttgtaaccccctactgcaagcgcacccgacctgggcgcgggacgaacacgaaggccgtgggatttccacctctctcacgcccatctccggccacctcgctttccccccttcgcgctcggcctcgcctcgacccatctgggctggggcacgcagcgacacttcactcgtcggctcagggaccccctggtctcggaacgccgacagccgggctgggctgctacaaggccttacaggcgagcaacccagctgggaaatactaa

SEQ ID NO: 6536 - DNA, 99 bp, Zea mays
  Peptide Sequence Number=SeqID_48315
atgcgggtcagcgacgattggagtagcagcgcgatcgtggcattggaggccgatgacgagccagacacgtccgcgaggctattacaagctaaggagtaa

SEQ ID NO: 6537 - DNA, 465 bp, Zea mays
  Peptide Sequence Number=SeqID_48316
atgggtccatccaacacgatgttagcagattttatgattcgtatgcaaacatttacgcttctgttgtatacatgtgcagatgacctgtcccacgcccgctccctgctagtggacctccaaggcatcctaggcactctgaaccgctccaaccctaatctaatttgtactcgccgccgcctgagccaaggttgccatctccgccccctctactgtgctgtctccgtgcatcgcctgcagtcgcttgcatcgccgccgtctccgtctcctaccccgccatacagacccatgccttcttcctgcatccgtgggccatcgtcacgccatgaatgcgaaggtctcttcgccatcgagacctccgtcttcaagaaggaaaatgtctccctggctggccatgaggaggatatcaagaggaggaaagaggcgctgaagaatggtgcagatccacattcactacacgacggttga

SEQ ID NO: 6538 - DNA, 519 bp, Zea mays
  Peptide Sequence Number=SeqID_48317
atgccgagccaggcctcgaggctgatcggcgcctgtgccatggcctgcgaggacgcggccccggttgcccaacgtgggcgctgctacccagcagggcgtggcgggcacccagcccccatcgcgcaggcggggcctccggccataggtcgtcgtggcgcaggcttgcctctcctgcgaggacgtggccccggttgcccaacgtggtcgctcgtcactggcgcgtccggtcccagcagccccgtgggcacgcggccccagcaggggtcatctccaaggggtgtgtcccttagggatatgttcgtcgagccccttggattggtcacaaaatattgtaacacctactataggggattaccggattatggtttgatgtgttgcgtatgtgcatgtgccgatgtggccggtggtcttatcttgcgtggtggcctagtgggcaagtccggaactaggttggtcattggcgctagtgagtggtgggcagttggcactagtacaggaacaaccaaacatgatacctaa

SEQ ID NO: 6539 - DNA, 354 bp, Zea mays
  Peptide Sequence Number=SeqID_48318
atggtgaccgccggcggtggtgggcgcctgggtgggcgcgcggcgggcacgggctgtgcgaaggcgatggcggcggcggcgggcacgagcgttggtggcggcggcggattaagcaggcgacggcggcagcgcggcagcgacggcggcaacacggcagagaagagaaggagaggatgtggaaacgaaacggcgcgcggtgtctggttcgcgttaaaatatcttatatccgacggctatcagttcggccgtcgaacattcatcgaacatgaaccaggctcctcgtttggatctttcagttttagcagctcaactgctcgatctgcaccgcagcaaccacatccgctgtaccactga

SEQ ID NO: 6540 - DNA, 621 bp, Zea mays
  Peptide Sequence Number=SeqID_48319
atgacgcctgccgctgcgccactagctatacacctgctggggccgcgtgcccacggggctgctgggaccggacgcgccagtgacgagcgaccacgttgggcaaccggggccacgtcctcgcaggagaggcaagcctgcgccacgacgacctatggccggaggccccgcctgcgcgatgggggctgggtgcccgccacgccctgctgggtagcagcgcccacgttgggcaaccggggccgcgtcctcgcaggccatggcacaggcgccgatcagcctcgaggcctggctcggcatggccacccactggtctcgaggcatgggcgcggccggccttgtcgcgggcacagccccccaactccaacgctcggcgcggtcggacctcgaccgaccgacctcggctccggcgaaggccctgcgagcactggcgcgagccgcgcgggcgcggccggccccggcgtgggctccgctggcccccgggagacggcggtggctggagcgctcccctggctgtggctggcgggcggcgcgaggatgcggtgggccctggccgcggaggctcttggcgcgctcctcgaaggtatcttggcggcggctggggcactccctgctgggagacggtag

SEQ ID NO: 6541 - DNA, 369 bp, Zea mays
  Peptide Sequence Number=SeqID_48320
atgcggttggcagtgcagttgaaccccttgacggacgccggtgcggccgtggccatggtcgtgttctacgaccgcgccggggcggggaacgcgcacaagcagaggagcagcagcaacgcgttcagcctcagtgcatgcaacaagacaatgacgatcgcagagtctcagaggaaacacgatgggtggtgcctcgctaggttcctcccgctcagcccctgcagcatgagtggagggagacacgagggccagcttgtgcggcttgcatgcagcttctgcggcttgcatgcttgcatgcagtgggagggtaggcggcttgcatgcttgcatgttgcatgcagtgggagggtaggtgcatgcgacgtgcgataa

SEQ ID NO: 6542 - DNA, 246 bp, Zea mays
  Peptide Sequence Number=SeqID_48321
atgggggtggcgaggatgaaggcgactatgatgagtaggacaccggctggtttctgtatgcagctgctggcttatccacgctccagtgatgtgtggcagggcgacggacatgcgctcatgaacgggggaggcagggatctggtcgatgtgaggccacgtctggcgacctgggcaagcggacgcgcgaaggctggcggcgtcttcggccgtgtcgacctgcacaagcggacacgcgaaggcttctag

SEQ ID NO: 6543 - DNA, 249 bp, Zea mays
  Peptide Sequence Number=SeqID_48322
atgagccaaccatgtcgggggaagaacctccccagcgagaagctcaacgacaaaggaacagacgccaaaatattcggcgacatcacgaggctggggagtgggacccagcgcagcccgtatctcgggatgaagtgtcggaagtgggagaaactcctgacgagagagtattcagagaaaggaggaattctcgccgacatgaccaccagcaggctcaagaccaagattgagaacaagctgaacagggtgtaa

SEQ ID NO: 6544 - DNA, 273 bp, Zea mays
  Peptide Sequence Number=SeqID_48323
atgacctcgctgcacgagcggcttctccctgtgtgcttgccaaacgttctgcgcctggggacggacagtctgcgcgtgcacagagggtcttctctttcgcaggaacctaaatctcacctcccggcagggacccatcagggaggagagatccaagggttgtcttggggtcggcaggccacccaagacgtctctagacgacgccgggctgaagagagcatggtttttaaagcggtaaggcggtccaaggcgttggaccaccgcctggacgcctag

SEQ ID NO: 6545 - DNA, 828 bp, Zea mays
  Peptide Sequence Number=SeqID_48324
atggctgtcccggttgcccgcgtgcacctcgccatggaacacgcggctctcccgccgctgctcccggccccgcccaactgcaagatgctgccgctgctcccgacgccaccgtgcgtggccaccatcatcctcccaaagccgcacgccaatgagcccagccgcgccgactccgacgagaggtgggacgcgcacaagaccaggccggccagcgcagaatcgacagcctcgtcgcgccctcgttccttttcctgcggggccgccgccggacgcagatccacctaccgcatgaacgcgacgtcgccgcctaggcctggcctggcggctgactcggcagagagatgggacgcgcacaagaaggcggcggcgactccagcttcttcgtcgtcaggcacgtcttccctcaaaggcagcacgtgcacgatcagccgcagccgcgcgtcgtccatggaacgccgggacgcgcacaagaaggcggcgagtccatcttcctcgtcgacgacgacgtcgtcgtcatcatcaggcacgtctttcctcaaaggcagccccccgtgcacgatcagccgcagccgcgcgtcgtccacggaacgctgggacgcgcacaagaaggcggccagtccagcttcgtcgtcgtcatcatgcacgcccgcgctgctcgacgatgatggcgagcgcagcagtactggcagcaacgacaacatcgaaacggaggaggagatagtatggaaaccacgggccacggccatctacgctgaaccgtgcttcatctccaccgcgccggaacccagcatgcttcccatgccgacagctttcttgtttcgcgttgcatag

SEQ ID NO: 6546 - DNA, 339 bp, Zea mays
  Peptide Sequence Number=SeqID_48325
atgaagaatcttcataagcttttaaaggaagaacatgtgttaggactaactgatgtctgttttgagaaagatagaccttgtgcagcgtgccagacagggaaacatgtaggaaccactcatcaaagcaagaacatgatgacaacttcaagaccactggaactccttcatatagatctcttcgggcccgttgcttatcttagcatcgggggaagaactcaagcggacacccttgcaaatctttcaaataccgctgttgccatcaagcttaagtctgacggagcaaagttagaggccaaggatgccatggaagccttgatagccacgcctctatcacattaa

SEQ ID NO: 6547 - DNA, 762 bp, Zea mays
  Peptide Sequence Number=SeqID_48326
atggccatcatgcgcgccaaggccctggccgcaacgccgccgacgcagcagcagctcatggcgtcctcgtaccccttctcgctgtcgcccaagggaggcgtcagcctcagcttcctgatccagcagcaccagcagcagcagagcgagacccaaagaatgttgctgtttctgtatcagggcatggggcctctatcccacaattatcttctcagagcagcgcacctcagtaatcctattatggtggatatcagggtacaagcaaaaagattgaaaatccaaatggaaggaaagtgcatccagaagtgtgatgtttgtaatcttttaaactggcactattgtcaacttgctataagcaaagctgaacagttgatcaaagaagttctggcagaggccgatgctgggtcatccggtgctagatctggaggccggaaatacaatgcaacacaacaaggtgctgagacgtaccagatgaaaattgctaataacaaggtgggactgattattaggaagggtggtgagactataaagtccatgcagaccaaatctggagcccgtattcagtcttcaatcagtgatggtggtctttctcaggatgctaagcaatgcagaaacctgaagttcctccataccgaagggtgcttgtccatcactaaggcgtctctaagagcccttgtgcagtatgccaagagactcgagtctcttactctgggaagctaccctcaaattgagcaacatgccatcttttccttactgatgaactaa

SEQ ID NO: 6548 - DNA, 210 bp, Zea mays
  Peptide Sequence Number=SeqID_48327
atgggggcgggggttgttgagagcacggggagcagatcgtcggacgtgcgcggcgggattcgtaggggcgtgcgcggcgagcgtgcggaggacgggaggccgttgcgggtgcgggccttggagcgagggtttcgcggcggctgcggcgcgggcgtgcggaggacggctgggcggtgcgggaggcagttgcgcgtgcggaagaatgcttga

SEQ ID NO: 6549 - DNA, 846 bp, Zea mays
  Peptide Sequence Number=SeqID_48328
atggaagcctcttccccggcctgcgacgacgccggcacgaccatcgaggacctcccggcggacgtcctcgccctcgtgctccgccgcctcgacggcgcgtctctggcggcggtcggaccgcagcccctgcccgcgcgcctcgtgtcggccgtcgacctgcgccacgcggggggctgcgtcctgtcgtgcgtcgtggacacggatgccgcctccgactggttcctgggcgcgccgttccgcgtcgcgggggcctgcgtcctgtcgtgcgtcgtggacacggatgccgcctccgactggttcctgggcgcgccgttccgcgtcgacgtcgacgcgccgctgcatgagggcttcgcgtcgtcgccggccgccgtcgctccggtcgacctcgagctcagctgggtcctcgtcgacccggccacgggccgcgcgctcggcgccgccagccgccgcgccgtgtccgtcgaccgcaagtggctcacgtgggacaccgtggcgcgcttcgccgtcgtgatcggcggcggcgtcgcgctcgaagccgccgtcacctgcgacgtcggccagtacggccacgtccgggaggtcagcctgcgcgtcgaggacgccgacggcgctggcgtcagcggcagggacgggctggccgccgtcgccgccgccatggccgcgcccaggcgggggtgccgcggcgcggcggaggacgcggccagggccaggtacgaggacttcgtcagggggaggagggcgcgcaaggagtggaaggccaggcgcgagagcatcctcgacctctgctgctccggcgtcggggccgctgccttcctgggcttcctgctcatgctcacgttccggtga

SEQ ID NO: 6550 - DNA, 2736 bp, Zea mays
  Peptide Sequence Number=SeqID_48329
atggcagaagctgtggtgtttgctcttgcaaagataagcgtatccttggcagggtctgccatttccggtctgagggaacatgcttctataatcaaggaacttccagggaaggtgcggcgaatagaagcacaactgtcaataataaacggcgccctccagcagcaagattcagcctacctcagcgaccacgcctacatgaaatggatcgcctacatcaggaccttggcctaccaggttgaggatatcatggatacatactcacaccatgctcatcagctggagaacagagggttcatgtggaagctgacccaagaatacctcgggcctttcagaagcatctctgcagagatcaccaagatagaggagaatctcaagcatgccacagagctgaaacaagcatggctggaaaactacggccaccatggccaacagataatggaagctgagctttcccaggactacatccctgccgagcccagctgggaccaagattttgtcgggatggacggcaacacaacactggtgactgaatggctgcgctctgctagcgattcagaaagcacgttcatgacattgctgggcgcgggaggtctgggaaacaccaccctagccatggacgtgtacaagcgcgagaaggacaggttccgtgtccacagtttcatagctgtggagagggactgcaccatggatgccttgatgaggaagatactgttggagattgggagcagcatgaagcagccgccctcggaaagcgtcgacagtatccccgccaaccaactgaaggaagaagcgaggagaaggatcagcaagctcagagacggaaggtgcttgattgtcttggacaacgtccgggacccgagaatttactttgagatgcgtgatgtgatgagcaatctgccaggagttcgcatcatcttgacgacgaggaagacacaggtcgcagccgctcgtgatccctcgtcgtcacgtttcctgcaactccagccgttggaccacatcgacgcgctacgtctgttctgcaggaaggcctttttcaagacgaacgacagcaagtgccccccgaatgtcgaggttttcgctacttctttagtgaatatgtgcaagggcctgcccctagcgatcgtagctatgggaggcatgatgtcgttgaagccaccagtggagcagatatggaaccaggcatgcgttcgtctccagaaagagctggagaggaacgcggatcacgtgcaggccgtcctgaacctgagctaccatgacatgccgggacacctcaggaactgcttgctgtactgcagcatgttccccgaagactaccacatgtcacgggagagcctcgtgcggctgtggatcgcggaaggctccgtgctggcagccaacagcccgacgccggagaccaccgcggaggcatacttcatggagctggtccgccgcaacatgctgcaggtagtggacaacgacgtggttggcagggtgagtacctgcaagatgcacgacatcgtgcgcaagatggtcctcgtggttgccaaagaggagaggttcgcttctgccaccgattacagcacagtgtcgcacaccggtaaggacgttcgtcacctggcattgcatgggtggaaggacacgaacacaccaccagtcaagttccctcgtcttcgacgtctagtggcactcggagcgaactcatgcctgacgaaactgctacccgcgattttctctggatcgagcttcctcactgttctggtgctgcaagactccggcatctccgaagtgcccgcgtctatcgggagcttgttcaacctgcgctacatcagcttacggtacacccaggtcaaatccctcccggaatccgtccaaaggctcgcgtaccttgacacgctggacgtcaggcaaaccagagtacagaggctgccacagggtgtcggcaaggccaggaagctacgccacatcttggcagacgcttgttgtcccgatggcagccagcagtcagaatttcgaagcttcactgcgttggagcccccaaaagcgctgacgagttttggagagctgcaaaccctcgagactgtgcaggctaacaaggacatggcgatgaagctggcgaagatgatgcagctgagaagcgtatcgatcgacaacataagctctgccctttgcggggagctgtttgcttccgtctcagagctgcagttccttaccagcctgcttctctctgcaacagatgagcacgagccgctcagtttccagaacctcgtgccgaagtcaagctacctaagcaggctgactgtgagaggaagctggttggggaagacactggattacccggtttttaaggagcatgggcggaatctcgcgtatctgtcgcttagctggtgtctcgttttgggagatccactccagttccttgggtcacactgtccacatcttcagtacctgtgcctccatagggtgcagagcgcaaactccttggttcttccggagagatgctttcgggagctcaagaatctcgtcttggagcgcatgcctgatgtcagccagatgaaggttggagatggcgcccttcagtgcgtccaagctatccacatcacggcgctgcccaacctagataaggtacctcagggcatggaatcccttaccactctcaagaagctatctctgctcgatttgcataacgacttcatagttgactgggagaagaaggaaatgagccggaagatgcctcttggtctggagttgcgcatatag

SEQ ID NO: 6551 - DNA, 225 bp, Zea mays
  Peptide Sequence Number=SeqID_48330
atggcgcccatcgcagagacgcttaagggtgaactaagtaggacgttggaagaggtatctggccgttctctgcctctctactggaaagggcaggaaccattcaaatctgtacttgatgtgataaaggagttcaaatctttggtgctgaactttgccagtggcaagaagacccttatggagatccctactgagaactacctcattgtaacagtaaatattgcataa

SEQ ID NO: 6552 - DNA, 2664 bp, Zea mays
  Peptide Sequence Number=SeqID_48331
atggggcggctcggcggggcaacctcaccggggtggctggaaggcggtgggcgcttcggcgagggagagagaacgacgggagagataacgacgcgtggggagagaacggcgcagggagataggatgactgctctccagcttccaggtactggagagtgccagcgttatggttgcttttccttgctgatgcctgtcggctgggtcaggctgaggagggtgttccacactgagtctgttggtttcggcttggcaggagaagatgcagcaccgccggacagaaaatggtcaggcttgtgccagattgcaacagtggcagccattgacagtgcttcagttcctctgaagtttgacaacccttcagatgatgtcagcacagggatgatgatgaggggtatgaccgccaaaaacttcgatccagttcgctactctggtagatggtttgagggagtgtattcttttgatgagaaggcacgctcaatccaggtggatacattctgtgtccacggtggacctgatggatacatcaccggcattcggggcagggtgcaatgcctatctgaagaggacattgcaagtgctgagacagatcttgagaggcaggagatggtccgtgggaaatgctttctccggttccccacactgccattcatacccaaggaaccctatgatgtccttgcaacagactatgacaattatgcaattgtgtctggagctaaggatacaagctttattcagatatactcaagaacacccaaccccgggccagaattcattgacaagtacaagtcttatgttgccaacttcggctatgacccaagcaagatcaaggacactcctcaagactgcgagtacatgtcctcagaccagattgcgctgatgatgtcgatgcccgggatgaatgaggccttgacgaatcagttcccagacctcaagctaaaggcaccggtcgcacttaacccattcacaagcgtgtttgataccctgaagaagttgcttgaactgtacttcaaaacagggaacgccaaggctgctggcttcacgccttcgcatgttcatggcagcaatagaagaagggttgggaacttgtttgtgggcaacagaacgaatgagcaggtcgagaggaagctaacgatggcgattttatgtccggagaggcccgccgctcgccgtcaccaacaccacccgcagccggtgcttgaagccatcaccagtacgccggcccgagggagggagcacgtgcgctcgatcggccagctgaacggcgtgcccacggtcggctggtctcctactctcctggagctgggtcggcggcacacgcgcagccagagccgccctgggctccatcggtaccgtgggcctccgaacacgtggcccacaagcgaagaagcatgggcctctattctgaaggcgacatcagctggttcaacaaaactagtaaagatggcatcagaagggaacaaagacgtacctcatgaagctttgaccgtggatcactcatcgatttcgggttcaaagcgcaagcgtggccgcccaaggaaatatgagtatcctgtaaatgaactaccacagaaggtacagcccatccagagcgccccacctcttcttcactgcacacaagatggctcaagtctggccagccatgcatctggtggcggtgctcatggtaattggtccgctcaacctaggaattcagctaatgcttctcttcaaggtaattctggcaaagatgactttcttggcaagcattttgtgggcaagctgaccaagaaagttcctgggttttcgctcattacggtaaaagtgaaggacaatcaggtgctcaaaggttgggttccagatgaaattaatctccgcccaataacacctaaggatgaccttgccccagagctacccatgctgcgaccgagtcaagttcgaaagcgagcatcagcgatccatatgcaacctgctcttcctgtgccaatgcacttggagaatgttacacttgcaaagcctctgcagatgaggagacctgttgagaaaactattgctaagcatgctgtgcctcttgcttctaggccttacattagttctggtgttgttgcagcaatacctatatcggttgctcccatcaatcctgaaatgagaacttcggccaggcaggatgctgaacttgtgatcccacaatcatcagtttctgcagtgccaataaaatttgtttgtcctgcctcggtaccatgcaagcaactggctaatcaaaatgagtttactggaaataagtctgttgatgaggttcagaaagattcggaatctccaaatgtaaccaaggaatcaccagtgaaagctgaaaaaccaaacattgctcttgtggatgtagtggccaaggattctctaggggaagggcaacaacttaatgatcaagtaacggatgtagttagggatttttctggtcaaactcaaaatgttgatgtgacaatgtctgatgagatcaagatagcatcaggtgccagagataagccaaattctgcaaattgtgaacagcagagttctaaggaaccatcagacatcacagaacaatctgagcagctcaagacagagaccgatgtccagaaaggagttgatgcctcaggcttattgggatgtggagctggaattttagcatggaccaatgctttaggtgtatag

SEQ ID NO: 6553 - DNA, 243 bp, Zea mays
  Peptide Sequence Number=SeqID_48332
atggcgcctctcctcaccttccttcgcttgcaactaccccctgccagcgccacccatgaagctgagagagagaagagccgctgtttcggccgacccgtgtatgactgcgcgtggtgccgtcgctttcgcgccatcgagaggaggaggaagggcgcagtggacgagcaagtcattgaggatcctcgtgagcagcagatagaagtagctgagcaggagctcattgaaggcaagttgtgcccttga

SEQ ID NO: 6554 - DNA, 1026 bp, Zea mays
  Peptide Sequence Number=SeqID_48333
atgtccccgtcgctcctcctgcttcactcctctgcgactccttgtagggggcttctgcctccgccatccagctgcttcgccactttctcgcgcgcctcctcccccctgcggccgcgacaccgcatccgcctcgtgtgcgccgccgagcagcccaacggtgccgcctctcctggctctggctctggaggcgacgccacggcaaacccaaccaacaacggactgcccaagaacaggagggttattctcctcgaatacgtcaaaaatgtccagccagagtttatggagctcttcataaaaagagctccagcacaggttgtcgaggccatgcgccaaacagtgactaatatgatgggcactttaccaccacaatttttcgctgtaactgtctcaacggtcgctgaaaatctggctcagcttatgtacagtgtcctaatgactggatacatgtttaggaatgcacagtaccgtctggaactgcaacagagtttggagcagattgctcttcctgaaccaaaagaagaaaaggattacgctcctggaactcagaaaaaggtaaccggggaagttatccgttggaacaaggccactggacctgagaaaattgatgctgtaaaatatatagaattacttgaagcagaaatcgatgagctgagccgtcaagttgctaggaaaacatcacaaggaagtaatgagctgttggaatatctgaagagtctagagcctcagaatttgaaggctgacaaagggaagctgttgcaggaactcacgagtactgctggcgaggatgtcgtctttgccatgaatgcgttcataaagcgcctgttggcggtctctgactcagagcagatgaagacagcagtctcggaaacaagtgcaagtcagctggccaacttgctgttctggctgatgatcgttgggtacagcatgcgcaacattgaggtgcggttggacatggagcgagtgctgggtgctcccccaaaggtcgccgagctaccaccaccaccatctggaggagagaacatataa

SEQ ID NO: 6555 - DNA, 1812 bp, Zea mays
  Peptide Sequence Number=SeqID_48334
atggcggcgctcagcctccgccagaggcagcttgatctgattgtgcggatgctgcacctcaacaagccaccgccgccgcccggcacggctgcggagcaagaagaggaggtgtacaagatcctggtactggacagcttctgcctctcgctgctctcgccgctgctccgcgtcgccgacctccgcaagcacggggtcaccctctactttcccatcgacaagccccgccagcaggtcgccgacgcccccgccgtgtacttcctccgccccacgcaagccaatgccgaccgcgtcgctgcagatgccgccgcctcgctctacgcatccttccacctcaacttctcctccgccctcccgcgcccgctcctcgaccgcctggccgccgccaccgcagcctccggctctgcccaccgcgtcgcccgcctcgccgaccagtacctcgacttcgtctctctcgaggacaacctcttctccctcgcccacccgcgctcctacgtcgcgctcaacgaccccaaagcggccgacgccgacattgaggccctcgtcgacgcgatcgcgctcggcctcttctgcgcggcggccacgctcggcaccgtgcccgtcatcaggtgcccccgcggtggccccgccgagatggtcgccgccgcccttgacgcccgcctccggcatcacctcctcgccaagcctaacctcttcaccgaggcctcagcctcagcctccgttgcctccttccagcgccccgtgctctgcctcttcgacaggaatttggacctctctgtgggaatacagcacgattggagctaccgccccttggtccatgacgtcctcggcctcaagctcaacaagctcaagatgcccgcgggacaaatcgagtcgcagctcgccaagtacaagcaggatgtggacgaggtgaaccagcgcaccggtggcaacaaggatggcatcgagttcgatggcacagacctcattggcaacacccagcacctgatgaatgccgttaactcgctcccggagctcacagaacgcaagaagatgatcgacaagcacacgaatatcgcgacagcgttgcttgggcacatcaaggagagatcgctggatggatactgtgactgcgggaacgacatgctcacgaagggcaccgtggacaggagcacgctactgggccttctccgagggaagggcaccaaggcggacaagcttcgtctggctgtgacctacctcctctgtttcgagacgccagagctagagcaggtcgaggcggcgctgcgtgagtcagaagtggacatgtcagcgtttcagtatgtgaagaggatcaaatcgctgaacacgcagtttagtgcctcgtcgtcaagcagtgcaacgaggagcaacattgttgattgggcagagaagctgtatgggcagtccattagcgcagtgacagcaggggtgaagaatctcttgtccagtgggaggcagcttgcattgacgaggacggtcgaagctctcatggaagggaagccgaatccggaggtggacaactatctgctgtttgacccacgtgcccctagatcaggaagcggtgggcagttcaaagggccattcagagaagcaattgtgttcatgattggtggtgggaattacattgagtacaggagcttgatggagctggcagaatgctcgcagccgccttcttccaagcatgtcatatacggagcaactgagattgtcaacggggtggagttcatcgagcaacttgcagaactggggcagaaagcgggggctgggtctgggtggtggaaacaaccctccactacagtaattactaataaataa

SEQ ID NO: 6556 - DNA, 312 bp, Zea mays
  Peptide Sequence Number=SeqID_48335
atggacaaggcaagcgggatccgcatctcgatgggtgacgcagaagaggactcgtcgctgtcggaggcgatggatctggggctcagggcgcgcgagtggcccgactgtagctcgcggcgcgtgcacaactgcatcgatagtgccgcgctccaaaggaggaggacgcatctcgtcgggttgcgagctttcctcgtcggtgtgggtccagacgaaggttccaaagcgtatactgatatctcaaagcgtccgctacgactttaccacccaacttcgcagatgggcctctataatagatttcgtcctgctccctaa

SEQ ID NO: 6557 - DNA, 276 bp, Zea mays
  Peptide Sequence Number=SeqID_48336
atggcgcctctcctcaccttccttcgcttgcaactaccccctgccagcgccacccatgaagctgagagagagaagagccgccgtctcggccgacccgtgtatgactgcgcgtggtgccgtcgctttcgcgccatcgagaggaggaggaagggcgcagtgggtgcgagctggcgcgattgggtaaccagggagggctcgcggtcggaagccatcggctgtgcgctcggtgtcacgctagggaagaagaaggtggcctggccgttggatcactggtag

SEQ ID NO: 6558 - DNA, 414 bp, Zea mays
  Peptide Sequence Number=SeqID_48337
atggctcaccggagtttctcctgctcgcccgagaccttctcacctctgttctcccctctctgcccatggattcatggccttttcccctccattgagttcgccgtggagccctcttcccctctgccctactccggcgaccctggagccacccttgctcacgcttgcctcaactccggcgacctcaccgccgcggagaggagcggcgccgcctgcagccgtctgttttcctctggtctgatcccctccgtccgattcagatcgaatggctcggaccgcgggataccgcttcgctcacgcgcgtctgacacgccctggcccgcctgtcagcgccgcccacagccgctcatccttcccggaggtgatgctggcaacatggatgacttcgaggagttccaggaatatgacgacttctag

SEQ ID NO: 6559 - DNA, 198 bp, Zea mays
  Peptide Sequence Number=SeqID_48338
atggctgggaggagctggggcgagcggcacacagggaagagaagcagctgggcgaataggtaccttggagaggaccagcaagaacttgagaaaggccaaggtgttgaggaggagcagcaagggcggccacaacaagaaggagatcaagtccgactcggctgcgactccatctcaggtttcaagaccagtctgtactaa

SEQ ID NO: 6560 - DNA, 264 bp, Zea mays
  Peptide Sequence Number=SeqID_48339
atgtctcgcgcgttcgacgactactatatcaaggactgtggcgtcatcttggcgccagaggtgacgcagaggaggaccgacagcgccagcctaacggctgaacagcaagtcagcaaggccaggtccgcatcaaagcatcaagcaaacagcaaggcatcagccatcaaggctcaaggcattgcggaggtactgttgatattggaggcggacattgcggcgcggcggcggaccacgtaccggtcaccggtgctcgacgagagttag

SEQ ID NO: 6561 - DNA, 162 bp, Zea mays
  Peptide Sequence Number=SeqID_48340
atggggaggagttatggcggcaatgctcagtggaggggagggaagcgatggcacgctccactgagcattgaacgtggcgcgctccactataattcaccggactgtccggtgaaccagccgagcaacgtctccctgctcgccaacggtcacctgctgcggtga

SEQ ID NO: 6562 - DNA, 780 bp, Zea mays
  Peptide Sequence Number=SeqID_48341
atggacgctcccaaagtcggctctagcaccttcaagtccgctgaggatgcgaacgaggtcccagttgaccccaccgactccgccaaacgtgtccacattgaggtgaccctgtcggtattttgtgtccaaccacacacccaggggtaccctcgtggtgcttttggccgaccttctcctttgtcgtggtatattcattgcgtatatgttgcaggtctcaccgctccagaaaatcttagagaatccgggcggtacacccaatgggtgccatgttatgcgaagcggcgccaggcgccttactcatttctaggagtgagccatggctggagggaaaaaggcaagaaagggcaccacccagccgatgggaagcgcaagcgccccccaagtcctcccttagaggactttggggactcggagtactcggaggaagtctcctccgagtatgatcgctcccctgctccggcgtccccggtggtgtcgtctgatgattcagacgactccatggggctatccgccgcggagcgggtgtacatccagtttgtcgagtgtgtggggcttggcaggtcagatgactcggaggaggcagaggacacctcggactccaaggagggcagcacgacgagggcgatggcggcagtagcgatcgctgcgatggcagcagcagtggcggtgaaggcagcgacggcggcgagggcagcggcgacggtgactgcgacaaaggcagcagcaggggcggcggcggggatgacgcttgtggcagagtgctaccggcttaagtattag

SEQ ID NO: 6563 - DNA, 252 bp, Zea mays
  Peptide Sequence Number=SeqID_48342
atggcgcctgccccgcctggctcggcggcctcggcgcagtccgcagctcgggcgctcgccatggcctgctcgcggtcggcccccagctcgcccgtcctctcgtcctgtccccacggcccacgggcctggagctcggccggcgtgcctagtgcgcggccgtggcgaccccgcgcggcgtgccccagccccaggcgtggcccggcctctcccctcttcgcgcggtgcggcgcgacacgtccgactcggcccagc

SEQ ID NO: 6564 - DNA, 1479 bp, Zea mays
  Peptide Sequence Number=SeqID_48343
atggctccttcctccattgcttcgcttctcttcttgtgcatgctccttctgcttcctgctcagcatggcgcctcgtcctcccatgcaagctacaaggtagggtccagccaaacctttttcaagacaagaagcaagtcatctggcaactcaaagaaggcggcttccgcgacgcctactgcaaccacctgctcgtccatcgcaactggcctaggcaacaacaagctacctatagtgcaccggcagagcccatgctcgccgttgcacgggctgccgtccctaacggcggcagatgtcttgcgtcgtgacacctcccgcatccggcgccgcttcgcctcacaatcgtcgtccgtggtggcttctcttgcgtcggccctggccccggccccggcgccggcagccaccataatccccatagacggctcaccggacgcgggcgcactggactacaccgtgaacgtcggctatggcacgccggagcagcagttcccgatgttcctggacaccatcttcggcgtgtccctggtcttgtgcaagccgtgcgccccaggttccaccagctgtgacccggcgttcgacacatcgcagtccacgacgttcacccacgtcccctgcgactcgccggactgtccttcgacggccaactgctccgctggctccgtctgtccgttcaacctcttcttcgtcgagggcactttctctcaggacgtgctcacggtggcgccgtccgtggccgtccaagacttcaccttcgtctgcctggacgcaggcgcttctgatggtatgccagaggtcgggaccctcgacctcagccgcgaccggaactcgctaccgtcgcggctggctggttccgcttccgccgccttctcctactgcatgccacagtacccggactccccaggcttcctctccctcggcgacgacgccactgtcagaggagacaactgcaccgcgcacgcaccgctgctgagcagcgacgaccccgacctggcaaacatgtacttcatcgacgtcgtcgggatgagcctcggcgacgtggacctcccgatcccgtcgggcaccttcggcaacaacgccagcaccatcgtggaagcggggaccaccttcaccatgttggcaccggacgcgtacacgccgctgcgcgacgccttccggcaggcgatggcgcagtacaaccgctcagtgccggggttctacgacttcgacacgtgctacaacttcaccgggctgcaagagctcaccgtgccgctcgtcgaattcaagttcggcaatggcgacagcctgctcatcgatggggaccagatgttgtactacgacatccccagcgagggtccgttcaccgtgacttgccttgccttctctaccttggacgtcgacgacgatgatgtgtccgccgtgattggggcgtattcgctggcgaccacagaagtggtgtacgacgtggccggaggaacggttggcttcatcccagagagctgctga

SEQ ID NO: 6565 - DNA, 1530 bp, Zea mays
  Peptide Sequence Number=SeqID_48344
atggaggagaggccatcgtccgaggcaggcgcgggcaactcgagggccgaggacgacttcaggagctgctgcggggatgaggaagagtgggaggacacggaggagtcgttcacggccggcgtcaccaagggggagctggacgaggcctctgtgcgtctcttcttcaagggcgtgtcgagccctgaggcggaggggaagaagctgtctgggatcggagtcgtcatggagaggtcgcccggggtgcctgttcttaaggtgcagaagaagctggatttctatgtggaggagctcgtggctgatcacctcgccctcatggatgggctgcttgtcgcactgcagaatgggatcaggaagatcttcgcctttactaattcggagaagctctactttcagatagcagaagctgaaattcttgaagaccagcttttggtagctctaggacacaggattcttgaactggtggataagttggaagactttgatttgatattgcttcctagctttgaactagagaggcccttgcagttggctaaagaagctataggcatcagatatctgtctccctacgaggttggtacctgcccgatttgccgtgaggagaaactaggttctcagatgatcaaggcaggttgttctcacacatattgctataattgcctgactgggtatgttgaagagaagctgctgacctcgaagctgcctataaggtgtccacaattaaggtgtaaatacattatttccgctagtgagtgcaactcgttccttccagttagcagctatgattccctggagagagcatttgcagaagctggcacctcaggaatggaaagattttattgtccctttccaaactgttcagtgctgttagaccttagtcagcacttctctagggcaagttcatcaagccagtcagatctcagttgtgtcgagtgcccagaatgccatagagatatatgtatcaactgtggagtgccgtggcacatcatgatgggctgtgatgagtaccagagcttgcccgctgaggaaagagatgctggagacctatctttgcatcggcttgcacagaacaataggtggaggcgttgccagagatgtcgacgtatgattgaactgacacagggctgcttccatatgacttgctggtgtgggcacgagttctgctactcctgcggtgctgactacgctagcggcgttcaaacgtgccaatgcgtgttctgggacgacgaagccatggagccctcctccgccgcacggtccacccaagcagcgtccgagatctgggcgtgggacacatttgactgcatgccgaccgccgtggagggatactcggagcaggagagagcgcagctggcactcatccagaggttcctcgccggggggttcagcctgggtgagaacccctgccagtcgccgccccgctgcgccgactcctacatcgtcgacaccatgaaggacctccaccagctcccatggctcgagcggttcgtgtcggtgatcagcgacacgtacaacgatgactacatgcagtga

SEQ ID NO: 6566 - DNA, 354 bp, Zea mays
  Peptide Sequence Number=SeqID_48345
atggcgtgggcgaacttcggcgacggcggtggtggctcgaacggcgagaagagtgagaaggagaagggggagagctcggtgttacatcaactcggccatgattttcgccataaagccgtgtacccccattttgtcctcctcgccatcaaccgacgagagaagccaggaactagtcgtcgtgggagtaagggagcgtccagctgcgaagtgtgggctcggcagagggattacgatgtgcagaagcgggtccgccacgggggagattgggtcgtcgccgctggattctgtgctcgacgccgttcgggtgcggaagaatggagctgggtgttcaccgtatctcgctatgggtgttga

SEQ ID NO: 6567 - DNA, 189 bp, Zea mays
  Peptide Sequence Number=SeqID_48346
atgaccccgaccgcctgcgcacatagccagccctactctagccatcatcgctggcgatccacccctcgacgtgactgccagaagcccctggacctcactcgaccctccaccggacctctcccaccaccggttttggctaaggaaaaccccaggggccacggtgcaaagctgtttgtcttaaacctttag

SEQ ID NO: 6568 - DNA, 162 bp, Zea mays
  Peptide Sequence Number=SeqID_48347
atgcagcaaccattagatatggatatcaatgttgccctaaatatcctggagggtgttcccttggaaggtcctaaaaagagccacatctccagaagatctttgcaggggagaaagtcttcctcttctaccttctcgggggattctaatgttggcagctcgtaa

SEQ ID NO: 6569 - DNA, 456 bp, Zea mays
  Peptide Sequence Number=SeqID_48348
atgcagtcgtaccataatactccgctccgcgagaccttcctgggtgtttgtgcagtcaaagtgaactggtactgctacggcaaggcggtggcggagcaggcggcgtgggagacggcccggcggcggggcgtggacctggtggtggtgaaccccgtgctggtggtgggccccctgctgcaggcgacggtgaacgccagcatcgcgcacatcctcaagtacctggacggctcggcccgcaccttcgccaacgccgtgcaggcgtacgtggacgtgcgcgacgtggccgacgcgcacctccgcgtcttcgagagcccccgcgcgtccggccgccacctctgcgccgagcgcgtcctccaccgcgaggacgtcgtccgcatcctcgccaagctcttccccgagtaccccgtcccagccaggtctgatttcatagtactcattgcttgcttgcttgcttag

SEQ ID NO: 6570 - DNA, 171 bp, Zea mays
  Peptide Sequence Number=SeqID_48349
atgtcgatggatgaagaagctataggtaccccgtcgggctaccaccacgtgcttcgcaagaaggtgccggcgtacaagaatagctacgtcaccgtgccatcagcaactctgctctcttccagttccaaatggacgtccgaacaacctatatgtggtaggtgtttggtttga

SEQ ID NO: 6571 - DNA, 399 bp, Zea mays
  Peptide Sequence Number=SeqID_48350
atggccgacggcgatgccaagggcggcatgctggtacctaaacaaggcctaggacctctcctccccgacggggtccctcccgggagcgaggtccaggccctgtcggcgaactctgtcacccctgcgcatgcgtggaccgttcgacatgttagtcaggaacctgagccctgctccaggtcgcggaccgtccgcgcctccgtagagagcaccagtatccaggtcactggcggactatttggacgagggcaccggactgtctggtgccacacactggactgtccggtgcaccaggaaacagtagcccaatggctagttcctggtggcattgtggaggagtgcatcagattgttcggtgcaaaagctgatgaaagggaaatagagtcaaaccttttcctataa

SEQ ID NO: 6572 - DNA, 240 bp, Zea mays
  Peptide Sequence Number=SeqID_48351
atgcctcccagcccagatctagcgcatcgttgggtgtggcggctgtctcgtgagggagggggcgtgggaaatggggatctacacgggagggcaagggccgcggtgatccgacgggcaacgcgtggcggggtgctcgcgcaggttgatgggggctggggcacggtgccactgcttcagatcggcggcaatctcagggtgcggggctccttaagagcgaggaggattgctcaaggaggctaa

SEQ ID NO: 6573 - DNA, 567 bp, Zea mays
  Peptide Sequence Number=SeqID_48352
atgacgaccgaggcgacggagagcctgacgaagccgccgaggctgtcgaacgccttgcgtgagaaccctgcccattcatcgggaaaggagccaccgacgagcatccacacacaggctcgaacgtgggggatgcggtggggaagggggcaagggcgtcgtctccggtgggcgccatggatcccccaccgcggcgccatagatggggcacgactgcgagatgcggggatggggcgggctatgagatgcggggatggggaggacgagggtggaggcgtggatcccgcggcgtggctgcgagatgcgggaatggagtgggctgcgagatgcgaggatgggcgggagggcgagggcgagggcggaggcgtggatcccgcgacgccatggatggggcgcggctgcgacatgcgggcaggctgcgagatggggggcggaaagcgagggtggatgaccccgctggtgacggctgcgagatgcggggatgggttgggcgcggatcgaccgcgagatagcggcagggggaagggcggagccgcggtgaagcggtggacgccctccttaccgtcttaa

SEQ ID NO: 6574 - DNA, 714 bp, Zea mays
  Peptide Sequence Number=SeqID_48353
atgaccgtcgtcgacgccgtcgtctcctccaccgatgccggcgcccctgctgccgccgccaccgcggtaccggcggggaacgggcagaccgtgtgcgtgaccggcgcggccgggtacatcgcctcgtggttggtgaagctgctgctcgagaagggatacactgtgaagggcaccgtcaggaacccaggcatgcatgcctcctgcttgttgttatatataagcagtctactatgtcgacctgcgcgagcgtggcagcagatggagcgattaacgtgtttgtacatgttcatggcagcagatgacccgaagaacgcgcacctcaaggcgctggacggcgccgccgagcggctgatcctctgcaaggccgatctgctggactacgacgccatctgccgcgccgtgcagggctgccagggcgtcttccacaccgcctcccccgtcaccgacgacccggagcaaatggtggagccggcggtgcgcggcaccgagtacgtgatcaacgcggcggcggaggccggcacggtgcggcgggtggtgttcacgtcgtccatcggcgccgtgaccatggaccccaagcgcgggcccgacgtcgtggtcgacgagtcgtgctggagcgacctcgagttctgcgagaaaaccagggtgggtgtgcttgcttgctcacttttatttgatcgatcgtctccatccatccatcatctgatctactactaa

SEQ ID NO: 6575 - DNA, 282 bp, Zea mays
  Peptide Sequence Number=SeqID_48354
atggcggcattgcaagagcagcaggaggaggaccgcgacgagggcgagggcgggaaagacgacgacgaggagtcagaggatgatggggtaggatgcaaagctccaagcgcaaggagacggggggatggagcaaacggagaaagcggccgaccgcgtgctcccagccgtttccttcttcttccatgccgcgcgctccctcggcgcggggagagatcatcggtgggccgcttgtttgctcagcttcccttgccattcccacccaaccgcctcgacccgccctag

SEQ ID NO: 6576 - DNA, 876 bp, Zea mays
  Peptide Sequence Number=SeqID_48355
atggcgctggccgtcgtgcgcaagaacgcgacggcggcgctacttctcctcctgctgctgtcgtccacggtgtcggaggcgcgccacaagatttggcacggccccataatctacgcgtcgccgccgccgccgcctccttcacaccacagggacctgtatttgccctacatagccgagcagaagaccctggcggcgccatcgccggaagacgctactggcggcacgagtactgcagggtcgtccaacaagttcaggcacgccatcctcaggaacctgctcctacggctcagcaacaaggacggcgctgcgtcgccgtcgtggtccagtgccatgagcctgcgcgagaggagggacgccgtcaggcacgccgccgacgccgccctcgccgccgcacggggcgccgcgccgcgctggagccgggctttggcggcggagctctcgtcgcagtcgcagtcgcagcagcatggccggtggcactggcacgacgacgacgcgccccacctgcttgtcgccggcgccgatgcacggccttcgggccatcagacgtgcttgccgtgcgggacggcggcggcggtggcagcagccggctgcaggaagaccgtcccgaggcggcggaggctccgggtccgggccaggcccaagagcggagccactacggcctggtccgctggcgctgtcgcgcgggtcgtggcgaggcggcgggcgcgggccggggcgctgaggaggatggtgccgggagggcgagggatggcggacgagtgcacgctgcttggtgagaccctagactacgccgtgtcgctcagagctcaggtcgacgccatgcagctcctgttgaggacgctccagcctccaggccacgccaacaacaacccttaa

SEQ ID NO: 6577 - DNA, 219 bp, Zea mays
  Peptide Sequence Number=SeqID_48356
atggccgacgcaaggcgggatcccagagcccctttctcaagctcggagaagtccggaaacaccgttgagttcgccatcgaccgccgctactccccaacattcgcctcgttcgtcttgccgccagaattcatgtggaagagggtgaaccagaagtcaaagctcaggagtgtcctgatcaccgccctagttccttcgagaaaggcgagctccggcatctaa

SEQ ID NO: 6578 - DNA, 156 bp, Zea mays
  Peptide Sequence Number=SeqID_48357
atggccaacaggtcatcatctacgcaatggaacatttggaagaaacgttgcaagagagtgttccaacaacaagcaaaaacttatcaccatttagctttaagaattagagaggatgtactaaattatgaactggcgcttcaggaagtaggagagtag

SEQ ID NO: 6579 - DNA, 1635 bp, Zea mays
  Peptide Sequence Number=SeqID_48358
atggcctcggaccaacaggccctcccggtcccggtcccggtccccgtcccgcccaaccctaacccgaccgcaccagccgacctgaccccgccctcggcgtccgccgcgcgcaagctccccatcaagcggcgctccccgcggccgtcgtcctcgcccccgtcctcttcttccccggcctcctccgacccgctccgcgcgcccggcggcggcggcggatccgaccagcagcagccgcccttcaagttccagcgcatctggtccgagtccgacgagctccgcttcctgcagggcctcctcggctgcggcacgcagggcctcgtcttcccgcgcgacctcaacgtcttctacgaccgcttctccgagtccatgccccagccctacacccgcgcccagctctcggagaagctccgccgcctcaagaacaagttccgcagcatgtccgcgcgcgtcgcgggaggcatagacccggcccgcctcgcgccgcacgaccgcgacgtgctccacctctgctccaggctgtgggaccccgccaacgccgccacctcgcccttcgcggccagcgccggaacgtcggggaacaagcgccgccgctccaacccgcgtggcacgcccccagacgcgtctggggatagcaactcccatgactacaatgggattagctcctctgctcccggtttgtttccggatggttccaacggcgaggatacgttttaccttgagcaagaaagcgggcagctgggcaatcatgaaggcgctgctcttgtagcagatagcaaattcgatgttgtggtgcaggagcagcctgaggccgtggttactctcccgaatgggaacaacggaattggcagtgagatgagtgcggagtgtaaaacggtggtgccgtgcagcaacgagcaccgaatggcaaatgctgtcctagatgtgtttgaggaatgcctgagggaggcaaagagtaacgggattatcaatggtggcaatgtggagagcgagctctccaagcggtggagagcacagaggatggatgagcttgatgtcttgagccggaggctgaggttgctcgtcgaagggccagagtgcatccacgcttccatcccaacacgcccacccgcagcacccgcattccctccgggctcaacagagctctaccagaggacgatggagctgcttgggctagcagataggagtggtgggatagcacacttccttctctcccggtggcagcatgtgggagcaagctccaaggaggtgacagtttcctcttcacgatgctaccagggctggtctcctccttgcaggctatacaaggttttgggtgtgtgggctctagtgtcaccacggccttggccctcagaatccatggagaagcaggagcagactgaggctgtggttgctctcctcaattggaacaatggaattggcaatgagataaatcataaatgtggactgcaaaatggtggtaccatgcagcagtggcatcaaatggcaaatgatgtgctggatgcctggacgtgtttgaggagtgagtgcctccgtaagaggatggatgatcttgacgtgaccggaggctgtggttgctcatcgaggatggatggtcttgatgtcttaagccggatgctgaggttgcttgtcttctag

SEQ ID NO: 6580 - DNA, 246 bp, Zea mays
  Peptide Sequence Number=SeqID_48359
atggtggtggttacctataagattgaagatgaactagagattcgatcgacgaaccagaagcgcggtgacgaagctctcatcgagccagtcacggtgatgttctgggttgccctggaagatgaacggacagagagaaattcctcgccggagttgtcgctagagttggggaggaactcaaacttcaatgagcaggccgtgacgacttatggctgcgagcttagctggcggcgggctattatggcttga

SEQ ID NO: 6581 - DNA, 948 bp, Zea mays
  Peptide Sequence Number=SeqID_48360
atggtgtggttccaatgcgaggactgtggcgagaacctcaagaagcccaaacttgccggccacttccgctcctgctccgcgtacaagctgtcatgcatcgattgcggcgagttattcagccacgacaccgtgcaggggcacacccagtgcatctccgaggccgagaagtacggtcctaagggacagaccaaaccatccaatggtgcacagggtaaggcagataagccaaagccaaatgcagatgtcgatatcaatgttgggctgtcgacacggcctccttggttctgtaggagcttgtttagatatttaggaactgtgtacttatcatggtttttaaagcgcctatgcaagaccactaccacaagtaagcaaactctcttactacatgctgatgggaagaagcatagggcaaaggcgaaagccttccatgtgtctcagaaacaaaaagatggtgcagaacaaactccagatgtgaaggaagctggagttgtacccacaaaagaatctgctcaagtaaatggtggcgtgagtggtgatcatgaaagaaatgaagataaagatgctgggaaaaggaaacgaatggatgacatgaccatagagccaggtaacacaaaaagacagttgacacagtctggagatgagaagtcagaaaacaaagcgaagagtaaggccgatgaactagcaagtggtaccgactgcaaaagtgttcaaaagcaaaagatcaaatggaagaagattattactaaaacattgaaggcgaacgcagatggagttatgaagctaaagaagctacaaaagctagtctccaaggagcttcaggaatgtggtgtctccaaagacaaggaggagctccgtgctaccttgatggataaaatagcttcaagttccagattttatgttgatggcaagaatgttagactggtggccaagaatgaagaagaatcttag

SEQ ID NO: 6582 - DNA, 2262 bp, Zea mays
  Peptide Sequence Number=SeqID_48361
atggacgcccaggtgacgaatccttctgccgccacggaccatgcagcgccgaccaccagcgttagcgcgcccgcgcactacgcctacgccaacgacaatgcgtgccccggcgggccgaaggtctgggtcctcgtgctcctcttcgcgctgctcctgctgcccttcctgccctccgcgatgcggcgcggcggcggcatgcactgggcaggaggagaaggagggtaccgccgcggcgggatcaccttcaagagcggctgggacgtcgtcaacctctgcctcgtgctcttcgccatcctctgcggtctccttggccgcagaggcggcggcggcagcggcgacggggagtcctcttccgccgcgacttccacgccggccaaggacggtcatcgagaggtggcctcggcgcccgccacggcggcggcgactacgacctcggcggatttggaggaggaggaggaggagggctacgactccatgtccgccatctacgccaccctgccccgcaccaaccaccacgcccacgcctcgggggggatccgccggatgaagagcagcagctcgctgcgcctcggcagcgacggcgtctgggcccccgaggccacctgccgcttctacgacgacgccgagctgtaccgggcccgtcgcccggagcggacctgggacgtcgaccttcacgggaggacggcgacgacggaggtcaagaccatccccgtcgacaccttcgtcgagcgcggccgggcctcgcagcctcgggagccgcggaggcggaggaggagcgtccagaggctcgacgaggtggacgaggagaggccgccgcggggggaggcgctggcgccggcgaggctcaggaggtggaactcagaggtggttgatgtgatgccggaacacggggcgccgccggcgacgagcaggatgtgggactcgaaggtggtggacgtcatgccggagcaggatgcagcgaggctcaggaggtggaattcagaatcgttggatatggtattggagcaggaggcgcaggtggctccggcgaggaacaggaggtggacctcggaggcggtggacgtgataacggagcggcaggcagcggtggcgcctgcaaggatcatcaggtggaactcagtggatgtaataccggagcaggaagcgccggtggctccgtcgaggagcaggaggtggagctcggtggcggtggacatggtccccgagcataaagtgccggtggtgatggtgcctgctgctccaccacctccatctccgcctccaccgccggcgcttcctcgacgacgacggcacagcgtcgagaaactgccgagaccacaggaactggagcaagagatagtagtagtggaagaggtgaggaatctattgccgccgccatcgccgtccatgttcgcgcctggaacgccaccccctccgcctcctcttccgcttccgcctcgttcgacggtgtcgcgcagcaagaagaagcgcagcggcagcgtgggtggcgccaaagatctagcatccgccatcgctacgttctaccagaagaagcgcaagagcattaccatgaaggccaagaggaggccccatcagcaccaccattccgatggccactactcgtcgccgtcgtcagatgcgtcagcgagcccggactccactgttcgcaccaccaacgccccgcctccgcctccgccacctccccggccaccgccgtcctcaatcttctccaacctcttcaagaacaagaagggcggcaataagagccgccgcatccactccgtcgcgccaccgcagccgccacccccgcctccacccactcgccgaactaagaaaccaccaccgcctgcgtctcgtcttgcgcctccagcaccagcagtcaggacacggcagccgcgcgcccccgtgcacgcgcccacacatcagccgccattgtactacacatactacccgctcccgccgctacctccgcctccgccgcctccgctggtgtcagagggcgaggatgactcaccttcaatcacagcgtcgccggcgcctgcgtactgcgcgagccccgacgtgaacacgaaagcggacaggttcatcgagagcttccgcgaggggctgaagctggagaagctcaactcgtaccgggagaagtggcagaggcagatccaagagaacgccgccgccgtcgatatcgaggaggagggggagttcatggtgatcgggtcgctctttggcgacgacgacatctcgttgccgcagacgccggcgaccgctgttgccgtcggcttctaa

SEQ ID NO: 6583 - DNA, 1419 bp, Zea mays
  Peptide Sequence Number=SeqID_48362
atgagtgaaacttttgccgccaagaaggcgctttctgaagccgagctgaggaacgagaagctggccaggctgcttggagttgaggaagttaagaacaaacggcttcaagacaccctgaaaaggatggaggagaaggcttctagtctggacgaggaaaacagaatgctgcgacaggctgtggcgtcaaaccctgctattgtcaggtcgccatcgggcgaaaaccatgaagcacctggaattcaggcagctcctgataatgagaaatcaaggaatggtacagtgaagcctatagcagtggatcgggaggctaatgtccatgagaagggcgctgaacagcccagctcaaatggtcaagaagctgggaagcaacagcaagagcttctgatcaagtgcctatccgaagacctgggtttctcggtcggcaggcctatcgctgcatacctcatctacaggtgtctggtgcattggagatcatttgaagaagagaggagcgtggtctttgaccggattatccagaagattactgctgcgcttgaggcgcgagacaacaacgatgcactagcatactggctgtccaattcatgcgcgctcctggttcttcttcaaaggacactgaaaatcaacggggtagctgccttggctcgtcagaggcgaagaacgtcgtcacctctcaaggtgccacaggaaaaccaagatccagctcccgacggacagttgatctgtggactagcccaagtctaccaggttgaggccaagtacccagctatcgcgttcaagcagcagctcaccgcactgctggagaaggtctatgggatgatccggcacaacctgaagaaggaactgtcgccgcttctgggcctctgcattcaggtgcctccgttcctgatctgcaagatgttcacgcaagtcttctcgtttatcaatgtgcagctttttaacagtaacggagagtacgtgaaggctgggctggatgagctagagcattggtgcttttggctgactgaagagtacgcaggatctgcatgggacgagctgaagcatatcaggcaggcagttaccctcttgatacttgacgacaagcatagccggagtctcgcggagatcacagacgacttctgcccagtgctgagcatgcagcaactgtaccggatcagcacgatgtactgcgacgacaagtttgggaccctgggcattccatcagaagtcgtctccagcatgcggaccaagatgatcgagggctcgtcgagcagcccgtcggcgcacgacgacatcaactcgttcctgctagacgatgacttcagcataccgttctccgtggatgacttcacgaagctgatagtgcacgtcgacgtagcggacatggatttgccaccgctcattcaggagagcagcggcggcggctccaaaatgggacattga

SEQ ID NO: 6584 - DNA, 2883 bp, Zea mays
  Peptide Sequence Number=SeqID_48363
atggcgtcctccgccgccaccaccaccaccaccctcctccgtctgctttgcctctgcaccgtcctgctagtcgccatgcaggcggcggcggctcgcccgcccaacgtcaccatcggctccctcttcgcctttgactccgtcatcggaaggtccgccaggtccgccatccagctcgccgtcgacgacgtcaaccgcgaccccaccgtgctcaacggcaccaccctcaccgtcgtcttccaggacacaaagtgcagcggattcgcaggcacaatccaagcaggcctggagctgatggagaaggaggtggtggccgtggtgggcccgcagtcctcggtcatcgcgcacgtcgtctcccacgtcgccaaccagctgcgcgtgccgctgctgtccttcgccgccaccgacccggcgctcgcctccacgcagtacccctacttcgtgcgcaccgtgcacgacgaccgcttccagatggccgccatcgctgacgtcgtctcgcacttcggatggagggaggtcaccgccgtctacgtcgacgacgactacggccgcggcggcgtcatcgcgctcgccgacgcgctggaggccacgcgtgccagggtgtcctacagggccgccttcccgctgggcgccgaccgcgccacgctcgccgacatcctccagcgcgccaacttcatggagtcgcgcgtcttcatcgtccacgctagcccggactcgggcctcaacgtcttcgccgccgcgcgggggctcggcatgatggtctcggggtacacctggatcgcgaccgactggctcgccaccgccgccatcgatgctgctggcgccgcctccaactccagcaacatacagggcgtcctcacgctgcgacagtacaccccggactctgacgccaaggcgtcgctcctctccaggctcgccgccgctgatccaaccagcaacaatgccaccgccagcgtcaacacgtacggcctcttcgcctacgactccgtatggatggcggcgtacgccatcgatcagttcctcggcgacgccggtggcggcaacgtctccttctccgccgaccccaccatccgcgatgccaacggcagcgcgctgggtctcagcgcgctcagggtgttcgaccagggcgagcagctactcgggaaggtcatgctctccaacttcaccggcgtcacgggccacgtggagttccagttcgacgccggtgtgaatagcagcggaaccctcgtcaaccctgcctatgagatcctcaacgtcggtggcacgggcgtccgccgtgtcgcctactggtccaactacacgcgcctgtcggtggacgcacccaagcagctcggcgacggcgtgcctccgcccaacagcaccagcacgacggcccaacagcagatgtccaacgtcatctggcccggtggcacgacggccacgccgcgcgggtgggtgttcgccgacaacggcaagccgctgacgatcggcgtgccctaccggacgtcgtacaaggagtttgtgtccaaggacgagacaagccccgacggcgtgagcggctactgcgtggacgtgttcaaggcggcggtggccctgctcccgtacccggtgccggtgtcgttcgtcctgttcggcgacggcgtcgagaaccccagctacaacgagctggtgcagaaggtggcggacggctacttcgacgcggcggtgggcgacatctcgatcgtcacgaaccgaacgcgggtggtggacttcacgcagccgtacatcgactccgggctcatgatcgtgtccacggtgaagtccagcagctccgacgagtgggccttcctcaagcccttcacaccggagctttgggccactgttgtcgccttctgcatcttcgtcggcgccgtggtgtggatcctggagcaccggcacaacgacgagtttcgcgggccgctgaagaagcagatggtcaccatcttctggttcagcttttcctccatgttcttcacgcagagagaggacaccgtcagtgttcctggtcgcttcgtcgtcatcatgtggctcttcgtggtgctcatcatcacccagagctacacagccagcctgacgtccatcctgacagtgcagcagctgtcgacgggaatccagggcctgagcgacctcctcgcctccaacgaccccatcggttaccaggtcggctccttcgctgggagctacatgaacaaggagctgggcgtcgcggcgacacgcctccgggagctggaccccgacgactacgccgacagcctgcagcgcgggcccagaggcggcggcgtggcggccatcgtcgacgagctgccctacatggagctcttcctctccagcaactgccagttccagacggtgggccaggagttcaccaagagcggatggggattcgcgttcccgcttgactccccgctggcggtggacctgtccacggccatcctgacgctgtcggagaacggcgacctgcagcggatccacgacaattggctcaacacggggacgtgcgactcgcagaacaacggcgtgggcggcgccgaaaggctcagcctgcgcaactttggggggctcttccttatctgcggcgtcgcctgcgtcatcgccctgctcatccacttcgtcaggatacttttccagttctgccagtaccgcagacacggggccgccgacggcgcccaagaagaggacgagaacgacggcgacgacgacagggacggcgacagcgacaaggagaagagccagcgccggcccgccaggcagaccagcatccgggacctcatgtccttcgtggacatggaggaggccgaggtcaagagggccatccggagcaggtctggcaagtccatgggccggtcccggagcgacacgtctgatgcaccgtcctcgtcgccggtgtaa

SEQ ID NO: 6585 - DNA, 498 bp, Zea mays
  Peptide Sequence Number=SeqID_48364
atggccagcgactcgtccacacccatgctcgaatcatgcccattcgagaccagatcaacggttgagggtacaggaagaggaggacatcgcgaagttgatagggcatactcaccaaggaacacgacgaatgttcagcgaccacggcgaaggatggatctgtggtggcgatggaacgacgacgtgaaattcgtcggatcccaatgcacaacagctcccgcccaggccacgaacacgaaccccgggtgctgcgcagggcctccaaccgtgagccgatgtccaaccacggcgcccagaggtcctcgacggcgggcgcacttcttgcctccgctgcacgcgctatatctctcacggtggggttcggtcatggggagtggaacagagaggagagggaggcagatagagaagagggcgcaggggtgcccaagttttattccccagctccaagaacgatcagcgccgaattttccggttatgcgcggaggttgcggcggtagttga

SEQ ID NO: 6586 - DNA, 549 bp, Zea mays
  Peptide Sequence Number=SeqID_48365
atgcccaatcgcagatctaatcctaacccttggtcagagatggacggctctggttctttcttcttcctcccgcggatacaggcagcgacggcgccctggccggcgtgcacggtcccgggtacaggaagaggaggacatcgcgaagtcgatagggcatactcaccaaggaacacgacgaatgttcagcgaccacggcgaaggatggatctgtggtggcgatggaacgacgacgtgaaattcgtcggatcccaatgcacaacagctcccacccaggccacgaacacgaaccccgggtgctgtgcagggcctccaaccgtgagccgatgtccaaccacggcgcctagaggtcctcgacggcgggcacacttcttgcctccggtgcacgcgttatatctctcatggtggggttcggtcatggggagtggaacggagaggagagggaggcagatagagaagagggcacaggggtgcccaagttttattccccagctccaagaacgatcagcgtcgatttttccggttatgcgcggaggttgcggcggtagttga

SEQ ID NO: 6587 - DNA, 1128 bp, Zea mays
  Peptide Sequence Number=SeqID_48366
atggccaaagacaaaaggaccttgatctggtcttcgtcgatgcaacaatcctcggccgcctcgatggcaatggaggaagacgacgactacgagccgccgttgatggccacgtacaagcatctgttggacagtcacccgcaccgacaactgggcgccggcgccgcgcaagacgacgaggattgcttcctcctcccggtgatcgacctttccagcctcctgccgccggtgcatcatcgcaagcagtcatcatcagcagcagctgcagagcagtgccgggcgtccatcgtgcgcgccgcctccgagtggggcttcttccaggtgaccaaccacggcgtgccgcaggttctgctggacgagctgcaccaggcgcaggccggcgtcttccgccggcccttccaactcaaggcgcaccagccgctgctggacttctcgccggagagctaccgctggggcacgcccaccgccacgtgcctggagcagctctcgtggtccgaggcctaccacatccccacaacgacgaccacgaccggtaacgacgacaagacccggctagtggtcgaggaggtgtcgacggcgatgtcgaagctggcgcagcggctggcggggatcctcgtcgcggagctgggcgaagacagcgcggcggcggtggtgtcgcggtgcacgcggagcacctgcttcctgcggctgaaccggtacccgccgtgcgcggcggcggccagcggcgtcgtctacgggctgtgcccacactcggacagcgacttcctgaccatactccaccaggacggcgtcggcggcctccagctcgtcaaggacgggcagtgggtagccgtgaagcccagccccggcgcgctcatcgtcaatgtgggcgacctcctgcaggcgtggagcaacgaccggtaccggagcgtcgagcaccgggtgatggccagcgccacgagggagcggttctccgccgccttcttcctgtgccccagctacgacacgctcatccggccgcgctgcggcgccggcggacctcctcctcgctatgagagcttcaccttcggggagtaccggaaccagatcagggaggacgtcaggctcacgggccgaaagctcggcctgcaacgcttccgcaaagcagagtag

SEQ ID NO: 6588 - DNA, 1026 bp, Zea mays
  Peptide Sequence Number=SeqID_48367
atggcgggcgcggccctggtggttggcagtgtgaggcggggatggggtgacgcgaagcggacccggttgcgcctaatggcggcagggtccagtggaattgggatggacccgatgaagctgacaagatgtggtcttttgagatgggttaagaaattagtgaacgaattgcctagctggaaggcttctctcaatcttgctggaaggactgctatggtgcgttttgttttgtcggctatcccagtttatcttttgattgctatgaatgtgcctaagtgggtcattaaggcttttgataaggtcaggagagccttcctgtggaaaggaaggaaggaggttgttggcggtgatccacttctagagctacttgcggtcgattggttcaaagttaatgaacgctttgattcagttgccttacatcccaaaagccttgtgcaatcagaagctgcaaagaaacttcctttcatattggttataaatttgcaggtgccagcgaaaccaaattataacttggttatgtactacgctgcagagagaccagtgaacaaagattctttgttgggtagattcattgatggaactgatgcataccgagatgccagatttaaacttataccaagcattgttgagggttattggatggttaagcgtgctgtaggaacaaaagcttgccttctgggcaaagcagtaacgtgcaattatcttcgccaggataactttctggagatagatgttgacatcggttcatcatccgttgcccggagcattattggtctagtattgggatatgtcacaagcatagttgttgatcttgctattcttattgagcaaggaaatgacctttatattgcgctgcatttcactagcatgaagcgtgttaacagttgtatcctttcccttgaactcgcggagcacgtttttgtaacagctttatctgtgcaggccaaggaagagaaagagctccccgagtacattctgggcactgttcgtctgaaccgtgtgaatcccgacagtgctgtatcaatctaa

SEQ ID NO: 6589 - DNA, 1635 bp, Zea mays
  Peptide Sequence Number=SeqID_48368
atggcattgtcgtctggaagctctggttctcctacgtcgtccctgcacgtccccgttgaccttgcctccatcctcgtcacgatcgtgatcatgctggagttcctcgtggcggcgacgcacggtggctacggtgacctcgagtgcatcgacacggttggtgaggccgcagatgatgagaggggtgggggtgaagcgaagaaggggtcaagcgccaacgaggcgggtgggggaggggagggggagggaggaggatgtcgtgtaggtcgaggaaccgggaggtggcgtgtaacaagaatgagtagtcagagacaccgtcaagaaggaatgggcaggttgcaaaatggcgaaattatattggggctggggcacggcgggctgcgtccgaagcgccacgccagcaccgcggcgccctcgcttgcgatgcccagcccgatcgccgcttgcttccgctgcgccgcggcgccttcgtcgggcgccggcgcggcggggcccagcctgacgacctccgtctacgagacccacctcggcctcgtcgcgctctcctggtcccgcacctcgctcggcctctccctccgcgccgtactccgcctgtcgcccccgccatcgcccggcttctcttcggcgtcgggagcgggctacctcgacgacgacgcggacgaggagactctcgccttccgcgtccgcccatggctcctctggcgctggcgcggctccaagcggttccgcgctgacgaccgcatcgtcgacttggcgtgggacctctcgcgcgcgcgcttcccgggctccgggtcccccgagccgtcgtccggcttcttcgtcgccgtcatcatcgacggcgagatggtcctcgcggtcggggacctttccgatgctgcctaccggaggacccgggcccggcgcccatccgggccccgcccagtcctcctctcccggagggagcacgtttcgctacgcgacgcgggcgccggccgaggccgcagccacaccacctgcgtgaccgtccagggtaaggaacgggagatctccgtggatctcgtggcccgcggccttggcacggacagggtcgccgccggcagggagaaggcgaaggaccgggctgacgtaggcatgtcggtctctgtcgacggcgagcgagtgctccacgtccggcgcctgcgctggaagttccgcggcagcgagcgtgtcgaccttgggggcggcaacggcgtccaggtctcctgggacctccacaactggctcttccgtccgcgcgagccaggtcccgcggaggcatcgacgcacgcccacgcccacgcggtgttcgttttccgcttcgatgtctccagcggcggcgaggatttgggtaaggatccctgcccggacaatgccacagggaggaacacggacgtcgtttggggaggctacctcgcgcggtggagacaacgggactggagcgagacgggcagcaacgccgagaggaggaagggcagggggcggaggctggccaaggagagctcgtcgtcgtcggcgtccgtggcatcctcgacggcgtcgtgggccagtggctccacggtgatggactggggcagccccgaggaggccgagatgcagcgcggcgatggcttgacgctgctgatctacgcctggaagagctaa

SEQ ID NO: 6590 - DNA, 960 bp, Zea mays
  Peptide Sequence Number=SeqID_48369
atgaggcgcgcctcgaagaaatccttgtcgtctgccgcgaccgctagcgctggtaccgcccccaccgctgggccactcccttcttcccttagttccttgatcgcgctcactagttcccaggcagtgcggatgggttcctgtttctccagattggatgctggtgttatttcctctggaagatctgtgctggagcgcactcgattggtcaatatttcgattgtcgaattcggtatatgggagctatgcatcgtctttttcgtgattggaagggtgtggagatttgtcttcgttgtaaagaggatgcaatctgcaggtctattctttgccaacctaggtgcggaacaagtaaatgaaaaacaaaacagaaaaagaaaaggagtcagtacaaacctgaccagcaggaaagcacaacgtggccctactaaagcagtttccaaggaagtagaacggattgatcaatttttctatacttatgccgataactcatctgtcatgattgacccagaaggcattgaaacactctgttctcaccttgaagttccccacaccgacgttaggattctaatgttagcatggaaaatgggctgtgagaagcaaggttattttaccttggatgaatggagagctggtttgaaagctcttcgagcagacagcatcagtaaactgaagaaagcatttcctgaactggttcaagagtgtaaccttgcttaccactttcatgtgttctataaatccaggttacaaggccgtcaaatttccaggatttctacatatatgcatttcgttattgcctcacagtaccaaaatgactacaaggtgataaacatggatcagtggatgggatttatgcggttctgtaatgagataaacttcccatcacttgacaattatgattcagaccttgcttggcctttgattctagacaattttgttgagtggctaagagaaaataaaagctag

SEQ ID NO: 6591 - DNA, 135 bp, Zea mays
  Peptide Sequence Number=SeqID_48370
atgcctccttattcactccgcctactcttccttagtcttgctggaagcctccgcaggagttaccacgagctatccgtgtccagaccgtcccagctgctgcaacagatgcttatacgggaatctgacaatctttaa

SEQ ID NO: 6592 - DNA, 279 bp, Zea mays
  Peptide Sequence Number=SeqID_48371
atggatgatgagtatggtggtgtaatagtgaattctgagattaattctttgcttgatccaatggaccaggattgtaatctttgccattgccatcttcatttccatgtgcttgatcaagccaagaatttctatcatcccatggtgagctgtgacgactcagagagcagagaagatcagttctcagttatgaacctagaacactatgaagatgcaagggcttactgcatatttattgttttatttggatctagattaccgacgactatgagtcatatgtaa

SEQ ID NO: 6593 - DNA, 609 bp, Zea mays
  Peptide Sequence Number=SeqID_48372
atggcgaagacggggcggagggccgacgagggcggcggcgccacggagcacccggtcgaggtgatcggccgcatccggaacctcgcctcgggtgtctcgtccgcgctggagttcgcgtggggcgggacggccgtgcgcgtgcgcggcgatgccggcgggtgtcgtgacttcaccctcgacggcgtctccgtgttggaggaggaggacctcgaggggttctaccaccggttcgtgcgctccaggatctacggcgtccccgatgcgctcggcaacctccaccctcctcgtcgtgacgatctcggtcggccgagctccgcaccaaccaggcaaccaccagctcgatctcctcgttgtaagccttgccaacctacagcccgctctcctcgccgacatgcgaggatctcggccgaccgagctctgcgaacccgcccctctcgcgtcgagctccgcgtttccccacccgccatcccgcccttcgtgtttccctgcccactctacctctcgcctatcgtgccgcccaccatccgcttccgtcgcaagggaaccgaggatctcgacagatccacccgccatcctgcccgcgcttcctcgcaaaacaaatacccctag

SEQ ID NO: 6594 - DNA, 396 bp, Zea mays
  Peptide Sequence Number=SeqID_48373
atggctactgctaggaatctagatggacagattgacatggtgaaggtggtagagccacaacaggcaatggttatgggttcacctttagaggatgcaagacatttggcccagagctacaatgggacgtgctgcgatcaagatgtaggtatcaaagtacttgagcctgagcgggttagtgttgatatgctacagtcgatgttgaggctggagctcggtggggacacggacaggtctgcgaagctgacggagcggccatgcgaggtggactgtgcttactacatccacacaggctcctgcgaccgtgatcgtgctgcaccgcggggacccgtccagccagctatcctcccagaaccttacttgagatccgtcattgaccagaaaggttccgaagcgtag

SEQ ID NO: 6595 - DNA, 210 bp, Zea mays
  Peptide Sequence Number=SeqID_48374
atggaggcactatggaagcaggcctctaggctcaagaaccaggtcgctcgccagtatgttgtgaacctatcgtttgtatttgataaaacaaaaatactggatcttcctgctgctatgggaaagagaggggtgaagcttggcaaggcatcctatcaagagcttataggggtaaagaagccaaagttggatgagcagggcatgcttcactag

SEQ ID NO: 6596 - DNA, 243 bp, Zea mays
  Peptide Sequence Number=SeqID_48375
atgcgggtgggccgcgggcggaagtggttgcagctggcggagcaaggattgtgcgtgattgattcagagctcgaaggttactgggcggcggttcagaatagcatgaatgaaggtttgcaaggggctgcattctttgatatgaaaaagcaaacgcatacatcaaatgaaggtgttgaatactgggcaacaataccattttatcttaggaacctcacgaaaggtcttgggacctggccatacttg

SEQ ID NO: 6597 - DNA, 342 bp, Zea mays
  Peptide Sequence Number=SeqID_48376
atgtcgtcttcttcctcctcctcgtctgctgcggtcgcgtcctggaccgtgccatcgtcggagaagacgattagcgatccggcgacggtggtggaactgcagcacgggcatacggtcgaatttggcacctcgaggatttactcggaccgcgtgatggagatgcagcgcctgggctattttaggaacggagtcgggcgggctctacgggctgaagatgtccctaagccagaaggggagttaattgtgttcgaggcgttttttgtcgccggccttcgcttgccggttgaaatcttcttgacagcactccggcagagtaacaatgcgctcaagactttgctctag

SEQ ID NO: 6598 - DNA, 210 bp, Zea mays
  Peptide Sequence Number=SeqID_48377
atggcgtggagcccaaccttcactgttgacttgcgtgggcggggtgtggctgccttcgtgcgagaggtggagtcagatgccattaagattgttggaaagtatgtgccgaagactgagatgataaagagttggaatattgtcacacccggttttggaagtggactagctttatttggggttaaggtcaagcagttgcttttagttgatcag

SEQ ID NO: 6599 - DNA, 7707 bp, Zea mays
  Peptide Sequence Number=SeqID_48378
atggaggccgccgcgcccgatggggccgcgcaggcgtccccgccccccgcggaggccgaccgcccgcccgagcctcgccccccgccgctgccagccgcggggacgcacgatccgcacttcctgagctcgatcataggggacgcggcgcccccgcccccgccgccgccgctcgggcagaagcggaagcgggggaggccgcccaagaggaaggacggcgcggccgtggccgcggggccggtggtgccggcgccggcgccggcgctcgcccgggccgcccggagaaggcaggacgaggaggaggtcgtctgcttcatctgcttcgacgggggaaacctcgtcgtctgcgataggaggggttgccccaaggtctaccatccggcgtgcatcaagcgtgacgaggcattcttccagtcccggagcaagtggaactgcggctggcacatatgcagcagctgcgaaaaggcagtgcactacatgtgctacacttgtacatactccctctgcaaagtgtgcatcaagcaaggtaaattcttcagtgtcagggggacaaagggcttctgcgacacatgttatgggactatacttttgatagaatgcaaagatgaaagcgcaacaaaggttgattttgatgacatactcagctgggagtacctgttcaagctatattggctagatctgaaagggaagctttcattaacattggaagaactcactactgccaagaatagatggaatgttcctagcacttctgctaggaaagaaaaagaggagtcgtctgatgacctgtatgatgctaataatgatgatgatgctggttctgactgctcctcaggaaaacgaaggcgaactaattcaaggaaaaagggtcaaaaacgccgaaaggtaaatagagattgtagcattcttgaaaaaaaggtcgagcttccacttagaaatactgagagcattccggtggaagtgccaaatgaacgggtgccatatccggtacacacaaaagtaccaaatggacgagtacccatgccagtagacacaaaagtaccaaatgaaccagtgtccttggcagcaaacacaaaatgggcatcaccagagctattggagtttataggacacatgagaaatggcgatcaatctttcatttctcaatttgatgttcagactcttctgcttgattatatcaagaagaataaccttcgtgatcctcaaaggaaaagccagattatttgtgactcgagacttcacttcttgttcaggaaagcacgagttgctcactttgagatgttaaagcttttggaaatgcattttcttacgaatgagacttcaacagtaactaatagtagccaagtgactatcaatctcaattcagctcatgtagataccaatggacacaatgacacggctgcaaaagtttcccctgataagaggaggaggatctatagaaagatggaaagagatacacaagttaatcttgaggattatgcagcaattgacatgcataacataaatttgatttacatgaggcgcagcctaatggaggatttagttgatgatgtcaaattctcagataaaattcacggtggttttgtgaggataaaaatttctgatgtttgtcaaaaacaagacatataccgtctcgtaaaagttattggaacacataaggttccagaaaagtatagtattggaaagaagatgacaaatgttgcacttgagatattgaatttaaacaaaaaggagattattacaatggatacaatatctaatcatgattttacagagggtgatatcctagagaaagccaagatattgcaatattggtttgaaaatgaaaagcagaggcttgggcatcttcgtgaccgtgcaagtgaaactgggcgcagaaaggaatatcctattgactatactatgcttctcaacgattctgaggaaagaactcgcaggattattgaaattctggaattgcatgttgactcacatatggatcctaattatgagtctgctgaagaaacagatgagaaaggaactgttggaaagtcggtaaatcagacaagaccagatacaaccatatcacgaaggatatcgagatatcttagcactgtgcaaaaccatcctaaaaaagtttctgattctagccaccttccaaaaagcttgtccacagaaagtgcaatatgtggatcaggagcaagaagtttggagaacagcacagcaaacagaactatgtatggagctggaccactttcatcttctgtagtaacaatgacaaacgacacagagccagagaaagtctggcactacaaggatccttctgggaatgttcagggtccatttactcttttgcaactttcaaattggacaagttacttcccacgtgatctgagagtatggcttacatttgagagtgaagagagatcattgctgttgactgaagtgctttcaaaacagcagaaagattttactcaggctgcatcacatacaagtagcaaggcaacactggttggcactggacatacaaggaacaaccctagtgtggatcagaccaatgctttctcccctgttggtcatagcgtggttagttcttctggaatacctgttcagtataataagtattctgttccagaaagggaaagtgtgtactctccagatgatagcttgtcgctgtcaactagttcggttccaccaaaggatgcttatactgtgaatagccaagcacactgccagaataagcattctgttttcattcaatctcctgggagttcatatgggcacacagacttgaaccatgatggaatacagggaggatgctctggtgaatcaaaccaccatcacagcagtagagccctatggagtcctacagtggcacatgtgagttgtggacgtggtaacgtggaatctcatcagaatcagcatgtttcctggtcagaaagtcaacatgaatctaaaaatggttcacaaggaggatttgttaaagatctgaattcaaggcaggatctatcgaaaaacctacctgctcaacgtattgggaaagatgtttccagtcctttgtttgcttggagtccggccgagtcgaggacagcttcaagtcaacaggaagggtcttgcttaagttcaacaactaacccaagctttctcgatgaacttcattcttctattgcttctgcaaagcctaagagctgcgctccagcaacccccattgaagacagaggttctagttcaccatcagatatgctaagtcatgaagaaagagttccaatctgcagtccacaatcagcccctttagcatctgcttctgatatgtgcaagatggaggagatcatgaatcagcaaagaacacttgtggtggatacatcgaatgcttcagttaaccagtctcctgaatcaagggcttttcctgtatcctctcctgataaccaagatattgaccgcgagtttcctagtccagttccaagatctgagaataaggacattgctgtggacagctcagaattagcaccagcgtcacctgaaaatattactacgaatttgcctgtttcagatacatgcaagatggaggaggtagtgagtcaacaacaagtaattggggctgttgtatcgaattcttcagataaccattctcctcaatctaaagtttcccctgtatcttctaataatgaagatacgaaacataaataccccagttcaaccccaaggcccgagaataagaatcctgcggtggatagtttactttcaacgtcagctgctcctgaaaatctaacgacaacttcaacccatgattctgatacatgcaaaatggaggtagtgaatcagccaaaaacatttgaagcggatgcatcaaatgctccacttcatcaacttcctcattctcacagtttcctggtaccttctgacaatcaagatattgagtgtgaatgtccaggtccaactccaagatctgacagtgaggaagctcttatgaacaactcagcgacaactgcatcagcctctgatacaagcaaaatggaggagtttgtgaatcagcaaaaaacccttgaagcagattcatcaaatgctccacttaatcaatctcctcattctcacattttctcagtaccttctgacaagcaagatattgagcgtgaatgtccaggcccaactcaaagatctgacactaaggaacctcttatgaacaactccgtgttaacatcaggaccatctgaaattcagacgacagcctctgcagcctctgatacatgcaaaatggaggagtcagtggatcagccaaaagcgcttgaagcagatgcatcaaatgctccacttaatcatcatcctcattctcacattttccgtgtatcttctgataatcaagacaatcagtgtgaacatcctagcccaaatccaaaatctgacagtaaggaacctcttgtggacaactcagtattaacatcagtggtgcctggaatgctagcgacaacttctgcctctgataaatgcaaaatggaggagtttgcgaatcagcaaaaagcacttgaagtggatgcatcgaatgcttcatttaatcagcctcacattttcgctgtatcttccgataatcaagatatggagcgtgaacgtcctagcccaactccaaggtctgaatgcaaggaatcacttacggagaactcagtattaacatccttggcgcctgaaattctagcaagatcttctgcctctgcttctgataaatgcaaaacggaggagtttgtgaatcagcaaaaaccaattgaagcggatgcatcaaatgcttcacttaatcagcctcatgtttttgctgtaccttccgataatcaagatatagagcgtgagtgtcctagtccaactccaaggtctgaatgcaaggaatcttttatggagaactcagtattaacatcagcggtgcctgaaattgcaagatcttctgtatccgcttctgatacatgcaaaatggagtttgtgaatcagcaaagaccaattgaagcagatgcatcgaatgcttcacttaaccagcctcgcattttcgctatatcttctgataataaagatatagagcgtgaatgtcctaacccaactccaaggtctgaatgcaaggaatctattatggagaactcagtattaacatcagcggcgcctgaaattcttgcaatatcttctgcatccgcttctgatacatgcaaaatggagtttgtgaatcagcaaagaccaattgaagcagatgcatcgaatgcttcacttaaccagcctcacattttcgctatatcttctgataataaagatatagagcgcgaatgtcctagcccaactccaaggtctgaatgcaaggaatctcttatggagaactcagtattaacaccagcgacgcctgaaattcttgcaagatcttctgcatccgcttctgatacatgcaaaatggaggagtttgtgaagcagcaaagaccaaatgaagcggacgcatcgaatgcttcacttaaccagcctcacattttcactgtatcttctgataataaagatatagagcgtgaatgtcctagcccaactccaaggtctgaatgcaaggaatcccttatggagaactcagtattaacatcagcggcacctgaaagatcttctgcatccgcttctgatacatgcaaaatggagtttgtgaatcagcaaagaccaattgaagcagatgcaccaaatgcttcacttaatcagtgtcgcactttcgctgtatcttctgatactaaagatatagagcgtgaatgtcctagcccaactccaaggtctgaatgcaaggaatcccttatggagaattcagtattaacatcagcggcgcctgaaattcttgcaagatcttctgcatctgcttctgatacatgcaaaatggaggagtttgtgaatcagcaaagactaattgaagcggatgcatcaaatgcttcacttaatcagcctcacattttcgctgtatcttctgataataaagatatagagcgtgaatgtcctagcccaactccaaggtctgaatgcaaggaatctcttatggagaactcagtattaacatcagcggcgcctgaaattcttgtaagatcttctgcatccgcttctgatacatgcaaaatggaggagtttgtgaatcagcaaagaccaattgaagtggatgcatcgaatgcttcacttaatcagcctcctcgttgtcacattttcactgcttcttccaataatcaagatattgagcgtgaatgtcctagctcaactccaaggtctgacagtaaggaaccttttgtggacaacttagtgttaacatcagcagtgcctggaaatctactgacaagttctgcagttgcctctgatacatgcaagatggagatcttgaataagaaaataacacttgaagcagatgcatcaaatgctccacttaatcagcctcctctctctagcgttttcgcttcatcttctggtgatgaccaagataatgtgtgtggacgtcctagtccaaatccaagacctgagggtgagcagcctctcatgggtaactcagggttaatatcaacagtgcctcgaaatctaacttctacttctgcatctgcttccgacatatgcaaaatggagatcttgaatgagaaaagaacacttgaagcaaacccatcaaatggtttgattactcaatctcctcaacccaaggttttccttgtaccatctcctgatatcctagagtgtgaattttctagtgaaacacctaggcatgagtttaaggaacctgttgcggacagctctgggttaacttcagcagcacatgaaaatttagggactaagccacatgtccactcaccagatgcctttgtaccaccaaagtctggtgctctaactggggaattaggtgacacgaaatcagattttaaaggtgaagaaactattcaaaaagagcaatattttggaagtgaatctattgccgctacaagagagaatttgttaattgatccttcctctggtgttgagtcgatagatgtgtcagatgtactggattctttaatggaagaaaggagtggaacttcgtacatgccaggatcaatagaggacttcctagccgaagaagaaccacaatactctagccctatcgcattatctccttggggtgaacctagttactaccaaggtgatgctgttgattctgcgctatggggtactcaagatttgatcaatgatatgtggtcattgctttcaccaagacctatgctccaaccttcatctggtattggaactgaggggaaggaaacttttgatatcaacgaggtggctgtgacccatgttagtagtgattattttcaaaaaggatcaatgtttggggaggaaaatgtgaaccaggcaaacttgagtgctgctgcagactggatgctgcctgagcaggtcccatcaataccaaatggtatgtcaacatcgtcagtagatgagagcaccatagttttaggttctcagccatcaaccaatcagagcttagactggggtggtactacatggagtattggccagaatgccagcgtgtatagcaatgaaaaagcagagccctcgagtaaaagctattgggaagaaccaaggaagcaggaaaccgccaaatccagtgtttctatttcaggacaggccattggaaacaacaagggcttggaccctcgtgataatgctgctaatcggggcagccggctgagtcatcatcaccgtggcagtttgtataggctaattacagtttag

SEQ ID NO: 6600 - DNA, 1119 bp, Zea mays
  Peptide Sequence Number=SeqID_48379
atgggggccggcgcaggcctcctcttcgtctcgcccctcaggaagcacctacgctacgtgctacgcctccacttcccagcgtccaacaatgtggcagagtacgaggctctgctcgtcatcgaccaagtcatgaagaactcccactgccgtgacccgaagatggaagcctactgcgatgaggttcggcgcctggaagacaagttctacgggctcgagctcaaccacatcgcccgacgctacaatgagactgcggacgagctggctaaaatagcctcgggacgaacaacagttcccccggacgtattctcccgagacctgcatcaaccctccgtcaagaccgaggacacgcccgagcccgaggcacctttggctccgcccgaggcaccttcggctgagtccaaggcacccgggggctacacgcacctgttggtcgccatcgacaaattctccaagtggatcgaggtccgacccctaaacagcatcagaaagttcctggacttctgcgaggatcaccacatccgggtggactgggctgccgtggctcaccccatgacgaatgggcaagtggagcgggctaacagcatgatcctgcaaggactcaagcctcggatctacaacgacctcaacaagttcggcaagcggtggatgaagaaactcccctcggtggtctggagtctgagaacaacgccgagccgagccacgggcttcacaccgttctttctagtctatggggccgaggccatcttgcccacagacttggaatatggttccccgagggcgagggcctacaccgaccaaagcaaccgagccaaccgagaagactcactggaccagctggaggaggctcgggacatggccttactacactcggcgcggtaccagcagtccctgcgatgctaccacgctcgaggggttcggtcccgagacctccaggtgggcgacctggtgcttcggctgcgacaagacgcccgagggcggcacaaactcatgcctccctgggaagggtcgttcgtcatcgccaaggttctgaagcccggaacgtacaagctggccaacagccaaggcgaggtctacagcaacgcttggaacatccaacaactacgttgcttctacccttaa

SEQ ID NO: 6601 - DNA, 333 bp, Zea mays
  Peptide Sequence Number=SeqID_48380
atggcgtcttcccctgctggctcgctggctccatgctccctgctccccgcgctccgggtcgcctgccagcagttcagctcgctcccagcgcttctctccagccaagacgcgcccatctctctgctccctcacgctcggatcctcatcgcgcgcgctgctccgtggtactcgctggcgttcctccttctctgctcgccgcacgcacgaaatttccctgctcgttggtgcttggtccttgctccactgcgtcgtgctgtttctctgcgcgcgtcaagttccctcgccgagttcgccttggtcgcaagcctgtgtgtcctcgctgcgcctgtatag

SEQ ID NO: 6602 - DNA, 729 bp, Zea mays
  Peptide Sequence Number=SeqID_48381
atggacagagatgagaagaacatgtcaactatggaggagttgatggtcgcgcgaccgagcagtcaacgccagggcccgcccgcgtgccgggaagccacgcccgagcaggggctacgctcgcgctccacgctgccgaggaggtcgtgcccgtgcgtgcagggggtcacgcgcgtgcccctggggtgcctcgcccgcgtcgccgggccgtggccgcgcccgtgcgccggaggccgcaccctcgccgggctcgtgtgctgggatggggagccgccggggcagggtctgcgccggggccggggccgctggggcagggtccacgccggggccggcgccgccagggcttgcacgctcgtgccgccgggggagctgcgccccgcaccatcgctcctaggctgggggtcatgcgcccgggccgcctggaggtcgtgccccacgctgccgcttctaggccaggggccacgcgctcgggccgccgcatctagggctggccgcgcccaggccacccatgcactgctgggggagtcgcgctgggccacatccgcgcagccaccgggaggcgcacctgcgcaacagtgccgggcccgcgcgcgcctggccaaggccgtgccgctgggttcgcgcctgtgcctatcggccgcgtcgctgggttcgtgcccgtgcctatcggccgcgcccgctgcgcctgagccgccggggccgagggccaccgcgctcgcgtgccggggttga

SEQ ID NO: 6603 - DNA, 897 bp, Zea mays
  Peptide Sequence Number=SeqID_48382
atggaggccgcgcctaccaccatcaccgtccaggtcaagttcgccgggcggacgatccccgtggaggtcccggcagcggcttccggcgcggagctgaagcgcctcctccagccgctgaccaatgtcctcccgcgcggccagaggctcatctgcaaaggcaccgatccccaaacccttccaaccctcgactcccttgtggtcgcaggcaaagtgctccaggatgccgcaagcctgagctcgatgcaagtagtgggcggatccaaggtgatgctcatcgcgtcgcaggggctccatcagggggatggtcctatcacaaataatagcagtagctcagcaacaactgtgagaaggccttcaaatgttaaggagaatcaaacacaaaagccagaggtagttgtcaccaaaagccgatctgagcgctggaagttaacaggtgttgttgcgctgcaagactgtgacttgaaggtaatacctgaagaagtctgggattgtggcacctcgatacgaatactagacattagctacaactgtatcaaggaaattccacacaaaatctctgctcttaaatctctaaataaattgctcctaactgaaaatgatatagttgatgatagcatctgctgggaaggtctatcatgtcttcaaaagctattgaatttatctttaagcgaaaaccgactggttagcttgccaccaactttgggttcactgacttctcttcgtgaactgtgtgttgcaaagaacaggcttgataacttgcctgtagaaataggactgctgaagcacctccaggtcctcatagcaaataacaacaggttgagggggttgaaaaggaccatgtctagatggttcagtagatcaatgtctcaagagttgacattaagacttgtgtgctga

SEQ ID NO: 6604 - DNA, 672 bp, Zea mays
  Peptide Sequence Number=SeqID_48383
atgggtcggcgcgaggccgagcgcgaaggggggagaaaggtggccggagacaggcgtgagagaggtggaaatcccgcggccttcgtgttcgtcccgcgcccaggtcggcccgagtccgagccctgggtcgggcggagcggagttcgtcgtcttctggggctgagcccaagtccgagccctgggtcgggcggagcggagttcgccgtcttccggggcttagcccaagtccgaggagccctgggtcgggcggagcggagttcgtcgtcttctggggctgagcccaagtccgagccctgggtcgggcgaagcggagttcaccgtcttccggggcttagcccaagtccgagccctgggtcgggcggagcggagttcgccgtcttccggggcttagcccgagtccgagccctgggtcgggcggagcggagcttcctatggtgcctgaggtcgggcctgactgtctgtcagcctcactctgtcaagtggcactgcagtcggtgcggcgcaggcggcgctgtccttctgtcaggtcggtcagtggagcggcgaagtgactgcgggttgcttcttggcgaagacagggcctcgggcaagccgaaacttcgtgctgatgggggttaccagctgagaattaggagctttgagggtacccctaattatggtccccgacagtag

SEQ ID NO: 6605 - DNA, 138 bp, Zea mays
  Peptide Sequence Number=SeqID_48384
atgtcgcgcacgttcgacgactactatatcaaggattgcggcgtcatatcggcgccggagctcgcgccctcctcttcgttgtgcaacgtttctttgggacacaggatgatgcttgcagttgcagtatatctagaataa

SEQ ID NO: 6606 - DNA, 1221 bp, Zea mays
  Peptide Sequence Number=SeqID_48385
atgcaccacctcgactttggctacctcagcatccaggggctatcatccacacggagtgcacaccggtctctacaacagccgcaacattcgcaccctcacgacgctgtgactgtgggggtgggggatttcaacccgtcggttcctacctacgacttctgctccagtctcatcgtttgtggtgctcccgttgcgactgcggggatgttagagtgtgcaaaaagggcacgggatgttgtttaccgtgtcctatctgctgcatgtgaagatggtgaccttagcattcaggaagctatcgaagctattgaggacatctttagaagaaatgcattgaatttgtacaagttaaatgttgtcaatggatcaataaatcatgaaactgccatagttggtaaaagggtgtcattgtcttctgttgaggaagatgtgctctttgttcgaataatctggtgcgatgcttctggtcaacatagatgccgcgtcgtgccagctggacgattttatgagattacgaggaataagggtgttggtctgacttttgcagcaatgggaatgacctcattttgtgatggcccagcggatgggtcgaaccttactggtgtaggcgagatcagacttgtaccagatatgccaacactcgttaggctaccatggtcaaggcacgaggaaatggtgatggctgacatgcaaataaggcctggagaaggctgggaatactgtcctagaaataccttgaggaaagtcacaaaagttctgttagatgagttcaatgtgacaatgaaggcaggttttgaaaatgaatttttccttcgcagaaaattagtaagtaatggagttgagatgtggattccatatgataataccaattactgctcaacttcagcatttgatggtgcatcatccatattacaagaagtatattcttccctcaaagattcaggcattgttgttgaacagttgcatgctgaagctggaaaagggcagtttgagatagccttgaagtatatcttgtgcactgttgcggctgacaaactcatatatgctcgtgagactattaagtcgattgctcgaaagcatggactggtagcaacatttcttccaaagctgcaacttcttgtgtttgcctggcaggcgagccaggccagcggcagcctagacgtgcatcatggcaacctggctctgtggatacttaaatttaggtcgcatctccagagcctggcctga

SEQ ID NO: 6607 - DNA, 1230 bp, Zea mays
  Peptide Sequence Number=SeqID_48386
atggaggcgaggtacgaggtgctgcggcgcgcgacggaggaggtggccgcggtggacgcgcacgcgcacaacctggtggagcacggctccgcgttcccctttctccgctgcttctccgaggccgagggggacgcgctcgcgctcgcgccccactccctctccttcaagcagtatattcgaaatcgcgacattgatgggagcctgcagtttgctgggttccgtgctaggtcgtgtcgattgagcttttcgttgtgcggcatgcggatggcagcaactttatggggtctgccttgccatcgtgcagtagaacgtggtggctgtataagaagcctgagggacattgctgcattgtacaactgcgaggcctcacttgagaaggtggagaagtttagaagtgctgaaggattgaaatcgattggctcaaaatgcttccaagctgccaacatatctgttatacttatagatgatggcatagcattcgacaaaatgctagacctggagtctcacaaggcatttgctcctgtagttggcagagttctgagaatagaaaggctagcagaaacaatcatcaatgctttcagctatttgtatttaataatatgttttaactacgagtacttttttaaaagcatagctgcatatagaagcggtttagagatcaatcccaatgttagcaagactgatgcagaggatggtcttcgtaaggagctaacaggtcctaggccatttcggattacaaacaagaacctgattgactacctatttacctgcagtcttggaattgctgtttcacttagcctgccagtgcaaattcacacaggttttggagataaggacctagacttgcgaaagtgcaacccactacatttgcgcgctgttcttgaggacgaaagatttgctaagtgccaaattgttcttttacatgcttcttatccattttctaaggaagcatcctatcttgcatctgtttactcccaggtttaccttgattttggcttggcgattccaaaacttagtgttcatggaatgacatcgtccctgaaagagcttctggagctagctcccataaagaagaccttctttgttatggtcgttaaatcggtgagggattggagaggggtatcaatgggcaagaatgtcgaccgggggcctctgcccacgaccgagcaagaggagggtttcttccttctaattcttgcctactttatttctcatctattgattacataa

SEQ ID NO: 6608 - DNA, 618 bp, Zea mays
  Peptide Sequence Number=SeqID_48387
atgggcgtcggcgtcgccatcccactgcgccggcggctgtttattgaagagatagaattaggagttctaacttcctacttatggatagctgatgtcacatttcatagaattgtcccggtgaactataggaaccttgcttttgtacatgtcctgctcggtgctgttccattccctagtgatgttctccggctaaagacgcttggagtttgtggtgtggtgacacttaatgaatcatacgagaggcttgttcccacatccctatacgagattagttttgcacaggcactcgtttgtggtatgctggttctactccctggatatgagcccttgggcctccagttcgggcaacaagcatatggcaaagagaaggcaaaggatccttcagagttcatcactcatcgagccaaagattttgtgtcaagcatgaaggacattgaaacccggtttatgtgtatagttgaagcaggaaataaggtttctagaatgcttgaaaccaagaagatcttgcttgacatatgtgctaaaataccaggtacaaaatacatggtgatccaaggtgaacctagagtggtcatccgaggaaagaagtttattgcatttgcaagcttcgtgtcctag

SEQ ID NO: 6609 - DNA, 216 bp, Zea mays
  Peptide Sequence Number=SeqID_48388
atggcttatgaacagcatttgagaacaagtccccaacattggcgcccacctctggtgaacccttttcgaccacctttggcaagcactgatcttcgtcatgcgaccaaagaaagtttcagcgccaggggctgccgcactatagccattggacccaaattaggagaccctctctctccgagaggcccgaagccagaaaaggaaggtgagagcacctag

SEQ ID NO: 6610 - DNA, 450 bp, Zea mays
  Peptide Sequence Number=SeqID_48389
atgcacatggactgttcactgtccagtggtgcaccagacaagcatggttcatggtccgtgatgcaagaggctttgattctttctgtgaaggccgttgtgagatttggtgtccccgagatagtgaagcaagctcaacagaacaagaaggtgccattgggacccaagcccgaagacaaggtgtcgtcgggtgagatcaagatatccggtgataagcacgagcacaaggagcacagtggagaatccaccagctccaccaagtcgcataagaagaaaggcggcaagaagaataggatgaagaaagtggtctactacgagaccaactcctccgtgccatcaatatcggacaccgaatcaacctcctccaagcgcaacaagtgcaaaagagttaccaaattcctttctgttaccctcacattccaaaacacacgcaattactttcgatcccattag

SEQ ID NO: 6611 - DNA, 741 bp, Zea mays
  Peptide Sequence Number=SeqID_48390
atgtggaggctcctccgaggtcgaggtcgagtctgtcttccgtggccgtggtcgagtccgagcccctgggtcgggcgaggcagagaccatcggctgaggccagggctgagtccgagccctggggtcgggcgaagcggtgttcgtcgtcttctggggctgagcccaagtccgagccctgggtcgggcggtgcggagttcaccgtcttcaggggcttagcccgagtccgagccctgggtcgagcggagcggagttcgtcgtcttctggggctgagcccaagtctgagccctgggtcgggcggagcggagttcgccgtcttacggggcttagcccaagtcggagccctgggtcgggcggagcggagttcgctgtcttccggggcttagcccaagtccgagccctgggtcaggcggagcggagttcgtcatcttctggggatgagcccaagtccgagccctgggtcggacggagcggagttcgccgtcttccggggcttagcccaagtccgagccctggatcgggcggagcggagttcgccgtcttccggggcttagcccgagtccgagccctgggtcgggcggagcggagcttcctatggtgcctgaggtcgggcctgactgcctgtcagcctcactttgtcaagtggcactgcagtcggtgcggcgcaggcggcgctgtccttctgtcaggtcggtcagtggagcggcgaagtgactgcggtcactttggctctgttgactga

SEQ ID NO: 6612 - DNA, 693 bp, Zea mays
  Peptide Sequence Number=SeqID_48391
atgctgcaggatgttgtttctattgaagtacctatttcttctgcctgtccaagtgaacatattgatggatcgagatcaggtggtctgaattgtagctgtgataagcctagccctacttcaattcttgatgtatcatttgaagatagcaaccttaatggatctgaatcgtcaagaagcattccttgtagcaacgagagctggtacttgcctgactgccctgtagaccctgcattgtgcgacaagctattggaccggaaggaggaggctgctaagtcgagggagcggaggtcgaaccaaaagcttcttttcgattacgtgaacatggcagtggtcgagattggccatgacaccttactatgcgcctacccctggaggcaggcgtgctccatggcctgggaggagaccctctctcaagctttggcggaggaagtgccacaccatatgagggattggctccatggatcaggaaagtttgcaggaaacgagaacgacaacgccggaacgttgttggagagagtcatgcggcaggaggtggaagggagaggctgggtgaaatccatgagatgggagttggatgagatcacagagcagattgcaggaaatgtgctggatgaaatagtggtagaagcattggatggtctcgggatttgttctccgtggccagaaatggccatggcaataccgaatctgtag

SEQ ID NO: 6613 - DNA, 1095 bp, Zea mays
  Peptide Sequence Number=SeqID_48392
atgaagaggcggtggagccacccgtcgtcggtcttgctcctgctgctgctggtcgccgtcttcctactcctcacgttgctgcgatgtcccctgcgccacgcgcagcaggcctgcgctgacgacgacgcgggaagctacgccgtggacgccacgctcgcggagctcgcggccgcggacccggccgcgtcggcagtgctgcgggccgccgagaggttgctggaggggaacctgacgagggctcccccggagcgccgggacgccgcggtgcgcggcctccgcgagtggctcggcaggcagcggttcgagccccaggtgatggccgagctcgtggacctcatcaagcgccccctcgaccggtggcactacggcgtcggcgccggggcgacggacagcgacgacgggcggcggccgtacgcgtcgtgcgccgtggtcggcaacagcggcatcctgctggcgcgggagcacggcgcgctcatcgacggccacgacctggtgatccgcctcaacaacgcgcccgcgggcgcgggcaggtacgcgcgccaagtcggcgccaggaccggcctcgccttcctcaacagcaacgtgctgagccgctgcacgaccgccggctgccggcactgccgcgcctacggcgaccgcgtgcccatcctcacctacatgtgcaacgccgcgcacttcgtggagcacgcggtgtgcagcgcaggcgcgtcggcgccggtgatcgtgacggacccgcggctggactcgctgtgcgcgcggctcgccaagtactactcgctgcgccggttcgtgcgcgagacgggccggccggcggaggagtggggcacgcggcacgaggagggcatgttccactactcgtcggggatgcaggccgtggtggctgcggcgggcgtgtgcggccgggtgtccgtcttcggcttcggcaaggaccccggcgcgcgccaccactaccacacgctgcagcggggcgagctggacctgcacgactacgaggccgagtacgagttctaccgggacctcgaggcgcggccggaggcgataccgttcctgcgggactccggcttcaggctgccgccggtcgtggtctaccggtga

SEQ ID NO: 6614 - DNA, 528 bp, Zea mays
  Peptide Sequence Number=SeqID_48393
atggacgcggatcctgcccacatcgcgcccccgcctcaccatgctcccgcccgctcgtctcgccacgactgccgcccttgctcccccgcccccgttcccgcggcctcagcgtcgagccacctgccagcgccgagaattcgtgccccaagccccatgacccagttctccgatggtacttccgtcctacgcgacgctacccacgcttcccccctcggcgtcgagttgcatgcccgcaccgagaatccgtccgccctatgccccacgacttcgttctccgatttggaaacaccggctttctcgttccacgattggagctcccccattacccgcgaatatgcaattggagatcgatgtgatttggcaattcgagatcgacgtcgatttgacaatgccgagcgcatcttccaaatcacgccgacatctatgcacaccaaatgtgcaaaagcgcctagggcgacgacattggtgcaaagaattgtgttatgtttgccacacccagatgaagatgccggaacgcgtaccatgtga

SEQ ID NO: 6615 - DNA, 1143 bp, Zea mays
  Peptide Sequence Number=SeqID_48394
atggccttgcaggtcaccggcggcgtgggctgctgctgccctccgggcagtgcccggcggttgccgcaagcggcggcgctgtgtcgcccgccccgcgcggtagtgtccggcgcaaccagggtggtggaggaggacgagggcaaggtgaggctgggcggctcaggcgtcgcggtcaccaagctcggcatcggcgcgtggtcctggggcgacaccacctactggaacgactccgagtgggatgacaggagactgagggaagcacaggacgcgttcgatgcgagcatcgataacgggatgaccttcttcgatactgcagaagtttacgattcagttctgaaggcacacctgtatctaactaagaatggttctgtcctacagctgatgggagcagtcaattctgaaactttactaggaggattcatcaaggaaaggcaacagaaggaccagatcgaggtgtccgttgcaacaaagttcgctgcccttccttggagatttggaaggggtagcgttctttcggcgctgaagaaatcgctagaccgtctaggcctagcgccagggatttgggggaacgaaggatatcttgatggtctcgcggatgcttatgagcaaggcctagtcaaggctgttggagtctcaaactacaatgagaagcgccttcgggatgcacatgctcgcctgaagaagcggggggttccacttgctgcaaaccaggtgaactacagcctcatatatagaacccctgagttgaatggcgtgaaagcagcatgtgatgagctcggcatcaccttgattgcttattccccgatagcgcaaggtgttctgacaggtaagtacactccagaaaacccccctactggtcctcgagcaaacacatacacccctgagttcctcgccaagctccaaccacttatgaacaggattaaagagatcggagcaagctatggcaagagtccaacccaggtgtctctgaactggctgacctgccaggggaacgtggtgccaatccccggagccaagaatgccagccaggccaaggagttcgccggtgcactcggctggagcctgacgggggacgaggtggaagagctacggactctggcacgcgagatcaagggcatcaggatgcccatcgaggagtcgtag

SEQ ID NO: 6616 - DNA, 1323 bp, Zea mays
  Peptide Sequence Number=SeqID_48395
atggatctcagattaaaagtattcagaggttctcttgctcctttcaaccttgcaaggactggttctcaaaactcaaaactgaaactgccgtcgtgtagaagcaggcaagatgccaagagaacagttgatcctgctaaagtttataccaacgataaagtaggagctagtaactggagctcatccagaaataaatcaaatgtgtctccattgaatgtggcgttagaaaaggagatgtccaaggaattggaatcaaagaagaagtcaccaagtgtggttgccagattgatgggacttgaagaagatctacctggtcaagagccagcattaccttccactaaaagaaatttgaagaaaagacacctaaatggcaacttggtcaaaacaaacaatctccatcgacatcaagagcagtaccattccagtatgacaacatgcgacaaacacataggacccaaagaaacagttgaatttaaggatgtttatgaagtcagtgaagaaccattgagaacataccattttcaggaccaaacttttcctagggaaatgtcttccaggagcaagagagacataaggatggaaattgttcgtcagaagttcatggaagcaaagcgtcttgctacagatgagaaactcctgcattcaaaggagtttcaagaagctcttgaggttctaagttctaacagagatttgttccttaagtttcttgaggaaccaaactctactttctcaaagcagctagctggacttcacagaagcccatcaccacctcagacaaagcgtattactgtgttgaaaccaactaaatttgttgagagcgattgcagaagggaaatcagaacacacagaataaatgaaggaaatgaacacgtgatgcggaggacacactggagatctcattcagcagaagataccttatcccagccaactaggatagtggtcctgaagcctagtcctggcaagcctagcagaacaatggctaggctaacaaccgaagcagccccagctcagttcgctgagcagataggtttttatggaggtttagaaggtcacaattacccatcagatgctctacatcggcgggatgagtctttattatcttctgtatactcaaatggctatggtggagatgaaagttctttcggcagatcagaagttgactacattgatgaagaagatagtaacctaagtgactcggagatcgttagcccagtaccgccgctgcattcatgggatcacttcaaaagatacagcagtcctcactcaggttcaacttttagcagaacatctcggtcgcccgagtcatctgtgatcacggaaagctaa

SEQ ID NO: 6617 - DNA, 447 bp, Zea mays
  Peptide Sequence Number=SeqID_48396
atgagggagcttgctttatctttgattactgagatgctcaactaccagatttcaaatgaggcaaaccaatgcttaaatgttctattggcaaaatacaaccctttcacatgtcttgctattactgtacctttattggtcagtgatgatgagaagatgcttgttgtgtgtatcaactgcttgacaaagcttgttggacgcctttctcaagaggaattgattgttcaattgcctacatttctgccagcattatttgatgcttttaacaaccaaagtccagatgtccgaaagactgttgtgttctgtctggtggatatctacatcatgcttgggaaagcatttgctccatacttggaagggcttagcagcacgcagctccgcctagtaaccatctacgctaaccggatttcacaggcgaggtccggcaagccaatcgattctaaccaatga

SEQ ID NO: 6618 - DNA, 651 bp, Zea mays
  Peptide Sequence Number=SeqID_48397
atggccgaccccgttgtccccgcccactttggccgcggccgttgcggcctcgccctcggactactaaagcataggtcgccaatgccatgcgcccgaaccaatcgcttcctccacacaaaagaaccgcgtcacgtgaccggtttccaccgccgccacaggaagaagattccgctgccgccgcgctatgatttatcgccgacgattgaggctggagcaaggtccctgatgcttctctgggccgcactgatcgtgcgtcaaccgaaccggggaggattcactcagatcgggtcggtagatggccggataggtcgaactccggcgagagcgccgcctcgaccgcatctgcgtcaccgcgccctggtgcaggaggtgcataaaggttcaacacaaaccaataaaaagattgaagttagggttcaaattcaaaggagcaaaggaaccgagtgtgccctggtttggagcaccggactgtccggtgtgccactggacagtgtccggtgcaccaggaccgtacaatctcaaactctccactctcgggtttctccaggagcgctccgctctaattcaccggactgttcggtgcaccagtggagcaacggctacttcgcgcaaatgtcgactgcaaaagctaaagaatcagatgaacagtga

SEQ ID NO: 6619 - DNA, 390 bp, Zea mays
  Peptide Sequence Number=SeqID_48398
atgccctcgcgcctccgcctcgggccagcgggaatcagaggcaccacctccaacccgagctcatgccgcgcgaatcaccggaaacattccagggggggaagcagaaagagagtaccgaagcgaatcagcgcggcgccgaaccgagcgaattggcggcccaggccgctgctccgtgcacgaatcggactccggagtcgacgagctgggcgaatccggcgggaggttggggaattcggcggggaagctttggcaggaatgcacagcaacggagtcagcaggggtggaggactggaggggaaagagcagagaaaggtagcggtgtgggatagcatgtgtgagtggggagatgatagatgggggacccgtagcggggtggcccagtggaaatag

SEQ ID NO: 6620 - DNA, 231 bp, Zea mays
  Peptide Sequence Number=SeqID_48399
atggacctcgatcgcacgctcttcctcctccgctcctacctcctcctggagaaggcattttggagggctgtaacaactgggatgacaaagtctctagccttctcatctcgtgttgatgatgtagagagtccagttcttgaaagggtgggaatgtgtccaagaagacaaaggcatcgacccgccaactcttcgctacaaattcaaacagcactaggggtgacaaacctgtag

SEQ ID NO: 6621 - DNA, 453 bp, Zea mays
  Peptide Sequence Number=SeqID_48400
atggcttcttcttctacctccagcattcacgtacagccgcagatatgggaggctcctcggctccggccatgggaggggcatcgtgctcccttgagctcagagcagaggccgagcagccctgggcacgcagctacggaggtcggttccatggacaagagaagtgctgctgcatctcgtaatagagaggaggcgtgtgggagaagatggagaaaatggccggtggcgtgtgggagagaagccatggtggctggcttgaagaagtggaggagaggaaaccgagttcctgcaccaaggaagaagaccggcgttggtgagctgctgctgccaggaatgggaaggggcgtggaggagaagggagagcatgtgctgccatttatagagccaagctctggacatggcagactgcaccagcaggtggcagatcttggttgctgcacaaaatatcttccttga

SEQ ID NO: 6622 - DNA, 483 bp, Zea mays
  Peptide Sequence Number=SeqID_48401
atggaatcaggattggcctcagtagcccagggtatggaaggctgcgttattagcaacaaagagacgggggcgtatggcatgccatcagctaccaacaatccagatgcctctggtcagtccttcagcgaagcgttgaggagttcgaggaagcatccgttgcagtacgatgcctccgaatctgcagacggtggcctaggtggtaagtgcgcaaagaagaaaacgaaaaaaagcaaggaacacaagatcggcggaggcggccagtgccatgccgctgcggggacgatgcggcacgacaagggcggcaagtgccacgcgctgtgctacggcgcgtcccggctcagcgtgtcctcatcggcgtcgtgctcgattttgtcgtctagggagcaaccaagcagcgcccggaggaattcagctccatcctatgcgacggcgaccattccaatgctccctatccaactcctctccggtggccgaacctcctga

SEQ ID NO: 6623 - DNA, 558 bp, Zea mays
  Peptide Sequence Number=SeqID_48402
atggcatatgcgcaggctgcggcagcatcagcgcgcgggggcgccagaggatggcgccgcgccaccgcccatcagtcccgactggcgtcgttccgcgcgcagctctacttcaaggagcagcacggtgacccgcccgtggcgtcgtcgacgcagctgccggcggtgcagaccggcagcgacaggtgggcgcaccctctaatgaagcccgagaaggggtgcctcttgatcgccacggagaagctggacggctcgcacatcttcgagcgcacggtgatcttgctgctgtcgtcgctgggccccgacggcgtgatcctgaaccgcccctcgctcatgtcgatcaaggaggcgtcagggtccatctgcgcggacgacgccgacatcgcgtgcgccttcgcgggccggccgctcttcttcgggtgggaaggcagactgatcgtggctggctgtgtctacggtgtggcggcgatggcgggaggcagagcgacgacggctgtggacgcggaggggatgggagagctagggttgcttgggggcaagggtcacgcacgcgatcgatag

SEQ ID NO: 6624 - DNA, 477 bp, Zea mays
  Peptide Sequence Number=SeqID_48403
atgtctggagcttgcacgaaagctaggcagttgcgacgaggagcaaccgttggacatgggcgcgagccccatagagaggagggtatcaacggtggtgaaatgctggacttagtatgggagcatggtgataaggtatgttttggttttacagttcataatgaagtcacaattgttctacctttcatgtattgggataaatctttaactcttggtgaggtgcccatgcaatacactaacaccatgaatacataccaaagtaagttcgctcatgacaatgctcaacataatatggtcacggaagtgaagggtgtggagaggatgtttgattcgaacacagcttcaatatccctccaggagtatgagttctttaggaggaaagctggagaattttcgagtgaccttgcaaggagaatggtaactgattgtagtacatctccatctacactaccggaatcgcgttctttgccgagtgtctag

SEQ ID NO: 6625 - DNA, 1251 bp, Zea mays
  Peptide Sequence Number=SeqID_48404
atgatcgaggtgcttttcacgaacaatgctgcaaatgcgcctcctagggatacacttagaaagcctggagtgccgctatgcggtgcccaagagaaggtccttgatcctaagaaggcgcagaacatcgccatcctgctgcgcgcactgaacgtcactctggaagaggtcacggatgcgctgctagacggcaacgctgaatgcctgggggcggatctgttggaaaccttggcaaagatggctcctacaaaagaggaagagctcaaactccgcaacttcactggggatatatcgaagctcggttccgcggagcggtttctcagggcgctgcttgacatccctttctgcttcaaaagagtggacgccatgctctaccgggcgaatttcgacggcgaaattaactacctcaggaaatctttccagacactagagggagcctgcgacgatctaaaaggcagtagactgttcctgaagctactcgaagctgtcctgcaagccgggaaccgaatgaacgtcggcacgaaccgtgggcaggcaagagccttcaagctggacactctgctcaagctcgcggacgtcaaaggcgccgacggcaagaccaccctgctgcacttcgtcgtccaggagatggtccggtcggaggaggacgcgaggacgacgtccgagagagccgcagaggatgaggccagaaagatcgcgagagacgagacgttccgtagtaagcaagggctgaaggtagtgtccgggctgagcggcgagctcgggaacgtcaggaaggcagccgccatggacttcgacgtgcttcacggctacgtgtccaagctccaggccgggctcggcggggtcaggtcggtcctcgcgctcgagaagcagtgcgcccaattgcaagcccaaggccaccaccacaggtttttcgccaggatgcgtgggtttctcgaggaggctggggcggagatcggacgagtcaggcgcgacgaggagagggccctggggagagtgaaggagatcaccgtgtatttccacggtgacgctgccagggaggaggcgcaccctctgaggatcttcgtggtggtcagggacttcctgtccacgctggaccgtgtctgcagggaggtcagccagcaggacaggacggtggttgggtccgcgaggtccttccgcatgtcagcggccacggcaatggcgaacctgagaatgtacggccagcatgcaagaggagacgatgacgacgaggaggagagttggtcgccgtag

SEQ ID NO: 6626 - DNA, 243 bp, Zea mays
  Peptide Sequence Number=SeqID_48405
atggcggcgcaccgaacagtgaacaggacctgtccggtgccgcaccagactgtccgttgtaaatttcagattacgcctattcacccccctctaggcgactttcacgcgtctacgtcgatgacaaatggtgccacatcatggcaacctctggagctcgaaggaagcgtggcacaagtcccacctcgttggccccaaaagctaggtcgatgtgcctggccatgggactggggaggagggacgtga

SEQ ID NO: 6627 - DNA, 303 bp, Zea mays
  Peptide Sequence Number=SeqID_48406
atggggcagcaacttgctatatgcattacaaaagtaaggctgaaaacttctgaggtgattagtcacactagggaaaacagttgtgtcaaattcgaaagaattctagactctagagtacgaactgaacccacttcaactacagtctccaagaggagaggagcttctttacttgattggagcttggtttctcttattaatatgatcatcttctttgctattcgatttgctgttccaagaagaggtatggtgagagtgatggttatccttctcagaaagggagagatcaagaaagatgagatataa

SEQ ID NO: 6628 - DNA, 471 bp, Zea mays
  Peptide Sequence Number=SeqID_48407
atgatgaccgcatcaaaaaaggctggcccctcggaagggttcgacagccgcccagagcactcgggctttaggctcattactgatcagaggttcgaaggctggcccctcggaaggggccgaagtgaccgcagtcactttgcccctccactgattgaccggacaggaaaacaacgccgactgccctgctttgactgctgtgccacccaccagggtgaggctgacaacagtcaagtccagcccaggcgccacaggaagctccgcctcgcccaaccttgggcctcggcctcgggagaagtctccgcctcgcccgaccccagggctcggcctctgcctcggcctcagaagatggactctgcctcgccgaccccagggctcggcctcgacctcagcctcggaggagtttccgcctcgcccgaccttgggcttggaccgaccacgccacaggggggatcatcattactctacccctag

SEQ ID NO: 6629 - DNA, 1560 bp, Zea mays
  Peptide Sequence Number=SeqID_48408
atggtgggtaaggagctggtggtgcaaaggaatggccctgttgacatacgtgagattgctgcaaaggccacgcttcgggaggtgcggcagagcgggcacacctacgtcgaactacggcgtgtcgggaagcgtgtcatcttcttctgcaccatctgcctcaccgagtgcttcagcgacaatgtgctgtttgaccacctcaagggaaacctgcattcacggcggtatgctgaggccaaggttacgctgtttgggcccatgccatggccgtttaatgatggtgtgctcttcttcaacaacttacgcgagaaggatccgctcctgctggactcaagctcacagagcaccagagagcttgccctggttccagagcctgaggtttcagggaatgatactgaggtgacatcaaggctgagagatggttcaacctcctctaatggtgtgaaaggtgcacgctatggtgcaaaaggccgtgctaatggtagaactgctgctgtatctgaagatcacatgctttcaaaccatggaactgatggtcctgttgttattcctggtgtattgctaaaggatgttgtttcagatttgcctgtgcatcttttgggctatgggaatatttcatacaggatctatgaagctagcaagaactgcaggaagataagcaagatctggtgtgcttgggtaggacaaggctcccatggttttgagagttgtaacacttatgagcaatctggatttgccatagtcaacttctcttatacctatgatttaggcaggaagtggtcttctgaggaacaagacctgtctgtctctgctggatctttctttgtaattgatgatgctggacaccgtggaaagcgaatgagaaaatcattctctgatcaagaagcatcttcagaagagtcaaatggtcagaacagctctttacagggcagtaggcaagctattgtgacttgttcaccggtaggtacctcaaatgatcttcaagttggtctcttatcaagcaaggcagcaaggagagagttgaggaagcagaagcgaatagcagctgagaaagtgtgtgatctttgcggcagaccaatgctctctggaaaggatgttgccaccttgctgaactgcaatacaggaaaactagcttgcagcagtagaaattcaagtggggcttaccatctatttcacacttcctgccttttacactggactattctgtgccaatacgagatgctgaacgatgaaatagctaggaaggggaagagcaaccgaggaaggaaggcaaagaatgcacctaagagaagcaaaataacgtccatagtttgcccagaatgtcagggtactggaattcacgtcaacggagatgaacttgagaagccaagcatttctttatcagaggtctggagcacatattcactcttctgctgtcagtccctgatttttcattcaggcaacttcttgcaaattacttctatagcagccgagcacctgaattggttggatatggcacttgcagatgtttcgcttcaagatgaaagcaatcgaagctcacaaagcatggctgaagagacctga

SEQ ID NO: 6630 - DNA, 534 bp, Zea mays
  Peptide Sequence Number=SeqID_48409
atggcatctcagagctccaagaccgcggacaccgccgcgcctccgccggaggttgcagccaccggagaggcggctccgggcgcggcttcttcaacaccggcacaaaaccctaacgctgctgcaaccgcagtggccggggccacggatctagagaagaagatgcgccgcgcggagcggtttgggatgccagtactgatgtcagaggaggaaaagcgcagcagtcgcgccgagagatttgggactggctcttcaagtgtaaaggaggaagagaagaagaagtccagggctgagaggtttggccttgcctcgccctcttcttcagatgaggaagctaagaaaaaggcccgtttggaacgatttggtcagagcgcaaatgtcgacaaggcggaagaagaaaaaagaaaggcccgagctgcccggacgcagccgctgttaccggcacagcttgatttgagcactctgccttggacgaggtctcagaaatattatctcctaggagactttggtgaagccatagcttttgtacaccactaa

SEQ ID NO: 6631 - DNA, 1251 bp, Zea mays
  Peptide Sequence Number=SeqID_48410
atggcggcggactgggcgtggtggatcggcctcctcctcggcgccgttccgctgctggtgctcgctgtgtggcacagcaacgacgccggccactgcgccgccttcgcgctgaagcggtggcgccaccaccgtggcgcgacgaggccgaggctcccgccgggccacatggggctcccgttcgtgggcgagagcctctggctgctctggtactacaagttcgcgcggcgccccggccccggccccgacggcttcgtggacgccaggaggagacgctactacggcggggccgcccgcgcgggcgacgtgggcgtgtaccgcacgcacctattcggctcgccgaccgtcctcgtctgctcgccggcggccaacaagttcgtcctcaactcctcccaggatggcgccttcggcatccgctggcccgcgcccgagctcgtcggcctctcttgtctggtcaacgtggagggtcgccagcacgccaggctccgcgggttcgtcctcgccgccatcaaccgccccgcctcgctccgcgccatcgcggaggtcgtccagccgcgcgtcgtggcggcgctgcggtcgtgggcggacgcgaagggcaccgtctccgccgccacagagatcaagaaagtgacgttcgagaacatatgcaagatgttcgcgagcatggatccgtcgcctgtcaccgacatgatggacgggtggttcgccggcttactcgctggattgagggcgttcccgatagacttccccggaacggcctaccgtcacgctcgcgcttgccgcagaaagctggacgctgtgttcagggaggaggtccagaggaggaggaggaggagggagggcacggtggacgacgccaccagcagggacttgatgagcgggctgatggagatggaagacgagcaagggaagaagctctgcgacgacgaggtggtcgacaacatcgtctccctcatcgtcgcgggctacgagtccacttccaacgccatgatgtgggcggtctatcacctagccaagtctccccacgctcttcacaagctgagggaggagaacagcgtcgtgagtcgagacaacaagaacggtggcttcattaccctggacgacatccctaccatgaagtacactgccaagaagccgccaaagccaggaacgtaccaggtgttcggtggagggcctagggtctgcgctgggaacatgctggcgaggctgcagctcagcatcatgctccaccatctagctgttggatacaagtaa

SEQ ID NO: 6632 - DNA, 2001 bp, Zea mays
  Peptide Sequence Number=SeqID_48411
atgacgtggacagcgacgacgtggacaacggacgccaatagctacgggacgcaatgctccgttgaatcaaaggaaagtttcgggcccgtggcaccacgcgtcgactgtagggcaggcgaagagccgggatcccggagagcgcttgagaatggatgtggaaggaggactagtctaatccactgccctgccgttaaacaagtacttgaagagcgaatgaagctcccggcgtggctcaccgccgtgccgccggaccctcgggcgtacggccacctcatccagctctgcgcggacaccggacacctcgctgctggccgccagctccacgctcgcctcgtcgcttcctccgttaccccgtccaacttcctcgcttccaagctcatttccctatactcccgcggagcccaccttgacgacgcacgcagggtgttcgacgccatcccgcggcccagcgtcttcgcctggaacgccatcctcatcgcactctcgcttcactcggccgatccctccgacgcggcccgcctcttcgccgcctccggcatctctcctgacgagatcacgctctccgcgctcctcaagtcgctcgccgactccggaccgaggttgtccgcactcgtcgcggaggtccacgccgtcgcggtccagcgcggctttggggacgacctgttcgtgtccaatggtctcatcaccgcgtacgcgaacgccggagattcacgctccgctcgcgcggtatttgacgaaatgccgcggcgagacgtggtgtcctggaactcgctgatatcgtcttacgctcgcgcagggtggtaccggcagtgcctagagctgtttcaggagttagcgagcgttcatggtgctggtggtgttagacccaacaacgtcaccgtggctagcgtattgcatgcttgtgcacaactcaaggctgtcgactttggggtaagagtgcaccgccttgctgccgagaatgggcttgattcggacattgcggtgtggaactcagcagttggattttatgccaaatgtggaaggctcaagtatgcaagagagttgtttgatgggatggctaagaaagatgcagtcagttacagtaccatgattgctggttacatgaaccatgggcatgtcgacatgggactggagcttttccagcgagcagatgttcaaggtatcagcatttggaacgcagtgattgctggattgattcaacatggtcgccagtccgatgtgcttggactactgaatgagatgattggttctggaatgctaccgaattcagccacactttcaatcctcattccttcagttcatttgttctccaccctactgggagtgaaacaagcacatgggtatgcgatcagaaacaactatgatcagagtatcggtgttgtgactgcattgattgatgcttactcaaaggctggatttcttgatgggtctcggagggtctttaaactgactgatgatagaagtgaaattgtatggacatcaatcatatctgccgttgcggctcatggagaagctgcagaggcattgcatctgttcaatgagatggtcaatgctggcatcagactggatactatagccttcactgctgtgcttacagcttgtgctcatactggcaaggttgctgatgctcgtaaaatttttaactccatgcaggctatgtttggtatcaatccagtgatggagcaatatgcctgcatggtttctgcattcagccgtgcagggatgctaaatgatgcacttgagcttgtcaacagtatgccatttgaaccaaatgcaatggtctggggtccattgcttaatggagcagcagaattttgtaatgtggagcttggtagatttgtattcgatcaactatttaaaattgagcctaagaacaccggtaattacattgtgatggctaatttgtactcaaatgctggcaaatgggaagaagctgatatcataaggaggaggatgtggggagttgggctcgagaaggttcctgggtgtagttggaattga

SEQ ID NO: 6633 - DNA, 1020 bp, Zea mays
  Peptide Sequence Number=SeqID_48412
atgacgaagaagaggaaccggaagcggaacgtgaagaggaggaagatgaggatgagatcgaggagtccgattagagttatggtgatcggtggcggtggcatgcggacggtggagtgcctgaggggaaggcttctcgcggagcgggtggcatccaaggctgcaaaggaggatgccgaccaactgaccaaaagggtacatccctacatctttatatcctacctcctgcagcagcacattccgtactgctccaccctctttttagtttctattggctcacataccaatcgaactatcttctctgtcgattttgatggtcggtttgggtcacagctggacgagctagagaagaagctcgccggcgaggtcagggtgaggaacagggcggagaggaggctcaggagggccatcaagaagctggagtccctcaagatcctggacgtcgagctctcggaaggctccattgggtcgctgtcctccaacggccgttcggatcaccaggcgccggaggccgaggagaggaacggccctggctcgttgaccactcgtgggtctgtgctggcatccggtccttccggagaccccgacgccgacgccgacagggaatcgtcagagggatcatgcacccaggtgaattcgtcctcccgggacgggagctggtgctccgttgcgtcagagcaatcccggcctggttcttgcatggatcttgccggaaacaccaccaactgcggctcagaggggagttgcggtgaccatgattcagagagggaacaccttgatgcatccagtggctgtggctcagcaaaatcggaagaagcgttctacgaaagcgacgacaggctagcgctatcgcggggtctcgttgaaccaccaccagcagctgcaggcgaaggtccaagaacgcaggataacgacacgcatgcaggagaggtccgtgccatggatcacgaggaagaagaggagaccaacaagcttgcgatcgttctagccgacccccagccacagtcgcaaggcgacgtgtag

SEQ ID NO: 6634 - DNA, 255 bp, Zea mays
  Peptide Sequence Number=SeqID_48413
atggcgtgcccctggtgctcctttttcaacgtgatcttctgcgccgtgctcggctgggtagttgaggagtggaggctccggacggtttgtgtagtggtcgcaagatttatactggttcgatcagaacccatgtttcttattcgtggtggaggtggttacaaggtggagtccaaactaagtcttggcttaacaatggggctccggcctccggatcctccttttgtttgtcagaattctgggcgtggtctcaactaa

SEQ ID NO: 6635 - DNA, 210 bp, Zea mays
  Peptide Sequence Number=SeqID_48414
atggatctcactggaagaagtccccctaggagcgttggggtggcgcagtcgcctgaaactgtttgggatcggatcctcaccttgtggtcggactgtcggagtttcggagtcggcgaccggcagcggaggcggagtggaactggaatgtggaaagtggagaggagcgatcggtggctctgctcgattctctccggcttccagcacaattag

SEQ ID NO: 6636 - DNA, 390 bp, Zea mays
  Peptide Sequence Number=SeqID_48415
atgcaggccgccgccgccgccgccccgtggacgacgaagaccctgccggtgtttgggaaccacctcggcaaccccacgcgcttcacaggcgcctcctcgtccttccacagtacgcccgcctccttcgccaagtggaggaacaaatgggactgccacaagatttcctgctgccaaaacattgtgcagagcgaaaaaggagcacgaaaggcatccagggaaaggcagccttgccagccgaggcgagccggattggctctcttggccaagcaagaacaaaccttgaaagcccagaataacgaggcaatcaataaaggaatcaaacactcagaagtttgctcagccaggcaaagtggagagtttagtaccttagtcctttcctgtcgtaactga

SEQ ID NO: 6637 - DNA, 588 bp, Zea mays
  Peptide Sequence Number=SeqID_48416
atggagcggtctctaccgctgcggaggcacatagcgtggccagggttgcagagaaggggcctagggcggatgtgcctgtgcgatgttgatgaccacctttctgatgttgaagacctaaacaatggatacatctcagaagaccttgagatttgggaaatggtgtttgaggaccagaaggcttggactcgggctaagccccggaagacggcaaactccgctccgcccgacccagggctcggactcgggctaagccccggaagacggcgaactccgctctgcccgacccagggctcggactcgggctcagccccggaagacggcgaactccgctccgcccgacctagggctcggactcaagctaagccccggaagacggcgaactccgctccgcccgacccagggctcggactcaggctcagcaccagaagacgacgaactccgctccgcccgaccccagggctcggactccgccttggcctctgccgaacgacctccgcctcgcccgacccaaggactcgggctcgggctcggccacggaggacagactcaacctcggcttcggaggaaccaccacgtcgcccgacctag

SEQ ID NO: 6638 - DNA, 747 bp, Zea mays
  Peptide Sequence Number=SeqID_48417
atggctgccaaggtcaaggctgaactgctccggtcttggcttgtcaagtccaatggtcgtgcagcgggtaagatgcttacctcctacttctctggatctttggcattgtcctggccctcattgcttcttcttttgatagctttgaaggccgagcttagggagctacacctccatttgagccgggctctagatttcgtcggggctcgtggctcctctctggtggagcgtgtagacgacgtcccgcgtcgtgttcggggtgttgttggtcttggtgtccactggggtgccactatggcactgctcatcgaggaactcaggactagctatgatctagagggggtcatcggtcctccctcagccttaccagataatgggttgatcgagatgttggatcacttcgacaacacggcaagccatgttgttcataggttgtatgtggacgacatcattcacaacactcctgatcctgcattcccttattcacgcacgaatttaactatggagctcgttaggtccatgatggggattatagtttgcacctccttgatgccttggcccccacatggcccatctatgggcgatttcaacgctgctgcgaatgtcacgcttggggcggtgttccgtgaagggaataactacgcatttgtaatcccacgatttgttttcgtccacgactttgcgtgtgacttggctgttatgatgatgcgtatgggttccaggcctgatagtcgcctagagggggggtga

SEQ ID NO: 6639 - DNA, 327 bp, Zea mays
  Peptide Sequence Number=SeqID_48418
atggggaactccaggcttgaggacccacactggttcgaccaggaacctaatgaggttggagtcaaacccaacgaggaggaggaccctaatgagctagtggacatcgatgagccttggacatcggagccacttatacatggagttcctgatccggagactcctatacatgaggctcttgcactagttgctcatgctctagaggcacctatcctagaggatccctcgttggaggaccctatgctagagcaccccttcacccatgacatatggaggagggtcatccactacatcagtggcctgaccttgcgatttacctgcatgttctaa

SEQ ID NO: 6640 - DNA, 405 bp, Zea mays
  Peptide Sequence Number=SeqID_48419
atggcccaaaggcacatttccctttcagaaggcaaacttgacagccagggcctgcctgtttgccttctgaaacatggtgtgacaccaagacccgtcttgggtgacctggaaggtgtctgcgagggttcgagccttagttgtgggagttcagacccgcatgtgcagaatctgagcatgcccgtattcgggctacgtggtagcatcgggcctgtcctagagcaggggactatcccaaggctagcagccttattaggtaaagtcggttctaaggggttggcttgctcagttccttgtcacgtggatagggctaaccacatgggtatctgccttgagacactagcagagggtaccccaattatggggtaccaacagtggccccctggcccacctcgggagaggctctga

SEQ ID NO: 6641 - DNA, 527 bp, Zea mays
  Peptide Sequence Number=SeqID_48420
atggacatgtggagttcacagttcaaaaggcagtttgcacatcttgaggagaattacagtgagaaggagaaagaggttctacactgcaaagagagcatgcttctttaccaagagaatttgaggaccttaattaagagcttaaataattggatgccttctaatttctatgttggaagctggcctgaactgtcagagattggacctggccgccatggggtaggggcaggtgtagccagacaggtgaggacagcggggaaggtgaccaactgcaggagcgatggaggtcgtgccgcactcgcaaggaacataaagcagcaacagggcggaggaactcacacgagactagaggtggaggcgatgcggcgggccccatcgacaggctggtggctagggagcggcaggcggtcgaggacaacgccaccggacaccgtcggcgcctccctcatgtcctcagctgatggggagcggtcgttggccacgagcccgccgccagaggtcggctactctctagcgaagcagcagagcgg

SEQ ID NO: 6642 - DNA, 216 bp, Zea mays
  Peptide Sequence Number=SeqID_48421
atggcgggcgtgatggagggggcctccatcacgacgagcttcgacgggctccacaacctgctggcggccaagatctcgctccgccaccgcggctacaggggctccgtgtccgtccttgggggctcccacaacaccaaaccctcggtgtacccggtggtgggcggcaccggcgattttctgtacacggagggattttacacagtaaaccaattgtaa

SEQ ID NO: 6643 - DNA, 501 bp, Zea mays
  Peptide Sequence Number=SeqID_48422
atgggggaacggggagcagaggaggacggctcgggcggctcctccctctccctcatgtgcctggaggacggcgccgacctcgacgccggtggctccgcggagagcgccgacgacggcgagccggccgtcgttgctcacagcgacgccggtgaggaccaggaggaggagtacatggactacctcgtgtccaaggagagcagcttctgctgctccccttcctcctcgcccgtctcctccgacgccggcgccgagacgcgcccttcgtccacggcgtcgtcatccgacgagtggttccgctgcgcgcgccacgccaccgtcgcgtgggtccttgagccgcccgatttgcagacgcgggcttacttcggcttctcccaccgcgcggcgtacctggccgtctcctacatggaccgcttctgcctccgccggtgcatggacgtgcgtcatccgtacatcccatcccaaccacggtcgatttcactgacggcgccgccgattcactga

SEQ ID NO: 6644 - DNA, 540 bp, Zea mays
  Peptide Sequence Number=SeqID_48423
atggacgcgacggagcagaagccggcgctggggaactggggcatgggcgcgcggtcctgcgtgcgttacttgaatcatgttgatccatgcgcaataaatggtggctggctgcgaactggtgacattgcctacttcgatttcgatgggtacttgtatatagtgggccgcttgaaagaggtgatcaagtacaagggatttcagatagctccagctgacttggaagcagttttgatcgaacaccctggaattgttgatgtggctgtgacgtctactgaggatgaagaagctggagaggtaccagtagccttcgtggtgaggaaatctggaagtggcctatcgtgcacgcaagtgatggagtatgtagctaagcaggtgtccccgtataagaaggtgcggaaggtggtgttcgtggagtcgatccccaagtcgccggctggaaaggttctcaggaggcttctcagggaatctcttgcagctagcgctgttgctggtccaacaagttattccgagtccaattccatgcgccattcgagactgtaa

SEQ ID NO: 6645 - DNA, 291 bp, Zea mays
  Peptide Sequence Number=SeqID_48424
atggagggctggtctgcccgcgacggtggtgcgaggggcggcagatctagcgccaggcagcttgcttcgtggagtggagcaaagccggcgcggctccgcggcgcacgcacgcaggaccgcgcgcccatgccccagttccccagcgccggcttctgctccgtcgcgtccatgtcagcaggtactctccctgtctgtgggatatggttggcttcggggaatggattgtggggctggttggcacgtgccagcggccatcactcccgagatctgagtgccgtgcttgaggcctag

SEQ ID NO: 6646 - DNA, 1398 bp, Zea mays
  Peptide Sequence Number=SeqID_48425
atgcaggacgccgtggcgacccacggccccgccaatgccgccgccggcgccaccttctactgcgccgccgccggcgtgtacgcgagcacgcaccctccggtggccctcccgtccgacccctccctctccctcgtcccgcacatcttcgcccgcctacccgccgcccgccccgacgccccggccctcgtcgacgccgccactgccgaggccctctcccgcgccgacctccgccgcctcgtatccgccctcgcggcgggcctccgccgccgtcggggcctccgtgagggggacgtcgtgctcctcgctctgccgaactccatcgccttccccgtcgcgttcctcgccgtcctcgccgccgggtccatcgccaccacaatgagcccgttcagcgcccccgccgagatcgccgctagggttcgggacaccagccccgccctcgtgttcgccacgctcgacaacgtcgggaagctcccgccgttgcgcgtcccggtcgtcctcgtccccgacgccttccacctcgcggacgagggcgcccccgagttcgcacccttccgcgagttgctgctgctcgattccgagccactgccgggcccttcggtcggtcaggacgacgcggccgccatcctctactcgtcggggacgggcggccggagcaagggcgtcgtgctcacgcaccgcaacctcatcgccacggtcgagctcttcgtgcacttcgaggcctcgcagtacgccgcacctgcttgtgataatgtctacctggcggcgctgcccatgttccacgtctacggactctcgctcttcgcggtgggacttctctcgctcggttccacggtggtcgtcatgaagaggttcgacgcaggcgaagccgttaagaccattcgcagattcaaagtcacgcacttcccggtcgttccgcccatcatggcggcgctggtgcacaccaccaagccagcggcaatgccgttggaatgcttggtgcaagtgtcaaccggtgcagcgccgtccagccgcaggctcatcgacgacttcgtcaaggctttccctcacgtcgatctcattcagggttatggcatgactgagtctgctgccgttggaactcgtggcttcaatacttcaaagcataagaagtatggttcagtaggactcctggctccaaacatgcatgcaagaattgttcatgtggaaactggttgctccttgcctccaggctcttgtggggagctctggctccatggtccagctataatgaaagcaacgccgctccattgtctccctccattacgcgcaacgaggggaggaatcctcgaagggatgagggaccgcccaactgagtggggctatgagttcgccaaagagttcgccaatcaagggttaccaggaaacaacgtccttccttag

SEQ ID NO: 6647 - DNA, 2433 bp, Zea mays
  Peptide Sequence Number=SeqID_48426
atggcgacgctcgaggacctgggcgtctccgccttcatcaacatcctgggcgccttcgtcttcctgctcctcttcgccgtcctccgcatccagcccgtcaacgaccgcgtctacttccccaagctctacctcgcgcacaagcgccaccagcacgaccacgccgcccgctccgccttccgccgcttcgtcaacctcaacctctgcacctacgtcaccttcctcagctgggtgcccggcgcgctccgcatgtccgagccggacctcgtcgcccacgccgggctcgactccgccgtctaccttagaatctacacgctcggcctcaagatatttctgcccattacgactctcgcccttctggttcttatcccagtcaacgtatctggcggcacattacttgatctaagaaaggaagttgttttcagtgatatcgataagctttccatatcaaatgttagccctggatccaacagattctttatccatctcttgatggcatatgtgttcacattctgggtgtgctttatgctgtacaaagaatacagcaatgtagcatttatgaggttgcatttcctggcttcccagaagcgctgtgccgatcatttcacagtgattgttagaaacattcctcgtgtctcaagtcattcaacttctgaaacagtggatgagttcttccgaagaaatcacccagaccactatcttggtcatcagcctgtttacaatgcaaatcggtatgctaaacttgtgaagcaaaaggagaggctccaaaactggttggattactacgaactgaagttcgaaaggcatcctgagagaagaccaacaagacggacaggatgccttggtttctgtggcagggaagtggatcaaatagactactaccgggctagaatcagcgagcttgagaggaggatgacatcagaacgacagaaaattctcaatgacccaaaagctgttatgccagtttcttttgtgacatttgactcgagatggggtgcggctgtgtgtgcacagacacaacagtcaaagaacccaacccaatggttgactgattgggctcctgaaccgcgggatgtttattggcaaaatcttgccatcccatttttctctctcagtatccgcaggtttctgatgtctgtcgctgtctttgctctagtgtttttctacatgatccccatcgcgtttgttcaatcgcttgccaatctcgagggtcttgaaaaagttgctccttttctgaagccagtaatagaagcacatgtggtaaaatctttccttcagggatttcttcctggtctggctctgaagatttttctctatattctccctactgtcctgctaatcatgtcaaaggttgaaggctatgtctctttatcctcgctggaaaggaggactgcttcgaaatattactacttcatgctggtgaacgtatttcttggaagcataatcgctggcacagcatttgaacagctatattcgtttctccaccagcctcctacacaaataccaaggaccattggggtagctataccaatgaaagccacatttttcatgacatacgtaatggtagatggctgggctggtattgctaacgagatccttcgagtgaaggctctggtgatataccatctgaagaacatgttcatcgtgaagacggagagggacagggatcgggcgatggatcccggcagcataggactcggagaaaacctcccgtcccttcagctgtatttcctcctcggcctcgtgtacgccgtcgttaccccgcttctcctgccgtttataatcgtcttcttcgcctttgctttcctcgtctacagacaccagatcatcaacgtgtacaatcaggagtacgagagtgctgctgcgttctggcctcaggtgcactcccggataatagctagcctactcatctctcatgtaactctgtttgggttgatgagcacaaaggaagctgcgtactccacccctctgctcatcttcctgcctctgctgacgatctggttccacaaatactgcaagagccggttcgaaccagctttcagaaagtatcctcttgaggaagcaatggcgaaggacaccatggagcacgcatcggagcctaacctgaacctggaatccttcctggctaacgcttacctgcaccccatcttccgccttttcgaggaagccgggaaagaggaggagacggtggaggtgaggatcgacaaagccgagaagcagcagcatcgccatgaggaggacgaggctcacgcgaggagctcgtcgcagtaccgggaggaggagactcacttcaggagcacgcacgagacgcattaccaccacgaggagagccacgtcagcaggagcacccagtatcatgagggcatccacgtgaggagcgacacggactcgccgtcgccgccacacttcgtctaccactacgacatccagcagtga

SEQ ID NO: 6648 - DNA, 228 bp, Zea mays
  Peptide Sequence Number=SeqID_48427
atggggtatatagggctcatgctgctcctacacctgagcgtcattctagcagagggagagagaaccagtgagttggccgccaccgtcgagtgcaaactttgtcgcttcgtcgaagcactagcacttcttgggcaagacgcagaaatggcgccgccacgtggggagtttcggagagaaccccgtagaactccaaaatcctacgcgcagtccagaaccgtgggaatttga

SEQ ID NO: 6649 - DNA, 714 bp, Zea mays
  Peptide Sequence Number=SeqID_48428
atggcgtgctgccccacgccgagccgtggtggtgctggcgaaacagacaggggtgcagtgcatcccgcggccgcggcggtgcggaatgtgcgagttggcgcgggcggcagaccacgtggatgtcacggtgcggcgggcgaggtggccgagcgccatggcgtggtcgtggtggagagcacgttgcagacgcggtacaacgatgcagtcgttgaggaggcgctcgagcctatagcgcccgcacctggacgcagcgtcgtcggccctccggctgcccggtatatgaacggtgagtggcgcaggcaaagggtggatgtcggcgggctgcaagcgacatggccaaggccaacgaagggtgtgcggacatggcaccttcacgatgctgtggtgggtgcccatgctaaagtggtgtgcggtgcggacagccggacagcgccggtcgtccgctccgcttcactggtggctatcacccgttgtcaacagagtgcagtagagaaatgggatttgagaagaagcaagaacacaggaatagggtggaggaagcaacagacagtagtttcagttgcaatattctccttacagatgcctttccctctcgccaagacaaggcttatctattaccttcacctagtctggtgggttggggcgacgaggagtaatagaagactgtacacatggttgaagcttcagataaacccaatcacccaactggaatga

SEQ ID NO: 6650 - DNA, 195 bp, Zea mays
  Peptide Sequence Number=SeqID_48429
aatgaagaagctatacaactgaaggagcggtatcgggcaacggtcggaaaggagctggaagatatagaaaggagacattgtgatatgacttcaatactgcatgcgctaggcatctcagttgaaggtggtgagctgcaaatcatttgcacaaagagtacagcagagatagggggtgacaatgatacagcgatgtga

SEQ ID NO: 6651 - DNA, 879 bp, Zea mays
  Peptide Sequence Number=SeqID_48430
atgagcaagacaacatcctatgcaaaagcttatctaagacctagaccagtgagacctctggcatcagccatgcgccagagatatattgtaaaaactatgtatctagaaaagttagaacgacttacgggcaattggtgccatgaatatagaaaactaaaggcgaaggtcgagacaatacagaaatgtcaaaagcacctcatgggagaggatcttgaaactttgaatctcaaagagcttcagcaactagagcagcagctggagagttcactgaaacatatcagaacaaggaagagccagcttatggtcgagtcaatttcagcgctccaacggaaggagaagtcactgcaggaggagaacaaggttctgcagaaggaggtaggcagacgctgctgcaactcaacgtcgcctcatccatgctcaactggccctctgttttctcatgaaccaaatcaaatttacagaaagcgttactcctgcatgcagctcgcggagaagcagaaagaccagcggcagcaagtgcaacgggaccaaactcaacagcagaccagttcgtcttccacgtccttcatgttaagggaagctgccccaacaacaaatgtcagcatcttccctgtggcagcaggcgggagggtggtggaaggggcagcagcgcagccgcaggctcgcgttggactgccaccatggatgcttagccatcctgagctgctgaaggtgaatggaggatgcgccaaggcatgtggaaaaaagagtgggatggctattaggatagccgaggtgagaagacaaggagataggtttatcttagtcaagcttgtcttgggtgatttggtcttgaatgtaattagtgtgtatgcccccaaagtcgccacgatgagagtg

SEQ ID NO: 6652 - DNA, 711 bp, Zea mays
  Peptide Sequence Number=SeqID_48431
atggggcgcgggaaggtgcagctgaagcggatcgagaacaagatcaaccgccaggtgacattctccaagcgccgctcggggctactcaagaaggcgcacgagatctccgtgctctgcgacgccgaggtcgcgctcatcatcttctccaccaagggcaagctctacgaagatgagaggctaaaacccgacgaaaatccctcattgccatctttagtcgtgtccgatcgccagagcacttatctggatgctcctggccggcgccagcgccgctgcccccactatggcctggccacaattgcaagcgccgtccgttgccccctggggtgtcggatacggtccccagggcaccggatccagcggcccaggctggcaccgctgccgccgtcatggatgtggaggaagaagcaagatgaaggagctctcccgctatctccttgcctaagccctaagcatgggcattggccgtcgctgctgccgcccaagcagacgaccccgctgagccccacgcagatgacgcgagagcacgacccgtcgcccccctaccgcctgcaccacaaaaacacgaggaagagccccgccgccatcccggctagctgcatggccatgccgacggcctccaacagcagcatgccagcatggtgggagcaactcaggggctcagggccgtgtatttatgctacgcataaaagggtttgctatgtttcattttga

SEQ ID NO: 6653 - DNA, 711 bp, Zea mays
  Peptide Sequence Number=SeqID_48432
atgccgcgaaacttccgcaagcggggcatcgagcaggacactgacgaccgctccgacgacgaggacactcgccgcatcgccctcgaggagatcaagtacatgcagaagctccgggagaggaagctgggtatccccgccgacctcgccgccgcatccactaacgggtcctccgcccgtggtctattgggcaccggggcagcggtcgccggtgaggccgagaaggaggacctcgtcctccaggacaccttcgctcaggagaccgccgtcactatcgaggaccccaacatgttgaggtacgtggagaccgagctggcgaagaagaggggtaagatggttgatgtgggacacaaggaagagatggaccatgtggacgagctctataccgtgccagaccacctcaaggtaaagaagaagaactcagaggagagctcgacacaatggacaactggcattgctgaagttcagctgcctattgagtacaaattaagaaacatcgaagaaaccgaggcggctaaaaagttgctgcaagagaaaaggcttgcaagaaaaccaaaaccagatgcaaacattccatcaagttatagtgctgattatttccaccgtggcaaagaatatgatgaaaaactgcgaagaggtttgttacctgcaccttttcaagattattttgatgagaagctggagggaaccctgttgataattcatatgatttga

SEQ ID NO: 6654 - DNA, 812 bp, Zea mays
  Peptide Sequence Number=SeqID_48433
tcccttgcgtcgaacggctcatcgctggacctcaattcgtcaggcccgtcggaggccacgactctaggtcgtctccggtactcgccatgctcgcgctgggggtctccggcgtccccgtcatacgcgagacctcgtcgccaccgacgacgtcgtgcagtactactactacggcaactacgccgacggtcacagccacccgggcgtgcagcggcgatcgctggcgacgggcacgttctgcgtgggctgcagaacgcggaccggcgggctgcaggccgggctcagctgggcgtgcggcccggccacgccgacttccgccatccagccagcggcgcctgctaccagcagaacaactgccggcgctcgcgtcctacgcctacaacgactactaccagaggatggccagcaccggcgccacctgctccttcaacggcaccgccaccacgaccaccaacgacccaagctcaggatcttgcgttttcgcgggaagctccaactcgagcgtgccggtgggagcgagcccgccgaccagcctctcccctccgacgggcttcacacctccagtcggctccagccccccgtcgtcgtcggagttcggccccccagcggccggcaccaccccgccggctggaggcggccttggacctggattcggcaccccgccgggctccttcaatggcaccgggtcgttcgggcccagcggcacgctcaacccttacaacggcgtgtcccgtgggttgccgcgcgcgggcttgttcacggctctgtccgccgctgcggtcgccgttcttctcgtgtccgtggatgccatgtga

SEQ ID NO: 6655 - DNA, 765 bp, Zea mays
  Peptide Sequence Number=SeqID_48434
atggcgctcatgtacgaacagatagaatttgtaaatatatttacagttctatctagctattctgagggatttgtaatgcattgtgctttgagttatcaccttcgtgaaccatttggaagatttggccgcgttaaagacatatatctgccaaaggattactacactcagcaatttagaggatttgggttcgtcgaatatgttgatcttgaggacgcttctaatgcaaagcactatatggatgggcagatagttcttggaaggaaacttcgtgttgtttatgcacaggacgtcaggaagtcaccttctgccatgaggttgagggccatagaaagaagcggcggaggtccttcttgtgtccggaggtcgcgctcaaggtcacctgggtaccatgattctcctaggggtagatcacggtcccgaagtcgaagctactcggcagcacaacactattcaaggtacgacttgttgccatcctattgtcctcgtctcctcgacctcgagagagatcgtcaccagctgacagcggatcaaagagtgcaagccccggtgctagcaggtctcctcccaggcagagatctccttctgatggcgagtgaggaaaataccggctgtattccttatttatgggttactcgcttattgctagcattagaaggcacttatttttgtaaacctcttggttcactcatctctcttgtggacacgtttaagtacggacttaggatttttgtagagtcatcattttacggtatcatgccgttttag

SEQ ID NO: 6656 - DNA, 594 bp, Zea mays
  Peptide Sequence Number=SeqID_48435
atggactgtcatcatcacttcttcccatgttgttctaagaaggcaagagaaaataattcaaagcgggacagaccatgggagtgcactgcagcactcacctcgacggggcttgcactctttgatctgctgtcagccggtgaagatctctctcgaggtcgaggagacggggacatgtcaagatggtgtccggttccacaagttaaccggaaatcttcatgggtgatagctgtgtcagattcttccgcgcatagggcaacagcagctggacgcacgaaggtagctggtaacccagataattatgcatggctggaggccataaacactccagtgaatatcaacatgcacactggcatgtataccggtcgaattgtacagtcagaagagtcagggtggagggtgctgagcctccagcttcctgataacggcattggtcacagcccagttgaaccctcggtactgaagccacctcaccatgcgcgcacgtcggctctccagggtcaagctttgcccacgctgccactgtttggacgcctgagcaaacagacgatccatggaagcttcggacggttgatcattgtgggaacaacaatataa

SEQ ID NO: 6657 - DNA, 465 bp, Zea mays
  Peptide Sequence Number=SeqID_48436
atggttttttactcggatccgttctgcgcgcaaggctggcaagaggcagcgcggtcgggctacacagtggaggaagacggccgccggaggttcgaggtcggctggggcagggctatagagcgcgtagaggagagcccgaccaccatggctaaggctgctcgcccatggatgacgcagcgttggatgacacccggcacaacagtgactgcactctccacgacacttgcctggttccataggcaggttttgacattgggcactggacctgaaacaattgacattgtcactggttggggcaggagaagcagggtaactgcatcttcgctggttaggcaatcgattcaaaagcttctaaacctctttgaatccccattcttcaccacccgtggaaatactggctgctttgtcggctgtggggagccactcaacaagtatccttatgttgggcgcatacatttattgtaa

SEQ ID NO: 6658 - DNA, 1125 bp, Zea mays
  Peptide Sequence Number=SeqID_48437
atggaggaccttgcccgagccaccaggctgtcaagtgtaatgctatccatttcatatgctgtcaactgtaatgtttccccgattgtgtatgctttcaagaattgttttgataatgcactaaatgctacagtgagtgagttgaacttcaagacaatagttgatggcctaggtgttgttctctatcagtacccattcaatgtaccagcatactatgcattgatactgcgatcgctcaccatactagaagatttagcactctatgctgaccctgattttaaggtgcttgctgcatcatatccttactttgcgaaaaggctactgactgatcccaacccatatctcagagatgctttaattgagcttgtattcaaggatggaaaattcaggcaagctaccaagaagattgctgatgcaaagctagctaaagatttccaagcagtcctaaaagaattccagaaagcccaacgattagcaacagagagagaagctgcatatgcaccttttatttctcaagcggtcttgccacagaggcatggcccctacctcactaggacagattctggttcagcacaagagatggacagaaggctttctccagatctccctctaaaagtacaacctgtttctgctagcttggtggaatccctgcaatgtggcgacactgctgtcgagtggtggaacacgcaaaggatgtggcttttcagaagaatcacctcatacctcttggcaaccatcgacacaatctgcagaatgcttggcgtcaccgagtcgggattcaccctgacggcgaaggtgaccgatccgcaggccctagagaggtacaagaaggggattatgttgtttgggtccttctccacgatgtttgtgatcattacaactgttgcactgcttaacctggcgtgcatgatgctcggggtggcaaaggttttgttgtgtaaaggagcggtgagtctgggagctatgtttgtgcagaccgttctatgtgctctgatagtagcgatcaatttcccagtgtatgaagcaatgtttgtccgcaaggacagtggcagattaccagcttctgtcagtgtagtttcgctctgcattgtattaccattttgtatactacttccaaccaagttgtag

SEQ ID NO: 6659 - DNA, 384 bp, Zea mays
  Peptide Sequence Number=SeqID_48438
atgggcaagggcgcgatggtcgaccaccacctctccaggcacctctgctcaggacattccctgtcgttggggcttgccaccatgatggaggagcctagaggcctcggggcacaggcagccacaacacggttggaaggcctgccacaggtcgctgggagcagcagcgcgaccgtcgagaagagcgccaggatggaggtggctatcgctgcagtcgcggtcgtcgccatgggctcgcgctcgtgccgctccgggagtacatgttatggtgcgtccgtgcgcctcccctcttccctcgcttcgttttgcacgcgctatgttgctggcttctgctcccactttctctatcctagagctatattgcatagttctccgtctgaaccttag

SEQ ID NO: 6660 - DNA, 1395 bp, Zea mays
  Peptide Sequence Number=SeqID_48439
atgaaggcgctggcgtgctgccggcggcggccccaggacttgagcatcgacatggaccaagagcccgacagggtgatgacatataatggcctggagacctgcattatcaactgttccgcctatgacgatgatagtggcatcagtgcaacaacatgcggagatggctgtgtcaccgctgattcccttgatgatgaagtctctagctgctttagtaaagatgcttctggttcttccttctcttcacactgccttagcaagcaggaggagcattcgctagatgagttgggtacacccatcgcaattcatctactccctttcaaagcgaagaaaccaatcacatataccttgagtgcttcagatattgaaaacatgaagaaaaaatttgcgaagcttttgctcggttatgatacttcaggaggcgctaggggcgtttgtgcggctctggccttgtctaatggcataatcaatctctctgaactctggaagctggaaccattgtgcgaagataaaaagatcaggtggagaaaagaaatggactggttgatgtctcctacaacttatatagtggagctggttccaaggaaacaaagcggagcagatggatgcacatttgagattatgactccaaaggcccgctcagatgttcatgtgaaccttcctgcccttcagaagcttgatacgatgctcattgaagtaatggactctatgatagatacagagttctggtatgaggagagtggtagcagagctgatggtccgtctgggagagctagcttgggtgaagatttgtaccaggctataacgaccgagtatattcccatagaggaaatatttgtttccctcagtttgaaaactgagcatagtgtgctcgagactatgaaccagttggagggggcaatgtttgcatggaaccaaagaatcttagaggagcgaagcaagaggtcaccgggacgtcattcctggagcttcatgaaggacagctcgtcagaactcgacaagatgtctgcatgcatcgaaagggtcgacacccttgtgcagcttctgaaagccagatatccgaacctgcctccaacttttatagatgttctaaaggtccagtacaatgtggatgtggggaatgcaatcgtggaggcatactctagggttcttgtcggggtagcattcagcatactgtcgcgcgtggcggagatactgctggaggatgacctggtcaagaggcccaacacccccatggcctcactgaagttcgacctctcctccgacgtgtacttggccggcataacagagacgccgccgggacacgtccggaggtcccttatggatcagatcagcatggtcgacgggcgcttcaacgctgctgtgaagaagaaaggagcgaagcagctgaggtggtga

SEQ ID NO: 6661 - DNA, 105 bp, Zea mays
  Peptide Sequence Number=SeqID_48440
atggcgagagtgcatatccttgagagtcttttctttagtcgggttatagtttttgtgctgctgttgatggtgttaagtgccggtgggctcggccttcttatataa

SEQ ID NO: 6662 - DNA, 330 bp, Zea mays
  Peptide Sequence Number=SeqID_48441
atggctggttcaaaggataactctcatatctcctctagcaacattattgagccgactatggagaacctatcggctgaagaaattcagaagctggaggacgttaggaaaaagctgctggcagaaattgacgtgaagttcttggccgatttcaaggtgctaaaggttcaaaacaaaccaataaaaacatcaatgttagggttcaaaagaaaggagcaaaagaaatcgaagagaaccctggtctggcgcaccagacagtgtccagtgcaccaccgaacagtgtccggtgcaccaccgaacagtgtccggtgcaccagggtcgtacaagtctga

SEQ ID NO: 6663 - DNA, 633 bp, Zea mays
  Peptide Sequence Number=SeqID_48442
atggaaattggagctgtggcggccatgagatatgtgaaggatggaatcaaggcagcaaaggaaatcttaccttggcctgagaagccaccgccggagctgcatgagcagtgggctccttcccacatcgtcccgggtatggaaatagcaggggatggtcacaggaaaagggagcgccatcaatggcaggagatgctcacagggaaagggagcatcgcgtacgcatcctttccattgtcggcgacagcgcgggcgcgtggaatccgaggattgctgggcgcggcgcgtggaatccgaggatggggccatcgttccgtatccgtcgctttgatgcagcaacgtgcgcggacggcgcgggcgcgtggaatccgaggatggggcgcggaatctgaggatggctgggcacagcgcgtggtggccttccatagacagagcggatgcgagatctcggggcacaggggcggatgcggacgcacgggcggggcacagagggggctgagcgggggtgacgtggcagcggacgcgagcgggggaaggggagatgcgggacggggcgagaatcgcgggagcgagggcgcgaggccgggcgggggcacagtaggtggtggacgccctcgctctgctcatatgggatag

SEQ ID NO: 6664 - DNA, 546 bp, Zea mays
  Peptide Sequence Number=SeqID_48443
atggccaccgggcagcccgtacgactcgtgttggatgcctccctcctcctcgacccctcctccaccagggaggcggcggtggtggctctgcgtcccggggtagaggagctgttgcggcggttgcgctactccaacctgactgtggcaatctgctatgcagagggcatgccaactaatgaggtgctctacttatctacattattattacatgcctctgaagttgtatcttcaaaagttcacatcgatagtatttgcttcctcttgccatacttacccatcatggcccatggggaatgttgggaactgatacacttcactggtccagctaatgaatgtagcatagaggttcctggtgttttaaatgttcaaaggcttcaacagttgcttctcaccttggctactctaataaaaaggatatgtggttctgtcacttctgtgaccgttgccgtgtacggagacgaggacaagccagcgcttataatatttacagagatgtggttctgtgactgttgccgtgtactcaggctttatttcaacaggatttaa

SEQ ID NO: 6665 - DNA, 213 bp, Zea mays
  Peptide Sequence Number=SeqID_48444
atggcgctcaagatcgctgacctcggactcagccgtgccatcaccgtccctgtaaataagtacacgcacgagattctgacgctgtggtacagggcgcctgatgttcttcttggcgccacacactactccacgccggttgacatttgcaagtcaaaaggaatactggcggctcagacaagcaaatctacagaactggccgccttcttggcgtaa

SEQ ID NO: 6666 - DNA, 306 bp, Zea mays
  Peptide Sequence Number=SeqID_48445
atggctgggaaggccgctattcttgaagttgaaacactaacctgtcttgaaggttctggtgaagttttgtgtatgaataggagtactatctatttgcgtggtgctggtggcttctccaactcttcacaaccgttctcatatgccacttatccttctaatgaggtttccaatgttacattttcagattccacaccttttgctgtgtatgaagatcgcattcagaaatcccaggcacttctgtgtggcttatctggctattttcatcctctgcattcagatcctacctttgcacaggctgcaggatag

SEQ ID NO: 6667 - DNA, 399 bp, Zea mays
  Peptide Sequence Number=SeqID_48446
atggaaccagcagccgtgaaaggtatctcctgccggttcctgcaccatgtctaccccggggaaactctggttactgagatgtggcttgaaggacagagccgaagggtgtactacagaactaaggcgaaagagcgtggtcgagctgtgctctcaggatacgtacaaacagcctcccggtcatctagtggcacacaggacccctacagggcactgtactgcagagggagggtaggtagagccgtggaggtgacggctgcagctatagcgtgcactagtccttgtgtaatgagtgcacggtacggccccggctcgcatcccgaggccctacactacacctactgtggtggggactggggatcatcgctgttctcgtcggctgtgcgcgaggatggtaggtaa

SEQ ID NO: 6668 - DNA, 648 bp, Zea mays
  Peptide Sequence Number=SeqID_48447
atgggatgcgccaggtttgggcggcgggggagcgctcttcttgtttcgttcattggcgttgccgcgttgcgtcagttgtttgggttggaccttggacgtgaacctatcactcgaccaagttcggaagttccttccatatcacaaagatctagcatcttcgaaatttgcgattggaaccatatccgctttcggatttgtgtcatcaaacctattgttcaaataaacaaacgatcaagcaaaaatgagcacaactctcacagaaacgatctgctctcgccatggtaccgccctctttctcgacctctgaatccaccccatctcccctgctccctcctgcatttgttgtccttcttggaagcaggttgcagggaccaagattgccatttcgtgaacgacaagccttcatctgcagtcgaatttgttcagcagaagctgggtggcccgtcaatctctgactatgaaaagctcaaggcagagaagttggacttgcaattgaaatatgataagcttttagaaacccacaaggaaacatgcagacagatagcttctccgattatttgggttcatatcgttatttacgtaaactactgtaggatggggatattggtaactcaagatcctgtggtgatccagctgcctctgctttaa

SEQ ID NO: 6669 - DNA, 2424 bp, Zea mays
  Peptide Sequence Number=SeqID_48448
atggcgcgatccatcgattgcgccaccgacagctcggtcaagaacgtggcgctggacacactgttcctcatcgtcctccaggcggccgtcgtcatcgcgctcggcaagttcatacacctcggcctccgccgccacaacctgcccagcgccacctcccagatcatcgcggggatcgtcgtggggagcctgggtctgcacgacgtgatcgtgcacgtcgacgtggagaacgcggaggacacctacggccgctacgtgtcggaggcgagaatcttctacatgttctacgtcggcctggaggcggacgtcgccgcgctgtggaacgacatgcgccgggccaccatcttcacgtacgcgagcgtcgccacctgcctgctcctcgcggccttcgtctctggcggcatgtatggcagcatgatgcacaccccggtgaggtcgcccgagctgctggccgcggtgctcatgctgtccatcgccgacagcgcatcggttgacgtcacgcggatggccagcgagatggggctcgcggccacgcccagcggccggctcgtcgtcgccacggcgatcgcgaccaacatcatctgcatcgtcggcgagggggtgttctcctgcatgaagctggcctccagcaggaccccggactacagcgccccgcagcggctggggctgggcatcctcgcgctaatcaaggtgggcatctcggtgttgctcctccggccgttggtggcgttcatcaaccggcgcaacgcggggcggcaccgcgtcggcaactgggagctggtgctgctgctcgtcgccgtatcgtggatcggcaacttcccgcagcacgtggggtttgacgggatgccggtgagcctcctgctggggctggcgttccccagggagggccccgtggcgaggagcatcatcgacacgctcgcgtacccgctccacgccctcgcgctgcccttctatttcggcgccatggggatgcggcttaacttcagcgccatgtcgggcgccatcctggtgccggcgatcctcctgacgctgctcggtttgatcggcaagtgcgccggcaccatcgccgccgccaggttcctcaagatgccgaccgccgacgccctgcgcttgggcgtcctgctcaacatcaaaggccacgtcaacatgatcgacatgagcttcgccagttccgaagggatctgggcggaacaggcgctgatggcgatggtcgtcggcagcatgatcagcaccatcatcgctgggccggtgttcgccgtggtgtttcgcaaggaaaaggaggcgtacgagggcagccaccaggcgctggaacacatggccacggaccaggagctgcgcatgatcgcctgcgtgcacggcgcgcgcggcacgccgggcatgctcagcctgctcgagcttctggcgagcaagccacgcgcgcagcccaccatccacgtccttcacttcttcgacgtcgcgggcaagcacgacggccccaggctctaccaccagagcgtccaggacagcgagcataagcacatgagccgccgcaaggacgccacgacgcaggtgaactgggccgtcgacgtgttcaccttcgccaccggcctagtcatccgccagatcgacgccggtgaccgcggcagcgccgtgaacgccaaggccatccgctgctggacggaggacgtccgcgcgggcatcctggtgattccctaccacaaagagcagcactacgacggcaccatggtctgccggcgggaagaacgtcgccagctcaacctcgaggtgctcgagcgcgcgccgtgcactacggctattctcgccgatcgcccgttccggagaagcggcaccagcttccagctgccgaccaagatatcgacgagcacggaggccgccgggagccagggcgacgagaaggtgacgacccacgtcgccgccgtcttcctcggcggtccggacgaccgagaggctgtcgccctcgcctgccgcctcgccaagaacgagtccgtcagcctgacggtcgtccgcttcgtgctccgggaaagcacggacgaccgcgtcgcgacgacgagcgccgacatagatggggaggtgtccatggtcgtcgacgatcctgacgaggagtgcgtgtcggagttccagcgcgagtacgtggcgaaggagcgcgcggcgtacgcggagaaggcggtaacggggcccatggacgtggtggaggcactgcgcgggatggccggcgcgtatgcgctggtggtggcggggcgcggtgggcggcagccggcggagctggtggtagggctggaaggatgggcggagtgcgcggagataggcccggtcggggagatcctggcctcggacgagtcgctggagatgggctccgtgcttgtcgtacaccagaagatcgtgcccccgttccacctggacttgccgccgccagctccggcgaactga

SEQ ID NO: 6670 - DNA, 810 bp, Zea mays
  Peptide Sequence Number=SeqID_48449
atggcggaggcgacgccgacgatggtgttcgtctacggcaccctaaagcgcgggttccctaaccactcgctcctcgtggcctccgccacccccttcgtgggagccgcatccacggccgggccagcctccctcatcatcggcccctactcggtacccttcctcctccccactcccgcctccgcctcctccggtcgtgtcgtctcgggcgagctctacgccccatcccccgccgcgctcgccgagctcgacgccctcgaggcaagcgcctcgcctcctcatcaaactcgttgttccctgtccaccggtttgggcacccacatcggcgtctacgagcggcgcccgatcaccgtcgtggtcgacgggtcgggcgaggtggtgcaggcggaggcgtacttcgcgcacccgagctacgcggaggcgctctggcggcgctgcggcggtgaggaggccgagattggagagtacaccgtggaccatgccggcgagtacgtcccgaagagtgagcgccttgccgacgctgctgggcttattgacgccatccatagacgaatgttttgggaagcaggcagaccaggagacggtggcaaggcgaaagagacagggaaatatgagatggccgcagagctcgagcgaaatcctatcatgggtgcggccactgcggtctgcggcggggcggtggacggcagacggagccaacatcgcttatcaaagtcgcatctgaaaaagatgaagaaccgtctcttcgagttggagaatacaattgtcacaagtgtaggaatccagtggcatagaacgctgcctgaggaatga

SEQ ID NO: 6671 - DNA, 282 bp, Zea mays
  Peptide Sequence Number=SeqID_48450
atgaggactagacacctgctgctggttgccactcccctcctcctgctcctggcagtatcctcagatttgacggccaaggtttcagctcggtgcccggacccggagtcggtaacactgtatccaggcaagccctgcaatcgccagcagtgcaagacggactgcgccagcaagtaccacggcggcgtcggcgtctgcctcaaccccaaaggatgttactgcgagtactgcctggatcgcccctccgcccacgcggcctcgccactccgtccgcgtcatgattga

SEQ ID NO: 6672 - DNA, 543 bp, Zea mays
  Peptide Sequence Number=SeqID_48451
atggacttggaccgggctggcccggcccaattcccagcactcaacaccacaccaccaccaccgggaagcacgtacacaacagccaccaagacacagcagcaaccataccacaccaccaccatcgggaagcacgtacacaacagccaccaagacagagcagcaacaacaccacacaccaccaccggtgtagaacagaaagccgatgacccggacgagacctgcacagtccaaacccctcttgatccaccgcaacacggataccagttcgatgaacggcaccaccacacgatggatcaggacatccggaatcgagcggatcgatggatttctcgccagaactgtgaactaaatggagcagtgaagttttcaatgtcttacctgttgttatttgagagaagtcttgcagccactcaaataaaggccaacccattagaccggcccaaatgtacacctatagcgccggtggcgccgtccgagctcgtctccccttgcgaagcccctgagcctcccggctcttggcagctcgtgggagagccagcctag

SEQ ID NO: 6673 - DNA, 845 bp, Zea mays
  Peptide Sequence Number=SeqID_48452
agaagacactcagcaaagcgtcctttgccgagcgccaacactcggtaaaggggctctttgccgagcgcctaactttaccgagtgcggccctcggcaaagccttctttgccgagcgtgcacaggtgcatgttctgccgcttgccgctggcgcaccccgcatcccgcccgcctcgccctccccgcggcaatctcggcgctcgctctccccagcggcaatctcggtgtccaccgcggcaagctcgccctcccccgcgacaatctcggcgtcccccgcaatcacggtgtctgtcccttccatctcaccgccgcctcataacactcccgtctcccacgccatacgcccaagaccgagccgcctagatctgattgggttggctctcgtcgcgggggcgaaggggaagggggaggaagaaccaggaggcgtgcgttcgtccaagatgctgcagctgctgatggcggcggccttctcggcggccccgctgacgctgtacgtgccgccggtgcgcagcctcagcctcttcgtggaggccatggaggtcgtctgccgcgactgcagcccctactcccacgacgtcgtcgcccacttccgcgtcggcttctcccgcgtcctcgccggcctagcccagcccatctccggtcggctacggtggatcgatctaaaggcaacaagactgagatatccaaatctgagctcatacagaagagtgcatactgtagggtttcaggacgggacatggatcttgttgaactttctgcctatggaaatgtccggcgagggccagattcagggggctgcaaaatccaatgaagtagatatatctgaatggcgtcaaagttcgaagtag

SEQ ID NO: 6674 - DNA, 882 bp, Zea mays
  Peptide Sequence Number=SeqID_48453
atggcgtcgcggccaacgtcgcggcagcggaaggcgggacacgcatcggcggcggcggggccgaagggtctgcaccaccaccagcagctgccgccgcagtcgggctcgccgacgtcgaccgcgaccacgtcctcgtcgcgtctcacgccggagctctcgctcgacgggcccgcgtccccgctgttcgccgggttggacgaggacccggcgcccaaggagaatgtaaccgtcactgtccgcttccgcccgctcagcccgcgggagattcggcagggggaggaggtcgcgtggtatgcggatggtgacacggtcgttcggagtgagcagaaccccagcgtcgcctatgcttacgatcgagtttttgcaccaactactacgacccgacatgtatatgatgttgcagctcaacatgttgttagtggtgccatggagggagtaaatggtacaatatttgcatatggtgttacaagcagtgggaagacacacacgatgcatggagaccaaagatccccagggattatacctttgtctgtcaaagatgcatttagcattatacaagagacaccaaatcgcgagtttctccttcgcgtatcatacttggaaatttataatgaggttgtcaatgatctactaaatcctgctggtcagaatttgcgaattagagaggatcctcagggaacatttgttgaaggtatcaaggaggaagtagtattatctcctgcacatgccctgtctctcattgcagctggcgaaggtctaaactttcatgtgaaaaatggtctcacagcacggcacagaactactgaaagtatggcgttagggaaagtttcctttcaagttcctgaaaaatataagcttctggaaagctctgaaactgactga

SEQ ID NO: 6675 - DNA, 1524 bp, Zea mays
  Peptide Sequence Number=SeqID_48454
atggtcctggagagggggagggggcggctaggtcgcagggggaggcagtggcaggtgagggatgagggagagcataggcatgttgggtctaccaacttcaatctattgagtagcagaagtcataccattttcacattgactatagagagcagcccttgtggtgagtctaatgaaggggaagctgtcactttctcacagctgaacctcatcgatctggcaggttcagagagctcaagggcggaaacaactggagtacggcggaaagaaggatcttatatcaacaaaagcttgcttactcttggaacggtgatatcaaagctgactgatggaaaggctacacatattccatatcgagattcaaaattaacacgactacttcagtcatccctcagtggtcaaggacgtgtttcaattatagatgagaaatctctaataaagaagtatcaaactgagattcggagattaaaggaagagctagaacagctgaaaatgggtattattactggcacacccttgaaagataccgaggaagataatattatcctttggaagcaaaagctagaggatggtaacgtcaagctgcagtctcggctggaacaagaggaggaagctaaagctgctttgcttgcaaggatccagcgtttaacaaaacttatactggtttctactaaggcgaccccggcttctagattttctccacatcctggaccaagacgaagacattcttttggggaagaggagctggcataccttccgtatagaagacgagatataatgatagacaatgaaagcaatgaattacttcttcctgtcgaagggtttggtgtatcacttgaagattcttcaaaggaagaaaaaaagaataggaagggacttcttaactggttcaaacttcggaaacgtgatggagcttctattctgacaagttcagaaggtgataagtccagtttgactaaatcaaccgctccttcaacacctattggggaaagcgtcaactttcctgctgaaccaagaatatcaaattcattagctggtgagaatgtatcatctgatctgtttagcattggtcatggggaatttccttctggcagcattcacggcgaagaaactctttcggccagtggaaaaacgatggaccatgttgatttgttgagagaacagttgaaaattttgtcaggggaggttgcgtttaatacaagtgctcttaagcgcctcacagaggaagctggaagaagcccaaagaacgagaagattcagatggaaatgaagaagaagaccgatgaaattaaggggaagcagcaacagatagcatctttggagagagagatagctcatgcaacattaggaactcaaggaaaggtcgatacgttagagcattcaccgtcttatcatgaactacttgagcagctcaatgagaaatctttagaacttgagcagcaacaacaactaagacttttatcccaagcaagttggggatccctctacgtacttgcacctccagaggtctccgttggatatgtctaa

SEQ ID NO: 6676 - DNA, 252 bp, Zea mays
  Peptide Sequence Number=SeqID_48455
atggagtggtgggggggcggcggggcgcctggggctggggcagtccggcagtgggcgctggacggtgccgtggagcggcggccggcggaggcgcggaccgcggcggggcctggaggcggccggccgtggggctggggcctggggctgggcaactgccggcggccagcgagggtggggttgggcatctgtgggagacactggcgctgggaggcagccggcctctgggtcttgattccactggccgaacaaggg

SEQ ID NO: 6677 - DNA, 786 bp, Zea mays
  Peptide Sequence Number=SeqID_48456
atgaaggcaaacgattcgagacatatacaactctgccaatactgcactgctgtagttggtcttgacagggtaggttccaacttgtcggggaccataattaggggtaccctcaagacgcctaattctcagctgagtaagtctgacaggcagtcaggtcttgccaaaggcgccacagcgaactccgctccgcccgaccccagggctcggactcgggctaagacccggaagacggcgaactccgctccgcccgaccccagggctcggactcgggctaagacccggaagacggcgaactccgctccgcccgaccccagggctcggactcgggctaagacccggaagacggcgaactccgctccgcccgaccccagggctcggactcgggctaagacccggaagacggcgaactccgctccgcccgaccccagggctcggactcgggctaagacccggaagacggcgaactccgctccgcccgaccccagggctcggactcgggctaagacccggaagacggcgaactccgctccgcccgaccccagggctcggactcgggctaagacccggaagacgacgaaactccgcctcgcccgaccccagggctcggactccgccctggcctcggccgaacgacttccgactcgcccgaccccagggctcggactccgccctggcctcggccgaacgacttccgcctcgcccgaccccttggctcgggctcggccacggcaacagaaggcagactcaacctcggcttcggaggaaaccccacgtcgccctgcctag

SEQ ID NO: 6678 - DNA, 261 bp, Zea mays
  Peptide Sequence Number=SeqID_48457
atgcctccagggaggaagggaatacgaagcataagggaacccccaccaacaggcaaatatgcaactgggaacgcttggttgttggtggccaaacattttgaccaggagttaaatgcttgcggcgtgttgaaatttcttagacttgcacagactgtaaatattgagtccgagaaatctcactacgttcgtgttcaaacctctagcgctagtgtgcacaaaggaggtcgtctaaggtctttacaagcagatgcaaatctttaa

SEQ ID NO: 6679 - DNA, 192 bp, Zea mays
  Peptide Sequence Number=SeqID_48458
atggagacgagcttggctagagcgctggagctgggcgccatggactgggcgtggcgacctggtgccaagcgccagggagcagctcggcgagcgcaggggcgcggctcgggagagcaccatgggagcagcctgcaggggagaaatgcgcagatatttctaactccagattttagcgaaaaatgggtcgaatag

SEQ ID NO: 6680 - DNA, 624 bp, Zea mays
  Peptide Sequence Number=SeqID_48459
atgcagcagcagcaggaggaggaggctgcgggaggagctggcctgcagctgcagacgagagggaaggaggaggacgaggaggagccagtgctggccacgtgggactgcggcagcccgctgtacgactcctttgaggtcgcgtcgctgcactacgtcctagagaagcacacaatgatcctgccgttccccgacgccgccgcggggtcccgatcgcggcggcgtacacagcagcgtcggcatcatcgtggtggccaccgcgccgccatggcgcccgacgtggccaagaccggcaaccgccgcgtgggtgcaggcgcggcgaggagaacatgggggtggtggggcagcaaggccgcggcagctatattcagggctgttactctcctgttcgcttgccccgtgctggcactcggcaaagcctggaaaacactcgacaaagcctcctttgccaagtgtatttctatgccgagtgttccgccctcggcaaatgaggcagactgccgcatcctcatgtggatctacgacaccatctccagcgacctgcagcagtcgttgatgatgcaccgcaacacatggtgctacctcgaggatgaattcctcggacaggagtcccgtgctctgacgtag

SEQ ID NO: 6681 - DNA, 360 bp, Zea mays
  Peptide Sequence Number=SeqID_48460
atggagtccccaggtgggtacttcacttctttactgaaccacgatggtgcagatgtttttggctctgatagtaatttagaagttgataatgaagtgattgagcttgctgaagcgaaagcagaatttcgagaaaaacaagggaaggcattttttatctttcatgtttcgatgattcttaggcatgagccaaagtgggcatttagagaatcaaagaacaaagaccagcataaggacccaaagctgaaggatctcgtggcgtcaaagctaaaggcacctaaacgcaactcctgtgacacaaagctaaaggcacttggaggaaacttcatacgcatgatgcagagatggaaccgtgccgcctaa

SEQ ID NO: 6682 - DNA, 441 bp, Zea mays
  Peptide Sequence Number=SeqID_48461
atgggccagagcccagagggggaatctgcagttcagtggatgggtgcgtcggtcatgtggcaatgtgaagggaggcgctccagcgtgtggggagcgcgatgctccggcgggccaagtcgatcgggggctacagagggactactgccgacgtgtgtggaccgcgtcgtgtcggcgtttgggaagggagttgcgccaacatgtggtgtcacggcggtgcctgggaagggagccgcgtcagcgtctgggaacacagctacgccaccgtgtgggatggagcagcacaaccgtgtgggaatggagcagcgctggcgggtgggggatgggaagatgcgctgggatgtggggagagaggtgaatggcgaggtgggtagaggcatatgtcgagcaggccgtgtgaaggagatttacacgcttgaaaaatcgttggacgcacaggaatag

SEQ ID NO: 6683 - DNA, 717 bp, Zea mays
  Peptide Sequence Number=SeqID_48462
atggagctgcgcacctttgcaaacaacatgggttacaatgatgattgcacaatcttttggggtggcaagatgacaccattgaaatgtattccaaatacaagcgaaatacatgttgtgagaacgatcatggacaacttcggcaatgcccatgctcaaacacgagctactggccttcgcatgctagatattatcaaatgtgtggcatacaccaatatcaagggtcttgttcttcttaaagaactcaaagaacaaggcgggctagaggatcaaagtcataacatggatctttctcaatttgagaaggaagttatagagttccacagtgatctagaggagaaagctggtatgttgtatgcgttggctaaagatttcattgaaagtcagaaactagtggagactcttaacaaggaaaaagttgaaaccctcatgattgtggagtcaaaggagaaaataatttatgaacttaaagctaagaccagaaatattatggaggaaaacatggaagttgtttctaaacttaaggaacaattagtcaaagagaaggagaggcttgctcaagaggagaataagggtactacactgcaagaagagttgaatgctatgaagtctaagctagacttgtgttatacattggcttttacatctgtgccactagtctggtcatggtgctcattttgccactacatttacaacattctcagttcaactccctcatga

SEQ ID NO: 6684 - DNA, 1713 bp, Zea mays
  Peptide Sequence Number=SeqID_48463
atgagccttgccaatgccccgaaatccgccgccgcgctctattcctccctgctccagagctctatgggcgctaacgcgtttcggcaaggcaaatccgtgcaccaccgggccatcatcacgtcttccgcctcacctccggacctccacctgaataccaagctcgtcattttctactctcacttcggcgacgttgcggccgcacgcagggtgttcgacgggatgccgcacaggagtgtcgtgtcctggactgccatggtctctgggtacgccaagaacagccgtccccaggaggcgctggacctgtttgcgttcatgctccggtccggcgccaggccgaaccagttcacgttcgggagcgcggtgagggcatgcacgggcgcccgctgcgcgaggagcggggagcaaattcacgcgtgtgcggctaaagggaggttcgcaggcgacatgtttgtgcagagcgcgctcatggacatgcatctcaggtgcgggtcagtaggggacgcgaggcgactgtttgcggagatggagaggaaagacttggtgtcctggaattccctgatgagggggtttgtggagagggagcattgtaatgatgcgcttggattgtttgattcaatgctgagagatgggatgctacctgatcatttcacatttggaagtgctctaaaggcatgtggagcaatcagtgtgcttttcaatgtggagctaattcacgcttgcatcatcaagcttggttattgggacgaaaacgtcgctattgcatcacttattgattcttatgcaaaatgtcggagcttaagcagtgcgagggtgatatatgattccatgtgtgaaccagacctcgtgtcatctacagcattgatcagtgggtactccatggataggaactatagtgatgatgcaatgaagcttttctgtaagattcatcgaaagggtttaagaattgatgctattctgttaagctccttgcttggtgtttgtgctaatgtagcatcaataaaatttgggacacaaattcatgcttacatgcacaagaagcaacctatgggtgatttggcattggacaacgctcttgttgacatgtatgcaaagtcaggagaatttttggattccagacgcgcttttgatgaaatgcccaacagaaatgtgatttcgtggacttcacttattacttcctgtgcacaacatggttttggagaagatgctgtgaccctttttgctaggatggaggaggatggtgtgaagccaaatgatgtgacattcctttctcttctatcagcatgcagccattctggtatgatgaacaaagggatggaatatttcacttctatgatgagcaagtatggtattgatccaagatttaagcattacagctctgctgttgaccttcttgctcgtggtggtcagttagaagatgcatggatgcttgttcaaaatacgaatactgagtgcaagtcatcaatgtatggtacaatgcttggagcttgcaagaatcccatttatgggaggatgctcagagaacaagaaaattattggtggagacatccaaaggaaaagaagctggtttcagtgtcatatcaagataggctaggggcagcacgtgtggtcgaggtacaacaccgggtaggttcaagtcctcagaggatcaaggttggcaaccatgaagagaatggtgttgaccacaaagatgaacaagtgctcaacacggcctaa

SEQ ID NO: 6685 - DNA, 357 bp, Zea mays
  Peptide Sequence Number=SeqID_48464
atgaagattagggttaagctcacttcctttgtggctttgtccccctctccagacccagccgactccctctcccagccgcctctcccagccaccagcgtctctctccctgtctgctcgcttctcgctctgctcacttctccctcctatgccggcgccgctgcgcagtcataccaccgtgccgctagagcagtcgcgccaccgcgcccctacagctgcgaccgtgccacagtgccactagagccgtcgtgccactgcagttgccgccgtgccgtcgcgccgctggagcagacgcacaggagtaaggcgagcaggacaccttacgtcgccggggcgccttaccgcctaggcatcacctag

SEQ ID NO: 6686 - DNA, 483 bp, Zea mays
  Peptide Sequence Number=SeqID_48465
atgggcgcgcccgcctcggcaccggcgagatcggccccggccctcggacgcaccgcgcccggacaccccgcgctcggccgcgcccggccgcgcacgctcggccccgtgccgtgccgccccgcctcgccgcgccccggctcggccgtccccgcgccgcctcgccccgaccccgcccggtcccagctcggcagcccccggcgagcccgtctgccccgcctcggccgctccggcgagcccccgcccccgtcccgcgcccagccgcgcccctcggcccctcccccggccgccctggctcggccgcctcgcctccggcgagccccgcgccgccccggctcggccgcctcccggcgagctcggccgtcccagacactttggtttacaggtggctatgagactgatggttttggttatgactatggtgctggagaagatgaagctgtggaaggagacttccaggagttccaagactacgacgagttctag

SEQ ID NO: 6687 - DNA, 639 bp, Zea mays
  Peptide Sequence Number=SeqID_48466
atgatgcatctaccttgtgcaaactttagttttatatcatcaatttatcatactgcagatcgtgcaacttccttcgctataaactgtggtggcaagcaagtggagtattcagatctaatgccaattatgttctctgaagactccactgatcttggaggatcaggctttcatgttaatgctactagtcattgggtagttagtcatgtgggttctgatccatttaacgaatccaccggtattgtaaatacaagtgatatttttgaaaccaacatgcaagagctctaccaaacagcaagaacttcaacaagttcgttgtggtactatgtggtaggtttagctaacgggaactacacagtccaactcttctttgcagagatagtcataactcatggacctggaaagcgcttatttgacattgatattcaggaccagaatatcaggaaggactttgacattactaaggaagcagggggttccagaaaagccactaacataacctacgaagtgactgttgataactccatactggcaatacatctgtattggagtggacgcggcacctgttgtattccatatgaaggagcttacgggccactagtttcagcaataaaaggcaaactgaagcacgttcttgactag

SEQ ID NO: 6688 - DNA, 429 bp, Zea mays
  Peptide Sequence Number=SeqID_48467
atgtctagcagcgcctcacccttcgagcttctcccgtcaccggtgccgtcaacaccccttgccaggcacttcaataataatcctctcagtggaggttttcctcatgaactgtcgcttttaaggaatctacggtccctgtggatgtttgataattacattgtagggccttttccggcatttattcagaacttaaccaatctcacagacttgcgaatatatgggacgaatcttcaaggacctattccaaaaaatttctctaatctgagcaatcttgaagtcctgatgcttggtgatcttgcgggcaaccattcttatttaaatgtcataggagcgtgggcaaacctttcagtgttatctctgagaaaatgtggtcttacaggtcaggttcctaatactcccccaaacttgcccaagctaaaatatctgtga

SEQ ID NO: 6689 - DNA, 978 bp, Zea mays
  Peptide Sequence Number=SeqID_48468
atgaggaggggcggcacgtgcgaggggcgcagcaaagaggaggatgcacgtgcgagggacccagcgaagaggaggacgccgaccaagggaggcagccatggggaacaaggaactgagcagaggggctgctcgcgccctgccccatctcgctgcgtgggaaatggagctcagttgccgagcgtcatggatccaagcttggctggcgaccagggagaggtagcagcagtgggaagccagctggagaccgcggccgccatcggggctagaggcagagcgctggagccagacggcccggagaggaagcagagagaggaagagcagcggctgttgtggaggaaacagggagaagaagatgggggtgtcggcttcttgaggagagggatgacggccaagttcaccaccagcgccgacgccccggcctcggtgcggctctccgcagcagcgcaggcggctgcgatccagccctcctccccgcgcttcttctgctcctcgctggccgggaccaacccgacctcccccgcatcaccattgccgggggctgggcgcgagcagaatggggtgggtgaagcgggagtgcgcgagcacggcgaaggagagcgggaagacgaggcaggcggtgagcagcgcgaaggcgcgcagagccacgcgcgggatcgacgccgagacgcggaccagctcctctgcgctcagcgccgcgaggtcgctcgactccaggtccatcgccgccggcgggatgctgcttgtgtcggtcggcccggttggttcgaggagcagaggatgaactccatggctgcgcgcgcggccgccctagccttcgcggcgacggcgacggatctggaccgcggctggggtgtggccgcccccgggagggaagggatgagcctcccggggggcgacggcggctggtgtgggtggcggctgggggctagtgtgtcggctggcggctgtggtgtagagaggaaagaaaccctcctctga

SEQ ID NO: 6690 - DNA, 1110 bp, Zea mays
  Peptide Sequence Number=SeqID_48469
atggcggtggttgggggtggtgggtccgagacggacgcgacggagaaacccagcggcggcggcgcagagaagtcttgcgaggttgcggacgcggcttctcctgtctcccatccggtggaggcaggcggctactccgcgatggcatctccatttgtttgggatgatagggggaaattgcttgcgaattctttggactgctcatctgagttcatcaccgtggatggggacgccaaccggcacactcgcgcccgcatccatcttgctttggggcaggagactcgccgggatgactttgtcattgcgatggacgtggagggagtggtgcaaccggctaactttggtatgtgtgttagtcgcattcgggattaccttcaaaatgatcttagactgcatgttcttagctgctccgaacacctgtttgggctgggaatttttgaaatgggaagcattctccagaagggtagattgatctctggtgatattttcaatattgtcgacactttgggcgctttatccgactggatagagcgcaaaatttcagagaaatctgtcaatgacatgccaagaagaattgtgctcactcagggagaagtctccactggtttgggatgctcttgggccgtccctgtgtacatcctcactccgaaagacaattggaggcttggggatattgaagctcttgccaaccatgaggatgatgttcctcccaatggtaaccctcatccacttctagaagaagacaatgatgaagacttccttcaagctgagggagatttcatagaaaatgtagataatcacaacttgggggtgttcagggtcctactcagggaagccttaaagcaaaggcaagtggttaccaaagaaatatatcaaaggcagatgcctaggcaggccaggcatattgtcaagaagaccagggtccctggaggtaccttctcaacatctaccccatttggaatttatctagacattaatgctatcaccttgcagaaggtgattgttgagaattgcggagtgccccttgtggaggcatccctggaggtgctacttcgtccggacccaggagtggagggcagcatcatccccgtaggacctctgcaaaaaccatga

SEQ ID NO: 6691 - DNA, 360 bp, Zea mays
  Peptide Sequence Number=SeqID_48470
atgtcacagtggagccagaaagagaacaagatgtttgaagaggcactcgcctactatggcgagggcacacccaaccggtgggacaaggtgtccagcgccatgggaggcatcaagtctgccgaggaggtgcgctgccactatgaaaatcttgattacgacgtcaagatgattgagtcaggcaatgtgccgtaccccaagtacaagacacagggattctggacccgagctgaagctgcacccttgcgaacgccgaggtcgccgcacgacagcacgtgggatgccttgcggccgcagacgccgatggccgacatagactcctctaatcgacgtagagtcgaagagaagcgaagaatttggtga

SEQ ID NO: 6692 - DNA, 654 bp, Zea mays
  Peptide Sequence Number=SeqID_48471
atgaccgttggtggaggctgtctgtcgtatggtgcaccggacagtccgcttgcggagacaaaaacaaggagcatagaagaggaagtaatcaagctgcagaaatgcttacaggacaaggatgagcaactacgttcatccacaagtagcacggaacagtaccatcatgagttggatgatcttagaacacatctgccatttactcaagctacaggagaagtaggtgagcagcttgatcttctccagaaggatgtacaagcaagggaggtctcacaaatgcaacttaaagatatagttataaggatcgagaccgacatcatggatgaagttgccaaagcttttgaaattgcgacgttgagaggggaaattagaatattgtctactcactggatgaacaaaaccaagaaccttaaatcacagttaaaaaagcacaagagaactgatcaggagctgaagaagagggttctgaagcttgaattttgtctccgatcctgtcatcccctgatattattatgcgctcttgtcacaacaattgagaacatgaacctgggggcatggcgtggaggggcacccacggtagctcatttgtttctctacgtccagttcttggaaaaggctacctgcactaattcagcattgggaagtgtcgtgggatga

SEQ ID NO: 6693 - DNA, 261 bp, Zea mays
  Peptide Sequence Number=SeqID_48472
atggggggcgggagacgcgcgacttggcccttgtgcagggtggcgaggatggagctcgttccggacctggcgagcacgtcgcagagcggacggggattgcagcgggcgacgcgtgacttggcccttgtgcggggtggcgaggatggagctcatcccggacctggcgagcacgtcgcagagcgagcgaggattgcggagggcgggcggggattgcggctggcggatcgcggcattcgcgacgggtgggcggagggcgggtga

SEQ ID NO: 6694 - DNA, 690 bp, Zea mays
  Peptide Sequence Number=SeqID_48473
atggattgggcgcaggaagaacagagaccgaactcagcgagctgcgcgcagacacgcgacgaccatggcaagggagcagagaaaattgtgcggacggctggaacagagacggcgagcacgcgcgcacaaaaagcagggcgcgcagaggacagggaactgcgacgacgaaacgccatagctggagcaagagcgggacgcgaactaggcgacggcagcgcgcaaggacgatcttggctaggggaaaaactccgcgcgcagggatccgagctgaaaggagccgaggaagatggacgccatgggaagaggaagaagcagctgggcacactgcggcttggaaccgatcttagaaacggcgactggcacggacgggaggagttcgcggacaaggaagttccagcaggcagagaggcaccgcggccaccatggggaacgagccagagctgcgcgcgcgcgcaagaaaatcgctcggcagaaaggacggacagggagctccaagcaccgaactgcagccggaaccagaggcactgcgagcaggtagacctgggagggacctcgctggctgaacgagctggaagagagaagcaaggggagggcgcagggaaagaagaagcgctcggcgcagggagctgggcgccagagcaggaggcttcagggtgcggcgcagggacacgcgcggtcaagcgaacttga

SEQ ID NO: 6695 - DNA, 447 bp, Zea mays
  Peptide Sequence Number=SeqID_48474
atggattgggcgcaggaagaacagagaccgaactcagcgagctgcgcgcagacacgcgacgaccatggcaagggagcagagaaaattgtgcggacggctggaacagagacggcgagcacgcgcgcacaaaaagcagggcgcgcagaggacagggaactgcgacgacgaaacgccatagctggagcaagagcgggacgcgaactaggcgacggcagcgcgcaaggacgatcttggctaggggaaaaactccgcgcgcagggatccgagctgaaaggagccgaggaagatggacgccatgggaagaggaagaagcagctgggcacactgcggcttggaaccgatcttagaaacggcgactggcacggacgggaggagttcgcggacttagaagttccagcaggcagagaggcaccgcggccaccatgggaacgagcgacgaatctctag

SEQ ID NO: 6696 - DNA, 576 bp, Zea mays
  Peptide Sequence Number=SeqID_48475
atgactgatgacaacatacgcgtacaaccagggtcgtcgtggtcgtcgtcgtcgtgttacctggaaggatcagccgcgctgcctggtgtctgttgcccgcccgtctataaatgtttgctgctgcagttgctgctccatcacaagccagctgccggctgcacctgcacagcgcatcgaacccatcggcacccggcgcgacggccatcgtcccgtccgttcatcccctactgctcagacctgtcgttcgccacaacatctgctggtcctaatccccagcgcggcagcgcgatgaagcaaaagatcgtgatcaaggtgtgcatgccatgcgacaagtgccggtccaaggccatggggctggccgccatagaaggggtgagcaagatagggatcaccggcgacggcagggaccagctggaggtggagggcgacgacatcgacaccgtctgcctcgtcaactgcctgcgcaagaaggtcggccgcgccgacatcgtcaaggtgaaggagttgaagcccgagccccgaggagaagccgcccgaggagaaggagaaactgttctgctgtggcctcatcagtaa

SEQ ID NO: 6697 - DNA, 411 bp, Zea mays
  Peptide Sequence Number=SeqID_48476
atgaagcaaaagatcgtgatcaaggtgagcatgccgtgcgagaggagccggaccaaagccatgacgctggccgccggagcaaatggggtgatatcggtggcgatcgccggggagaagctggaggtggtcggcgacgacgtcgacccggtcaggctggccagctgcctgcgcaggaaggtcggccacgccgacatcctgcaagtggaggaagtcaaggacaagaagccgtccgaggaccccaagccgccgccggcgccgccggcgccgcagcccgtggtcgtgcacccgccgccgccgcactggccgcactgctaccccggaggctaccaccaccaccaccaccaccaccaccacccgccgccgccgccggtggtcgtctgtgacgagcccagcggctgccacatcatgtaa

SEQ ID NO: 6698 - DNA, 444 bp, Zea mays
  Peptide Sequence Number=SeqID_48477
atgaagcaaaggattgtgatcaaggtgcagatgacctgcgacaagtgccgtaaaaacgctctggctctagcttgctcgacatatggagtgcaatcggtggggatcgagggtgaggagcgggaccaccagctcgtggtgatcggcgacggcgtcgacgccacctgcctggcgagcggcctgcggaagaaggtgaaggcgggcagggcggacatcgtgaaggtggaagcggtgggcgacgagaaggaggcgacgacgaaggacgacgcggccgccagtagtggtagtaatcctaatcccgtggccgggtggccgccgcagtggtacccctaccatcccggctactactgcccagggccgggcgtcgtccacccgtacgccggccactgccttgtcgaagacccttgcgccgacgacgaggctccgtggcggtgcaccatcatgtag

SEQ ID NO: 6699 - DNA, 486 bp, Zea mays
  Peptide Sequence Number=SeqID_48478
atgccagcgaccggttggttcctctctggcctgcttctgtcagtgaatccaggaatttcgttccgtctatggaaactccgagacgaggcgagcgaggagagacaacacactcgacactgcgtcgacgcttgtgcccccatggaaactaaagcctttctgcccgaaaatgacctggcaacgaacctgcggttgatacgccggccgggcgttggccgggaggggaggacgtcgctcaagcttcaaattgacacgccgcctactgcaggtgcggtgcggtgcagtgcagggcgaggagagacgggtcgtcgattcaagcttacacacatgcacgagtatgacatttgtggaaagattgtcaacgatgctaagcaaaccattgtaaattcggggactcaagtgacacagcatgccatgatccggacaccaagtggctccgacgtggcatgtcacgtcgacatccggttttacaaacccgactttatataa

SEQ ID NO: 6700 - DNA, 339 bp, Zea mays
  Peptide Sequence Number=SeqID_48479
atgaggactgatccggcgaacagcgacgcggagagcaaagcgaggtcgcggccgggtgaactttattacgcggactgctttgtggtctggacggcagtcgcgatgcacacgacgtcgccaagccacgacaccaccacgaccaggcttggccatgggcgcgacgacgagcaggaaagacgcgtagccaggatcccggcgcgcgacctgcagaagaacacgcgcgcgacaccaagaacccgtgctcgctgcaacatatcatcgagcaagcaaagggcgcgactccgaggggttgccataggtgttgctgctatacggctggcagagtttgccgcagcctag

SEQ ID NO: 6701 - DNA, 231 bp, Zea mays
  Peptide Sequence Number=SeqID_48480
atggcgagcagagcgcagcaaggaaatccatggcaacgccatggaggcgagctgcgccacgctgtgcatgccgcccccacggtggaggtcgtcgtagcccccgccacctcccgtcgcgtccctgttggtgatccgccatgggaaggtgcttgggggtcgcggcgcggagatagccaggtgccgagcgccacggcgaactggaagcaggggcaagcgcggaagatagcttga

SEQ ID NO: 6702 - DNA, 405 bp, Zea mays
  Peptide Sequence Number=SeqID_48481
atgagaaacgctgggaaagcagttttagcagatgcggggtggagccgttttactcatcctaatctgcccaccaacctagctacaaaaagtcatatcgagacccctcaagtgatagcggtggtggatctgctcgcagccggtggcctgagctctctagctactctgactcgcctatgtcctacaaggcctgcccaccgagttcgtgtcatgttcatgggtcttaaagccagcataggtggcagcgcggtggtgttcggcaccacatggatcggtggcacatcgctcatcgcggaaattgtcggtatggcgagcatcagtggaagggtggccacgggcaagatcggcggcttcgacatgacaggaatgcccgagacagcgataggagcgatggggggcggggcatga

SEQ ID NO: 6703 - DNA, 294 bp, Zea mays
  Peptide Sequence Number=SeqID_48482
atggaggaggatatggaggatagggaggatagcccaaaaagaaagaatgcatcatctcttcctcatatgtcgaaccccgtggaggctcgtcagatgaaggaaaagctgacgaagatgaaggaccctggaacggaggtggagaaggagggcacacaaataggcctcgaccctgacccctaccttggccctgtcctctacctcgaccgctacggtccatcagacgcgaggcaacggcagcacgagatgaggtctcatgaagtgaaggctaaggagctggctcatcaaaagaagtag

SEQ ID NO: 6704 - DNA, 339 bp, Zea mays
  Peptide Sequence Number=SeqID_48483
atgcaggtggcgtgcaactgcaccacggggacgcaccccttcgacttcgacgcatccagcaaggaggcccaggcccacatgtcatgtaatcggcgcgcccgttactgcgtgcgagaaactgcaccgccacttgcgccaatgccgcgccttctcgactgcggaactagtgccgcgattcgaggcaaccctgcgcatggcccaacagtgccaaccgagcacatcggtcacggggaccgggaaaggggacaattcgaaagggatccttctccgcgaaggaagcgggccccgagccctcctactgatcaggggttcgaaggctggcccctcagaagggtttga

SEQ ID NO: 6705 - DNA, 282 bp, Zea mays
  Peptide Sequence Number=SeqID_48484
atggtggaagccgcactcagggctgatttggtgatcagggatctcgataggatcaatggggagaaatccctttgctatttaaatttggctgaacaagatttgtgtgcagaagaaagaaagaaattaatttttttgctaaccctgcaggttttggaaacctccccgtgcaggggagagaagatacttgtcttcctagccgctgcgggtctacctgcaccgcgtcgcgtcgctactgcaccgacccgccacagccccactagcctgactccaccaacaccctag

SEQ ID NO: 6706 - DNA, 345 bp, Zea mays
  Peptide Sequence Number=SeqID_48485
atgacagccgccgctccatcaacgacctcgccctccttcctccaccgtcccgctcgcacgaatctccttcgttgcgacactatcgtgggcctgcggtgcaaggagatcgccacgctcgttgttggggcctctgcgctctcctcctggcacgacggcagtcgtggtgagccccgaccctacttcattcttgaaagcttggcacctccgcgcgggattgggtgggttggttttctagcagactggcagcagatccaggattttgatgcactgcagcacacagtctttaaagatatagcggttcacatatgtgggagcgagtcaaaaacaaagacatgcaaatgttga

SEQ ID NO: 6707 - DNA, 1242 bp, Zea mays
  Peptide Sequence Number=SeqID_48486
atgacgtttgggcgccgttgtcctatggttagggctgctggccggaaggggcgtgatactattcacgggatgaacaatacccgcgaagaagctctcacagcgggacaactagctaaccggaccctcttcgccgtcgaatgtgggaaagggaaggttgtggtggtgctggttgggagggttttgttgcgcaaggctgaggttggcggtggaaggttggttgaggtggatgggagtggagcagctgtggtggtgatcgacggtgatggtatgggtggcgtgcagggtttgacaagggagcgctgcgttggcagagttggtcgcggcagcagaagcacatcgctggtgttgtcatcgttgcctggcatctctgataccagattgttggtgctgcggcttctaagaaggaagtctgtcattctcatcgttgttgaccgcttctccaagtacgcgcacttcatcgccctcagccacccatacatggttgtctcggacacccacgccttacacgacttcatcacctccatcctcagtgaccgtgacccgatcttcattagtcacatgtggcgacctcttgaagatggctggcatcaagcttcgtttgagcacatcaacaaggtggtgtacgaccgacccttgccacctattcttctgcacgtcacaaagacaactcagacagtggcggtggacgtcgtcctgtgtgaccgtgacaccttcctcggggaggttcgggagcatcttctcaaggaccagcagtataccaagcattactatgacaattgccatcagggcgctcgtctccacaatgtgttccacgtggggctgctcaagccgttccgtggggaccctccgacgactccatacacgtgccatcgttacatgatggccatctgttgcccgagccaaagcatgtgttgtgcacccaactacgacagggcagatgacacgtccttgttcagtggcgtggcctgcctagtgacgacaccatttgggggccgcttcagcaatttaaatctgcgtgatgataagcagttttttgttgatcaccctggtgctgttccaatttccactgcccagggcgaagagctgaggaagctaattggtgctgccgcctacatcgaatgcagttcaaaaacccagcagaacataaaagcagtgtttgacgcagcaattaaggtggttctccagccaccaaagcaaaagaagaggaagaagaaggtgcagaagggatgcaccattttgtaa

SEQ ID NO: 6708 - DNA, 729 bp, Zea mays
  Peptide Sequence Number=SeqID_48487
atgagttcaaccgaagaaaaaccttcgaaagaagcctccaaccttcgaactgtatccaggatgctaatctacctgtcggggaccataattaggggtaccctcaagacgcctaattctcagctgagtgagtctgacaggcaattaggccttgccaaaggcgccacggcgaactccgctccgcccgaccccagggctcggactcgggctaagacccggaagacggcgaactccgctccgcccgaccccagggctcggactcgggctaagacccggaagacggcgaactccgctccgcccgaccccagggctcggactcgggctaggacccggaagacggcgaactccgctccgcccgaccccagggctcggactcgggctaagacccggaagacggcgaactccgctccgcccgaccccagggctcggactcgggctaagacccggaagacggcgaactccgctccgcccgaccccagggctcggactcgggctaagacccggaagacggcgaactccgctccgcccgaccccagggctcggactcgggctaagacccggaagacggcgaactccgctccgcccgaccccagggctcggactcaggctaagacccggaagacgacgaaactccgcctcgcccgaccccagggctcggactccgccctggcctcggccggacgacttccgcctcgcccgaccccctggctcgagctcggccacggcaactga

SEQ ID NO: 6709 - DNA, 372 bp, Zea mays
  Peptide Sequence Number=SeqID_48488
atggggtcggcgccggcgcggcctcgacggacagagggtggaacgacatgggtggtcgggttggggggggggacaaaggccggagcggtcggaggcgtggccaagagacgacgagccgaggaggagcagcggcgggctgggagctgctgcttgtcgtcgcagcctgctgagtgcccgcaggatctggtgggggtggcggcgacgacagcgcgcgtcggtgggggccctaatgggctaggcccatatacatgcagcactctaacagtgttggaaggacaaaaggttgttccggcgaaggccaaggatctgggcttctcctatagatacccctatgttgaagacgctctaaaggccattgcccgagacctatag

SEQ ID NO: 6710 - DNA, 237 bp, Zea mays
  Peptide Sequence Number=SeqID_48489
atggggaccatgggcagccgtgagcgcgaccgtactaatgattgcgtctggggagctgtcggcccgacgccgacctgcggggcccgcacagggatgattgaagaggaatggtggggactggggaggaagatcttggcttcaccgtgtgccaccgagacttccccgcaacgaacggcatatatatgcactgcacgtagcaggtactaccagaaccagatcggcctgagccagcagtag

SEQ ID NO: 6711 - DNA, 1650 bp, Zea mays
  Peptide Sequence Number=SeqID_48490
atgaaccctcccgcagcctccgtagcttgccgagtctgttttgtgaaaaaccccccgtgccgtcatgtcgttggatggaaaatagacggccagatttcgttttgtgcatttgtgcacggcgtggcccttgtgcattggatacgatcccctccaaccctgctatggttgctctacgtctcactcgcctcctgcctcctctacaagctcttctcttcatccaatacgagctccgagaaggcgcggcggcgcgcacctggcccagcacctctgccgctcgtcggcaacatcctggagctccgaggtgagccgcaccacgccctcgccaggcttgcagagacgcacgggccggtcatgtccctgaggttgggcactaccgacgccatcgtggtctcctccgccgcggcggcgcgcgacgtgctgcagaggtacgacaacgtgctggcggcgcggtcggtgaccgacgccggacgcgcgctggggaaccacgagcgctccgtcatctggctcccagccaccagccagctgtggaagcggctccgcgccgtgtgcaccaaccacctcttctcagcgcgcgggctggaagcgacgcgcgccacgcgggaggaggcggtgaggcagctggtgtcatgcctgggccgccgcaccggcgagaccctggaagtgggccgcgtcgtgttctcgtgcgtgctcaacctcgtctccggcgcgctcttctccgaggacgtggccggcctgagctcggaccgcgcacgggagctggagacgcttgtgagagacaccgtcgaggaggccaccaagcccaacctctcggacctcttccccgtgctcgccaggctcgacttgcagggccgtcgccgccgcagcgctgagttcatcgggaggttctacgacttcttcgatccgatcatcgcccgccgtgtcaaagctcggggcagtggtgaacatgttggtgatgatttcttagacgtgctgcttcagcttcactcgatggatcaactcagcctgcaaactgtcaagtcttttcttttggatctcttcgccgcaggaacggacacgaacacgatcgcggtggagtggacgatggccgagctgctccggcacccggccgtgatgtccaaggtccgcgcggagctgcgggacgcgctgggctccaagccgtgcccggacgagtcggacgtcggcaggctgccctatctccgcgccgtggtgatggagagcatgcgactccacccgccgagcccaatgctggtgccgcacctggccatggccgacggcgcggaggtgggcggcttcacggtgcccgccggcaccaaggtgatcataaacctatgggcgatcatgcgcgacccggcgtcgtgggcggagcccgaggcgttcgtgcctgagcggttcgtgggcgcgagcgacgcggacttccgtgggacggaccggcttgagttcatgccgttcggggccgggcggagggcgtgccccggcgcgcccatggccacgcgggtggtgacgctgctcctggcctccatgctgcacgcgttcgagtggaggctgcccgaggggatgaagccatgcgacgtggacgtcagggactggttcggcacgtcgctcaacatggtcacgccgctcaaggccgtacccgtgccttcgtcccggtga

SEQ ID NO: 6712 - DNA, 309 bp, Zea mays
  Peptide Sequence Number=SeqID_48491
atgggccaaaagtgttgtattcaggctcgaacccattgccggtgttttgggtccgaccgcacacctggagttgcccctcaaggtgccttagaagtcggcattatgtcatccatattatgctttagagccgagttcgtgatccgcccatatcttgctaggtggtgcaatttatttgctctgcgactgattggacatttgatggacgttccctggctagtcttcacgtcgcttctgtcggtcagattttgtacttcaccagctatatttggctttcctttgatccttactgatatctcatttttgtcttga

SEQ ID NO: 6713 - DNA, 123 bp, Zea mays
  Peptide Sequence Number=SeqID_48492
atggacttcacagtagagggagaaagtcatttctacgcacggccaatggagcaaatgcaaattaatgtccctaaaggcatcaaggcggagttcctcgtctgctgccccgagatgcttccatga

SEQ ID NO: 6714 - DNA, 390 bp, Zea mays
  Peptide Sequence Number=SeqID_48493
atgggttcgggcgaggcggagttcgtcgtcttccggggccgagcccgagtccaagccctgggtcgggcgaggctgagttcgtcgtcttccggggccgagcccgagaccgagccctgggtcgggcgaggcggagttcgtcgtcttccggggccgagcccgagtccgagccctgggtcgggcgaggcggagtttcctatggcgcccgaggccggacttggccgctgtcagcctcactttgtcgagtggcacagcagtcggagcgacgcgggcggcgctgtcttcttgtcagaatgccgccgccgaggtgagggtctgcagaggttatttggtggcgtctccagtgctcagcaactaccggccatggtgctcagcgacatcaagaacaagtaa

SEQ ID NO: 6715 - DNA, 294 bp, Zea mays
  Peptide Sequence Number=SeqID_48494
atgacgatgtctcttttaacgccagacgcagaagaagcccgggatggtgcctccgcgcgccagtgcatttgtgcaggcaataccacccattttaccgtctcagacaggatggttaggatcttaacccttaatgcttcatacttcttgaagaacgatggccactttgtcatttcaatcaagggtaactgtatcgactccaccctgtctgttgaggtcgtgtttgttgttgaagttggagaagctcaaagcacatcaattcaagcctgcctagcaggtgacattggagccctatga

SEQ ID NO: 6716 - DNA, 2163 bp, Zea mays
  Peptide Sequence Number=SeqID_48495
atggccgatgatggtggcagtgaggctgacgaggcctcgactggctgcaccgagggcagtagagggctggacagtggacacagccagggcgctcgtgtcggaaccgccgttgtcggcgccagagtgccagaccctgctggcaacgaccttcgcaaagatctagcccttgcttacaagaccctcggcgttgtgtttggtggcctcgtcacgtctcccctctacgtttatccgtcaatgaacttgtcatctcccacgaaagatgactacatggggttatacagcataatgttttggactcttactttgattggtgtggtcaagtatgtaggcatagcactcaacgccgacgatcatggtgaagggggtacatttgccatgtactctttgctgtgtaggcatgctgatataggcatacttccttccaaaaaggtttatttggaagaggagccactgcttcgaaatcagtctgcagcagctagaaggcctagctggctggggaaattctttgagcgaagcataacagccagaagagcgctgctgttcatgtcaatactgggaatgtgcatgctcattggggatggcatactcactcctgccatttcagttttatcagcgatccaagggttgagagggccatttccatccgtcaggaattctgtagtggaagctctgtctgccgtgatccttatcggcttgttcttgctgcaaaagtatgggacctcgaaagtgagcttcctgttctcaccgatcatggcggcgtggaccttcaccactccaatcatcggcctgtacagcatcgttcattactaccccggcatcttcaaagccatctcaccgcactatatcgtccgtttcttcctgagaaacaaaaaggaagggtggcgcatgctcggtggaactgttctatgcatcacgggcgctgaagccatgtttgcagaccttggccacttcagtaagaagggtattcagatagcatttctgtctagcatatacccttctctggtgctcacatacgctgggcaaacagcgtacctcatcaacaacgtcaacgacttcagtgacggattctacaagtttgttcctcgccctgtttactggcccatgttcatcatcgcgacgctggcggcgatcgtcgcaagccaatccttgatatccgcgacgttctcagtcatcaagcaatccgttgtcctggactacttcccgcgcgttaaggtggtgcacacgtcgcagcacaaggaaggggaggtttactccccagaaaccaattacatcctcatggtgctttgcgttagcgtcgtactaggcttcggagctgggaatgcgatcgggaacgcattcggtgttgtggtcatcatggtcatgctcataaccacagtcatgctcaccctggtgatgatcattatatggagaacgccgcctgttcttgtggcgctctacttcgtgcctttcgtcgtcatggaagggtcttatgtcagtgcagtcttcaccaagatccccgaaggcggctggctcccctttgcggtgtccatcatcctggcgatggtcatgttcggctggtactacggcaggcagcggaagacggagtacgagatagcgaacaaggtgaccgtggagcgcctcggcgagctcctggcgaagccggaggtccagagggtccccgggctgtgcttcttctacagcaacatccaggacgggctcacgcccatcgtcggccactacatcaagaacatgagctcgctgcacgcggtcacggtcttcgtcaccctccggtacctgctggtggccaaggtggacgagcgggagagggtcctcgtcgcgaggctgggaccggacggggtgtacggctgcactgtccagtacgggtacgcggacagcctcagcggcggcgacctcaccgcgcaggtcacgggctccctgcgccggcactttgggacggcggaggccggggcggaagaggccgcgcgcctggaggcggcgaggacgaacggcgtcgtgcacgttcggggtaagatgaggttctacgtgggcgaggacgccgggtggttcgacaaggtcatgctcgggttctacgagttcctgcacggcatctgtcgctccgcgctgccggcgctggggacgccgctgcaacagcgagtcgagatcggcatgctgtacaaggtttga

SEQ ID NO: 6717 - DNA, 546 bp, Zea mays
  Peptide Sequence Number=SeqID_48496
atggaggatgaggcgaaatataatgcccaggccgaagctcataaagccgaggttgaagaccttcggagacaacttgccgaagcaaaagaaaattatcgccagatttggttcccgagcgtgctcctctgcgcggccccggtggtgctcccccgcgcggccttggcggcgctcccccgcgcccccggcgcactccctcgcggccccctggcgcgcttcccgcgcgccccctactgccccctgcgtgtccccgcgcgcgcccctcgcggccccctagcagtgcccttgcgcgtgcccctgctcggcccctcctcggcggcgcccgccctatccctggcgcggctgtgcgcccccggcgtgactcgcgtggtctcgcaggaactgggtgtagttcgcttcgccgtcgtgccgttaatggggctcgatgtatgcgactcgctctgccaaggtggtgatgaggatgatggttttggttatgactatggtactggtgaagatgaagtcgtggaggaggacttccaggagtttcaagagtacgatgagttctag

SEQ ID NO: 6718 - DNA, 465 bp, Zea mays
  Peptide Sequence Number=SeqID_48497
atggagtattcggcaaagacatcgcttccactctactccatcggtattatttacccttcgccggtgcagaaaggtttaacacaaaccaataaaagatcaaagttagggttcacaagcaaaggaaccgagtgtgccctcgtctggcgcttcggactgtacggtgtgcctccaacagtgttcggtgcaccaggatcgtacaactccaaactcgccaccctcgggtttcagcaggcgcactccgctataattcaccggactgtccggtgtgccaccggactgtccggtgcaccagcagagcagcggctctttggcgcaacggtcggcagcaaaagtgctgatcagaggaacagtgcgcgaacagtacgcgcagagtcagaggcgcaccggacactgaacaatacatgcccgatgcggcaccggactgtccggtgccacatgaggacaaagcctccaacagtcgactag

SEQ ID NO: 6719 - DNA, 411 bp, Zea mays
  Peptide Sequence Number=SeqID_48498
atggggcatgccatgcgctgggctggccgcgcgccgaaccagccgcgtgcccacgctgccacacacgggcccgctgcgcgctcgcaccacgtcgcgctagagccgctgcgcgcccgcaccacaccggtcgcaggtcgttggccgcgccatggccggacgcaaggaggaagcaccgagcgctggccaggggatggccggccactgggaatggaggaaaaaatgcacggaggtggggaagagaagaagaagggctcaccagtcgaggatggtgagcggctcggatgttggacacgcgggcgagctcgggtggcggcgaaaacttcatgtgcgccgagatggggctccgcggtggcgctcgggcgggagtcacgcgagtgtgcggttttgggcgaggattggggaaaaggctag

SEQ ID NO: 6720 - DNA, 837 bp, Zea mays
  Peptide Sequence Number=SeqID_48499
atggatttggctgccctccccatcgacgaactcctccagtgggtgaagggaacagtggagaaggcggattactccgtcgtcgtgccgatgtgccccgagcagggctatgtgtccctgagttctttcgagataggcttccgaaaacgaagatgcacttattggtatggatactatattaattctattaagtgccggctggcagccgaggagaagaagaaggacgaggagaagaagtgggcccacaagaagatgctagctcgcgatgcactggaaaaggcccgcatggcacaagcgagagatgggctaccgctcgaagcctctcctagcaaggaggaagacaacgatgacgaggaggggatggaagtccgtatgggcttcagtcccgaggtcgggctctggtccgcaccgacctcggcgggcccctctggcagcgcggcgcatcctgcacgaggaccgacagcgtctctgtctggggcgcgggcgtcagccgaacctacccctatccctgcttcggtggaagaggcagggaccgtggaggatgaagtcgacccctccccaggaaggcgtcgaggcgcttgcagtgccctcgaccatcgttccaccctaggcccctgccccggggccctcataagagagggctaccgctccgtcgccgacgtccgtgacggagcatcagggtctgaggagctagatgccgaggcctgccgccgtgcccctctcaggcaacaagcgccgatcccacacaccgtccttcacagctaccaaggcggtgaagcgcggtgcggggcgtctacgggggcttcgtcccaccctcgctatgcccaggagaccacctag

SEQ ID NO: 6721 - DNA, 234 bp, Zea mays
  Peptide Sequence Number=SeqID_48500
atgtggctcagggtggtaaagatcgtcgtgtggatgaacttgagctcctgttcactccagccatcgtgtcccgccacggacgatcgcgttggcatcaccggcgttcgccgttatccagccaggctatgtgcctcgacgctttaccgcatcgcgaacggggatgaaatagaagttgaagaagcaaggactccaccaccacctgaagaacctcaggtgataggagttgtgtgctaa

SEQ ID NO: 6722 - DNA, 330 bp, Zea mays
  Peptide Sequence Number=SeqID_48501
atgaagagccagcccaatgctataggcccgcatcagcgtgacaagacgcgtcatgaccaaaccacatccgagcctcgagcatggtgtcaaagggtccccgtcgaacatcaaatgaccttcatcctagggagcctcatcacatttgccaccctcaacttctttgccaccaccatcagcgagctcagcctcgccaccctcaacgtgcccaacgccatgggcgcacgacccatgcactccgccaagagcaaagcggagaagcgacgcctcaaaaagcatggcactgcctcaaagcggcaccttaacatgcacactagaagcaaggcggcataa

SEQ ID NO: 6723 - DNA, 549 bp, Zea mays
  Peptide Sequence Number=SeqID_48502
atggcgcactgccccatccctttcgggtatgtgggtcactatggaggctctggtgctgaggtcccccttggtactgttcggtcaccagggagccggtcgcccgccccgccccgcctcgccgggttgctcggcggggaattggtcacccgtcccgcctcgctggcctgctcggcagagaattggtcgttcgccccgccttacagacttgctcggtggggacttggtcgcttgcctcgcctcgctggcccgctcggcggggacttggtcgttcgccccgcctcgctggctcgctcggcggggacttggtcgttcgccccgcctcgcagacttgctcgacggggacttggttgctcgccccgcctcacagttttgctcggcaagtgggccggagagaggttatgggcctcacctttgggtaccccgttcctaggtacccgacagcagcccccgccttcgtgcgatttctcggaatcgggtggaggctttctcgctggggatcaaagcccttggtgcgcgcaagctcatcagtatgatgtagcccccgagtaa

SEQ ID NO: 6724 - DNA, 975 bp, Zea mays
  Peptide Sequence Number=SeqID_48503
atggaatttctgggatctttagtcaccaagatacaattcatggtcatgcggttgtttggggacaagcaaccatttgtgggggtggaaaggatatatggcaacacagagctatacaacattcttgaccaagtcgatgaactattgttgcttcctgaccaaaagctcgggagaccatggtgtgacactgatctaatatgtgaaccgattctgtcttggagactcaatggtggcagcccaagcaaatgtttgttgcaactcaagacatacatagtcagacagtgggatccaggaatttctgggatctttagtcatcgagatacaattcaaggtcatgcggttgcttggggacaagcaacattttgtgagggtggaaatgtaacatccatgaatagcaacatgtccagggctttagctgacaagcgggccacccacccatgggacccaggtggaagaccagatgctgggtataagttccaagagtctctattggcgattggatcacctactggaagcgtagctcgttcgggcaaaagctgttgcagtgcgcgcgcccagaaccagtatcagaagctcagggaccttggagagaagctgcagaagtgcgctcaggatctggatctgaagttttgggaccttgtagctaagctacagcagtgcgcccagaacctgaatcacatgttctgggactttcaagctaagttcttgcagtgcacccaaagcctgccactgtatatccatcagggagcagctgggcaaccaccaatgcggcaatgcctgattcacccgccgcaagatccactgcagaattcagggatgacattgaacaaggaccatcgacgcctgatgatgcaccctcgaatccaccgtcgcctaatgccctcccgaatgctgctggctccaccactggcaatcaacacggatcagctgaggaggcaccgacgcctgatgcaccctcgaattccctggtgcagatga

SEQ ID NO: 6725 - DNA, 1530 bp, Zea mays
  Peptide Sequence Number=SeqID_48504
atggcttccctttcccccggcaactccttcatcgaggcggtgtcgacggcggtggttgcggcggatttggcgaggtggtctgggatgatgaaggggcactattcgatgaaatgcattgcacggatgtcatctgggatgaggagacacatcatggctttgactcacatggccctattgcagcaccatgctgaagcaatggataaccagatgcagggcaaggagaaattggctcaaagtggagattactatgatgagaggaaagtcaatattgaaccagacatcaacaacttgctcattcatgtcaatgaccatttctctatgttggtgattggtgcggattctaggcgaagtgatgttgtgtgggacgaggacatgttatctgacctcgatactcatggtggcttattacagttactggcatgttgtaaagatgatgagctcaaccaggacagagacactccttttctcttgggccttggtatggatcaggtggatgagatgctggccagcccgtccagccttggcatgaatgaggacttgccatctgtacctgagacacatggctcgttattgcagcaagtggcatgggacaggaagcactttgcttatgaaatgtgcacgcttattgctgagatggtcctggaagatgttctcaccgatgttggcaacctcgctttcagcattgattcaagcatgcagatcagtgatcaaccttccaaatatgcgctagtcatcgatgcttatctgctgaagacgcagtacaaaaaaccatacatttctataagccaatgggatccaggaatttggtgcaaaggtactatggcccatgagcagcaacagcttgagatatataggatgtttgagaaacaatgggattcagttatccttaaatggttcaggaatccttttgtgctgctgcaatcatgcaatggggaggatctgaatgaacaaggcacagtgcctgtaaatgacattttcgatgtattggctgctggccaggagttgaattttggcaacgtcaccttgatcatttatgggggatgccaaggagcaatgggtctgcaggttctttttgcagaattacacccttggcaccacaatgtctttacctccatagaattagcaatacagtcatggagaatcaatggtttcagtccaggaagctgcaagctcaacagacaatctatacttgttgctactaacttgcagttcaattataaagcttccaagtttgtatcctttactgatacttatcagatatacaagaacacatgcatttgtatcggagaattggaacctgctagttggagagatacttgttggctacctgagatctcacatgccaatgtgtccacacttgctagtgaggaaatagataacatgcttttccaggttggtgattttcatccaggagagagtgagcagcttgagctttacatgataacattgatacagtgggatctaggtccagtagaattttacaaatcaaactgtaggtgccctgctgcagaactgatagggtggtgctga

SEQ ID NO: 6726 - DNA, 258 bp, Zea mays
  Peptide Sequence Number=SeqID_48505
atgatggttgctcgggagagttgtattagcgtgcgcccacgggcacaccgccacgggagcgcgaaccaggctaacagcaccatccccatcgatgaaaacgtcacccctggattcgggaaggccttcgcaccacgacgcacgggtctgcgcgggttatggggttcggagtggctgaaccgaagcgaggttatgaggaacccgatgatcaaattggagaagtacctggagttgcatcaaaaaggcaagttgtgtccttaa

SEQ ID NO: 6727 - DNA, 906 bp, Zea mays
  Peptide Sequence Number=SeqID_48506
atgccaacaatacagcagcgcacgacccgccaggaggagccatgccgcgtacgggcataccccgagactgacccgagggggcctgccacgcactatcacgcgagacgtcagctgcggactcgctacagggactggaatgttcgtcagcacctgctgggggcgagaccctcgcccccggggagcggcatcacgttcggctctttcgacttcctcgccaccgctcccggcgagcttcgccttgcaagtcccggagcgtctggctccgggcgcaaggaacccgagcgctccgccaagagtgaggtggagaggcgacgtcgcgaaagggggcccgccacccccgaacggagcttccgccagcccgtgggcaaagccgagcggcaagcgggagatacaccatcgtcaggatacacgggcgaagtcagccgtcggcgggcgcccggcagcaagcgccgacatgaaggtcaagaagtgtatacggcgcgacccgccagcccccggcacctccaatggtcaaaatcaccaattaccttcgatcggagcaaccacccgggcagagtcccgcaccgcggaacctaccccctcgtagtcgaatcgatcgtgggcatgaagcgcctctccaaggtcctcatggaccgaggaagcgacctcaacgtcctgtacatcgagactctcgaccgcatggggatctcgcgctctgcactacaccctagcacggagctgatccacggcatcgcgccccgtcgaggggctcacccgctcgggcgaatcacgttgccagtcacgtttggcgacccctccaacttccgcaccgagccgttgcgcttcgaggtggtggacatcccaggggtctacaacaccatatttgggaggccatgctacgtcaagttcatggcgattcccaattag

SEQ ID NO: 6728 - DNA, 978 bp, Zea mays
  Peptide Sequence Number=SeqID_48507
atgtggcagtacaccggggacggcgactccgaccgtcattcagccgagaacctgacgaaggaggagctcagggcccgcatccttgctatcacggcgggagtcacatcagacttcctggacgagagtggcccactaccgttcaaccaatcgaggttgagcgacctgaagaagagggcgcgtctggcgcgagctgaaccgaggagaagcattaccccatccaccgacacggaggacttgacctccaccgacgctgaggccagttctaacgtccagccccagagggtgggggatgctgcggaggccgcctcgccggctgcgctcgaggaccgccgtgggagagggccggaggccgccggttcttcctcttcccccaccacgacaaccgtgcgcgacggtttgggcgagatgggctcgccacctccggtggcagctgctacggtggagcgccgtgaggaggccgagccaacggccgtgccacctcctgctccttccgctccactggttgcgatgcctcgggtgcggagggcggtggttgcccggacgcgttcttcccgcgcgtatgtgcagggcaagacggtgaaaagcgtggcccttgcggcgaaagggggcacctcgaccactcagccttccttggtggtcgctggcgtgaccgccttggcttcctcagcccccaagggaacgctgggcgcgtccgttgtcgccacgggcgcccctgagctcctggcgcctgtccctgacgtggggcgggacctgctgctgctgacgctgccgccgtcgaggcccctgcggtggacacgacggtcgtcgttccttcgcccctgtcgctggctcccgttgccgctgaggctactgctggcgaggcccctgcggcggacaccacgatggtcgttcttccacccccgccgccggttctcttgccgtcgggccccgcggcggtggcggcgggctcatctgcagagccgtcactgccagttgtag

SEQ ID NO: 6729 - DNA, 447 bp, Zea mays
  Peptide Sequence Number=SeqID_48508
atgagagaagcacgacaggaaacagagaaagataagaaggaccatgatgatagattctttgagcttgagcaagaccagtttgacaaaaagataatggaaactgacacaagcattattttaagccacactctgggagatgctcttactgtggcaatagatgaaaatcttcctagcttcgtgtttcctggcattacaatgttcttccttcatgtgaacgtgatcctagttctctcttatccgtgctccgcctttgtatccaggaactggaaatatagatttctgagtattcaacgtgatcttggagaaaatctcatcgagagcgaggacgatgttgtcgtattgctcctgcacctggagatcgtccttgtctcctcgctggacttctccggcagcgtgagctgcaagtcgaacgtacgtgccggcggcgcttctcgccacaggcggtag

SEQ ID NO: 6730 - DNA, 528 bp, Zea mays
  Peptide Sequence Number=SeqID_48509
atgcagtttgggagctgtactttcacgccgaagactggcaagactggtggtgaagtgttagaactggtgccatgtgcaaaaaataagtgggatagctggtttaaatcttggttctatctagatcttggaaaaggtgtttcaggtgttgatcaaccagcggccaacgttatggtagcacatgacttcgttgctttccccgacttcgaagtcggggagaaggattctgatgaatcggcacgacaccgtgcaagggtagtgagcagtggtagagatttggtcgaagattatgttgtgtatcaagtgtggccgtggagcgggtgctggacagttagtgagatcacacggcgaaggatgccgctgaagagtttattttttcataaggatgtcgtagttgtgagtcctgccttcgctgtggagcttggcgggcgggagggggtggcctttatgagcaaagttgaagaggaggctatcagaattgttggaaaatattcgtcgaagactgagctaacgaagagtttggaaatttga

SEQ ID NO: 6731 - DNA, 354 bp, Zea mays
  Peptide Sequence Number=SeqID_48510
atgagcgccaaaaccactcaccggcagcgacatcccaacagagggctcagcgccgatgacgaggaagaagagggtggcaacatgtaccgacatcagcagcaagaagtatgtttaatccgcgctagtgcaatcgtcgctggcatgacacagagagatgcgcaacgcaaggcaaaagcagcggagcggaggaagcggggcacaaacaaagaatacccccaccccaccctacccttatttatacagcgcccgagcggcgcttcgaaaactgtgaaccacctttcatcaaaggatgagctaccatacgtcgtcctgcaacctcagcaaccaacagtcacaaactcaaaaagcaactag

SEQ ID NO: 6732 - DNA, 762 bp, Zea mays
  Peptide Sequence Number=SeqID_48511
atggcctgctatcatatcaatgccatcggtcagctctctacggttttgggcccagatcttcaagttcattaccaccagtattgggaagctaaatatcctttatcctctgtagtggcgttgagtagagatatatccgatcatacgcctatactcttgaatactggtgaaccagtaacagccaagtccggcctcgggcgtcataggaagctccgcctcgcccgaccccaaggctcggcccccgtctcggctccggaagacgacgaactccgcctcgcccgaccccagggctcggacttagcctcggctccggaagacgacgaactccgcctcgcccgaccccagggctcggacttagcctcggctctggaagacgatgaactccgcctcacccgaccccagggctcgaacttagcctcggctccgaaagacgacgaactccgcctcgcccgaccccagggctcggactcagcctcggaagacagactcgacctcggaggagtctccgcctcacccgacccaagggctcgaaccgaccacgtcacaagaagggccattattaccctacccctagctcgctcaggctacgggggacaagaccggcgtcccatcaggctcgccccgccaaagtctgctcagtctgggagcaccggactgtccggtggtgcaccggacagtgtccgattgctctcaacggctcctagctgccttggggctataaaagggacccctaggcgcatggaggaggacaccaagcattcctag

SEQ ID NO: 6733 - DNA, 456 bp, Zea mays
  Peptide Sequence Number=SeqID_48512
atggcgccaatgttctgcccgagagctggaggcgtggaggcaaaccgcaatgccgagacaatggcacgcatgctgctagctggtaagtctcagaagaccgtgttggctgtctctccagaattactctcagtaactggcagcaaggggggagcagatatcaagctggaactcagtgttggcaagatcaggacaggtgaggagaccgccagaagcaacgtactgacaggtcgaaggctggctttcggagatgcagtcatggagcagaaggaaacagagaattccggaatcagaacagactcaggtgcaaaatatgctgttggaaaatgcggacatggaggagggaaggacttaagtatgaattgtagcaaacatacaccgaaggtttacttcgatggacacattcccttcactgctgattaccgttcaccccggaaacaccctcccaagaacaactag

SEQ ID NO: 6734 - DNA, 222 bp, Zea mays
  Peptide Sequence Number=SeqID_48513
atggtcggttggcgtagtgatctgaccaaggttgcttctctgcgaaggctgggcctcgggcgagccggaggacagaaactgatcctttttttggccacgcagactaaaaaggttggtgatgttgttttgccaccttgggctaaaggcaatgctagagaattaattaggaagcatggatcagagttcagaactggtcgtttcactaacgttttgctgacatga

SEQ ID NO: 6735 - DNA, 363 bp, Zea mays
  Peptide Sequence Number=SeqID_48514
atggacgtggacgacgacgtcgacggcaccccggaggagcaaggggaggcacccgcgtgcgcgtggtgcgcggcgccgaggccgcagcggcaggggcagggccgtgcactcatctgtggacacggacaccagggagttatatgtggtgtgtgtggcagtggcagggcagagataaacgatgggaaattaccggccggtgcagggaatctgtatctgcagctcatctacaaggacctgaacttgaagaatctgtgcctgggaagaagcatcttcgctcttctctgcctgtggactgtggtgtggtggaagtaccagtgggaggatttgtctgctggaactgcaactcgtgtgtgcaagaactga

SEQ ID NO: 6736 - DNA, 1866 bp, Zea mays
  Peptide Sequence Number=SeqID_48515
atgaagtcggtgtaccggggcttcgacgaggagcgcggcgtggaggtggcgtggaaccaggcgagcctcgccgacgtgctccgctccccggacgccgtgcagcgcatgtactcggaggtgcagctgctgagcgagctccggcacgacggcatcatcggcttccacgcgtcctgggtggacgtgcccgggcgcagcttcaacttcatcaccgagctcttctcctccggcacgctccgctcctaccgcctccggtacccccgcgtgaacctgcgcgccgtccggtcgtgggcgcggcagctgctggggggcctcgcctacctgcacgcgcgcgacccgccggtcatccaccgcgacctcaagtgcgacaacatcttcgtcaacggccaccagggccacgtcaagatcggcgacctcgggctcgccgcggtgctccgccggggcggcgccgcgcacagcgtcatcggcacgcccgagttcatggcgcccgagatgtacgacgaggagtacgacgagcgcgtcgacgtctacgccttcgggatgtgcatgctggagatgctcaccgtcgagtacccctacagcgagtgcaccaacccggcgcagatctacaagaaggtcaccgcaggcaggctccccgacgcgttctaccgggtggacgacgacgacgcgcgcaggttcatcggccgctgcctcgtccccgccgccaaccgcccgtccgccgccgagctgctgctggaccctttcctcctccaccaccaccaccatgctgctgctgctgctggcacggtaccagtgccgtcaccattgccaactaccgctgttgccgccggcgctccgccgccctcgacgtgtagtagctccgcggccgacgatgatgtcgtctcggcgttggacgacgacgacgaggtggacgtgccgcccaggaatgacatgaccatcaccgggaagctgaacgcggaggaggacaccatcttcctgaaggtgcagatcgccgacgaggcgtcggggcacgcgcgcaacatctacttcccgttcgacatggcgagcgacacggcggcggaggtggcgcaggagatggtgaaggagctggacatcacggaccgccacgcgtcggagatcgccgccatgatccaacaggagatcggcaggctgctgccggggcgagcgcagcagcacgagtacacgtacgcgtcacgcggcggcgactacgacgacgaggagcggcctcctcccttctactacctctcctcgtcccccgcatcctcccatggttctcactgcggggtggggccatatgccttcggaggcttctctggcccatgtggcagtgcttggaccaaagatcatgactggtacgctttaagcgacaacgacgatgacatgagctccgtgcactccggtaagtactctcctgtgcactacgcgtcaggtgccggccacgaggaggcgccggccagcagcagcggctcgtccaagacaaggttcggcggcggcggctccggttccgccgcggcgctcgcgcggcagctggagcggcagtgcagcgtgtcgccgcagcacgcggggcggccgcggcggcgggaggacgacgacgaccgggccggcaggcggaggaggatgacgcggaaccggtccatggtggacatgcggagccagctgctgcaccgcacgctggtggaggagctcaaccgccgcctcttcttcaacaccgtcggcgccgtcgagaacatcggcttccgcgcgcccaccaccaccgccgcctcgtcctcctcgtctgcgcgcggcggcctcgaccgcggcaggagaccaggcggcggcggcaagcagcggcagctggacgacaaggagcagcagtatttcatgctttga

SEQ ID NO: 6737 - DNA, 465 bp, Zea mays
  Peptide Sequence Number=SeqID_48516
atgggttggggcgacctcgtcggttggatcagatgggcgctagtcggcgccaccatgctcgtcgtggcgctgttggccgtctgcatgctcgtcgtcgccgtcggccacgtcatctacgtgctctggcgaaacatccgcggcggcggcgccaagacgccgccgccgccgctgtccatcgaggaggtgctggagcggataccggactacgacttcccgtaccaggagctccccggcggtgccgccggcgacgactacgatgacgacgaccacagggagtcgtgcgccatctgcgtggcgccctacgagcccggcgaggcctgcggcgtgctgcccgggtgcggccacgtcttccacaagctctgcgtcgccgagtggctgcggcagagcaccacctgcccgctctgtagggcggctttcgacgtgactgagggcacgcgacaggccgtcgttgacaacatggtgtag

SEQ ID NO: 6738 - DNA, 876 bp, Zea mays
  Peptide Sequence Number=SeqID_48517
atgaccctcaacgtcgtcgtcttcctcttccaaccatcggcaatagcttctgcgccgccatccttgggagactcatcttaccctcctagggacgacacccatgttctcctaccttcagccgccaccgtcctccacctggccacaaccctccctaccaccttgctaaggccgccacctccatggccaccagcagatctctgtcgggcttccactctaggtgtggtcccggccacccccgccacccctgctcttcactgcgccatggcttcgtgccccagctgcttcagcgtggaggacgcccggacctctccctgtgtggccatcgcgtcgggcgcggcggcggacgtccgccccaccctcgagccccctccccgcgctgctcctccatccgccgccgcgtcctgctgctgctccagccgccggatctgcgcctcctccgcgctggtgtgctctggcgccaccacaagcgagcacgcgggcgcgggccgccgccgacgagcaggcgttcaggcccgagctgccgacgcgcaagttggcgtgcggtgcgtccacgaccccccttctccggcgcaggccccttcatccacaccccgcacgctgctctgtgggcatgccggctgctgcgccaccgcgcggacatgcaggcaggctaccgctgcctctcggacatgccggcagattgccgctacctcgcgggcgcgtatgcagtctggatccgcgccggcgtcgcccggatctcccctgaccgaccgccatgagcgcctctacggctccttcgccggccagcgcctctccttttctgggcgcaacccccccatcatggtgtcggctacctactccgtgcccgcgccgatgcccatcaacgccaacctttaa

SEQ ID NO: 6739 - DNA, 348 bp, Zea mays
  Peptide Sequence Number=SeqID_48518
atggcggcggcggctgggaaggcgcgggcggtgagcctggccgcggcggtgcgtgtggtggcggcgacggcgcggccggcgtctagcgcagccgcggcggcgggagtgggtgcgatggcattgatcgtgcagggggaggacacggccttcgggtctctggagtggtgggcgtacgcgggcatctcctgctttctcgtgctcttcgcagggatcatgtccgggctcacacttggactcatgtcgctcggcctcgtcgagctggagatcctccaacgcagcggcaccgacgtcgaaaaggctcaggctggcgaccagctggtcgttcctgaggaccgaccaggcgcctaa

SEQ ID NO: 6740 - DNA, 213 bp, Zea mays
  Peptide Sequence Number=SeqID_48519
atggagggaggcaactgtgcagcgttgctacaaggggtgatgtggtttacattggtttgggttagccgacatctgtctgtaatctgtggtctgccacaacattatgtaaagaagcttcaaacaaaaattctgatattaccatacattcttttagcaaatgaatacacttctagagtacaaaatagtgtgataattgatatgattgtaatctaa

SEQ ID NO: 6741 - DNA, 393 bp, Zea mays
  Peptide Sequence Number=SeqID_48520
atggagcacaggaggcggaggtggaacccgcgagctaggcgaaggaggatgatgggggaagggcggtggcggggggcgcagccattggaaggaggcggaggtcgcggctgctgggaggtggcggtggaggatagagaggcacttcctatatttcttgacagaatgtttcatcctattgttgctgtaatattgtcagtgacatttgttcttgcctttggagaggttataccacaagcaatctgtactagatatggtctagcagtgggtgctaactttgtatggctcgtacgcattctcatggtcatctgctatccaatttcttaccctattgggaaggatagagctttcacttcttttttcacgaacatgccacacacttatttcattaagtag

SEQ ID NO: 6742 - DNA, 144 bp, Zea mays
  Peptide Sequence Number=SeqID_48521
atggcggaggcgcaagggctcgacggggcgacggtggcggagctccggctgcgcgaaggttgctccagtgagcgcggaccggacgaaacagaaagggagagggcgcaccgaagggcgtcccgagcagctgacaggaatttctaa

SEQ ID NO: 6743 - DNA, 561 bp, Zea mays
  Peptide Sequence Number=SeqID_48522
atgggcctacccattcggcccttatggaactggatctctaggtgtcattggctgggcggctgggccatggtccatggagtcgttggtaccacgggcgctgccgtcagatactcagatctcgtctccaaggtgtcggagatggacttgccggcgaaccgcggccggtggcgcaggcggagcgcccgatcgcacctgcctctcgtcgtggccgtcctcgtgctccttcttccggcctatcttctcttctcatcggcctactccaccacgctccgcgctctcttcgctttccccttcgcccccggcggtggcgaggcgccccggtgcgggggctcagtggagctcgagggtcagaggttcctgtggtacgcaccgcacagcgggttcagcaaccaggtgggcgagttgcggaacgcggcagtggcagccgctctgctaaaccgcactctcgttgtgccccccgtgctcgaccaccacgccgtcgtcctcgggagctgccccaagttcggatcaccgacccttcctcgctgcgcgccgctgtttgggaccaacgaatcaagctga

SEQ ID NO: 6744 - DNA, 1608 bp, Zea mays
  Peptide Sequence Number=SeqID_48523
atgcaagtgtcattggctgggcggctgggccatggtccatggagtcgttggtaccacgggcgctgccgtcttatactcagatctcgtctccaaggtgtcggagatggacttgccggcgaaccgcggccggtggcgcacgcggagcgcccgatcacacctgcctctcgtcgtggccgtcctcatgctccttcttccggcctatcttctcatctcatcggcctactcaccccgctccgcgctctcttcgctttccccttcgcccccggcggtggcgaggcgccccggtgcgggggctcagtggagctcgagggtcagaggttcctgtggtacgcaccgcacagcgggttcagcaaccaggtgggcgagttgcggaacgcggcagtggcagccgctctgctaaaccgcactctcgttgtgccccccgtgctcgaccaccacgccgtcgtcctcgggagctgccccaagttcagggtcaccgacccttcctcgctgcgcgccgctgtttgggaccacaccatgcaactcctgctggatcgaaggtatgtttcaatgggtgacatagttgatctatccccaatcgaaccaatggttaggactatcgacttcagggtttttgtctccctgtggtgcggtgtagacatgcggaagacttgcttttctcggctgtgctgtgctgtttctggtggtagctctaggccagatgactacaataaatgccgatctttgctgtctggtctaggaggcagtgaaaaaggctgtgtgtatcatgtacatgacgattgtagaacaacggtctggacataccaacagaatgatgatggggcgttcgatcagtttcaaccagatgaagaattgaaacggaggaagaagatctcatatgtccggagacgcagagatatgtacaaggctttagggcctggttcacaagctgaggatgctactttgctggcatttgggacactcttctcaggaccatacaggggatctgagtcttattttgatatccatgaatcgcctaaggaccaaagagtacaaagggtactagagaaggttgagtttcttccctttgcaccggagatcatggctgcagggaaggaatttgctaagaacaacattaaggagccatttctttgtgcgcaacttaggttgctggatgggcaattcaaaaatcactggaaagcaacattctctgccctcaaggagaagttggaagctattgaactagaaattaggagaaacatgactagtggccttattcacatgttcgtcatgactgatcttccaccaacaaactggaccaacaccttccttggagatgttgcaacagatgagcgatataaactgtacacactgaaggaaagtgacgacttagtgctgcaaactgcagaaaggcttatggctgcagaacatggtattcggtctggattccttcagaaaatcatagagagcacaaagaaggactgcgaccctgttcaactgccagaaattttgttgtatattgaagaatctgtttgtagttgtgcatcactaggatttgttgggactgcaggatcaaccatagcaggaagcatagaaacaatgaggaaaaacaaagtgtgcaaattgtag

SEQ ID NO: 6745 - DNA, 402 bp, Zea mays
  Peptide Sequence Number=SeqID_48524
atggcgcctcctgttgacgtggcggtctgtgccctacgcagggtgacgtgggggtactccgaacctgaggttgcgtctacggtccctggccattttaaagaccgaggccagttgtcgaagaccccctctcggatgcgaatcatccggagggcgccgcaccaggccggccgtcgggccacacggagattccagagccgcatccaggtggacctggtgtctgaggcgccggacaggtccagcggaaaaggagatgcttcggggaagggcagcgaggaagccaagggccgttttcggattaaatttcttcgtcctgtcggccggtggcgagagccccagcgatccctaaggagaaggtctcttttcttttgcaacctctgctattgcagaccggcgcctctgtga

SEQ ID NO: 6746 - DNA, 2136 bp, Zea mays
  Peptide Sequence Number=SeqID_48525
atgcctggcataccgagggatgtcgccgagcactcgctggatatccgagctgaagcccgacctgtgaagcagcctctgcgccgattcgacgaagaaaagcgcagagtcataggcgaggagatccacaagttgatggctgcagggttcatcaaagaggtattccatcccgaatggcttgccaaccctatgcttgtgagaaagaaaggagggaaatggtggatgtgtgtagactacactggtgcgacataccaaaggtgcatgaaccacgtgttcggagagcacattggtcgaacgatcgaggcttacgtcgatgacatcatagtcaagacgaggaaagcctctgacctcctctccgaccttgaaacgacattcaagtgtctcaaggcgaaaggcgtaaaactcaatcccgagaagtgtgtcttcggagtcccccgaggcatgctcctggggttcatcgtctccgagcggggcatcaaggccaacccggagaaaatcgtggccatcaccaacatggggcccatcaaggacatgaaaggactacagagggtcatgggatgccttgcggccctgagccgtttcatctcgcgccttggcgaaagaggcctacctctgtaccgcctcttaaggaagaccgagcgcttcacttggacccccgaggccaaggaagccctcgggaacctaaaggcgctccttacaagcgcgcccatcttggtgccccccgctgccggagaagccctcttgatctacgtcgccgctaccactcaggtggggccagtctacttcatcagtgaagtactgtccgagaccaaaatccgctacccgcaaatccagaagctactgtacgttgtaattctgacgcggcgtaagttgcgacactacttcgagtctcatccggtgactgtggtgtcatccttccccctgggagagatcatccagtgccgagaggcctcgggtaggattgcaaagtgggcggtggagatcatgggcgagacaatctcgttcgcccctcggaaggccatcaagtcccaagtcttggcagactttgtggctgaatgggtcgacacccagcttccagcagctccgatccaaccggaactctggaccatgtttttcgacgggtcgttgatgaaaacaggagcgggcgcgggcctgctcttcatctcacccctcaggaagcacctccgatacgtgttgcgcctccatttcccggcgtccaacaacgtggccgagtatgaggctctggttaacgggttgcacatcgccatcgagctaggggtccgatgcctcgacgctcgtggcgactcacagcttgtcatcaaccaagtcatgaagaactcccattgccgcgacctaaaatatatctccaccgaggagctacccctcgacagagccgaagctcggcgattggcgtggcacgccaagtcgttcgtcttgctggcacctcaggctctcgttagaaacgccttccgacagggtttctactggccaaccgcggtggccgacgccactaggattgtacgcacctgccaagggtgtcaattctacgcaaagcagacccacctgcccgctcaggctctgcaaatgatacccatcacctggccatttgctgtgtggggtctggacctcgtcggtcccttgcagaaggcacccgagggctacacgcaccggctggtcgccatcgacaaattctccaagtggatcgaggtcagacccctaaacagcatcaggtccgaacaggcggtggcgttcttcaccaacatcatccatcgctttggggtcccgaactccatcatcaccgacaacggcacccagttcaccggcagaaagttcctggacttctgcgaggatcaccacatccgggtggactgggccgccgtagctcaccccatgacgaatgggcaagtagagcgtgccaacggcatgattctgcaaggactcaagccacggatctacaacgacctcaacaaattcggcaagcggtggatgaaggaactcccctcggtggtctggagtctgagaacgacgccaagccgagccacgagcttcacgccgttttttctagtctatggggccgaagctatcttgcccacagacttggaatacggatccccgaggacgagggcgtacgacgactga

SEQ ID NO: 6747 - DNA, 192 bp, Zea mays
  Peptide Sequence Number=SeqID_48526
atgttgagttttgaaaacctccccgtgcagggggtgctatcgaaatcttttgttgataggcttgttttttttgcagaggtctttctagccactacagggacaatcgacggcgtcaaacaaccctcatggatcgttcagcccatcgctgaaccagtccagccgcccacctcgctgatgatcttatgtctgtga

SEQ ID NO: 6748 - DNA, 954 bp, Zea mays
  Peptide Sequence Number=SeqID_48527
atggtgaaggaggcgtccgtggacgacgtgatgaaggtgctgatgggtcgcgcaagttcgagatgcaggagctctgggccgcctgctcccacctggtggcgcgctcgggcctctccgccgacctcctcgcaagcacctccccatcgacgtggtcgccaagatcgaggagatccgcgccaagtcccccggcgggcgccgccgcccgcgggcggcgccgggccgcgctcgccgttcctcacccaccactacctccccatcaacgcggcgtcgtcggcggccgaccgcgagcaccggatccggcgcatgcggcgcgcgctggacgccgccgacatcgagctcgtcaagctgatggtgatgggcgaggggctggacctggacgacgcgctggccgtgcactacgccgtccagcactgcggccgcgacgtcgtcaaggcgctgctggagctgggcgccgccgacgtcaactcccgcgccgggcccgcgggcaagacggcgctgcacctggcggccgagatggtgtcccccgacatggtctccgtgctcctggaccaccacgccgaccccaacgcccgcacgctcgacggcgtcaccccgctcgacgtgctccgcagcctcacctccgagttcctcttcaagggcgccgtgccggggctcacgcacatcgagcccaacaagctcaggctctgcctcgagctcgtgcagtccgcggtcatggtggccacgcgcgacgacggcggcgcgcacggcgacgccgggggaggtgggagcgacggcgggagcttcccgaggggcggcgacgccgccgacgacagcttggtgagcctcaccatgaactccacgctcatgtaccagggccaggagatggcggcggcgctggccggcgacgccaggaaagggagcggcggcggccgagggagtccgtccagcttgtacttccccaatggcttcgcatga

SEQ ID NO: 6749 - DNA, 543 bp, Zea mays
  Peptide Sequence Number=SeqID_48528
atggcgaagcgtgccaccgtggcgagaaatcccgcgtccgattctctttctccggcgaggtggtcaggaaggaggcgcccagggcacgagcatcgatgcctgctcaacggtggcgtcaaggaaggcggggatggaggagagcaccacccacggtcgggactggaactcgacctcctctgctgctatgtactccggtggtggctactcatacttgcggctgtacagagacctaaagaaacctcggctccctacgtccacgacccttcatcgctcgactggatgaacgaggggagggagggcttatatctgtgcgggcacgcgcccccgcaggaagccgcaggccgggaactcgccgcatattccgacgtgtctgttacggtgagcagtcgagtccaagtccatcgtgagatccacgtggaagaaggatttctggatgccgggacccacggattcctcgcgccgaccgtggtggtgtttgttgcggtgcaagattgggacgaagcctgccagcatggacccacccgccagtggcacgggaaatag

SEQ ID NO: 6750 - DNA, 270 bp, Zea mays
  Peptide Sequence Number=SeqID_48529
atggcgatcgcctccctgtcatcgttccagaggtgcctcctagcccagatctgttcgcccctcgccctctccagactcgtgacgggtgtggattttgtggaatctacgattgatggggttacgatttgggggttttctgcgcttaaggcagctggcggggttcgggagcttcggatctggtttgtggatttccatccgcaagggctgtttggggttccgaggttgtgggtttctgctggaatatattttctaaccatagaatttgtttag

SEQ ID NO: 6751 - DNA, 5082 bp, Zea mays
  Peptide Sequence Number=SeqID_48530
atggtgcatgtaggggagatgctggcctcggccgtcattaaggaagttgttcgcaggctgcctgcgctgctccaggctcccgtcaaaggtccggcaaagatgatccggagcttcagggaggacctcgacgagatgaaaatgacgctcgagtccatcaaggcaaccatggcggaagcagagcagcggtctatcaacgacgagaccgcgcggctgtggctcaaacggctcaagagggcagcctatgatatctctgatatgtttgatgagttcgaacacggcagcccaccgggcaagaagctgcagggccctagttggttcgagataatgtttagccgtgacatggctaagaaaatgaagaaaatgaataaaaggctgaaagaaatagcagagcaatggaaaaattacggcgggattggccgtgtatcatgtgagcccaaaaatgatgctgctgaggaacaagaaacaacttcaagttcatcatcagccgtggttgttggtcgtagagctgagaaacaagcagtcattaatatactgcttagctccaataacacataccctcaagaaactattagtcactgtactgttatccatggacttggtggtgttggtaagagcgaactggcaacatcagtgttcaatgacgaaagaatcaaggaggcctttcctcaacgggcatgggtttggttgggccaaaatttccgcgaaaaggatattggaagagctataatctctatagttgaatgtggatcttgtaatctcgagattcttgaatctatataccaacatctcagaaaggtgctcctgggtagatgtctcattgtattggacaatctctgggattcagttcacttagccaaactgcagggtgaactaggaagcaatgtttcgatcttagttacttcacgcagagaaattcaattgaatatgcccagatcgacattattccgcttggatccattgtcagaaagatttagccttgatttagttaaggaagttgcatcctcatattttcctgcaggtgatattccagaaactgcaatggaagaaattgtaaagatgtgcggaggtgtacctttggcccttaaatctgttgcgtcacaactgagaccagaaagaagcgttaaagagctgttgagtttaataagagctatctctccgcccaaatcagattatggaacaacggatatccaggaccgtgttcttgcatcccttaagctgacatatcacttaatgtccccgagtctcaagttatgctttgcttactgtgcaattttcgctaaaggcgatgaaattgatcgggaaggcttatgccaccaatggatcgctcttggactaactgaaaagatgtatgcagaggacagagtccgtgacttattgaccatgtcatttcttcgggatccagagccacctgcgatcacgaggagcagttctggtggttcatccaaacttaagatgcatgatctggtacacgaccttgctatgttagttgctgatgatgaattgctagttatcaatcaggagtgtgtggtatttaaatctgattcacctcgttatgccatggtttttgcatgtaagttggaaaacttgcataagaataaattgctagccgggttaagggctcttcatataaaagattctgatggactgaaatttaaatggtacaatttctcgtttgtcaaatgcctgcggatcatggatattagtgggctatgcactgagaagcttccttcctcgattggaaatatgatgcagctgaggtaccttaatgcttcaggaatacaatgcgaagtgctccccaaagccattggcagtttatcaaaactgcaatatctcaatctacatggcagtagaatttcagcactaccagactcagttaccaaattgggccagttgatgcatctggacatttcggactgtgtgcatctgcagacattgcccaactcgttctgcaatctcgaaagcctgtgttttttgtccctaaagaactgctgtcgactaagttcattacctgacgatcttgccagactagagaatttagagaaactaaatttgtcaggatgctcctgtcttgacactttgccaaaatcccttggtgagctggactccttaaaactattggacctatcaggttgtatgaaactcaccatgctcccgaaatctttcattagccttactagtctacaatacctgaacatctcaagctgttctgagttagacatacctgtcgatgctcttaacaagctcacaaaattgaactatatagacatgtcatgttgtccaaaacttgtaggcctccctcaagaattttgcagccttaaacatctccacacactgaatctctcagactgttctaaattagcatatttaccagagaagctgggccaaatggaaagcatcaagttcattttgcttgatggttgtacggaatcggtgaggaaacctattctaaaacataggctgggtgctggtctgcagtccttaccagcatttgtcgttgaaagaaaggctgacagcatacggagcaacattttccaactcgaacaggagaagttctctgagctggaactgtatcgcctcgagaatatacatacagttgatgaggctaaagcactgaagatgcctgatagatcaggactacgtagtttgggacttatgtggacattaaatgttgatcgattcgtggaagatgaagcactgcttcaggcgcttgagccacatgagaatcttaaaaaacttacggtgcaaggctacatgggcgaaaggtttcctaaatggaaactagaacttggttcctcccgccagggccatcttcacgaagttggattaatgcattttccaatgtgcagcagtttgccacagcttgggcagcttgcaaatctcaagaagctttacctgtccaggatgccaaaaataaggagactgggaagagagttgtctgataacactggagggctcaggaatttgcaaatcttcactttggaatatatggagaacctggaagaatggtgcacaactatgacatcagctacgggccagcagcagcaggaagaattcatgtttcccgcgctccaagaactgaccatataccattgccctctgttaacgatgcgtccctgccctccaagaagcatagattattgggaagtaagagcaagcagtggtgcagcacaactgcttcttcagaaggacggcatgatgcaatccgtggcagactatatgggcttgcagtgtccctttgcttacaccagcgagctgcatgttagtggctccagcagcagttccacactacttcctactgacggatggaaattcaatggttctctcatcactctaaaggatttgacaagtgattgctgcagtttgatagacagattgctagccaaaggtaacagcatgcaatgtttagttaacctagaggtttcaggcatcaaaaatacaaatagcttactggaagaagttgaatcagttgcatactacacccgatcgagcctcgctaaatcatggccagattggtttttacaggaacaaggcataaacagagcatcaccacattttatagtaacaggttatgcaaattgtggagtcgatggctggattcataaggtgacctcctttcttggcaaccttatacggatcaacatggagaaccttcctatgtgcgactgcctaccaccacttggtcagttgccaatgctgcaggaactgcgactaaaagggatgcctaaaataagaagtattgatcgagacttctgtgggagtgggagtgggagtcagcaatcgtcacacacattgtttttcccaaggttaacaaggtttgttttgaatgatatgccaaacctagaagattgggtcactaaggtgtcaggtgcaagtgatccgtatggccaggaggaattcatgtttcccaagcttgtcaagttgacaatttggaactgccccaagcttaagctgaagccatgccccccaagagcaatggagtgggatataaataacagcgatcaagtaatagcgtcaaactatgatataaacagtggtggttatcttgtgactatgctgcaagtattgttatgcaaagttccacccagcaattggaaattgcttcatcaactccctgggatccaaagcttggctattgtaagctgccacgggatggaagctttgccagatagcattcaatacctttcctcactccactcgctaactgtaagcaaatgtcatggcctgaaacacctacctgattggttgggggacctcacctcccttgagaggttgatggttgtgagttgccccctggagttcttaccagggagcttgaggcgcctccctttccttcggtcgctcactctgagccgttgtgaccgactggcagcactgccagggtggatgggtgatctcaaatcactcgtgacgatcacaattgaagaatgcaagagccttaaatctttgcctaagctttatcatctggaacatctacacattcagtgtaatgacgaactagaacgttggtgcaaatcagaggtgaatcagcataagttttctcaaactctaaggaagggtttcttcctggagagtcctatggggaccaacagctgcatcttaccagctagatcgttgagtatactttggggacaggatgacagatactggaggttgaattctattcctgagtccaggttcgcattatcgatggagctcatagcagtctggtggctcgagattgagggatgggtccctttcgagttcctctccaccgacactagctatgatatattccttgtctacaagctggcagatgagcatgatggcctcagatggggggagtcctacgtagcagtggatggagtacacaccactgatggcgttgtttcctttgtagacgaagatgccgtgcgtgtagatcgcgtggcttacccggttacccgttcagaaggttggatggagctctggcttggtgagttttacaataagtatgttgatagagaggtaaaagtgagtgtctgggagaaaaccgatacctatgccaagatagggctcatcattgagggcatggagatcagaaagaagagcgggagtattagctag

SEQ ID NO: 6752 - DNA, 585 bp, Zea mays
  Peptide Sequence Number=SeqID_48531
atggcaggcgatggagaaggggttgccggcgtgcgtcgcacagtcctcccgggtgcaaaccttggcgacagagaggcatgggttgcgcggttcatcggaggtgggttcaagctcgccagcagcggcattcgcggagagcttcacgggttctcgacatgcgctgaactgttagcggtttgttggctggacatctccggttgcatgccatgcaggatgctgtcaggtgacacgcgctatgcagcctacctggtattcaagatggccgatgactgctttggcctggattctcctcttcaggaggcatcggtcagcgtcggagaggggggcacatcaacggcccactggatcagactacagagctaccacgtcggcgacgaagagaacggcgtaaccgaggaaggagctccacctaggctcccacatgagaggcctgatggctggatggaggtggagctaggagactggtacaaccatggaggcgacgacgacctagtggttcgtgccagtgtgaaggaggccaggtttggaggcaactggaagaaagggcttattgttcagggccttgagattagacctaagaactga

SEQ ID NO: 6753 - DNA, 516 bp, Zea mays
  Peptide Sequence Number=SeqID_48532
atgagagatggtggtgagctcgggtgtgagagggagagctccgtggtcgcggtttttatagaggagagggaggaagaggagagggtgaccgggtgcttcatggccatcaatggagggagtaatgggagaagaaacggtcgcaatgaagctcctttaacgaaaaaacggacagtggggtcgcttgggcttcaggcgcgggtggtgcggccatcggggtcgcgctggacgcaaaacgcgcaaggtcttcggtcctggtcgtcggttggctcggacgcgggcgttgctcggtcggtcagggtcgggaaggccgggttgcgtcgggtcgtggatgtagggctgcgcggcttgaggcgctgctcggttgggcggcttcctggcgtcgctcgtggagcagagaggcagggaggaggagagagtcgggtggagcccgcgcgagtgggagagaaaggggagcggaaagggcagagcctggcggcggcggcggcttcagctgggagcagggggcggcgcggctag

SEQ ID NO: 6754 - DNA, 1494 bp, Zea mays
  Peptide Sequence Number=SeqID_48533
atggcggcggtggccggggatggtggtggtgggcccgaggagggcgtcggcgagagctcgtccccgcctcgcaaccccgtgctcgcgcccgcacccgctgcctctggcgggagcgggagcggtggcggcggccgcggaggtggcctccgggacatctgccgcgaggtgttcgagcgcctcgtcaacgatggccacagggcgggctccgagctccttgcccagctcgaggcccacttcaatcgactccccatcagctacaagctggatgtgaatattgacaaagcagaagatgtgttaatccatcagaaagttttggcagaagcacaggatcctgataggcgcccagcattcactgtccgtttcctcaggcttgaagaggtaaatgtggacgagacaactaactctgatgcacatgaagaaggggctgatattggtgaagctctttctaccaggtcaaagacatcatatgcacacattcatgagatactattctccaccaaggataaacccaagctcctgagtcagttgtctgctttgctttctgacattggactgaacatcaaggaggcacatgtgttctcaacaacagatggttattctcttgatgtttttgttgttgacggttggcccgttgaggaaactgatggtttgcataaggcactagaagtatcaattttgagaaatgaggattttgaatcagatattgacacaagacttctgaagcttgtaaataagattgcttctggatcttgtggggacatgtttcttgggacctacagtggtgaggaggttgctgttaaagttcttaatcctcagaatttgaacaaaaatgtatggagtgaatttaagcaagaaatcaacatgttaagggaagttgatcatccgaatattgtccgattcattggttcatgcacaaagccacctcagttttacataattacagcctcaatcttctccaacattgccgacgacatcgccacgcaggcatgggacatgctgtctgtgaaggaacttcgcctcgtaaacgagcagaaaatcatcaacttcatcgcactcctcgtcgggactgcctcgtcctgtaccagcccgggcgagtgtcgctccacttctgcccctacccagaccagtggcaacaatggtggtttccagctgaagaagagtggcagcagtggcacaggtggcgacaacgacatgaagagtcggcgtagctcccaccactacgatgtgactaccgcctcgtatggccaacaccgttccgaccccgacgtgccttcgaccgaccacagtgcaccagcgactggctgcgcctcactctttgttccggcaccagttctagctcgggtgcctccaccagtgccgcgttgcccagtcactcgctctatgattgacaccatcctgcgggtgcactacaggaacctcaacatcaccactccgtcgccagcacctccactgatcccggtgaactaccctagcggcctggctaatgccaactag

SEQ ID NO: 6755 - DNA, 693 bp, Zea mays
  Peptide Sequence Number=SeqID_48534
atggagcgagaagaagtagtgcacggggttgagcttgaccgctgcgacatcgcgggccagcggccactggacgggctcctgctcggcgccagcgtcagacccatcgctgctgaacaagcggaagaggccgcgacggtggtggggcttctcgtggatcaggcacgtgaggacggcgacagagtggtccccctagcggaggcacatgatggagagcgtgccagtgctgaggtcgacgctgcggtcggggtagatgaggtggagctgcgccccggggacagcgatgatggtctcctctgtggtgggcggtggcggtgtcgcgtcctcttcgaccgtctcggggaagaggttctgtgcgagctcattggggtcgatggtggggtagagggagttgcctgtggtagcgccgatggaggtggtgggtgcggagaagaaagtggtgttgagatcagggtgggactggtccacatccgggtagaggctctacttggcattcgaggaagcgaaagccatggttgcgtagctgtacttgatgatgaggctgtcatgaggaaacaactccacgaggcgagagaacagctggtgagacaaagtagtgacaaagaaataaacccaatgggacaggtacctgcaattgttgatggaagattcaaactatttgaaaggctttttttcttcacaaattctggacagtag

SEQ ID NO: 6756 - DNA, 474 bp, Zea mays
  Peptide Sequence Number=SeqID_48535
atggaagagctggccgcagtcacccgttccctcggtctcgacccgagcgatcaggagctcaatgatatgatgagcgaggtcgatacggacggcaatgggatcatcgatttccaggagttcttaagcctcattgcccggaagatgaaggcgagtctctctctcatttgtctatcacgaatactcccgaaattaaccatcgcagtccgaaagttgacagcacacctgcttcgttgcttgcaggatggcgacggcgacgaagagctcaaggaagcctttgaggtcctggacaaagaccagaacggcttcatctccccggttgagctgaggacggtgatgaccagtctcggggagaagatgaccgacgaggaggttgaacagatgatcagggaagcagacaccgacggtgacggtcaggtgaactacgatgagttcgttctcatgatgaagaacgctgagcggaaaatatctgggtga

SEQ ID NO: 6757 - DNA, 267 bp, Zea mays
  Peptide Sequence Number=SeqID_48536
atggcgagagaagacggtaggagagatagagataccgtcgccgttcttgtcgaagagcgagaaggcctcctggaacgcgagcctctgctcgtccgtcagcccgtccatgcaactgacagcaaggcactatacgggaccaatgccagttgccaggtgaagggggtgctggaatactgtaatttgatttcaaaagacgtgatatatatggcgcagcatcgctccttggttacagtagctgtaacaccataccagaccaccctggagtaa

SEQ ID NO: 6758 - DNA, 441 bp, Zea mays
  Peptide Sequence Number=SeqID_48537
atgatgtaccccctgcaacgtggtcggtccgagcccaaggttgggcgaggcggtgactcctccgaggtcgaggttgaggccgagccctggggtcgagcgaggcggagaccgtcttccgaggtcgaggcggaggccgagccctggggtcgggcgaggcggagactgtcttccgaggtcaaagcgggggccgagccccggggtcgggcgaggcggaggcccgtcttccgaggtcgaggcgggggtgagccccggggtcaggcgaggcggagcttcctatggcgcctgaggctggactcggttgctgtaagcctcaccctggcgggtggcacaacagtcggagcagggcaggcagcgctgttttcctgtcaggtcagtcagtggaggggcgaagtgactgcggtcacttcggccctgccgactgaggagcgcatgttaggataa

SEQ ID NO: 6759 - DNA, 579 bp, Zea mays
  Peptide Sequence Number=SeqID_48538
atggctaggaacagagaagagcgcttgagctgtggcggcgacgccgaccagccgcacaagcacagcgactcgagcactgagcaaagcactctaaacctagcagtagcgacggcggtggcggctgctgctcatctccggccgacggtggtggcggctgctgctcatctccggccattcgtcggcctggtcgtcggcctgaagcccgcctggagcttgtctgcctacccgaccagagtacccggtgctgctgccgatccagcgcccttactgaggtcaacggcatctataaatgaaaaagaactaggtgaagatgacaacaccaatgtgaatgcaagtgagaacgtagaggctaataaagaagcaagtggtgcagctaatgatctgtaccatgtgatttgcacaaaggattggataagggccgaaagaaaagatccatataatgtaacttcacttcttgatgatttatctaatattattgacaccgtgagtgatgataatgttgatcatgatggagatgcttccgatgttgttgaccacaacgtcgatgataatgacattgttcaagtggaggaagattag

SEQ ID NO: 6760 - DNA, 137 bp, Zea mays
  Peptide Sequence Number=SeqID_48539
aggtatggaaggctaggaggacatatgctatgcattcatatgcatacattgaagtgaaatttgcagatgatgtggttatatactcttcagagggaagtgttatacaacctattgtggttgttcgaggaaatgagatg

SEQ ID NO: 6761 - DNA, 2433 bp, Zea mays
  Peptide Sequence Number=SeqID_48540
atggctcagtccacccctgatcccccggctttagtggcgatgacgttggcggagctagaggcagccatcgccgccctgcccggcaagtggggtgccctgcgggaggcgttcgatcgcctcgccgcctgctcaccctcgccgctccccttcgcctgggaggacctcgacggctacatctcctcgctccagtcgtcagtcgcgctgcggtttcgccaggtccgcgcactcgaggccgccggcgctgtacctgctgctgccgcgtcgttggtaactcgcggagatggaaagggagaaaaccaggagttggaggaggatgatgaattagatgaggatgtcgcggtggaagtggaggagaaggtcgcggtggaagtggaggaggaggccgatgaggagatacaggaagccgacagcgataagatttgcaatgatgaaaaggatgggaaggaggcgagagaggtggaagtggagaaggaggtggcggagttggagaaggccgatgaggatatgcaggaagccaacagcgacaagttttgcaatgatgaaaaggacgggaacgagacaagagaggtggaagtggaggacgaggtggcagaactggagaagaaggccgatttggagatgcaagaagttgactacgataaaatttgcaatgatgaaaaggacgagaaggggggcaaagaagaggtggtggaggaagagggagttgaggaggcatccaacatcaagattggcaatgagattaagtatgagaaggagtcaagggaggaggagcaggccagtaaggtgaatgagcaagatcctgacaaggagatgcaggtggttgataaggacaagctgaataccaaaggtgcttttaaggcttctcaggacaaggagaaggatcaggataccaacatggatgagacagtgaccaagatggcgtcttcagtgcagcacaaggagggggaggaggcttgcgacaggaagcagaaggaagcacagaaacaggaccttcatgagaaggtggaaggtaccaaaaatgctaaggaccagggtaatcgagctcttccacgcagatctgatgattgcactgtagcatgtgcatacatggatgccaagaggttggtcaagctcgtatgcaccaacactgacctcaaatcagagcttcatgctgcatttcgctgtgctccagatgctgcagcagtcgctctccacgtagttgagttattcctacacaacaagacatttgttaggaccaacaaggtctgggcaaactgtgttgagctagttcaaatggtacctgtatttgttaccaagccttctgcagacacgactgagcaggccaagcggatggctaaggattggaaggagatgattgacagtccagagagttgctatgttcttggcagcctagcctcgtggggcctcctttactttcttatctcctataacattgtaactgagtttgacatgaaggagatcttccgtctctttggtaacatccctttcaaacagaagaagaaatctgccatgctcttaaaaggtcttgggctcagcaatagaatcccagagttaatggactatttgatcggaaacggacaacaaatggatgttttatgtttggcacgtgttcttaacatggtggacaagtatcctccactttctcttctgaagggatatgtcgaaaaggcaaaacaaactgctatggaaatatctcaaaagaatatgacacgccaattgagggtagttataataaaggagcttgatgatctaagaagggctcattttttggttaagaaggaaatcacgaacaccaacctctgcaccagtatcagggaagaaatcaacattttgttaggtgagcttgaaaaaaagaagcggggtttagcaaatcccttgacagcctcaacttcaaattcacagcagcgacaaacaaagattaacaagaagcgcaaggtaatgcagaagcaggagcatcacaaaggacaagaagaccggatgcaagggcaactgagtgggctggcagagaagcccgagaagaaacaaaggaagccccaacaggagcagcaacaggaacaagaaaataagccggaagagaagaaacagaaacaagaagatgggccagaagagaagaaaccgaaacacgaatataagccagaagagaagaaacggaaacaagaagataagtcagaagagaagcagcaacagaaaaagcagaaacatcataaatggctgaggcaacgcactcccatgctacctgcacagggttaccctgcaatgtggaacgcagcaatgaggagcgacttggagcctccaccatatgccgcgacgcatggagtccatcatggttaccaccaccctgtccagccaggctggcctggggttcattgcgcatcgccgttcataggaccctctacaccctggtaccctcctcctcagttctatcccaggtag

SEQ ID NO: 6762 - DNA, 1902 bp, Zea mays
  Peptide Sequence Number=SeqID_48541
atggcgacgcaggacgagctccaggcggccgtcgccgcggtcacggagaagaagcgccgcctccgggaggcattcgaccgcctcgtctcctgcgccccggtccctgtccccttccgctgggaggacgtcgacgcgcacctcgccgccatcttccgccacctcggctccacccacgccgacgtcatagccatcgctgggggtccagccaccgctgctcaccacttccagttccagcacacggtcaaggaggagcaggaccaggaacgccgcgtcgggcgcggcgcgtcggaggagggacaaggtagcaatgcggaggaaggcaggagcgcgtcgtcgcaccaggaacgcggggaggaggaaggggaggtccgggaggcgtcagttgcgcgtcccgaccgagaagccgacgaagcgggcaacattctcggggcggaggcggttccagagcagctagacgacgagaaggaggatgacatggggacaatcgtggcgtctccccaccaacgcaatgatggcatcgagatggtagtggaggaggaggaggaggccgtcaaggggaacgcagacagagaaggccgcgaggacgaggcggaggaaggggagtggcggcagcagcatccgcacgccgcaggcgggggagagacgtcgtcggctctggcgaaagccgtcgccgcggcgtgcgcgaacatggacccctccgcgctggtggactcgctgcgcgtcagcggcaggagctccccccgcgcgttcctcccggcgctgctcggcgccccggacccccacgctctccttgtccgtgccgtcggcggcgttttggacatggcctcagcggagcgcgacgcgagcaagtggtggtgcgcaaactgcgtcgcgctggtcgaatgcgcgccccgcctccccgcgccgtcgccggacgcgctggcgcatgcaaagcgcctggcggggcgctggaaggagatggtggttgcgggccctgcgggtggcggggacacgggcgggatggccggatggggccttctcaccttcattgcttcctacgacattgccccggagttcgatgctgatgagatcatccgtctcttcggtgatatcgcgtctgaggtgaaggacaactgcgttgagctctgcaagcggcttggcctcatcggaaagatgactgattcagtcgaccatttcatcgaaaatgggcagccaatcgatgctataagactggcacgtactttcggtttgactggcaagtatactccacttgccatcatgaatgattatattgagaatgccaagaaggatgctgaagacatactaagcaaggagagctatacaccagagtctcggaagcaagcgatggcaaagaaggttgatgctctaatatttttatggagtgcaatcgatgggtacgatatggattctgttcagcgtagtagcatcaaggcagaaattacccagctgttacacaagtacgcaaacaagcagcaaagtctggcaggtgttcctgcctccatttcaagttcgcaccagcagcagaagtttcaggaggagtatcggcagcggccaccggtggaacaggagacgcagcagcgaaaggcacatgagctgcagcaagaaacagaagagaaacagcaccaccagcagcggaaggcacaagagacgcagcatcagcacatccaagatcaacaagagacgcagaagcgggaaatgtggcagaaccggaaaaggagaaggcaaaacaagaatcgcaagaggaaacagcgcaggcagaatctgcagcagcagagtaaacgtccaaggctacctccatatgtcaggccaggagttggcaaccagcacgggcagccattttcaggaggtcgattcgcagcctgtgccactaccatacctccatattattggtccatgggatga

SEQ ID NO: 6763 - DNA, 1632 bp, Zea mays
  Peptide Sequence Number=SeqID_48542
atgcgggtcacccataacaacctactccatctaagtgggttagcttgcaggcttcagtgggttagcggcgtgtaccaggccagtggcttggtggcatggcccaaaccatttgcaagcctagctcggaagaggaagctaggattgctcgaggatgaggaaattgctaatttggcatctgcagcttccgcgcagggcagtgagtttgcagcaaaggatgcagcaaaggataaagctcctttaacagtggcaaagagcaatgatcattctgagagatctttctacaaggagcttgttaaagtaatcgaagcttctgatgtgattcttgaggttcttgatgcaagagatccgctgggcacccgttgcattgacatggaaaagatggttaggaaggctgatccaagtaaacggattgtactacttctcaacaagatagatcttgttcctaaggaggcggtagagaagtggcttacatatctgagagaagaaatgccaacagttgcgtttaagtgtaatacccaagagcagcggaccaagctgggatggaaatcttcaaaactagataaaacaaacatcatcccacaaagtagtgattgccttggtgctgagaatctaattagattgctcaagaattattccagaagccacgagctcaaactggcaattacggtgggtattgttggactccctaatgttggcaagagcagtctgatcaacagcctgaagaggtcccgagtggttaatgtcggttccactccaggggttactagatcaatgcaagaagttcaattagacaagaaggtaaagttgttggattgtcctggtgttgttatgctcaaatcttccaacagcggtgtgtctgtagctcttcgaaactgcaaaagagttgagaaaatggaagatccagtcactcctgttaaggagatccttggtatttgcccacatgagaagttgctgtctatgtataaggttccaagcttcagttcagttgatgatttccttcagaaagtatcaactgtacgggggaaattgaaaaagggtggtgtggtggatgttgaagctgctgcgagaattgtgcttcatgactggaatgaaggtaaaataccatattttacactgccacctaaaagagatgctgtggaggactcagatgtagtgattatatcagaagatgggaaagaatttaatattgatgaaatttacaaagctgagtcttcatatattggtggtttgaagtccattgaggagttccatcatattgagattcctcctaatgctccaccggcaattgacgaagagatgctagaggatggcagcaaaccaagtgaacccgctcaggaaaaccgggaggagcaaatgtctgacgcgaacgacccacaaggaagcaagccagccaccgccagcacgcagaacgacaagttgtacaccgccgagggcatactcgaccctcgcaagaggaaagcagagaagaaacggcgcaaggcgaacaggttcagtgtgctgaacgacatggacgcggactacgatttcaaggtggattaccagatggaggacgccgcggatggtgaagacgaagacgctggggatgaagccaaggaggataatgagccgatgactggcgtcgacgattcgtga

SEQ ID NO: 6764 - DNA, 411 bp, Zea mays
  Peptide Sequence Number=SeqID_48543
atgtccgtcgccgccgcgggccagtcggtggctgtggctaagaaagaggagttcagcaagtcaccgtccaactcgccagcctcgtcaggcggcacgaacggtggctcgtcggctgtcccgtggccgaatcagctccacgcgcagaacaacaccccggcgccggtgcaggccatggaactcgtcgtcgcactcaccacctgcgccgactccgtcgcaacctgcaaccatgacaccgccaactactacctcacgcggctgggcgagatggcctcccccgcggggcccacgccgatgcaccgcgtggccacctacttcgcggaggtgctcacgctgcacgtggtgcgcatgtggcccagccgagatttggtcattagattcaatagtttgtggtactggtggcgtgtggcctag

SEQ ID NO: 6765 - DNA, 924 bp, Zea mays
  Peptide Sequence Number=SeqID_48544
atggcgcttcctgttgacgtggcgggcctgtgccctaggtcgggcgacgtggaggctcctacgaagccggggtcgagtctgtcttccgtggccgaggccgagcccgagcccctgggtcgggcgaggcggaggtcgttcggcagaggccagggcggagtccgagccctggggtcgggcgaagcggagttcgtcgtcttctggggaaaagaggactatctgcttgtggaaattggagatgctcagattgactacagcttatttttgacatcaatgcaccatgctggtgatatgagtaacacattgatgagtgtcatcgtcgaatacttcaacagtatttctggggccctctttgacactgtttctagaccctctaccatttctaaatatgatatctgtcctttcttgttggagaaagttaaaaagggttgcaactttaaagttaaagatagtttactgaagactcttgaggaaacccagaaaagagatatgattatgctcccgattctggatggcagtcattggcaacttcttgctaatttcatcgaattactgaagatacataaatgcatgaaatttgatgttaattcttttgaaaagatcaaagctagcgaaattgttgcatgcagaatgaaactcacacatatgctgatcaaatctaagcaaaatagtgctgatccatgtaatgtggttaaaaaactagatgtgaatataaagaaatatagcgttagttcccgaaaggtgatcacaagtaagaatttgacgatgctgatgggactaatagatcaagagattgaagagattaatgcaaaaaagagaaagcgaagtggacatccagcaggacaaccagaactgaaggacgatgacggtcaactaagggcaaacgcagtcaaggctcgcgacgctgaattgggttgtgaaatgtaa

SEQ ID NO: 6766 - DNA, 2583 bp, Zea mays
  Peptide Sequence Number=SeqID_48545
atggcgatgcagcaacagccgcccccgcctcctgggaacccctggccccctcaccacggcgccgggcagcacccgccgcctacctaccctcctcctccgccggggcaggcttggaccaatcactcatgggctcagaatcatggatatcaaggtcatgacaatgaggaagattgggctacaaaggctaaggcatgggttgctgctaaatctgttatgggaaaccaccagattcaacagcatgccatatccacaagtagaactgaaggtcatcataatggttaccatgatcagtatcagcaaccagctggtctgccaacagaagttacagaagctttgcacccaccagtacctcaatcaagtattgatcatgtgccatttccaatgacaggtcaacagagagaaacaaaccatttattagatagaggtccaatggtgtctccagcaaagaattttggttcattttcgtccacctatgagcaggaggtatcttataattattcttctgctccaggtactgggaataatatgcttcaatatccaaactctcaagcacagccatttccaaccacggcagctgttcaaggtggattctcacagggttgccttagtatgcctgttcccttgacagaacagcctctttttgggcatgaaagacagccaattgatccaagtgaccaacctttggaatttaacagtaggaaagctcctgatttggcagtacatataaatgtcaattccaatatcccagctcctcaaacactagcacctaatcatgatgtagctgcaacctctacacattcatggacgccatctgctacagtagggtacctgcctcgagctcctgtgccaccacaaacagcacagatggatccttctgtgcatgctgcaccactttttggagcagcatctagttctagttatgtttcacctgcagcatttggtgttggtaatgtaacagaagtgttccctacagatccaaacactccttttagtgttgcagataaatcaaagaaacctccagtacctaactggcttcgggaagaacttttaaagaaaaaatcggaaccactgagtgcttcagcgcaaaactcagaaaacttaaatcccatggaagctaatgaggcagtacagacaataggaagacctgaccaaagtgacagcagaagcaatgattccgctaaatccactgaagacgatgacgatgatgaggatgaaattgaagcagctcgaatggcagcaatcaacaaggaaattaagcgtgtgttgactgaggtccttttgaaggttactgatgagctttttgatgagatagcaacaaaagttctaaatgaagacgactcagctgaatccaatgaagccactggtgttttcggatcaaaggagactggtctgggaagatcaagagccaaggcctcggctaaagttgttctccctgctaagtcaacaaatagttctgatcataaagatagtactgggttaagttcccctaaaggtgctcttctcggcctggctagttatgattcagatgatgacgacgatgctgacactgacagcaaggataagatgccaatatcaaatttatcttctaaagataatgctggtgctgtaaatactgaaggtgataaaagcactcttggtaaaagaaatgggaatcacaatgaacagaattcttcacttggaagttctccatcaggggaagatcttaaatctaataatcaaaactttcaaaggaatgcgaatgcagaacctgaacaaatgcatattcgtgatacagagaatggggagttccgtttcaaggccaagactcgtactgagccaaagggtgcatttgacagaatggatgagaaggcacatacgtatgcagaggtagatatccagaacagaaaaacctcttttggcaataatgctgaaaagcacaatgatttggaaagcagtcacagacattcagaaaagagcagcaaagaggactttgttaatgagttgaaggctgatcatacaaaagaactcgaatattctagagcagaaaaatataataacgatgacaaatacagcatgtatggaaatattgacaaaaggggtagctgcaaggagggaaaaggttctgatagtgctgcaaagcatgaatccgatacaagggagccacattacagaggtaactctaagcttgatggtgcaaagggagattggaaggatttgccgaaggatagagagagaaatagagatgatagaagggggaaaggaaaggatgaaaaggacgacaggttaaggcagatgacaagtcataacagcagaagttcacggtcacgatcaccaagggggagaagtcgtactagaaaggagaactcacatgttcgagggagtgtttcaagtgatgagccttctgatagtgtgaaaaagagaaagcattattcccataaaaccagcatgtcaccttcacccccaaaatctagaaacagacgaatttcgcggtctccacatagcaagcattctcaccgcaggcattcgccttattcatcggctggcagatttaggatgcaaactagattagctatcaatctttctgtggctgattatggaaattag

SEQ ID NO: 6767 - DNA, 678 bp, Zea mays
  Peptide Sequence Number=SeqID_48546
atgccgcgcagcagcggccgcgcgtcgccgcgcgcgcgccggtcggccaccaccggaccacaggaatgggaggaaaacgaggccgaggaggtgacgcggcggaggacgtcgaggaagcggtcctcgtcgcaggggagcgccacggggcccggggcggccgggaagccgtactcctcctccgcctgccgcagcagctccaggaacgccgggtggctgaggtgcgccagccgcaccacgaaccgcctcggcgccgccgccgtgccttgcacggacacggcgacgtgccccgccggcaccgcggcgtcagaggaggacgatgccgcctccgcggcgcgggaccgccaccgccgcagcgcgcgccgtagccagacgagcgacgggatcgtcaacgccaccctgcacatgatgcttggaggcttggagctggagctgctcgagcggccgggttgttgggtggttttgcttctctttgctgtggaggctcgcagttgcgcagtcgaggctgtggaccttgtggtggacatatacatatatatagagagagagagacaggtcgtgagccttcaaaagtgcaccaaggagctggtgcctactgatgttattaaaaggatggaaggggtttccctgacgagacttgagagtgcaacgccctgcttctgcttccagataattggataa

SEQ ID NO: 6768 - DNA, 198 bp, Zea mays
  Peptide Sequence Number=SeqID_48547
atggagatatataaagagctggtccagagtttacaaccgcttctgactgaaaagaagaatcagttacattctctagatctcccagctgagttgagagttgctggattgttttacaagggtattaacttcaaggtgaaggatgccaatcaaggccaaaggaagatcatcgccctctttgaaaagctttggaacatgtga

SEQ ID NO: 6769 - DNA, 612 bp, Zea mays
  Peptide Sequence Number=SeqID_48548
atgagaatgattgctaacacatcaaattctggccgtcgtcatgggcccacagtggcaagaagtgtagtacttgaggctgttaatgtggatcctgggagcagtgaactcccagcttttgttgcgcagattctccaaagtgtgcttggaacaatcaatgcacaatctacgggtacaccaacatcttctgacaccggatctttagatccttcacaatcttccatcccaaatactataagagttgaactcgaccagcaacaagctcctctgctttttcagtctgaacccgcacatgagtcatctcaaccaaatgtcatccctgatgctttgacaactatgtctcagtacattaactttatgagggactcatttaggagggagggctttagtcttaatggacaaacagagggtaatgtggaaaacagaactgcagagcctgaatcagcttctgtgcttgggcttcataatgcatcattgctagctgaaaatatgcactctactaggcaaattattgttgaacaggctggtgcattgctgtctgcgagcagccaagcaggcagaggggcgcaggcgccgttgaatggagcaggacagcagggggtgcagaaactctga

SEQ ID NO: 6770 - DNA, 555 bp, Zea mays
  Peptide Sequence Number=SeqID_48549
atggccgcagctgagcacttgcacgcgatcgagctcgtacctgcaacttgcaagtcttgcagaaacccgtcgccctcaccgatcggcagcggacccgactcgccgcgcgcgcaccgccgcgtggcgaggccgcagcaggaggaggaggaggaggaggcggcggccgacgtggacacgcggtggaggacgtcgcggaagtggtcctcgtcgcagggaagcgcgatgggcccgggcgccgccgggaagccgtactcttcctccgcctgccgcagcatctcacggaacgacgggtggatgaggtgcgccacccgtaccacgaaccgcctggtggagccggacccggcggcggcggcggcggcctccacgcacacagccacgtgccccgccggcaccgaggtgcagggcggggggaggagaaggagaaggaggtgcagccgtgccgtgcgtacgtacgacgtttacagtgcactgtaccgggacactttgaaggtgacgccggcgtccggcggcgctatgcgcagtgctgccgtggcgttgctttgctggtactgctaa

SEQ ID NO: 6771 - DNA, 1275 bp, Zea mays
  Peptide Sequence Number=SeqID_48550
atggacgtggtgaaggcggcgcagttgtcggggcggacgctggaacgggtagtggtgcatcccttggtgctgctcagcatcgtcgaccactacaaccgcgtcgcccgcgacacccgcaagcgcgtcgtcggcgtcctcctcggcacctcatcccgcgggtccgtcgatgtcaccaactcctacgccgtgccgtttgaggaggatgacaaggatcctaggatctggttccttgaccacaattaccacgagtcaatgttctccatgttcaagaggattaatgccaaggagcatgttgttggctggtacagcactggcccaaaactaagggagaacgacttggatgtccatgcattattcaacagttatgttcctaatccagtcttggtgattattgatgtccaacccaaggagctgggtataccgaccaaagcgtactacgctgtggaggaggttaaagagaatgcaactcagaaaagtcagaaggtatttgtccatgttccttcagaaattgcagctcatgaagttgaggaaattggagttgaacaccttctaagggatgtcaaggacacaacaataagcacacttgctacagaggatgtctttaatctccttccaaatttgaacgtaaatgagctaattaaagcctttgcagtgaaaacaaacgacatgatgttggtgatatacctgtcttctctgatccggagcgtcattgcgcttcacaatttaatcaacaataaggctcctgcaagcgtcgaaccctacgcttcggtggaggccacgccggagaagaagccatacccacctgccacggtcgcagaggaggtgaggttggctggcgctcgaacccggtaccacattccactcgccgtcgctgatgtgcctgtccaagattttggattgctatgcttgctgagtattctaaagtcatcgactgattgggagcaacttcaaagatattccttaaagcaagggagcattgttgaatctcatgaagaggatgcttcgaggagagtgacaactgatgaaacagagagtcaagaggatggccaagatcagtttgagagagccaaaactcaaaacatggaaactgcaatctcagaggtgattttattattgtctgctatgttgaattttgcttcacaatctggtggccaatttagtcgtaccatccgcttgctcaatgatggcgtgcgccaggtgttcgacaaaatgcagtggttgcttctcctgaacatcgatagtgtcctagagtcatgcagtgccccttactggtaa

SEQ ID NO: 6772 - DNA, 375 bp, Zea mays
  Peptide Sequence Number=SeqID_48551
atgcaggcgcctccctccgctgcgggctgcggcagattgagcagcgcgccgcagccgggcccgccgcacagtgggacaagtacgcaacagccagacgacggggagggtcacgggccgcccggtccatccgtcctggagccgaagccggagagggtgaatggggggcaatgggcggtgtgctctccggatgttaacacgattattcggttggtggtgtaccgtaatcattgtgaccagcctagcgacagcttcaacgtatattctttccctttctttctccaagaagaagaaaatgggtgggaggatcattcagcgacaagtccattggagtcactggtaaactgttggcgatggtgtaaagcactcgggaagtga

SEQ ID NO: 6773 - DNA, 429 bp, Zea mays
  Peptide Sequence Number=SeqID_48552
atggcgaaatgcagcagcaagatccggtacatcgtgtggctgcggcagacgctgcggcggtggcggtcccgcgcggcggctcgcgcggcggtcccggcggggcacgtggcggtgtgcgtgggcggcgcggcgcggcggttcgtggtgcgggcggcgcacctgaaccaccccgtgttccgggagctgctccggcaggcggaggaggagtacgggttcccgtcgggggcctgcgcgggccccatcgcgctcccctgcgacgagggcctcttcgagcacgtcctccgccacctctcctccccgtccaagtccgcccgcttcgtcaccctcgaggacctcgagagcggcgcactgtcctgctgctgcgtcgccgccgccggagactcgctcccgctcctccgcggcatctccgccgacaaggccgtctggtga

SEQ ID NO: 6774 - DNA, 525 bp, Zea mays
  Peptide Sequence Number=SeqID_48553
atgtctgagagaatgctatcgatgtttcagactattcaggacagacaggacactctgcagcagcagcttctggcaaacagggctgagaacagggccttcatgactctcatgcttcagcatacaagtgttcagattcccccagttcagtcagcaccccctccagctcttcaggcagctattgtgccagccattcaggcaggaccccctcttcctttgcttggtccttcttcctctctgcttcggtcggtcaccctggttttctcgtcatcggtcatcagctccgtcagcgctccaccgccagtgccactagctcctgctgttaccactgctgctgtggcggtgtctgtgacctcttcggctccggcagttcctgtagcgtggcctatgtccgagtcagtaccagctccagcttctatagcagatcctggatcagagactgactctgaccctcagctggcgtttgctcttctgccacgaccgcgaccagatgcgccctcgccacctccttcctcttctggtctatag

SEQ ID NO: 6775 - DNA, 246 bp, Zea mays
  Peptide Sequence Number=SeqID_48554
atgaagctgtggaaggagacttccaggagttccaagactacgacgagttctaggtgtgggttagcggcaacccccagtcggctgcctgtgaaggccgcggttatctacgtttcttttccgcactttgatttattggagacaggttctctacaacttcttgcgcctctactgctgacgggagggaagggagcggatctggtgatccgtggtaacatagttctcaataggctgaacacagggttatag

SEQ ID NO: 6776 - DNA, 225 bp, Zea mays
  Peptide Sequence Number=SeqID_48555
atggcggaccaaattgccggcgatggagacggtgtttccagcgttgcgaaccacggacgacgcgcgcaaccacacgtggaagatctggctagtgaaaagaactacccaattccagccccagaggtagaggggaactgggccacggcgcaatgcgacatggcggcggcgctacaactacggccacccgtttcgaccatcggatccctcgatctcaaccccaattga

SEQ ID NO: 6777 - DNA, 735 bp, Zea mays
  Peptide Sequence Number=SeqID_48556
atgtgtgcgctgcgagaacatggtttggggttttcgtgcacgagcggggttagtgaatgtgtcatgcgagaagccgtacgcatggcaaacttcggctgtgagcgcgacagcacaaccacgaaccggtgctgcgcgatgcgcaagggcgcgagtggctgtgccgggggctgcgcgagccacgctggccgctcccaggcgagccgccgcacgtcgcgtcgggcacgtgtggccgcacgctacggctgtgcctacaagctaaacgggcgagtcgctcgcagcagccgcgcacagaggggagctcggccatgcctaggccgcaggggagcctaccgagggggcaagggtggctcagctatggccggacgaccacacggagagggtgggcgagggcccgagaggcgcaaagggggtggggaagagagacaaaagggctcatcagcggaggtgatggcaaatgggttcggacaccagcgacattcgcgcaaacgacgaagaaggcaacggtttttcgcggatcgggcaccatgcgacttgtgtgagggagcgaggcggttggagactcaattgaggatggttcggtcgaacggccagggcagcaaggtcgtgggcggttttttgtcgtggacgcggagtgctcgtgcggttggagaagaagccaatcgcctaggcagccagtgggtgtgcggcggctgcgctggggcgtgcctgcacacgagcgtgctgcatgggccgtga

SEQ ID NO: 6778 - DNA, 498 bp, Zea mays
  Peptide Sequence Number=SeqID_48557
atgaacgtatgtgagctcacccttgttgtactcacatcacccccaggtcaaggacaggcaccactggatgaggcgcttgaaggatgcggtgatgagttcgcgagtggtctaggccgtcatctcccagtcaactttgtgttgctggatcgttgttgttgcatgataagttgttccgagtcgctcgaggctagctctgggcgggagaagcagtcacgactcgaccggccaacctcgggcaggaatgcagtcacgactcgcctgaggctgacctcagataggagcgctgaaacgctccttgggtcgcttgatgggcctcctgatgacttgcctatcaaggcatgccctcgggccgtaaccaggctagatgagcttgacccagagagacaaatacgagacgatcgagttatgcacagaaggaacgttgataccttgggcagggaggttgagcatacccgaaaagctagatactcagagataactcgggtgaaggacaactaa

SEQ ID NO: 6779 - DNA, 2205 bp, Zea mays
  Peptide Sequence Number=SeqID_48558
atgctgctcctgcgccctaccatcctcgtcaccctcacgccgctctcacgccctattgtcctctttgaacgattaaggctggatccggaggcacattgcttggaagaagagttggaccaatttggtgttaggtcgatgcttcttcgggtggttcctcccgcaagcttccatggcagggttctagaggatccactcaatgttgagcaagtcgacatggaggagccctgcaatggtgagattctggctgcagcggacacgagattttctttcaagccagcatgcgggcctacagatttgattgcgaaaggcgcggagctggaggcgcccctggatccgggatccgacccggagtaccgggacttccagtttcggttcatcccggaggtgttcgagctccagatgggcggcggggtgaggaatggagacggcaaggtgacggcggagaaggttcttgggttcgagttcgacaaggtcaggatcagcattgcgtccagcgacgacgaggtggacggagaagcgccgccgaggagctccttctccggggcgagccacccgccggagccggtggacgagatagacaccgtctttgtcgctgtcgacggccgggagaagccggtccagaagccaatcatctcgtgggacgcgtccccgccgccgagcggcgcggcaagcccgcacagcagcatcgacagctccggcgccgccgccaccaccgtgacaatcacaagcctcgcgccgagctgcaccgtcaccagccggagcgccaagaccagcgtcagcagcagcgcggccagcgacggcagcggctggagcaacggcaccggcaccggcgccggcggcagcgccgggaagccgcacaagggcggcgaccccaggtggaaggccatcctcgcggcgcgcgcgcgcgacgggcccctcgcgatgggcagcttccggctgctgcggaggctcgggtgcggcgacatcgggacggtgtacctgtccgagctgagcggcggaggcgccggcaacggcggcgcggcgaggccctgctggttcgcgatgaaggtcatggacaaggcgtcgctggagagccggcggaagctgagtcgcgcgcagacggagcgggagatcctgcagctgctggaccacccgttcctgcccactctgtacgcgcacttcgagaccgaccgcttcgcctgccttgtcatggagttctgccccggcggcgacctccacgcgctccggcagcgacagcccggcaagcacttcccagagcacgccgcaaggttttacgccgcagaagtgctccttgcgctggagtacctgcatatgcttggagtggtctacagagatctgaagccggagaacgtgctcgtgagagaagatggccacatcatgatctccgacttcgacctctcccttcgttgcgcggtgtcgccgacgctggtgagatcttccctgaactccgactccaggaacgcgcaggctgcctgcatccagcccacatgcttcatgcccaagctcttcggccagaggagcaagaagagcagcagcgccaagaaatccaaatccaagggcggcgagcccaggcagcagcaggctcccacgggcctgccggagctcgtcgtggagccgacgggggcgcggtccatgtcgttcgtggggacgcacgagtacctggctccggagatcatcaagggcgagggccacggcagcgcggtggactggtggacgttcggcatcttcctgcacgagctcatgtacggcaagacgccgttcaaggggcagacgaaccgcgccacgctgttcaacgtcgtcggccagcagctcaggttcccggactgccccggcacgagcaacgcgagcagggacctgatcagaggcctgctggccaaggagccccagagccggctgggcgtgaagaggggcgccgcggagataaagcagcaccccttctttgagggcgtcaactgggcgcttatccgctgcagcactccccccggcgtgccccgggccgtcgagcccgtggcgttggcgccgcccgcgccagctaagccagcgccggtggaaagagcggagatcaacagcagcagcaatagcaagaggatggagatcaacagcagcagcaacagcaagaggatggagatcaacagcagcagcaagaggatggcaggaaccggttctgagtccggggggaagttcctagacttcgaattcttttag

SEQ ID NO: 6780 - DNA, 207 bp, Zea mays
  Peptide Sequence Number=SeqID_48559
atggcgctctgcgacggcaacatgatgttctcggttcttcgctgcggtagtgttcagatggtcgagattccgccaagactactgtggggtaataatcgaatcatcgcgtggcacaaccgggagaaccgagggatcatcaacggtgatcccatggccacgtcaccggcacgtggtgctacaacaagcttgtgccagtgcccaagttga

SEQ ID NO: 6781 - DNA, 546 bp, Zea mays
  Peptide Sequence Number=SeqID_48560
atgcctcgacataatcaagaagttggtccaaacggtggtgcaacatctctagttccgcttccaaggctgccacaagagacggacgagataatagaaggggacaaaatcctagaaaatgcaagaatcaatcgacttactgatgacacaatcgtcggcctcggcaagctacacccgcagcagctcggcttcggcctcggtggcatcctatgccgcgtgagaggcgtcgtagctccccgcgaacacctgaggggaagaggaagagatgtggaactcgtttgtgacgcaacccttgggtctatgttgaccatacaactatggggagaaagggtctaccaaagtcaggccaaaagaggggtcggcaagcccaagggaagaatcctaccttggctcgtaaacagcggagcgctacatcctgatgagcccaaggttcgactgccaacccgatcaaaggcgagttcaaaggacatgccaagggtgtacaacaggagaacgatcgccgacatttataaagagggcagaggagcgccgactccaccctggggatga

SEQ ID NO: 6782 - DNA, 921 bp, Zea mays
  Peptide Sequence Number=SeqID_48561
atggcgtcggtgcaagtggaggccaatcatggccacggtgctgccggctctccaccttggaagctttatcacaacccccactacaccccgcggggcaggggcacccatctctcctcatcctgctgctcgccctctccttgccaagtccgcaggagtcccgagccccctcctatgatcattgcgctggacgacgaggaggtcgaccaagggtacgggtacggcgccatgtcgtcggagctggagctctgcgtggcacgcatcagggacctgagggcggagctggagttcgagcggcgcatgcggcgcaaggcggaggcgctgagcgaggcgctggccgcggagctggccgacgagcggcggcggagcgaggccgcggaggccgagtgccgggcgctgcgggaggaggccggcgccgcgcgcgcggaggcggagcgcgccctggagggcgtcgaggaggagcggcggatgctgcgcgtcgccgagctgtggcgcgaggagcgggtgcagatgaagctcgccgacgccagggccgcgctggacgagaagctgcgggagatcgacgacgccgtggcacagctccaggccactgccgacgccaacaagagcagctgctgcagcagccccaacggcagcaagtcggcgagccagcacggcgggcaacagagcccgcagcacggtaagccgcaccggcgagagcccggcggcggcggcgagaacccgcacatccggagggggatcaaggggttcgtggagttccccagggccgcgcgcctgcgcctgcgcccgcgcccgcgcgaggagcgggtggatctggtgtccaacctcgagtgccagcgggcgcagctgcgcgtgctcatgcggcacaggagccccgccgccggcatgggcctcatcggcgcagcagaaaacctggtcgtgtag

SEQ ID NO: 6783 - DNA, 1047 bp, Zea mays
  Peptide Sequence Number=SeqID_48562
atggcgccgccgcgtcgctacctggccgcgttgctcgctctgctatgcgcgtgcaccaccacgatgccgccggcgggctccgtcgtcgcggccgcgaacgtaccgatcactacgtgccggtcgttctgcggcaacatcacggtggactacccgttcgcgctgcaccccggatgcggccacgcggggctgcgggacctgctcttctgcatcaacggcgcgctgatgctccacctcccctcgggctcctaccgcgtggtcgacgtcgactacgcgtaccggggcctgaccctgcacgacccggccatgtccgactgccgcgcgctggacctcgccccggctgggcggggcaacggcttcgtcctcgagccgtggcgggagccgtacctgtcgccggacccggacaacgtgttcctcctcctaggctgccgagccacctcgccgctgttccagggcttccccgaccgccacctcccctgccggaacgtgtctgggatggggtgcggagactacctcggctgcctcgcctgggacgactactacgccggcggcggcgggcggcggggcccgtcgtcgggcgacgccgcggggcaaccgcccgagtgctgcgcgctgccctggggtgccatccgggcggtgaacgtcagccggctcgagtgcgaggggtacagcagcgcgtacagcctcgcgcccgtgcgcgccgagggcgccgccgcgggctgggcgtacgggatccgggtgtcgtggacgctgcccgagtccaaccgcggattctgcggcgcgtgccgcgccacgggcggggcgtgtggccatgacacggagagccacgccgacctgtgcctctgcggggactggaactccacctccaactgcgactcctcggccgacgcagcacggtcggtcgccgccacgctgcccgctgtcgccgcgcttcgctgggccatcctcgcctcagctaagataagtaagaaacctagaaggaacaacaataacaatactaacaataaacaacaattcactagtcataagctattgcaagagaacgagtaa

SEQ ID NO: 6784 - DNA, 432 bp, Zea mays
  Peptide Sequence Number=SeqID_48563
atgccaaagtggaagcggggagtggcaggaattgaacacctacagagggccttggggccggatgggcggcgcgacggggtgaggaatggagacggcaaggtaacggcggagaaggttcttgggttcgagttcgacaaggtcaggatcagcattgcgtccagcgacgacgaggcggacggagacgcgccgccgaggagctccttctccggggcgagccacccgccggagccggtggacgagatagacaccgtctttgtcgctgtcgacggccgggagaagccggtcccgaagccaatcatctcgtgggacgcgtctccgctgccgagcggcgcggcaagcccgcacagcagcatcgacagctccggcgccgccgtcaccaccgtgacaagcctcgcgccgagctgcaccgtcaccagaaagaaagaaacctga

SEQ ID NO: 6785 - DNA, 372 bp, Zea mays
  Peptide Sequence Number=SeqID_48564
agacggaggcagccatgtcgttgccgctgccgccgcgcgtggtgccgctcctactctacgtctgcctctacctcacccacctcccccgcctcgcctcctccaaaccccggctggacgggggtcacctgcagccccaattgcgcgcgcgtcgtggcactgcacctcccggggctgggcctctcgggcgccgtccaacctggcacgctcggtcgactcacggcgctgcagctgctcagcctgtgctccaacaacctgtcgggcccgctccccgccgacctcctgcgcctgcctgcgctaacggggctccacctccaccgcaacgacttctccggcgcgctcccggccgggctcacgaggctcgccgcactctag

SEQ ID NO: 6786 - DNA, 285 bp, Zea mays
  Peptide Sequence Number=SeqID_48565
atggcgaggccgaccgagccgagggactcctacgccttcgggatacggatacctcactcatcaccttccgtgaaaagtaactcacgctcgggttcgggcatcggaggagcaccaccctcggcgtcgtttccaccttcgacggagtctggcccgaccccagacggcgacccgagcggaaggatctccaccccgaaggaggacgccagctccgcgctagggctctcgtggccaggctctccgcaaaggttccggcccgagcaaacgccccagctagccgttccgtag

SEQ ID NO: 6787 - DNA, 249 bp, Zea mays
  Peptide Sequence Number=SeqID_48566
atggccggtgggcgccgcgccggagaactaccgcgccagggaagcagcgcgggtatgggggtctgcaggggcgagggtgccgccagggctagccacgacgccgtgccggggacgaggccaaggctgagtgcgctgcgcgcgactgcaggggacgcgcacgggaatagcacgctctgcaccggctggccgtgcgagggagagagagggatggagagggatcggccatgggggagaaggagaggcggctag

SEQ ID NO: 6788 - DNA, 201 bp, Zea mays
  Peptide Sequence Number=SeqID_48567
atggcggatgtcgctcctcaattcgttgattctgtcgccatccgcgacctagatagcattccggcatcggagttcattccgaagctgatttacttgtgcctcaagatccccgatcggatcattgctcccactgctgctatcctcatgccgtggggcaagttggtgacaaggcacaccgattggcccgaaaggcttaggtaa

SEQ ID NO: 6789 - DNA, 177 bp, Zea mays
  Peptide Sequence Number=SeqID_48568
atggcgagtgtagcctcaaactccgcaccaacacactcgacaagcttgatggcgacccctacgtcagcatccacatcggcaaggtcatgcaatgtcaacctcaacaccttgatgaacatgttcaacgtgcttggtgctggtggtggccttggtggtcgaaatgcttctaatggttag

SEQ ID NO: 6790 - DNA, 207 bp, Zea mays
  Peptide Sequence Number=SeqID_48569
atggtggcgatgagcagctgggcggtgctggtggccgtcgtgctgatgcagtgctgcaacgtgatcgtcgcggcgagaccattgccaatggagacgccggcggtagctacagccgacggcggctggctggagatgatcatgcaggtgctacaagggccgggctccaacaaccacaattgccaagctcccaacggatcctgcccctga

SEQ ID NO: 6791 - DNA, 609 bp, Zea mays
  Peptide Sequence Number=SeqID_48570
atggcggtggcgaggatctctccctctcctcctcggccttctccttcctccgatggtcgtcgacttcgtggccatggagaattcggggttgtgagggcatccacggagacgtcggtgatcgagatactaggcatcaagatggggtgcatctcgcccgtatcccacctcttcgagctcgtcctccgccggtggcccaagtgggggcggcggtggcgtcctagacgccactaccttcctgatggcgtcgcattccccatcactgtcttccatgagcgaaagcctggtccatctcagacaggcggcggtggcgtcccaggcgtcactaccttcctaatggcgtcgctattgaatcttgtctcggccacgccgccgcctttggttgatgctttcgcttctcgacgtccggttttgaacccgatttcctttaaaaatggatcaattcctttctttttcttaatagagatgcagtgctcctaccattacattaaaaagaagacgagacgacggatggatttggatggatggcatgaacttgcttggaatggtacggacgtacgggtgttggaagaagagaggcaaggtggtggtggtgctgcagtgccgcgctag

SEQ ID NO: 6792 - DNA, 252 bp, Zea mays
  Peptide Sequence Number=SeqID_48571
atgacggcgtttgatgagagcaggactctcggcacaggaatacactcgacaaagatttctttcccgagtatcaaacactcggcgaagggcggcgctcggcaaacggtcgccagccgccgtgtaaagctgacggccgttatctctgccgagagccgagttctggcactcggcaaaggctttgccgagtgttttccagccttcgccgagtgcttcagatactcggcaaagagaacgattccggtagtgatctaa

SEQ ID NO: 6793 - DNA, 189 bp, Zea mays
  Peptide Sequence Number=SeqID_48572
atgagctgggcggtgctggtggccgtcgtgctgatgatgcagtgctgcaacgtggtcgtcgcggcgaggccgctgctgatggaggcgccggcggtagcgacagcacacggcggctggctggagatgatcatgcaggatgcaatagatgcacatagagaaagtggacacatggaagtgttgcgtcattga

SEQ ID NO: 6794 - DNA, 174 bp, Zea mays
  Peptide Sequence Number=SeqID_48573
atggaggtggttcacaggttcaagtatgctcagatccatattgttgctgcccttgccacaacacgaatgttggtcctccaccttctgcaccgcagccacagcggacaacaacaatgggaggatactgtagagaaggagctcggcgccgacctctggcacgtcaccgccacgtaa

SEQ ID NO: 6795 - DNA, 2436 bp, Zea mays
  Peptide Sequence Number=SeqID_48574
atgcgggacttcatgaccgcatgtgactactgcctctccgactgttccgacggtagccgcagcctcgacgacgaggactgcggcccaagccgcgaatgtttccacgtcgatctaggggatccctccgaaggcaatcatctcggcatgccggaggacggtgatctccctaggccggtgcctcgcgctgacatcccacgggagctagctgtggtccccgttccggcggggggtcacgacccacagctcgagcaagtccgcggggcgcaggccagtctcgacgagggagcaggagcgcttgagccgatccgtcgggacgtcgggcaggcatgggcgggccaacccccggccggagaaatacgtcaccttccccagggtctccagcaccgcgtcgccaacgacgtcagggtcaggccaccacccgcatccagtggggtcggtcagaacctggctgcagcagcgatgcttctccgcgcgatgccggagccatcaaccaccgagggtcggcgaatccagggagagctcaagaatctcctggaaggcgctgcggtccgacgggccgagagctctgcctcccgaaggcagggatacccctcggaacctcatgccgcgacttcccgattcatgcgggaagcctcggtctacaccgggcgcacgcgcaacaccgcgcctgcggctccgggccacctcggcaacgagcaccatcatcgcgaccgtcgggcccacctcgacgagagggtgcgccgaggttaccaccccaggcgtgggggacgctacgacagcggggaggatcggagtccctcgcccgaaccacccggtccgcagaccttcagccgggccatccgacgggcgtcgttcccgaccgggttccgacccccgactactatcacaaagtactcgggggaaacgagaccggaactgtggctcgcggactaccgcctagcctgccaactgggtggaacggacgacgacaacctcatcattcgcaacctccccctgttcctctccgacaccgctcgcgcctggttggagcacctgcctccggggcagatctccaactgggatgacctggtccaagccttcgccggcaatttccagggcacgtacgtgcgccccgggaattcctgggacctccgaagctgccggcagcagccgggagagtctctccgggactacatccggcgattctcgaagcagcgcaccgagctgcccaacatcaccgactcggatgtcatcggcgcgttccttgccggcaccacctgccgcgacctggtgagtaagttgggtcgcaagacccccaccagggcgagcgagctgatggacatcgccaccaagttcgcctcaggccaggaggcggtcgaagctatcttccgaaaggacaagcagccccagggtcgcccatcagaagatgctcccgaggcgtctactccgcgcggcgccaagaagaaaggcaagaagaagtcgcaagcgaaacgcgacgccgccgatgcggaccttgtcgccgccgccgagtacaagaaccctcggaagccccccggaggtgccaacctcttcgacaagatgctcaaggagccgtgcccctatcatcaggggcccgtcaagcacacccttgaggagtgcgtcatgctttggcgccacttccacagggccgggccacccacggagggtggcagggcccgcgacgacgacaagaaggaagatcaccaagcaggagagttccccgaggtccgtgactgcttcatgatctacggtgggcatgcggcgaatgcctcggctcggcatcgcaagcaagagcgccgagaggtctgctccatgaaggtggcggcgccagtctacctagactggtccgacaagcccatcaccttcgaccaagctgaccaccccgaccacgtgccgagcccggggaaatacccgctcgtcgtcgaccccatcgtcggcgacgtcaggctcaccaaggcgctgcgcccttccatggggaacattcccgggaagcgcgtccagcccctcggacgactcgaccttcccgtctgcttcggaacgccctccaacttccgaagggagactctgacgttcgaggtggtcgggttccgaggaacctaccacgcggtactggggaggccatgctacgcgaagtttatggccgtccccaactacacctacctgaagctcaagatgccgggccccaacggggtcatcaccatcggccccacgtacaaacacgtgttcgaatgcgatgtggagtgcgtggagtacgccgaggccctcgccgagtccgaggccctcatcgccgacctagaaagcctctccaaagaggtgccagacgtgaagcgtcatgccggcaacttcgagccagtggagacggttaaggccgcccccctcgaccccagtggcgacgcctccaagcagatctggatcggttccgggctcgaccccaaatag

SEQ ID NO: 6796 - DNA, 264 bp, Zea mays
  Peptide Sequence Number=SeqID_48575
atggcccaagggcacatttccctttcaggcattaaatgtgctacagtgcgcgcctgcgcgcgcagaagtcagagtaggcgccagaaggcgcaccggatagtctacaggacctatccggtgcaccaccggactgtccggtggccccataagtcagagctccaacggggggagtttgaaggcccaccattgatggcaatcaaggttgtttttgatcgcacgtctcacaagaaagatggcattcattacagtgcaaacagccagtag

SEQ ID NO: 6797 - DNA, 921 bp, Zea mays
  Peptide Sequence Number=SeqID_48576
atggctccgcgctctgtgctgcatgacggtcctggaaccgatagcttctccagcccgtctttgtcgttgttcgccactttggtttgggcacccaccgtcgtcatgggagcgtgtgctgctttcggaaggatatatgatatatgttcatgtccacacgctcgatatagattggcccagagcagacctaacaaggttcatggagcatggttaccaccttggttagcgacacactatgctcgttacatggaggttgtctcaggtcactggaattatcatggaaaacctgttgtgcagaatgttttgcataaggcatcagaaaaatcagcacatgcaaagaaatgggctgaaccacatattgagactgctaagatgaaatggattcctgttaaggagaaattggttgtcctcaagaaaaatgcagaaccttatgtacagaaggtatcgacaagatcagtggagttttatgagtcatcaagggatgctgtgacacctcacgttgtcaaagttaaagagtttgctcatccctactaccaggaagccaagaagttttctaagccttacattgatcaaattgctgagatcactaagccacatgttgagaaagttagaactactctgaagccatacactaagagagcagttcatgcgtatgggtcatttcttgcgtctgcaaccacataccatcgacaagctcaggcgaccatcatggactacctccatcagcatggggtacccaagtcacttgcaacgaaggagttagtttggttcctggcttctgccttgctagctctgcctgtcttcgtcatatacaggcttgtagtagagaccttctgcaccaaaaagaatagaaggcctcgtggcggtaatggtaacggtaaccatggccagaagagacacaagcggcgatacgccgacaagtag

SEQ ID NO: 6798 - DNA, 724 bp, Zea mays
  Peptide Sequence Number=SeqID_48577
atgcggtggttctaccgcaaaggctcatcgggcttctccagcgcctccacggctgaggatgtcaccgccggcgtcgacggccaaggtctggtcgccgtcatcacaggtgcgtcgagcggcatcgggctggagacggcgcgtgtcctggcgttgcgcggcgtgcacgtcgtcatggccgtccgcaacgtctccgccgggctcaaggccagggaggccatcgtggctaagatccccgtcgcacggattgacgttctggagctggacctcagctccatagcttccgtaaggagattcgcctccaattttgactctctaaacttgcctctcagcattctcattttgaacgactttgttgcttatgggcaatccaagcttgccaatattcttcattctaatgaactgtctcgaatactcaaggaggatggagtgaatatttcagccaatgcagttcatcctggtgtcatcatgactaacctttttaggaacaggactattgtctctggccgaccaggccccgcggcggcggtaaccctcctccgccttcctctcgcccaactctcctaccacctccgctccatagatgaggaatctacggccgaggcagaggcgcccaagtcgttcgtgctcccacggctgccgcggccgaagctgagcgtgaaggagcggaaggagctggcctcgtacgctcatggcctcggcaaaaagctcaagtcacaacaggtcg

SEQ ID NO: 6799 - DNA, 1413 bp, Zea mays
  Peptide Sequence Number=SeqID_48578
atggcgtcggcctccgccgctcccgcgccggacagggaggagattgtgttcctggacgtggagacgtcaaccccgccgtgcgtgctcctcgagttcggtgccgtagtcgtgtgctcgcgcaggctcgtggacgtctcctccttcgccacgctcgtgcggcccgcgaacctcgacgcgctcccggacccgaccgcgcggagcaacggcatcacgcgcggcaccctcgctgacgcgccgccgttccgcgacgtcgccgacatggtctacgacgtcctgcacgggcacaacatcgtgcacttcgattccatgataatcatggacgcgttcgccgagattgggcgaccccctcctcaacccaaggccatgatcgacacccttccgttgcttacccagtgtttcgggccgagagcaggggacatgaagctggcaagcttggcaaactattttggtctagggaagcaaaggcacaggagcctggatgatgtgaaaatgaatattgacgttttcaagaactgtgctacagtcctgttcctggaggaaagccttcgaggtgtgcgtgtgcctaccgttcagaacatgtcgtcggggggtgcaacaatcagaacccaaggaataacaagtgatcctgcaccgaacagggataatcccaacgagtcgttgctggtgggatcgtccactgtgcatgtggaggaaatgatgctagacaccactgtcactgtgcagacggatacaaggagctcaggtgccttttctgggttcgttgagctagacgacgtttcaacggagagtatcaagatctcagctccgctgttcctacgcccgttcggtccgagagcaatcgtccagcacaagggttccccgctccagctcatctgtccaggtctggaagtcctctgggtcaacacaaaggggttcccaaacagcccacatcgaccaaaggtgggcataaaggtcgacatacctgagaaccttagtaaggtactagggttttgcgacgatctagcgcagagctcgtcgtcgtcgccaggaccaggagcaatatgcagtaattccagatggaaatccctgattgagagagacgcggatcggcgtccaacggtctggctgaagattcctacctttggcagtggcgacaccgcagcctgccggacacatgtatacgaaaaggagtgcgacggtgtcgttccaaggcttgtttccgaaagggtcgatccatcggaactggcctcgatgcttcaagggaacaaggtggtggatgcgttcgtctcggtggaaacattcgaccactaccaaagcgctggcattcggttggttgccaataggctggattcgacgatgtcaaacatctttgcagacttcactccaaattccatggccgacgagactggacagcaacagcacatgccacgctga

SEQ ID NO: 6800 - DNA, 255 bp, Zea mays
  Peptide Sequence Number=SeqID_48579
atggggccaccgttcctcaccgtcatcgtcatcgtcgccttcctggccaccactgcgcaggccgccgaccccttcgccttcttcgactgggtcgtctcctacatcaccgcctcccctctcggtgtcccgcagcagaccctcaaagttgaggcttacgcatcaaacatcttttgtgaggcaacatgcaagctgttcgagcaaaagcataatcgtgatctattttgtattggctgtgatcgaatatctcctggctaa

SEQ ID NO: 6801 - DNA, 2034 bp, Zea mays
  Peptide Sequence Number=SeqID_48580
atgaacgggagcaagtgtgacagatgcaagtggaggccatggagatggctcgttgcttcgtgggtcctagcggttattctggagcggggcggcgcggaggtgacggagttggatttggaggagcggcggaacgagcggcgcgacctgctggtgctgcgcgacacgctgcggtcggcgctggacctgcactccaactggacggggcctccgtgccacggcgagcggagccggtggcacggcgtgtcgtgtgacggcgacgggcgcgtggtcggcgtgtcgctcgacggcgcgcagcttacgggcacgctcccgcggagcgcgctccggggcgtgtcgcggctggaggcgctgtccctgcgcgggaacgcgctccacggcgcgctcccggggctcgatgggctgtcgcggctccgcgccgttgatctgtccagcaaccggttctcggggcccatcccgcgcggttatgccacatcgctatgggagctcgcgcggctcgaactccaggacaacctgctcaacggcacccttccggcgttcgagcagcacgggctcgtcgtcttcaacgtgtcctacaacttcctccagggcgaggtccccggcacccgcgcgttgcgacggttccccgcgagcgcgttcgaccacaacctcaggctctgtggcgaggttgtgaacgccgactgccgggaccaggaggggctgccgtcgtccggtgctccagcgtatggaagcagcagtccggtcgtgaggccggctggcgacggcggtcgggcggcacggaagcacttgcggttcaggctggcggcgtggagcgtcgtggcgatctgcctcatcgcggcgctggtgccgttcgcagctgtgttcatcttcttgcaccacaagaagaagagccaggaggtccgtctcggtggccgtgccagtggcagtgccacaggtgacaattcggatcacttcctgactcctctttcctctgcaacggccttctcgtttgtgacggagactcttgttctgtacaatgctaaagtgacggcggcggaggacatcaaggacaaggtggaggtggagcaaggccgagggagtggcagccgcagcacggaatccggcaagggggccgagctgcagctcttccgcgctgacggggccagcttcgacctcgacgagctcttcaggtccacggcggagatgctcggcaaggggcggttggggatcacgtaccgggtggccctccaggccggccccgtcgtcgtcgtgaagcggctgcgcaacatgtcgcacgtgccgcgtagggacttcacgcacaccatgcagctcctgggcaagctccggcacgagaacgtcgtcgacctcgtcgcgtgtttctactccaaggaggagaagctggtcgtgtacgagcacgttcccgggtgcagcctcttccagctcctgcatggaaacagaggcgaggggaggacgccgctgccgtggccggcgcggctgtcggtagcgcagggcatggtgcgtgggctggcgtacctgcacaagtccctgccgtacttccaccggccgccgcacggcaacctcaagtcgtccaatgtgctcgtcttcttctcggctcccaacggcaagcagcagaagcaggcggtgccaaagctgacggaccacggcttccacccgctgctcccgcaccacgcgcaccggctggcggcggccaagtgccccgagttcgcgcgccgcggcggcaggcggctgtcgtcccgcgccgacgtgtactgcctcgggttggtgctgctggagctggtgacggggaaggtgcccgtggaggaagacggcgacctggcggagtgggcgcgggtggcgctcagccacgagtggtccacggacatcctcgacgtggagatcctgggcgaccgggggcggcacggggacatgctccggctcacggaggtcgctctcctctgcgccgccgtcgagcccgacaggcggcccaagctgcaggacgtcatcaggatgatcgacgatatcgccggcggcgacggatcagagctggatcgccgttga

SEQ ID NO: 6802 - DNA, 693 bp, Zea mays
  Peptide Sequence Number=SeqID_48581
atgacgccgcatctgcccgccgtctcctcctcctcgaccaccaccacatcccgcgccgccgcggccgcccaccacctgctcgacgccgccgccgcgcccccgtcctcgccgcaccagtaccggaggcggaggcggcgccgggtgctggggtgcctccgcccgcgcgccgcgtccgtccgctgctgcgccgcggcggcgcgggcggcggaggccaccacgcgtgtcttcgtcgtctccgacctgcacacggactacccggagaacatggagtgggtgcgccgcctgcccgcccaggtcggggcgggcgaggggcgaggcgtcgacgcgctcgtcgtcgcgggcgacgtggccgagaccagggataacttcgcgcgcaccatggaggtcctcagggagcgcttcgccgccgtcttctacgttccagggaaccacgacctctggctgcgccgcgagggcggcctctatagttttgacaaggagaaggatgttaacagtgtgcgtgtcccttcgctagaaatggcttgtaaagactttcatgcttgccaatggccttcagacctgacaaatgatgatgaggctcttgctctttactttgacaagttgaatgacaagaatcatgatgctattgaagaattctgggtatgcctgactgaattacttgttgaattgcaattagtgatagctgccaaataa

SEQ ID NO: 6803 - DNA, 351 bp, Zea mays
  Peptide Sequence Number=SeqID_48582
atggacatcatcaccaggttagactccgtcgccaaaaacgatgtcgacatgttgtccttctccatcgacgcctacttgggcacacagttcaactacaaccccattgccatcatgacgttcaaggccatggagcatgacatcttcgtcagttgtgccacaggcaacacggggctaaagctcggcacaaccggcaatggcgcgttgtggatgctcactgtcgtggcgggcagttccatggcagtctggcagatcaacaagtcgcagcgcagtccaactgtccaagcaaggcacgtcggtccaagagcgacgctgccggcccggccgcgctgctcctccgagtccgagatctga

SEQ ID NO: 6804 - DNA, 1404 bp, Zea mays
  Peptide Sequence Number=SeqID_48583
atggggagcagcaagagagtgcccccgtaccttctgctggtgctgctggccgtcggagccgccgcggtgagcgtcggcatcctgcacaagatgagggagcgccgcgtccttgctgtcctcctccaggaacgcgaccagcagctcatctccttccaagtcctcctcgagaaagaaaaggaaattaacaaagagatgaggaggaaagtggacgaactggaagccaaaacatctgtcctaagtattgagagggcagaattgaaaaacaagctcatggattcagaaactaccacgacatatcttaccaacacgcagaaagaattggaagcagctcttgtggagaaagagagccatatcaaccaaataaaagagaatgcagttgcttcaaacccagatcagacgataactataaaggaactcctgcagcagaaagaagctgagcctgatcttgacaaatccgaaaattccagtgatcccattcctgctacagtagaagataattccaacaatactacaatatcagagagcagccacaatgatgagagcattgtagtgggagcaaacactgaaaatgcaacttctgaaaccgtggtagacaaatctgaaaactccaacgattccatgcctgctccagaaaaagaaaattcaagcaacactaatgcatcagatagcagccaccagaatgagaacattatagtggaagcaaaagaagataatgaaacttctgaccttgtggtactcgacaaatctgaaagcaccaatggttctgtacctgttactgcagaagaacaaaattcctacaacaccactgcatgggagagcaaccaacaagataacagttcctcacaagaacagttcttaaagttaacaaccaacatagaagatggccagtttcaacagaacaaaggtgatgccaatgagcaatcagatgatgcttcagagggaagccatttagatagatctgagcttcagcgggggaaccaaaaactgatagacaaccaggaagccagcaaagaagaaccggatggcacaagacaggtggaagatcctcaaggcgaggccagcaaccacggcagagaaagtaaagtgctcgagaaggaaaatgagaaagaaagaaatcctgagggcacgagctcagtggacaccttgagcgaagccaaccaaaacaaaacacaagcagtggaacctgttgtcgacccaacagatgtaaaccccagcacatccacaaataacgaggagagaagagaaacaaggaagagacgtagaaggagaaggtccagatctagaaggaataggaaggccgctgttgagggtgcaataacactccgagcatgcctccccataagagcacgccctcggccctgctgtacgcgcgcctccctgccccccgccgcgagtatcctctaa

SEQ ID NO: 6805 - DNA, 714 bp, Zea mays
  Peptide Sequence Number=SeqID_48584
atgcaccctcctcaccttgcctacattgatggtgagaaccaggatgctataaatctattttggggtattttcaaccacaagatggaaaaccaactcttctattggcccctgccaagtgatgatgcctccctgataccacttgaggcaagttttagtggttctttggttcacttaagatgtgaggctggcgggcgggcgggtgcggcatgcaaggaccggatgggtccaggatgcgtggagcacgattgggcatcgggtcggtgcacgttaaaacataatgcaaataatttagtgtttaggaaaattttatggatgccatctttacgtgcatgctttggagcacttttcgatgatgacccaaagaagtggaggatgtatgcatattttattgtaagtgctggaagcatatttgagctcatcactacactgtatcaggttacttccttccacttcaccattgggaatcttgcaaagggggctcttggggaatcgaagaagagtgataatgccttgatgaatgtcaaaattgatgatcagaaacttgccattggaaccctctctgttgataagaacccacacatacaatttgatctggttttcgataaagagtttgagctgtcgcacacatcaaaaactaccagcgtcttcttcactggctacaaggttgagcagccattcgaggaagatggatatccttttttagcattgaattag

SEQ ID NO: 6806 - DNA, 2046 bp, Zea mays
  Peptide Sequence Number=SeqID_48585
atggcgtcgcccgacgacgagtccgcgcagccaccatcgaagcggccccgacgcgatgccgaacctgaggtggacgccgctgagccatcaccgcgcgtggtgctcaacccagcggactgcgatctcgacttcgatgtaggcgggggcggtctccgggggagcgcgcttcacgagggcggcttcgcctactgctggtccggcgcgcgcgcgacggtgggcgccaggggcggcgggcggtactgcttcgggtgcagaatcgtcgctgagcagccggtggagatggatcccacgacctccggggagcgccacctctgccgcattggggtctcgagaggggatgatcccgtaggtgcgctcggggagtcccagcacagcttcgggttcgggggcacggggaagttctcccaccagcgcaggtttgtcaactacggcgtcaagttcggcgtcggcgacacggtcgtctgcgccgtggacctcgattccaagcccatggcgtcgatagggttcgcgagaaatggcgaatggcttggtattgcgaggcattttgatgcgggcgagaaagggcttggtctggttgacgctcctctgaggccgatgcgatggggatccgcactgtttccccatgtcctgctgaagaatgttatcgtggagatgcagttcagcagggaggatgggctgctgcctgttgatggttatgaaccctgggcctcagctttttctcaaaggaattcagtatttggcccttcgtttgagcaaaataaatgtgaggtcatgatgatggtcggtcttccggcctctggcaagtcaacatgggcagagaaatgggtcaaggagcatcaggagaaacgttatatccttctcggaactaaccttgtattggagcaaatgaaggtgccaggattattgcgtaagaataactatggtgagcgttttgaacgactgatggattatgctacatggattttcaacaaactgctgactagggctgcaaatacccctcgcaacttcattatcgatcaaacgaatgtttacaagaatgctcgcattcgcaagctgaggccatttgctaactaccgcaagactgctgtggtcatgttcccaactccaagtgaactgaaatccagggcagcgaagcgtttcaatgagatgggaaaggaaataccagctgaagcagttaacgaaatgacagccaattttgtcctaccactctcgaaggatatgcctcattcgaaggagccttttgacgaggtaatcttcacagagctttctagggatgaggctcagagaaccctagatgatatgcagcgtgtgttgccaagaaatgtgaccccaagctatggaaactctggcaaccaaaaacattatagttcaacatatgctgggactgctgctccacttgatcctagtgcaaggtcatcaatgccaggcttttatccaccaacggccaattcatatggagttggcgacctacgtagcagtgctgctactttcagcacaggtgtgcatactgaaggcaacacaacacatggacagacaccctgcagcgttcgaagtttccggagtccaacaggaaaccaacatggaatccattcaagctatccaagtgctccaaaccaatatcagatgccctcaagctacctgagtaactcaaaccaatatgaagtccgtgcaagctaccgaagtacaccacttccgggatatggacagagtacatatgcttcccgcaggaacccaagcccatacaattctgagatgcaccaaggtattcaggctcccatgagtagcaggaacctctaccgagcacctgggtcagccgaagcctatgtggcaccttgctatgcagctggaaatctgattgggaggccacatcaggtgttatcaccatcaacttttccagcacatggtccacaaccagctgctcagtgggtgccaaatcaaggttgcatgtcacttggtttttgccagaatttaacaatcattgatgcacccttttatgatcgtgctttgagtactatcctgttgaatatggaagcaatattctgctaa

SEQ ID NO: 6807 - DNA, 2044 bp, Zea mays
  Peptide Sequence Number=SeqID_48586
tgcattagatttacagcaacggattggtttggccaacacgttgagttcaggttcaatgtctgaaccagcacaacctagtggaggggaaggtgatgtcaacacgctccgaatacttgtagcaaccgactgccatctaggctacatggagaaagatgagatacgtaggtttgattcctttcaagcatttgaggagatttgcgcattggcagataaaaataaggtggattttatacttctcggtggtgatctattccatgagaacaagccgtcacgctcaaccctggtaaaaacgattgagattctacggcgctactgcctaaatgatcaacctgtgaagttccaggttgtcagtgatcagacagttaactttccaaacaggtttggtaaggtaaattatgaagacccaaactttaacgttggtctgcctgtgttcaccattcatggaaatcatgatgaccctgctggagtggataatctctctgctatcgatattctttcggcttgcaatcttgtaaattattttggaaagatggaccttggtggctctggcgttggtcagatagcagtttatcctgtacttgtaaaaaagggcatgacttcagttgcactgtatggtcttggaaacattagagatgaacgactaaatagaatgtttcagacgcctcattcagtacagtggatgcgacctggaactcaagatggggagtcagcgtctgactggttcaatatattggtacttcatcagaataggataaagacaaaccctaaaagtgccatcaatgagcatttcttaccacgtttcctggattttattgtatggggccatgagcatgaatgtcttattgatcctcaggaggtccctggaatgggtttccacatcacacaaccaggttcatcagtcgcgacgtccctgattgatggtgaagcaaaaccaaagcatgttcttttgttagaaatcaaggttgtgttgaaagatgaagcagatgttaactcaaatgatcaggactctgtgcttgaacatttggataaaattgtaagaaatctgattgagaagagtagccaaccaactgccagcagatcagagcccaaacttccattagttagaatcaaggtagattactctgggttttcaacaataaacccacaacgttttggtcagaagtatgttggaaaggtcgcaaaccctcaagatattctcattttctcaaaatcagcaaagaagcgccagactacaggagatcacattgatgattctgagaaacttcgtcctgaggaactaaaccaacaaacaatcgaagctctggtcgcagagagtaacttgaaaatggagattcttccggttgatgatttggacattgcgttgcatgattttgtgaacaaggatgacaagatggcattttattcatgtttgcagagaaaccttgaagaaaccaggaataagttgagttctgaagcagataaatccaaatttgaggaagaagatataatagtcaaagttggcgagtgcatgcaggatactggaggtaaatcttttacagctcaaagcaaccagaactccttcagtgatgatgaagacaccagggagatgcttcttggtgcaagatcaactgatgttggacgaaaatcatctggatttactagaccctccaaagatactgctgatgttgctaaacgtggtacttccaaaagaggcaggggaagaggcaccagttcaatgaagcagaccactcttagtttcagccagtcaaggtcagctaccgttattcgtagtgaggatgtggcttcctctgaggaggaagcagatgcaaatgaagttgttgaaaattcagaagaggagagtgcgcaacaagttggacgtaaaagagcagctcctaggggtagaggtagaggtagaggcggaggttccactgcaaagagggggcgaaaaacagatattgcttccatgcaaaatatgatgagcaaagatgatgatgattcagaagatgaaccgccaaagaaaactcctcgggtcaccaggaactatggcgctgtcaggaggagatga

SEQ ID NO: 6808 - DNA, 885 bp, Zea mays
  Peptide Sequence Number=SeqID_48587
atgaaggagcttcgtttgtacgagaattctgaaaaggctcttcttagttctacatcagccaatggaactgcgattcttagagttgtgcaggctttgagttctcttgtcagtactcttcaagatagaaaggatccagaacagcctgctgagaaggaccattcagatgcagtttcccagatttctgaaattaacacagcattggatgctttgtggttggaattgagcaactgcataagcaaaatagaaagctcttcagagtatgcatcaaatctaactcctgcttctgcaagtgcagctacattaacagcaggagtagcacctccattgcctgcaggaacgcaaaataggcgtactcaaggcttgctggggcgcagcgggatttgcaggcggggcgcagcgggatttggcgtcggtgatggcgcggaggtggctagggcgaatttgccggagggggcggtggttgagcagctatgcacggcatcgcacgacgacggggagcatcgcgtcgacccgctcctcccttctgccttccagccgcaggagccccacttccacctgccctcgtcgtcggtggaggaccccacggccaccatgggaaagcaaatctgcgtgctcgagcagcacttcaggcggggtggcgggcgcggcgggagcgagggaacgcggggcgccgtactcagggaagaagagggcgggttagcggcggtgtggggaggaagagggcgaggtgagggtcggggcgccatggacaggggcacagcgggcaatgttgcgggggagggaaacgcatgggggcacgaaatcgcctgggcgacgccgacgatcgggcgaggatggaggtgcgaggatggaggtgcggcatgcggggcgaggatggcggcgtga

SEQ ID NO: 6809 - DNA, 2115 bp, Zea mays
  Peptide Sequence Number=SeqID_48588
atggaccaaggagcgccggaggcggacaataatgccatgccagcaccatctgacggcaattcgaacggaggtccttttcttctttctcgtctgcttcctccttccctcgtcgtcctcgcgtcgcctccttcggccctccctattaatacctgcctcctcacaaccaggtcctgtcctcggggagccgaatccacacggaccacaccagaggacgcgggggacgccccggattcttcggattccaggatggaactacacagaaatagcactaatggttcctgcctcagtgcatgtgggccactgacagactactacattcctgattacatactgaagccggcctatgaaccggtcactgttgataatgtgccatgttgtcctgtggtagtcttcatcaactctagaagtggtggccaactgggaagcagtctgataaaaacataccgtgaacttctcaatgaagcgcaggtttttgatctctcagaagagtctcctgataaggttctacatagattatacagcaactttgaaaggctcaagtctagtgggatctttgaaatacaggttgctggtggtgacggtacagcaagttggctgcttggagtagttagtgacctgaaactatcacatccacctcctgttgctaccgtacctcttgggactggaaacaacctccctttttcatttggatgggggaaaaagaatcccgctactgaccaggcagcagtgaaatcattcctggatcaactggcatatcatcatgaggatgcgaattccacaggaaggcccatgagggataccacacattccgtggaggattctggaattattttagcttggggtacatatgctaagcttggatttaagcattccctaaaccatctttcatcgaggaacatttctcaacttgcaaaggtgaagatcatgaaaagacctggttcccagtgggaagagctaaagattcctcgcagcattcaatcagttatctgcctgaacctgccaagcttctctggaggattgaatccatggggaacacctggcacaaggaaagcacaagacagagacctgactgcaccttacgttgacgatgggcttatcgaggttgtcggcttccgtgatgcctggcatgggctcatcttgctggctcctaatggccatggaactcgtctagcgcaggcccaccgaatccgtttcgagttccacaagggagcagccgagcacacgttcatgaggatcgacggggagccatggaagcagcctctccccaaggaggacgacaccgtggtggtggagatctccaacctccgtcaggtggccatgctggccaacgacccgtgcaggtccaagagcgtgaacgagccgtcctccccgtcgtgccacggccatgaggacgacgacagcaacagcctggaggacgaggacgaggacgagtgggaggacgggaggaagaagttcggtgcggcggccaccttcaagatccccgacgagaagctaaccactgctgttggtgaaactgctcgttatgatcccccattgttctgtaaattttcaagttttagcagccatgagagtagaaagcaacagattttgaatcacgtaatctgtcagaggagaagtcgtcacgtaacaaatgacggctcggcttctggagttcgctgcgtccgtccgtccgcccgccgctgtttgataggagtactcccgcacccgcacccggttccaggccaaaccgcgttccccacgcgcccaccagaaagcagaggcggcagcataaaaggcccccgcgcgcctctccgcactccacgtcaatccaatccaggacacaaagttgcggtgagcaattgcaaggcgatgagcttgaggtacatgagccgtgtgggcgcgcgggtggtgcgggagagcacgggcaggtcggtcaaggcgcaggcgcaggcggcgtccatggcgaggagcggcggcagcagggcgccggccgccgggtcggtggagtcggggagagcgagcgccgtggcggcggcggcggcggccaggaggaaggcggaggaggagaagcggcggcgcgccgagcaggcgctgcgcaccgtcatgttcctctccgtctggggccccaacacctag

SEQ ID NO: 6810 - DNA, 1686 bp, Zea mays
  Peptide Sequence Number=SeqID_48589
atgaaaacgcgagttaccattgttaggaccttcctcctccgcctctccccggccttcgtcgccgccgcgctccgctccccgcagctcgccccgcacccgctcccgtcgctccacttcttccgctccctgcccaacgccaccgacctccgcgcccacccgcagcacctcctcagctgctacgtctccctcctccactccttcgcgcgctccagggagaccgacgcggccggccaggcgcggcagctcgtcgcggagctgcgcgcgcacggggacgccgtcctcagccacctcacgccggcgtcgtcggcctcgttgatccgcagcctcgcggcgttcggcctctccgaggagctgctatgggcgtggcaggccatgcgcctcgccggcgtcgagccgtccaggctcacctacaactgcctgctggacggccttgtcaacgctgacctcctcgacactgccatcaacgtgttcgacgcaatgtccacggaacatcgagtgcgtcccgacgtggtttcctacaacattctcatcaaggggtactgccgcgcggggaggacacaggatgcaatggcgcggcttgcggatatgagggaacatgcagagctcgcgccagacaaggtgacatacctcactctcatgcagcgccactacagcgaggccacgttcccacaatgcatagcactgttccaagagatggaagagaggggaatggggaaggaaatacctcaacatgcctatgtcctggtgatcggcgcgctcagcaaggacgggaaaccatttgaggcactggctgtgtttgagaggatgtcgaagcgaggctgtccagccaatgcagccatgtacaccgcgctcattgactcgatgggtaaattcgggagggagaaagaggcaatggcactctttgagaggatgaaggccactggaattgagcttgatgcggtcacgtatggtgtggttgttaattgcttgtgccggtttggcaatttggaggaggcacttgcgtgcttcaggagctgtgtagagaagggcgttgcagtgaatgccattttctatacaagcctgatcgacggttttggaaaaactgggatggttgaccaagcgaaggagctcttcgaggagatggttgctaaaggatttgtgcctgactcgtattgctacaatgttctgatcgacgcattagtgaaagcaggacggacagacgatgcgtgtgctttctacaagagaatggaagacgatggctgtgatcaaacagtctacacatataccattctcatcgatggtttgttcaaggaacacaagaatgaggaggcactgaagttctgggacagcatgattgacaagggaatcaccccaacagctgcagctttcagggccctctccaatggactctgcctttctggtaaattcagccgtgcatggaggatattggatgaactggctccaatgggggtgattcctgagacggctcacgaggatatgatcaacgtgttgtgtaagactggcagattcaagcaggcctgcaaattggcagatggcattgtgcagaagggacgtgagatacctgggagggggggcactgatggaaccgttgcaaatcatgtgaatgaaatggtagagcttgacgaggagactggaggtaaacatcaagaggacgaggaaaacaagaaaaggaaagcaatttcttaa

SEQ ID NO: 6811 - DNA, 375 bp, Zea mays
  Peptide Sequence Number=SeqID_48590
atgggcaagagcaagaaaggtggtagctcttcacatcactcaggagacaagcgcaagcgcgagccgactcctccctcggaggacttcggcgactcggaatactcggaggaggagttctcctccgagtccgagggctctccggctcctgcctctcccccggcatcgtctgatgattcagacgactcccaggggatcgccgcgaagggctcggatgagtcggagtactcctcggacaaggaggattcctccgactcgtccgaggagggcagcggcggcgacgacggtgacggcgacgacgacggagacgacggtggcagcgacagcggcaagggcggtgacggcagcggcaagggcagcaacaaggccagtggctag

SEQ ID NO: 6812 - DNA, 477 bp, Zea mays
  Peptide Sequence Number=SeqID_48591
atggcggtgttggtcgaggtcaacgcgacagacgctggtgacgaggtaggagacgtaggtggtcgcggattcagggacgagcgaggtggtggcagactcagcttcaatcgccgggtcagagatggtgaggagggcgtactcggaggccgccaccgcgtggatctcggcgacgcggaggaggacgagcgaggtggtggcagactaagcttcaatcactgggtcggagacggtgaggagggcgtactcggaggccgccactgcgtggatctcggtgatgcggaggaggacgaggagacggaggacggggaagagaacgccagacgcgatcgagggcaaggagatggagcacggggaggagacgacgcgagattggagggtggaagagagcgacgcgcatatgcgagattagcgggcgatagagagcagagcggatgcggaccttccagtacgcccttccatgaacggcgcggaggctga

SEQ ID NO: 6813 - DNA, 570 bp, Zea mays
  Peptide Sequence Number=SeqID_48592
atggcgtccgtgtccacggcgccgcgcgctccactcccggcggcagcgtcgtcctcgttatccgcgcggcaggtggatccgaaccctagcggcagccacttcctcgacgggcggcgcctccgcgtcgtccgccgcctcgccggcgcggccccgtcgcggcgcgctccgttggtctgctgctccgcgcgtagtccggacgcggacgccggcgacgagcgacgccggcggggttgggacgcgatgcttcacgacgccttcaagggtgccgtgcgacggtggagcgagtacgtcagcaattactggcccccaccgacctctgttaaggaggcgggtacggggaagagggttgggaggtctcacgaggaagaggtgatgaatggggatgaagaggagaggaaggttggggaggaagagggaaagtggagctgggcgaggtggaagcggcactttgctctcattgaggagagcgggcgtctcgttgatgagctccagaaaatcagtgtcgccaacacccttgtatttgcaaccggctttctggtgctcttggtggtcctattgggtggtgcgtga

SEQ ID NO: 6814 - DNA, 372 bp, Zea mays
  Peptide Sequence Number=SeqID_48593
atggcggggggcgcgatggcggcggcgcgcggaggacctcgcggcggcgggtggcgagggcggtctgggccgcctcggtgcagcgagaggagcagcgatgcggtgagaagagaggcggcgcgggagagacaaagcggtgctaaaggttcaacacaaatcaataaaaagatcaagttagggttcaaaataaaggagcaaaaagaaaccgaagagaaccctggtctggcgcaccaaacagtgtccggtgtaccagggccgtacgacttcaaacttgccaccttcgggtttcagaagccccgctccgctataattcaccaaactgtctggtgcaccagcggagcaacggctagccagcgcaacggtcgactctaa

SEQ ID NO: 6815 - DNA, 948 bp, Zea mays
  Peptide Sequence Number=SeqID_48594
atgggtgggttctgtatctccatgtttattagtcctaaccgccgcaggtgggtcctggaccgcaacgtgtgccatgtagactcctggcaggggccccaggtcttcaagccaccatgcgctcttgtcccccactatccgctcaagcagaggtccaaagccaccacatggctcgtcggcgcgtggcataagcctttggatggaagcaaccccgctactcgcattcaatgtgagcggctaaggcggttgtgcctcaacgcctcatgtgtgggcggaaccatcatgagcaactgcaggctcgggcagagcgcacgagtcatttgcattaacaccgctgcacgtcagcatggaccttcggaagaagaaggcccccaacatcacctgtctcctctatttggcatgatgggcacccccggtcgggcgctgtcagtggctagagagttgctccgcaaccccaagctcagtggtctcacttggggcaatgaggcattaacgcaaggcatcagtctccatgcgctcaccctctgtgaggactcatggactaaggacttgcaggaagagctcgaccgcagacgtgcgggtgaggatgccaacatatccatggagagggcgttgaacttcatcgacgcttacctccatgctgtgaggcaggaacccagagagatgctccatgctatgaggcaggaacccagagagatgctccggtcattcatctcttgcttcactaagggcagcggcaaggaaaagaagaaaaagaaccgaagtggagaaaagccattgtccgcatacctcatttatgtgagggagctagagaaggactttgatgccttggaactgcaacatgttcctcacgacaactcgatggcagatgaactccgtgcgagggcatcaacttgggcatccgtgcttgaggacgtcttcgaaacacggttgctgagaccatccacttag

SEQ ID NO: 6816 - DNA, 720 bp, Zea mays
  Peptide Sequence Number=SeqID_48595
atgcacatcctcattgatacaggcacgacccacaacatacttgacatcaactttgctaggttggccaaccttgcagaacgatgcatctcgaccacaatactcgtacccgagctatgtgtcgtcgctaccgccatcctaggtggcacaacttgcaccagcttggtccatgaaccaagtatgctcatgaaccacaagtacccgcaaggtatcatttcatcagcaacagtcttcttcgatgatgctagttaccacttcctcgccggcaatgacatctacatcgacaccaccaatgacttaggaaactcgaggcactcgctagatgacttcaactggggcttcatcctcccaacatcaacacggtacatagctttgagagaccttcctaggctatgcagattttcacccttgacgccaccatacaccgctgatcctttccatcgcctgccacacccatggaccaacctctgccactggaattttatcgtcgataggttccaagacaacatgatcctagcctatgtcatatgtgactgtctcatcgttaggatccaggcaatcccatttggaggacctctaccctctaacgacatcaacaagtggactatgattcagcgcgaggacacattgaatggaggaggaggagggggaggtatcataggcctaaatgtggattgccgcattgggtctagcgggccaaaggaggcccaacaccaggcctag

SEQ ID NO: 6817 - DNA, 402 bp, Zea mays
  Peptide Sequence Number=SeqID_48596
atggaggagtcgtcgaaggataggagctcgtctagcaaggagtctgacccgacctgggcatatcgatctccagcagcgattgctgcacgagctggcagatccattcatcatcgtcgtgatagcagcgtggttcggcatcgtccatacatccgcaagaatttctccaagccacgaagaggtgctctgttgagagatctcgatgaggaggacgaggtcgactctaggaagctacagatggagaggaagctgcaacaagaggatggggatgcagtgcagcagccacctactactaaagatgatgagttgcagtcggtcacaaaggacaacgaattggaggttggcgacggagtgaagaagtcgcctgcaactaaagaaccgaggaggctaccgtggacaaagtaa

SEQ ID NO: 6818 - DNA, 456 bp, Zea mays
  Peptide Sequence Number=SeqID_48597
atgtgcctaggggtcccttttatagatccaaggcagctaggagctgttggaggccaaacttgccttctgtcgggtggtgcaccggacagtccggtgcaccaccggacagtcactgtagctgtccggtgcgcgatctccttccatatctggcgcatccgaccattggtcctcggggtcggttggtgcaccggacactgtccggtgcacaccggacagtccggtgtgcctaaccgaccgttgctgcgggccacgcgtcgcccgcggattgcgcagctgaccgttggcgctgacggccgttggctcactggacagtccggtacaccaccggacagtccgctcgatgagtctgtaggtcatgaatgggaagcggaccggcgcccacactatggctcggtgccaggagtggttaatgcgaccagttatggcgagtcagtctgcggcaaggcgagggattga

SEQ ID NO: 6819 - DNA, 180 bp, Zea mays
  Peptide Sequence Number=SeqID_48598
atggtccctcggtcatcgcagcagcagttccagtcagaggcaaacgtggccgcaggcgcgtcgtctgcccagtcctcacggcagtcctacctgcgacgctgtggcgattcagacgccagcttgtctgacatggcgtcagcccagtcgttgccgggtgagcatgaagagatggtcgtctga

SEQ ID NO: 6820 - DNA, 2724 bp, Zea mays
  Peptide Sequence Number=SeqID_48599
atggccatgctcgctctctcctcccgccccctctcctcctcctccttcctccgctcgaagccgcgcgcgctccacctccaccgccacctcctccccaaacccctcggctccgcctccccgctcacgccgcctactccccgcgccgaccccgccccggcgccggacgcggaccccaccccgctcttcctccgcccagcgtcccaccggttccccacgcgccgccctcgccgcgttccgccgccgcgcggccgcgctcgtcccgcccaccgcggcgcacctccaccgccacctacgctggctctcgccgacgccaccggggacccgtccgccgccaccacctcgtcctccgaaggcccagcgctcctccgcgcgccgctcgaggacctcgaggccctgtggctgcgccacgtccgggagcgcacgccgttccagtacgtggtcgggaacgagcactggcgggacctggtggtcgccgtcagggagggcgtcctcatcccgcgcccggagacggaggccatcatcgacatggtgcgcgccgtggaggacttcgccgacgggtggtgggccgacctcggcaccggcagtggcgccatcgccgtggcgctcgccagggagctcgccgggcaagggagggtgttcgccacggatgtcagcgaggtggccatcgacgttgcgaggctcaacgtccagaggtacggtgtgcaggtgagcccagcctttaagttggctgctcaaagatgctcagctgatcaaatcgatgctgaaagcatgcccaaagatgctcacatccacctagaggtggacgataaagttgaaataaggcatggctcatggtttgaacctctggaagatttgaaaggaaaacttatgggtgtgattagtaaccctccgtacataccaaccgacgacctacctggtctgcaacctgaggttggttggcatgaaccaaagttggcgcttgacggcggcaaggatggccttgaacatctgctgcatctctgtgaagggttatcctcagttctgaaacctggaggcttctttgtttttgaggtgtcggcggcctgcagcccccccttgaaagatggcgcctttctgaggctccccggggtcggggggaatggggctctcgcggtctctggattgagcatttctttattggaattcgacatttcgtgcggcctccagtccatggaggatttggggctgtggaagcaggcgtggatgtgggtgttgtcccagaagcacatcctagcgtgggcgcacacggctgcgtgcggcagcagggagcgcctcgccttcctggtcgatcggcactggcccgccgtgtcccgggcctgcgccacctcctcgcgactcgcgctcgccgcgctgcggcaatggcgcgggtgcacggcgcgcggggtgctggcggtggcgagcctcggccctgccgccgtcttcgtcatcctctggagcttcttcgtgtgcatgacctcgccggcgtgcgccctctacgcgcttcttagcctgggggctgcagcagcagttgttcactatatgggctatacacctggccttttcattgttgggctgtttggaatattaattatgtggatgtatggctacttttggattacaggaatgcttctagttgctggaggttgtatgtgctctttgaaacatgctcgatatgtgatacctgttttgacttcatatggtgtttattctgtggctgttcgtgttgggtggcttggagtcttcttgacactaaacctttctttcttgacaaatgatcttcttaataagttagtgcaaggatacgaaggaagcactgaagaaagccagtttgaagacatgaaggattctgatccagttatggatgagttctatcgtagttgtgaattcccatcagttcctgacagtgaacctgagaccgtgtcttgcgcgaagccatactgctcagcacccatccaagatgtattacatgtacaaaaagaggaacctcctagtaaagtagtgaaatctgattctacttcattggatgagattaagaggataatggatggttcaaaccattatgaagttttgggtgtacctcgtaatagaagcattgatcagaagacactgaaaaaagaatatcacagaatggtcctgcttgtacatcctgataaaaatatgggaaatcaattggcttgtgaatcattcaagaagcttcaaacagcttatgaggcaagcgaatacagtgcactaagtgtggtaatttccatatatggatatgcaccaagagaagcaaaacaagggcacgattctgtcagggctgtgatcagtttcatcaagccaaggatggagatggatgggttgaaaccagattttcgacctccatcaagcaatgtgctgcctttttcacttcagatggaaataccacgggcttttgtctgtgctgagagcaaaatatttgatgtgtctgagtgggctacttgccagggaatggagtgcaagcctaacactcacggtccaacgtttatggtaaacatggttggcgcagataggatgcctcagagatcctacagttcccggtatcccttcagcttggacgcagagatgatcccggaagacgagttcgagctgtggcttcagcaggcgctggcgtcaggcgtcttcgctgacagccccaagcgcaggaaaagttggagcccattcaaactgcctcaaaagggaattaaaagttggcgaagatcgtcatga

SEQ ID NO: 6821 - DNA, 657 bp, Zea mays
  Peptide Sequence Number=SeqID_48600
atgggcgcatggaggggaggcaataataaccatctgatgaaaataggtaacatgcgagactcaaaacaagccccgaaaaatagggctcacatcgcgccgccgcagcaccagcaacagccgaggcttcatcaattccccacagcacgcgcacatggaggttgcggcgtcgaatgtggatcacacgcccatggaggaggatgcggcgccagcgtcgatcgtggaggactggaggtggatgcggaggagctggaggtggccggcattctgagcgacctgagcaggctcatccgctcatgggaccggctggagcggcagcgggaaaggagggagaggcggcgcccgctttcggtgcagcgggacagcaatccctccccggaaccagctcccgcggccgcgtcatccgccgtccctagccccgacaccccgctcgcgtacccacagagcggcgaggacgacgccgcgccgcccaaggacaagggcgagcccgtcgccgccgccgttcgcccacgggcccaggtgccgcgcgcgagggacccgccatctgcaagcgcgcctctgctgccgccgccgcgtcctaagaaagaaagaacgaacaaaagaaagagatcgtctgatggtctcagacgacaactaacatgttcctttcaccgttcgtag

SEQ ID NO: 6822 - DNA, 1086 bp, Zea mays
  Peptide Sequence Number=SeqID_48601
atgggcgccgggatcagggtcctggcggcgctcttggcggcgctcgcggcagccaccgccggcgtgacggcgcagctgcggcaggactactacgcggcggtgtgcccggacctggagagcatcgtgcgcgccgcggtgtccaagaaggtgcaggcgcagcccgtcgccgtgggcgccaccatccgcctcttcttccacgactgcttcgtcgaggtgcgcgcttcctcttcctcttcctcgacgactgcctgtgtttctgacggaccggggcgactggcgatgcttcaacttcccgcgtgcatgcagggctgcgacgcgtcggtgatcctggtgtccacggggaacaacacggcggagaaggaccacccgagcaacctctccctggccggcgacggcttcgacaccgtcatccaggccaaggcggccgtggacgccgtgccggcgtgcgccaaccaggtgtcgtgcgccgacatcctggcgctggccacccgggacgtcattgagctggctggcgggccgtcgtacgcggtggagctggggaggctggacgggctggtgtccatgtccaccaacgtcgacggcaagctgccgccgccgtccttcaacctggaccagctgacgagcattttcgccctcaacaacctgtcgcaggccgacatgattgctttatctggtgagcaaattactaccgctccacacgttctcggaccggatccagccgcagtcggtggacccgacgatgaacgcgacgtacgcggaggacctgcaggcggcgtgcccgggcggggggtggaccccaacatcgcgctgcagctggaccccgtgacgccgcaggccttcgacaaccagtacttcgccaacctggtggacggccgggggctcttcgcctccgaccaggtgctcttctccgacgcgcggtcgcagcccaccgtggtggcgtgggcgcagaacgcccaccgccttcgagcaggccttcgtcgacgccatcaccaggctcggccgcgtcggcgtcaagaccgacccgtcgctgggggacgtccgccgcgactgcgccttcctcaactgaaaaaggatgataagcgctag

SEQ ID NO: 6823 - DNA, 936 bp, Zea mays
  Peptide Sequence Number=SeqID_48602
atggcacgcgtcgacgtcgccgagctgaagcagcgcctggtgaagcggctgggccgggagcgggcggccaagtacttcgcacacctcaccaggctgctgaatctgaagctcaccaaggtagagttcgacaggctctgcttcgccaccatcggcaaggacaacatcgcgctgcacaacgcgctcattagggggatcataggcaatgctctgtcgggagtgcctccgcccagccggcaggcggtgacggggcagtcgggcaccaccaccgccccgagcgggcagtgcgtgggcgtcgcgctgcccgtggtggggaatgtgggggcagtggtcgattcgggtgatggtgagctggcgagggagcttggggcgccggttgggaaggtggtgtccgtggaagatggggaggaggtggagcagatcaggtctgttccgtgtgtccagagccggagcccgataacacagcccttggggatttcagtcgctgggggcagtggtacgagggtaaggaggaggctggatgatcctttggtgtcatgctacgattgtggacatttgctggatacgggctctctgtgcgaggatttgcatcggcgactgcacagtaccggcactggagtgacggtgcaagctgtcgatgctttgaaccgtggattagatgagttgttgcgaaggttgattaaaccgtgcatggatttgtcgagggtaagagccagcagtagaagaattagcaaagtcaatgaaaaggttgctggtagagtgaattcattgcaacaactaaatcagggtcagcgtacaacgatgcaagattttgcagttgctgtgcaatctgatccacatttgcttggtccaaattggcccacacaaatcgagaagcatatctggtccagttcaaagattgcatcagttgttttgggaacaaatgtctcagttgagtaa

SEQ ID NO: 6824 - DNA, 999 bp, Zea mays
  Peptide Sequence Number=SeqID_48603
atggctttgccgtcggcaggcaaggcgttgccgctggtcgtcgtcctcgcggtcgccgtggtcgcgtcccttgcgcagcccggcgcggccgacctgaggccgaactactacgcgagcagttgccccaacgtggaggccatcgtgcgcggcgtggtgcagcagcggctgcaggccaccatccgcaccgtcggctccaccgtccgcctcttcttccacgactgcttcgtcgagggctgcgacggctcggtgctgatcgaatcgacgccccgcaaccaggccgagaaggacgcccccgacaacaggtccctcgcgcccgaaggcttcgacaccgtgcggagcgccaaggccgccgtcgaggccgcctgcccggacaccgtctcctgcgccgacgtgctcgccctcgccactcgggacgccatcttcatgagcggcgggcctttcttccaggtggagctgggcaggctggacggcctgagctccacggccagcagcgtgccggggcagctgccggagcccaaccagagcatggaccagctgctggcggtcttcaacgcacacgggctcggcatgtccgacctcgtcgcgctctcagcggcgcacagcgtggggctggcgcactgcagcaagttcgcgagccggctgtacagcttccggccggggcagccgacggacccgacgctgaacccccgctacgcgagcttcctggcgagcaagtgccccaacggcggcggggccgacagcctggtgctcatggaccaggccacgccctcgcgcttcgacaaccagtactaccgcaacctccaggacggcggcggcctgctggcctccgaccagctgctctacgccgacggccgcacgcgccccgcggtggactcgctggccaacagcaccgccgccttccaccgtgccttcgccgacgccatcgtcaggctcggccgcgtcggggccaagtccagcgcgcggggcaacatccgcaagcggtgcgacgtgttcaactga

SEQ ID NO: 6825 - DNA, 426 bp, Zea mays
  Peptide Sequence Number=SeqID_48604
atgctggcgtgggacaccgggcgctgggtcgcggtgccggggcggctgcccgcgcgcggcctggagcgttggtcggcggtgcgggagctcccggcgctgggtcgcggtgcctggggcggctgcccgcgcgcggcctggagcgttggtcgcggcagagggttgcgcggcctcggacgaagggacgtccgcggcgccaggcgggacgtcggaggcgcggcaccggggagtggcggccgcccaggggcggcggccctgggagcgacggacgcgcaccgacgggagcggcgacccaggggagggcggcgcgccggggagatgggagggaggccggcggccggaggacttcaccaatcccaatttagaaagggaactagttttgactttttaagattgaacaaaaatgagattcaacctcgaaggaactag

SEQ ID NO: 6826 - DNA, 393 bp, Zea mays
  Peptide Sequence Number=SeqID_48605
atggacgacgtcgtggccggggctgcccaaaatggagacgacgtcgacacattagggctgcgcagatcggatcgcacacgtgatgtggagatcgcggggctgctgctgctgaaagggagtacgcgcacgacgctgaggaggttccacgaccatgccacgacgagcagaccggcagagacagcacaacggcctgcacagcaaggtcgaagacgatggcttgacaatggcaacgtccagggtggactaatggaacagagatgtcgtggtgtggaagcagctggtgacgtctggggaaaaactatagagacggtgtccccgctgaagtccgaatggaggaggacgacgtccaagcgtccatacattgagaggagatacgtgacgagcaagatctga

SEQ ID NO: 6827 - DNA, 2490 bp, Zea mays
  Peptide Sequence Number=SeqID_48606
atggcgagtcctcctcgctacccgttccccgtcctcctcctcggcctcgcgctggtggcgttgatggcgccggcgctactgcgagcagatggcggcgccgaggaggaggaggaggcgcggaagacgtacatcttccgcgtggaccacagcgccaagccgtccgtgttccccacccacgcgcactggtacgcctccgccgcgttcgcctcggcggcaccgggggcaaccccgctgcggccgctccacgtctacggcaccgtcttccacggcttctccgcgtccgtgccggcgtcccgcgccgaggagctgcggcgccacccggccgtgctcgccgcgttcgaggaccgcgcccgcccgcttcacaccacccggtcgccgcagttcatgggcctccgcgcgcgcctcggcctctggtccctcgcggactacggctccgacgtcatcgtcggggtgctcgacaccggcgtctggcccgagcgccgcagcctgtccgacaggaacctgccgcccgtccccgcgcgctggcgcggcggctgcgacgccggccccggcttcccggcctcgtcctgcaacaggaagctcgtcggcgcgcgcttcttctcgcagggccacgccgcgcgcttcggcgcctcggccgccgcgtccaacggctccgtcgagttcatgtcgccccgcgacgcggacggccacggcacgcacacggccaccaccgccgcgggcagcgtcgcgtacggcgccagcatggagggctacgcgcccggggtcgccaagggcgtcgcgcccaaggccagggtggccgcgtacaaggtctgctggaagggcgccggctgcatggactccgacatcctcgcgggcttcgaccgcgccgtcgctgacggcgtcgacgtcatctccgtctcgatcggcggcggcagcggcgtcacggctccgttctacctcgacccgatcgcgatcggcgcgtacggagccgtctcccggggggtgttcgtggccacctccgctggaaacgaagggccggcctccatgtcggtgaccaacctcgccccgtggcttgccaccgttggcgccggcaccatcgaccgtaatttcccggctgaaatcgtgctgggcgacggccgacgcttgtccggcgtgtcgctgtactccggcaagcctcttaccaactcatcgctgcctctgtactaccccgggaggactggcgggctctccgcttcgctgtgcatggagaactccatcgacccttcactggtgaaaggcaagatcgtcgtctgcgaccgcggcagcagcccgcgcgtggccaagggaatggtcgtcaaggaagctggtggcgcggcgatggtccttactaacggggaggccaacggcgagggactggttggagacgcccacgtcctccctgcttgcgcggtgggcgagaaggagggcgacgcggtcaaagcgtatgccgcgaacgcctccagcccgatggcgacaatcagcttcgggggcacggtcgtcggcgtcaagccggcacccgtggtggcctccttctcggcgcgtggacccaacgggctcgtcccggagattctcaagccggacttcatcgcaccgggcgtcaacatcctcgccgcgtggacgggcgccacgggtccgaccggcctggagggcgatacccgccgcacggagttcaacatcctgtccgggacgtccatggcgtgcccgcacgccagcggcgccgccgcgctgctccggtccgcgcaccccgggtggtcgccggcggcgatacggtccgcgctgatgactacggccatcgtgacggacaaccgcggcgggcccgtgggcgacgaggcagagcccgggcgcggcgcgacgccgttcgactacggcgccggccacatcaccctgggcaaggccctggaccccggcctggtctacgacgccggggaggacgactacgtcgcgttcatgtgcagcatcgggtacgagccgaacgcgatcgaggtggtcacgcacaagcccgtggcgtgccccgcgacggcgagcggggccaaggccagcggcagcccctcgggctccgacctcaactacccgtccatctccgtggtgctccgcggcggcaaccagtccaggacggtgacccgcacggtcaccaacgtcggcgcccaagcttcggcaacgtacactgcgcgcgtgcagatggcgtctagcggcggcgtgaccgtatccgtgaagccgcagcagctcgtcttctcccctggcgccaagaagcagagcttcgcggtgacggtgactgcgccgtctgctcaggacgcagcggcgccggtgtacgggttcctcgtctggtcggacggtggcgggcacgacgtgcggagccccattgtggagtcaaggcgcagtggccagtgggccagtaacggcaacagtacttgcttgccactggcggacaggacacaggagcaacggaaagaaatggagcaacaggacaaagctatgaaaaacgagtactgctag

SEQ ID NO: 6828 - DNA, 294 bp, Zea mays
  Peptide Sequence Number=SeqID_48607
atggcgatacccatgtgtggctttgcctttgcgacaacacgagcggggacctccggacctgaactgagctggccgcaaacgacgaaggataaacgtggattaggcatatgtgctgcattaacgtgggcatcggtcctaaacccgatcagggagcggagacgggagcgtgctttggcgaatcaagggaaaaatatgatgaaaaaactcggagtaaagagtaagcctagtccagacgcgccattcggttcagtcagaccagttccggacgtctataaaaacaccccagacctctag

SEQ ID NO: 6829 - DNA, 1797 bp, Zea mays
  Peptide Sequence Number=SeqID_48608
atggcggcagggttcatcaaagaggtattccatcccgaatggcttgccaaccctgtgcttgtgagaaagaaaggagggaaatggcggatgtgtgtagactacactggtctaaacaaagcatgtctgaaagttccctaccctctgcctcgcatcgatcaaatcgtggattccactgctgggtgcgaaaccctgtctttcctcgatgcctactcggggtatcaccagatcaggatgaaagagtccgaccagctcgcgacttctttcatcacacccttcggcatgtactgctatgttaccatgtcgtttggtttgaggaatgcgggtgcaacgtaccaacggtgcatgaaccacgtgttcggcgaacacattggccgaacggttgaggcctatgtcgatgacatcgtagtcaagacgaggaaagcctccgacctcctttccgaccttgaagcgacattccgatgtctcaaggcgaaaggcgtgaagctcaatcccgagaagtgtgtcttcggggttccccgaggcatgctcttggggttcatcgtctctgagcggggcatcgaggccaacccggagaagatcgcggccatcaccagcatggggcccatcaaggacttgaaaggcgtacagagagtcacgggatgccttgcggctctgagccgtttcatctcgcgcctcggcgaaagaggcctgcctctgtaccgcctcttaaggaaggccgagtgcttcacttggaccctagaggccaaggaagccctcgggaacctgaaggcgctcctcacgaacgcgcccatcttggtgccccccgctgccggagaagccctcttgatctacgtcgccgcgaccactcaggtggttagcgccgcgatcgtggttgggagacgagaagaggggcatgcattgcccgtccagaggccagtctacttcatcagcgaggtactatccgagaccaagatccgctacccacaaattcagaagctgctgtacgcggtgatcctgacacggcggaagttgcgacactacttcgagtctcatccggtaactgtggtgtcatccttccccctgggggagatcatccagtgccgagaggcctcgggtagaattgcaaagtgggcggtggaaaccatgggcgagacgatctcgttcgcccctcggaaggccatcaagtcccaggtcttggcggactttgtggctgaatgggtcgacacccagctcccaacggctccgatccaaccggaactctggaccatgtttttcgacgggtcgctgatgaagacaggagcaggcgcaggcctgctcttcatctcgcccctcgggaagcacctatgctatgtgctatgcctccacttcccggcgtccaacaatgtggctgagtacgaggctctggtcaacgggttgcgcatcgccatcgagctaggggtccgacgcctcgacgctcgcggcgactcgcagctcgtcatcgaccaagtcatgaagaactaccactgccgcgacccgaagatggaagcctactgcgatgaggttcggcgcctagaagaccagttctacaggctcgagctcaaccacgtcgcccggcgctacaacgagactgcggacgagctggctaaaatagcctcggggcgaacaacggttcccctggacgtcatctcccgagacctgcatcaaccctccgtcaagaccgacgacacgcccgagcccgtgaaggcctcggcccagcccgagacacccttggctcagtccgaggcaccctcggctcagtccgaggcaccctcggctcagtccgaggcaccctcggcttag

SEQ ID NO: 6830 - DNA, 519 bp, Zea mays
  Peptide Sequence Number=SeqID_48609
atgactaacaaccatacaggcagcaacaagaagacttcgccaggaactgaaggacaggacgactacctcttcaacatccgcctcctcaagcagagaagcactagcagtcaagctcctctttcgcggttccgccccgacttctacctccacggctccacgccgtcaagcaggttcaacgcgctcaactctggcgaggactcgcccgactggccgcgcaggaagccagccgccagcccaccaggaacaatcatcttgttgttgccttgtgagtgtgggaaccgggaaagtgggaagccgaacgatcggagagaagttggaacagccgtcgggctcgggcgtcacgtcggccgaacgggatggccggatggggtccccggtgggcttggcttagggtgtgatagggcccacccagacccccctatgggtccacccctgtctgtcgggatgcgtgaggacagcgagacaacaagcaactcccacaatgagcattttactagttgtaacttgcaaagtaaatga

SEQ ID NO: 6831 - DNA, 777 bp, Zea mays
  Peptide Sequence Number=SeqID_48610
atggccattgatgcatctctggatgattcagtccttgttggtgatgttatctctatggattattctgatgagttttcaatagaacaagctacagttggtcgtttagagataaggagcaatatcattcaaattagggacatgcggttatccaacataatcaacaagggtcgcgcccccggcgacgcccggatccgcgttcctgatcaccaaggcgtgaaggaaaatggattgttggagcaggaccggagctactatactgctgtccagatgagtgagagtgccttcatggataagttcatatgcccctacaaggaagctgcaccaagcctcgccctagattatgctgctgcttgcagaggagagaattggctcttgtacataagatgtgagccatggttattaccagggctagatttatctttgctctctgttattcaagctgatcaagtattccaatttcacctgtcactgtatggtatggatttagttgttttgtattggattatcttaaacttggccaaacctgctacctactccaaggctctttcggctggtgatgcgcttgagattattagcaaaggtggtgtgaaaggactagcccacatcactggtggtggctttactgacaatatcccaagagtattcccctctggatgcggggcaaatttttttactgggtcatgggaaatacctccaatcttcagttggcttcaacaggcaagaacaaatgattttcaaacttcgcctttgattttcaatagtaactgttataaataa

SEQ ID NO: 6832 - DNA, 405 bp, Zea mays
  Peptide Sequence Number=SeqID_48611
atggcggcgccgccccgcacgctcggcggagcacgccggcgaggttgccaatcggcgcgatggtcaccccaaactccgattggacggatgctacgcagagcggagatgatggcgaacgtggtcacgggctacttaccggcagtcgggtcgagcagttggctggcgacggacggagacgcggggagggagcagagaaggggccgcaccgagcggaggccactggggagggagatcggtcctgggttttatagggtcagtcccgcggatcccgggcggaggacggccacggactccgcgcgccatgatcctcagctccgaccgcgcacgttaacagaggatgaactaatcggcaacgccacacgcggcggggattacggcagttcggttatgccagatgcggagtga

SEQ ID NO: 6833 - DNA, 423 bp, Zea mays
  Peptide Sequence Number=SeqID_48612
atgctgaaagataaaaatggtcacatgaagctgtcagattttgggctgtgcaagccaattgactgttcaaagctctcaacgttgagtgaagatgaacccatgggtgatgacaacatgagggaatcaatggatattgatagttctttgtccaatacagcaaatggtagaagatggagaagtcaacacgaacagcttcagcactggcagatgaacagaagaaaactggcattctcaactgttgggacaccagattatattgctccagaggttctgctgaagaagggatgtgaaatggaatgtgattggtggtctctaggcgcgatcatgtatgagatgctagttgggtatccaccattttatgccgatgatccaataactacatgccgaaagcttagcgtacttataggcttatcctcgaaataa

SEQ ID NO: 6834 - DNA, 174 bp, Zea mays
  Peptide Sequence Number=SeqID_48613
atgaagtcacaacagaagaggagggccaacagcggcgtccaccatccccacatctttcccccgtggcggtgccgtaccgacagccagggtggacggttctggaggatcgagctttatgggctcaggaggcggttgagttcaacagtggggcaagatttggccatgggatcttag

SEQ ID NO: 6835 - DNA, 174 bp, Zea mays
  Peptide Sequence Number=SeqID_48614
atgcggcgagtgaagtcggcgacgacgcagctcatcgacgagatgagaggtaagggggcggcggtgaggtacctggtcgaggaggcaggtcgtcgacggcggatgtgtcccagcggcggcggtgagttatctattcatggacacattagtttggtttatgatcatgttatataa

SEQ ID NO: 6836 - DNA, 405 bp, Zea mays
  Peptide Sequence Number=SeqID_48615
atggcccccctgtgtcgtggtcggtccgagcccggggtcgggcgaggcagaggctcctccgaggtcgaggctgagtccgggcccgagggtcgggcgaggcggagaccgtcttccgaggttgaagtggagtccgagccctggggtcgggcgaggcggagaccgcctttcccggagtcgaggttgagtccgagccctggggtcgggcgaggcagagatcgtcgtccgaggtttaggtggagtccgagtccaggggtcaggcgaggcgaagaccgccttcccggaggtgaggttgagtccgagccctggggtcgggcgaggcggagatcgtcgtccaacgtcgaggttgagcccgagctctgggtcgggcgaggcggagcttcctatggcgcccggggctggacttag

SEQ ID NO: 6837 - DNA, 1093 bp, Zea mays
  Peptide Sequence Number=SeqID_48616
gttttcctttaccccttcttgcccctttccttactcaatttctttcctccgacgtcctgcttacaatgccgccgcccggtatcggagacaccgtccggccgcatcccgccctcccccggggttcccgcgcgtgcgccgccgcgactttcccccgtacccccggcgtaccgtgccggcccccggctcacccgcgttcgcgccggcccccacctcgcccccggagagctcgcgcccgggccgcgccctcgtccggcgagcaccgcgccgcccggacgcttgggccggctccctggccgacccagcgaaccgcgcctccgctaggagaaaggcgacccgcgctccgagggccggaccggctcccgagcctcgccagctcgcgccgaaacctgaccggcacttacggggcgccccgcccctcggctcggccggccgtggtggcccggcgtcctcccgcggcgcggcgagccccgctcgcccgagcgcgcccgcccccggctcggccgcccgcctcccggcgagctcgcccccccggttcaaccgcctccgtgccccggctcggccgcccgtcctcgcgctcggcctcgtccggccgtatcctcgctcgcccgcgctcgctttccccggcgtgcttgcccgttcgccccgtcgtgccttgctcgcgtcgtgtcggccctcggcgtggcctcgagctcggcccagcgtgccttcggcgcgtggcctcgagctcggccagcgcacggcctcgacgcgtgcgcgactcgttcgcagcacgttaagtgtggctttgcgcgtgcgcgtgttcgcgcagcgttccggcgtagctcgtcgtgcccgcgacacgatcgtctaccccctaacccccgtctacccccccccgtctcctatatgcgctaatcacgttgtttatattaataagccgtcgtgccgtcaatggggctcggtgtatgcggctcgctctgccagggttgatttgtcccttggggaggagtgcggtggctatgagatcgatggttttggttatgactatgatgctggcgaagatgaagctgtggaaggagacttccaggagttccaagactacgacgagttctag

SEQ ID NO: 6838 - DNA, 615 bp, Zea mays
  Peptide Sequence Number=SeqID_48617
atgtatcattcggaggctgaggcgcaccagcggctctccgcatcgcaagcgggcgagtgtcagcaaatggtggatctcgcacttgcaccgccgtcgaacggcaagaacaccaacgtcttgcaaccgcacgtacctcgtgtcattggaccgcaagtgggagctaggccttgccaaaggcaccataggaagctccgcccgacccagggctcggactcgggctcggccccggaagacggcgaactccgctccgcccgacccagggctcggactcgggctcagccccggaagacggcgaactccgctccgcccgacccagggctcggactcgggctcagccccggaagacagcgaactccgctccgcccgacccagggctcggactcgggctcagccccggaagacggcgaactccgctccgcccgacccagggctcggactcgggctaagacctgggagacgacgaactccgcttcgcccgaccccagggctcggacaccgccctggcctctgccgatgacctccgcctcgcccgacccaggagctcgggcccggcctcggccatggaagacagactcgaccctggcttcagaggagcctccacgtcgcccgacctag

SEQ ID NO: 6839 - DNA, 480 bp, Zea mays
  Peptide Sequence Number=SeqID_48618
atgtcatcaacatttccaaaagtaaacatcgtatcggaccgggtcgcgtgcacagggaccgggtcgtgccaaaaccgtgctccaaggccgcgcgccgggggccgaggccatgagaaggggctacgcaggggctacgggcgcgccacgccggggccacgccgaggccatgccggggcgagggctgcacaggggagggaccgtgccggggcaggggcagggggctatgtagtggaagggggccacgccggggacaccgcgcggggcagggggaccgcaccgagagggcaacgcgccaggggcaggagccgcaccgaggggcaccgcgccagaggcaggggccacgctggggaagggatgtcggggccaggcaggggggtcgcgccgttgggcgagctggggacacgccaggtgccgagggctaccgaggccgggcaagcaggagccgcgccgggggccaggggccgccgcgctgggggatag

SEQ ID NO: 6840 - DNA, 249 bp, Zea mays
  Peptide Sequence Number=SeqID_48619
atggccatagtaacacctggggtgttacacaacaattccctgaccgcagacagcgccccaggcgcagccctagacgttctagacgtctacgcaggagtatgctgccgtgcagagtgcacagcaacagcaccaggcgcggggagattggtggcccgcgctcaagggggcacgtacaaggatactgagccccgacatgtgggcccagagacaaatggaaggaagcaactaatgcctgtaacgccagggtga

SEQ ID NO: 6841 - DNA, 1428 bp, Zea mays
  Peptide Sequence Number=SeqID_48620
atggagaggagtcgtccgggcgccgcgccgacaccatcgccagaggaggaggtggcggcggagggccatgcgcatggtgacgatgtgacggggcaggaggaggaggcgacgccagtggtgctcaagaagggcccgtggacggcctcggaggatgccatgctcatggaccacgtccggcaccacggcgaggggaactggaacgcagtgcagaggatgaccggcctgctgcgctgcggcaagagctgccgcctgcgctggaccaaccacctccgccccaacctcaagaagggctccttctccccccgacgaggagctcctcatagcccagctccacgcgcagctcggcaacaagtgggcgcgcatggccgcgcacttcgttcgttcctgtgccggttgctggttggttgcattggttggcttggtgcgcgcccgcagctgcccgggaggacggacaacgagatcaagaactactggaacacgaggaccaagcgccgccagcgcgccggcctgcccgtgtacccgccggaggtgcagctccaccttgccctctccaagcgctgccactacgacgactacgacttcccgccgctcgcgtcgtccccgcagctgtcggcgacgacgacgaccgatgtccaggcgctgggcgccgggcccgggtacgccagctcgcgcccggcgccgctcgacctggctcgcagccagctcgccgcgacgacgacccagcagacggcgcagttcctctcgccgccgcccttctcggcgccgtcgtccccgtgggccaagccgttcgcgcggaacgcgcagtacttccagctcgcgcactcgtcgcccgtgtccccgtcgacgccgaccgggccggtgcacccggccatgccggacctgtctctcggcggccacggcgcgcgcgccgccgccgctgccgaccagagcaggctcccaccgctctcgccgtcccccggccccagagtggagctcccttcaaaccaatacggccagccggcgccgccgacctcggccgccgccgtcgccgccggacttgcgctgccggatcatcagaacgcggcgagcctcgaacagatgctgcaggagctgcacgacgtcatcaaggtcgaaccgcaggcgctggtcccggccagcggcggcggcgctgcactggagcggcatgattgcggagtttcagtcccagagagcagaatcagcggcctgcagcgtcggggtgacgacatggacacgctgttcggcctggtgcacccagcgctcggcgcgccggagacggcgccggcggccgccgcctccaaccactccggctcgacctcgcggcacagcaccgccgaccagaacccgtccaccgtcggcaacagctcgccggaccaggactggggcctcgacggcgtctgccagtggagcaacgtgtccaggatctgctga

SEQ ID NO: 6842 - DNA, 144 bp, Zea mays
  Peptide Sequence Number=SeqID_48621
atgaccgcggacagcctgactgtagactcaatcgtcgacaaggggtggatgattcttcccgaagccgagagcgactggtgcagcggccgtcgcacagtcagtcaagctcatcaagaagcgcctcaagtggggatggatacttga

SEQ ID NO: 6843 - DNA, 367 bp, Zea mays
  Peptide Sequence Number=SeqID_48622
ttttttgggggccctcaaggccttcgagggaccttatagttctttggatgccgtcgcgacgttcgggaccctccagggacctcagggtcctttgggtgccatcgggacgtctagggccctctgggtctattggaggcataagagctattgggacatcgggggccttagggtccttcagggggcatcaggaagtccggggactcaaggtccttcaatggaagtcagggccatcgagggatgtctggcgccctttagtgctgttgagactgtcaaaatgttcgagaccatcgggggccatcatgggattcggggttatgggccacaacacggcacaaccgatgataccaacaccaggaggagcttctag

SEQ ID NO: 6844 - DNA, 1737 bp, Zea mays
  Peptide Sequence Number=SeqID_48623
atgaaagagtccgaccagctcgcgacttctttcatcacaccttttggcatgtactgctacgttactatgccatttggtttgaggaatgcaggtgcgacataccaaaggtgcatgaaccacgtgtttggcgagcacattggtcgaacggtcgaggcttacgtcgatgacatcgtagtcaagacgaggaaagcctccgacctcctctccaaccttgaaacgacattccggtgtctcaaggcgaaaggcgtaaaactcaatcccgagaagtgcgtcttcggggtcccccgaggcatgctcttggggttcatcgtctccgagcgggggatcgaggccaacccggagaaaatcgcggccatcaccaacatgggccccatcaaagacttgaaaggcgtacaaagggtggtcagcgccgcgatcgtggttgagagacaagaagaagggcatgcattgcccgtccagaggtcggtctacttcatcagtgaggtactgtccgagaccaagatcagctacccacaaattcagaagctgctgtacgcggtgattctgacgcggcgaaagttgcgacactacttcgagtctcatccggtgactgtggtgtcatccttccccctgggggagatcatccagtgccgagaggcctcgggtaggattgcaaagtgggcggtggaaatcatgggcgagacaatctcgttcgcccctcagaaggccatcaagtcccaagtcttggcagactttgtggctgaatgggtcgacacccagcttccagcagctccgatccaaccggaactctggaccatgttttttgacgggtcgctgatgaaaacaggggcaggcgcgggcctgctcttcatctcgcccctcgggaagcacctccgctacgtgctgcgcctccatttcccggcgtccaacaacgtggctgagtatgaggctctggtcaacgggttgcgcatcgccatcgagctaagggtccgacgcctcgacgctcgcggtgactcgcagcttgtcatcgaccaagtcatgaagaactcccactgtcacgacccgaagatggaagcctactgcgacgaggttcggcgcctggaagacaagttctacgggctcgagctcaaccacatcgcccgacgatacaacgagactgcggacgagctggctaagatagcctcaggtcaaacaacgattcccccggacgtcttctcccgagacctacatcaaccctcagtcaagaccgacgacacgcccgagctcgagaaggcctcggcccagcccgaggcaccctcagctcagcccgaggcactctcagcccccgagggtttctactggccgaccgcggtggtcgacgccactagaattgtccacacctgcccagggtgtcaattctacgcaaggcagacccacctgcccgctcaggctctgcagacgatacccatcacctggccgtttgctgtgtggggtctggacctcgtcggtcccttgcagaaggcacccaggggatatacgcacctgctggtcgccatcgacaaattctccaagtggatcgaggtccgacccctaaacagcatcaggtccgaacaggcggtggcgttcttcaccaacatcatccatcgctttggggtcccgaactccatcatcaccgacaacgacacccagttcaccggcagaaagttcttggacttctgcgaggatcaccacatccgggtagactgggccgccgtggctcaccccatgatgaatgggtag

SEQ ID NO: 6845 - DNA, 670 bp, Zea mays
  Peptide Sequence Number=SeqID_48624
atgaagacaatgtgttcaatctcaaccaataagatcagagtggtgcagcgaaagcatagtcaaagtcagctcaagaaagtcgtggacaacctaagaaccaacctagtcgttcttgctaacctcttcttgaatctcgggggcgagattcctgttaaggggcgggcccccatatcatctcctcgcttcccccttcacaactgcctcagccccgtgcatccgaacgccaaggaaactggcccccactccaccatggcccgcccacgttgctcggtcttcaagccccctgcagttcaactgcatagcagtcctggagtcgcgctcgccgccaagctacgcgttgccatgcccggagaaggctacgcccgtgattctccctcatcgagttcgtcgcaaggtgagaagtacagagcgtggccatctcttttgttttctttgcctcgtccgagctgtggcaatggcgatccatcgtcattcgcgcttccccggcgaagtcggctgagccgtcctcgctctctctgttgtgtggtcgtgcgtctaccctcgcaacccctccctacaacgcccttcgcggccatggctgaccgaaccgccagcctcggcacgacggcacagccggcctgctgccaggcacaacggccagggcagagcccctgcgcgcccaatcgccacc

SEQ ID NO: 6846 - DNA, 135 bp, Zea mays
  Peptide Sequence Number=SeqID_48625
atggctgaccgaaccgccagcctcggcacgacggcacagccggcctgctgccaggcacaacggccagggcagagcccctgcgcgcccaatcgccaccttattaaaaatgaccttccaattaaacctaatgtatag

SEQ ID NO: 6847 - DNA, 651 bp, Zea mays
  Peptide Sequence Number=SeqID_48626
atggcgctggcgctgctgtgcgccgtcctgctggcggcgacggcggacgacgcggcggcggcggcgtcgtcgtgcaacccgtcggcgctgagcgcgtgcgcgcccgcgttgttcggcagggcggtcacgctggggtgctgcgcgtcgctgcgcgcgcagcagccgtgcctctgccagtacaagcgcgaccccgcgaaccgcgcctacgtcaacggccccgccgcgcagcgcttcacccgcgcctgcggcctcacccagatgaaacgtgctgctggacgcagcgcgcgtgatcggcgtggttgggatcgcggctgggagccggctaggcgcgcgccaccagaggcgcagccgcgcaggggctacgagcgcgccacaatagctagggaagacaatcgagccaccgatgcttcagaagaagacctcgctgccgcaagggagggcaggggcgggagctggagaaaccacgacgaagaggcgaagatgctgggccatagccatcggcccatcgcagcagggaggctgcttccgttaggcggtgcggaggccggaggcggcacacaggtcacagagaaaggggctgcactgccggaggagaaggggtggccacaggccacaccgaggaagaaggggaacgcgccgctgctgctggag

SEQ ID NO: 6848 - DNA, 183 bp, Zea mays
  Peptide Sequence Number=SeqID_48627
atggcccgcccacgttgctcggtcttcaagccccctgcagttcaactgcatagcagtcctggagtcgcgctcgccgccaagctacgcgttgccatgcccggagaaggctacgcccgtgattctccctcatcgagttcgtcgcaagttattaaaaatgaccttccaattaaacctaatgtatag

SEQ ID NO: 6849 - DNA, 2406 bp, Zea mays
  Peptide Sequence Number=SeqID_48628
atgatccccgctcctcccgcttccagcgcaggaggcagcatcaccagcgggtggcgcaacctcctcctcctcctcctcctcctcacactcaccctcgcgcgccccgcagcagcgcagccgccgacgagcccggcgctgcaggcggcgtacgcggcgctgcaggcgtggaagcggacggccatcttctccgacccgtccaacttcacctccaactgggcgggccccaacgtgtgcgcgtacaacggcatctactgcgcgccgcggccctccgacggggcgctggccgtggccggcatcgacctcaaccacgccgacatcgcgggccacatccccgccgacctccccctcggcgtgcccgacctggcgctgctccacctcaactccaaccgcttctgcggggtgctgccggacacgctgctccacctgcgcctcctccacgagctcgacctcagcaacaaccgcttcgtcggcgccttccccgccgtcgtgctcgcgctcccctcgctccgctacctcgacctccgcttcaacgacttcgagggccccatcccgccgccgctcttcgaccgcccgctcgacgccatcctcctcaactccaaccgcctccgcgggcccatcccggccaacctcggcaactcgccggcctccgtgctcgtgctcgcgcacaaccgcctcggcggctgcatcccgccgtcgatagggaggatggcggccacgctcaacgagatcgtcctcatcgacgacgacctcaccggctgcgtcccgccgcaggtcggcctgctcacgaagctcacggtgttcgacgtcagcggcaaccacctccagggcccgctcccgcccgccgtcggcgggatggccgccctccagcagctcaacgtcgccgggaacctgctcaggggccccgtgccgccggcggtgtgcggcctgcaggggacgctcaggaacttcacctacgaggacaacttcttcacctcgcgccctgggtgcgcggtcgccacggctgacgggcgctggaactgcatccctggcgctcctgcgcagcgcccaccgccacagtgcgccgccgcggccgcgccgttcgactgcaggacggcgcaatgccagccgcctccgacgtccggcccgcctgggtcgggccccggtggaccttcacagccactgtccccgccagggagctcgaatacgccgtcgcacccatccccgccagggagctccaacacgccgtcgtacccttctccgccagggagctccaacacaccggcatacccgtctccaccagggagctctacgacaccgtcgcacccatccccgccagggagctctaccaccccgtcgccaccagggagctccacgacaccgtcgcacccgtccccgccagggagctccacaacaccgtcgccaccagggagctccacgacaccgtcgcacccatccccgccagggagctccaacacgccgtcgtacccttctccgccagggagctccaacacaccggcatacccgtcgccaccagggagctctacgacaccgtcgcacccatccccgccagggagctctaccaccccgtcgccaccagggagctccacgacaccgtcgcacccgtccccgccagggagctccacaacaccgtcgcacccatccccaccagggagctccaccacgccgtcgtacccgtcgccgcccgcagacggcaatagccccaagccatcaatgccgccttcgtcccatggtggctcggctccgccgtcaggctaccagccgccgccgtggtcccagtgggcaccgtcgggtcaacccgtaggcgtaccaccacccacagagcaccccggtggcgtctggccgccgcacacgccaacggctcccggcacaccaggatcagcgtacccgccgggcacaccaggatcgccgtccacaccgacgactccgggcacgccaggttcgacattcccgccgacgacccccggcgcaccagggtcgttgccatccacgccgacgactccgggcacgccaggttcgacgttcccgccgacgaccccgggcgcaccagggtcgttgccacccacgccgacgactccaggatcgacgttcccgccgacgactcccggtgcgccagggtcgttgccacccacgcccggctaccaccctccgtccccaggcgaccacggcagcagccaggagcacaccccgccatcggcacctggcagcagcggcggcgtcctaccgttcccgcccgtgcacggcgtggcctactcgtcgccgcctccgccgccgtccgacccagcagcggggaacccgccgtcgttctcgcccgtccacggcgtgtcctactcgtcgcccccgccgccgctcccgcccgtgtaccccgtgtcctacgcgtcgcccccgccgccgtacaagagcaactag

SEQ ID NO: 6850 - DNA, 942 bp, Zea mays
  Peptide Sequence Number=SeqID_48629
atggctagcgaggaagtactccacaaggccgggtttgggtggaacaccaagggtctagacagacatctagaagagtttgtgtatgcttattttgatggattggtccagaatcttatagagcgctgccttcagatgtacatgaacaagaaagaagtggttgatgccctctcccaccactccaggatagagccttgtatcactgaacttgtttggcaacaacttgagcaacagaatcctctgtttttcaaagcatacgatatgaggctaatgcttaagaatcaaataatggtcttcaacaggcttctccaggatcagttcgagattatgaataaagagttttcttcagggatcccttctatgtctcttcctaatgactctaattccaacctattgaagcaagattcatgctttttgccagagactgctcctggaaatgcaatgccagatggtataatgcacaatggaagttcaagtggtataataaatgacacaccatctggcgatcagttacttaatgctagtaaagacttgcatggccttcatagtcaaatagatgcttcaactagtctacagtcagaccagaatgcaactgctgtgctgtatggtgtagacaacgagacaagcgcaacaataaagaccgagtcttgctactcgagtaatgctgattttgccttctgtgggaacactttcctggaatcatgccagtcgataggtgatgcatctggtggtggatccttcagcagctcagagttgaatgggcaaccactaaacgattcaattttggatatggagtcatcatcatttagcttcttgaaccaaatgccccaaagcttcatgttttcagacctggcagatgatttcaaccaaaatgcagaaataacaccatttctcactcctgagacaaatttctccgattcaacagggggagaccatacaggttga

SEQ ID NO: 6851 - DNA, 261 bp, Zea mays
  Peptide Sequence Number=SeqID_48630
atggcaaggtattttaaactctctcttttgctctacctccctccatgcatccctgtttttggcgtacctggtgctgattaccacaagactgtggtgcccgagagtagcagcaacatgaatcaagacctgcagaacgaggagtcagcaacaacttctgatgtgaaatctgtgctgccaaagttctcacagatcaatttgcttcacaatgacctgggcctgcctgatgatgataagtcagcggggacttctattgcaaattga

SEQ ID NO: 6852 - DNA, 531 bp, Zea mays
  Peptide Sequence Number=SeqID_48631
atggctctgggcgtgcggcccgcctgctgccgcctcgctgacccctaccgcgtctctcttcctgcacgcgttccacggcgcgctgctaccgcaggccacaaatcccgtataagtcacacggcttgcgcgagcgcgaccggcaaccctaaccctaacgcactctcctccctcccacctgcgtctccttgcggcggccgcggttctctgtctcgcggcgtcggcgactcggtctcgggcgcggcgctcggctgctccctcctcccggtgctccctgctcggctgctccctcatctggtcatcccggtggtccctggctggctggctccctccctgctcggctgctccatccacccgacgctccctgctccctcgatccctcctcctcccggtgctccctggtccctcggtccctccgccggcggtggcttccctgctccctcggtccctcctcccggcgctccctgctccctcggtccctcctccggcggtggcttccctgctcaaccggccaagggaaaccggaaacgctag

SEQ ID NO: 6853 - DNA, 489 bp, Zea mays
  Peptide Sequence Number=SeqID_48632
atggagaggacggttcttggcctgacgctgtgggtctggattgccatcggcgtggtcgcgcttctcgtggcaatcctgctgatgatctgcatttgggtggcgtcccgcctgaggaccaagagaaccatggacagcctgaggcagacgcagatccccatctactccaaggagatccccatcgaccgggtcggcgggcgcagcctggcacagacaatgcatgagcgcgagcagccgagcttgccgccgccggacaagtacgcgaaccgggagccggccggggcggctgtggggcacctggcactcagcaagtcctcggatcatgacaacatgagccaggggagctcggtttgcaatgctgaccgtgctggcactggcagcatgcactccgggggcaggcagaaaaagaattcagagtggaagttgaggctattggccatgtccgacataagaatttggttcggctgttgggatattgtgttgagggcgtaa

SEQ ID NO: 6854 - DNA, 345 bp, Zea mays
  Peptide Sequence Number=SeqID_48633
atggcgggcgcgggcagcaggatcaagagcaaggtgcgggagtggatgcggaagcggatggcgccgaggaggaagacggccgcggccgcggccgctacagggagcggtgacaacagcggcggcgtcggcggcagtgcgtcggcgtcggcgccggcgcagtcgtcgccgcggcggaagctcctggcggccgcgctcccgtcggcgctgcggtggaggaagccgcgcgggaacgtgctggcggcgctgttccagcgcgcggcgtaccacctgctgtggctcgtggagtccgtggtggtggtcgcgcagctctgcttcttcttcgtgcgcttcggcttcaggctgtga

SEQ ID NO: 6855 - DNA, 936 bp, Zea mays
  Peptide Sequence Number=SeqID_48634
atgcctagcccaccgtgccatgtcttcagtccagacatgatcggaccggcacagatccgattcactgctagctttgagtcgggccaaacccgtgccaggttttggaccacccgggtgttgctagctacatctgtcccgtcaaggagtagcatgatggttgatgtggtgatggtgccgtcgaggcggacgtcgccggaacgtgagggcatggtggatgaggtagaggaggaggtgcacgctatggtggtgcaggaaccagaggtaaaggatgtgttggtgaccaaggtggtggaggctttggaggtgaccaaggtgcatccggtgcttgaatctgagccaagggttgatgaagtgttggtggtcaacgaaacacctgtagtgcctgagatacaggaaccagaggtgaaaggcgtcggtgctaccgttgtgttgaaggaacaagagacgaatagtggcaatgtggtggtcaaggactctgatgaggcgttgccatctcaggaggttgctggtgtgcatactacagatcgaggaagttgccaggcagctttgtttggagcattggttatcattttcaaaaatggaacaatagaagaaggtctgatcgacaggatgaactccattgacgacaggatgaactcacgagcagctagcaccccacctgcacgcaccaagtgcgcgcagtgccataccgtggagcgaggtggcgcgcacaggcaggggcccaacctgcacgacctcttcggtcgtcagtcaggcaccaccatcggctatgcctactccacggccaataagaacatggctgtcgtctgggagaagggcaccatgtacgactacctcttcaaccccaagaagtacattccaggcacaaagatggtcttcccgaggctcaagaagcccaaggagcgaaccgatctcatcgcctacttgacctattga

SEQ ID NO: 6856 - DNA, 705 bp, Zea mays
  Peptide Sequence Number=SeqID_48635
atgtcgaatagccaagcggatgctcttgctgcccgtgcgaagtcggtgaggctatcttctgaactagaaaaactaaaagctaagtcgactgagggctaccgacactttgagccgcttgggtacatcgacaatgacttcgatcgtagtgtgtacaatattgaggttgatcacatggtgggattttctgtagacatgttgctagaccgcatgtggggaccacacgataggcgcgattggaagcagaggctggcgggttggatgactcagacacggagtccgacctactggggggcaatggctggtgcaggggcagctgcgcaagcatcaagttcaaaggcgcctgagtcttcgcaccgcagtgcagatgtctcgaaagatttagagcaggttcgggtaacttcaggttggggaaagtttcttttgaggacttttgctgagagggcaagagaattgcaactaacaaactttctaggtgcctgcacaagttctaatgtccgagcctacatgggaggcagcccgtcaaatggtgatgtgtcaatggaatcaaagtccattgtccgagaattttttattaacccggctgataatgtgtgtcttcaagaggatgaaattaggcatctattttttagtgaagagcttgaactgctctttttcgattatagggagcttgttctccttccaaaaagggaatgttgggactattga

SEQ ID NO: 6857 - DNA, 519 bp, Zea mays
  Peptide Sequence Number=SeqID_48636
atgaatgagctagaatatgggtcatatcccgaagacgtggaagaaggggaggaagaagattcaagtactactgcaaggaggaaggaggttattgaaggcggcgaagatagggtttgtttgaaatggaagtctttgcctactgaggacaaaatgaggattagggcgaagggggcgaggtctccagacggagcagagactacttctgaagatttggtcggcttgaacgctgaaacaactaaatttgctaaggatttggtggagactatgtgtgaagccacgtcacccgtgtctcttgtggcatcgcacgagaccgaacctggggtgacatcttccatagaggacatgtcagtttatgactactttgctaaggatggagggatgagcctggtggccaaaccacgcagcgagccccccaaggcgattgttggtgcggcggaggatccaaagtgtgggaaaagtgtgattgagctcacttatggtgggggctcaagtgtaaggcttaccaaggaaaatggttaa

SEQ ID NO: 6858 - DNA, 315 bp, Zea mays
  Peptide Sequence Number=SeqID_48637
atggcgctaaggccagcggtggggctaggggcggaggcggtgtggggcggcggcgctagggacaagggcggaggcgtaagtcggtggcgcttggggcaggggcggaggcggctctcgggacggcgctcaggcaggggcggccttggggcggtgctcgggcaggggcagcactccgaggcgggggctggggcggcggcgctcggacacggcggcagtttgagtgaacgaagaagaagaaatgagccctcgcgtgcgcggcctggctctaaaacgtgtaatccccgtcggccagaatacggggccgacgggaattag

SEQ ID NO: 6859 - DNA, 519 bp, Zea mays
  Peptide Sequence Number=SeqID_48638
atgtccctgtcctggctgtcccgcaaccaaacggaccctaaaactgaggggaggacctcttctatttccctctcacccgcctacgactttgtgcccatctccatagccactaattgtcgtcgtgcgtctgctcctcgtcgtggccagcccgtcccgatcaacgtcgccggtggagagaaggtggcctcggaggaagactactatgaggagttcgacgaggtttgccccttaaatccgggtgtgacagctatgcagtgcaatgaagaagatagtggtggtcaggttaacctggagtttagtgatgaggaccttcttagttctcaggaattgtccgagttggctaaaagtgtgggtgtcaatctgcagggctcacaagaaagtgggaatgaaaattccaaaactggagacactggtgatggtgctattgtgtcacaactgggttccggggcaccgaggcctgggcgcaaaacgaatgtcacatctttactgtataataggagttctgtacaaactaaataa

SEQ ID NO: 6860 - DNA, 270 bp, Zea mays
  Peptide Sequence Number=SeqID_48639
atggctcagttcgcgcacgtatcaggggtttacaatagctttgaccgctttgtgaattgtctttcaaccatcactctcgattctgccccaaggaaagagaaagctgaaatccctttcaagctcataagcagacacaaacccttcagaaccttaaccaaccccaaacaagacagattaggtttcctaagacttggtttaacatactgggatgagaaggaccctaccccatcagcgaccatgcccactgtcacacccggttttagaaggtaa

SEQ ID NO: 6861 - DNA, 369 bp, Zea mays
  Peptide Sequence Number=SeqID_48640
atgtcgcccactcatgtcactggtccgcgggacccgcacgtcatccgctgtttcgcacccacattgaaccggcctctaactgcgttcgcgggcccacggaacagactctcaactgcgctcctccgtctcactgtcacgcgggccggctttgtcagcgcattcttgtctgcgctcgcgaacccgctgcgagctccgcgcgcaatccgtaagctccgggaatcggttgaagtccgccttgacctggggataaaacctcccctagacacccccgagtttttcctgccctctccctgcgcagaaaccacgcaccgaccttgcagccatagccacctaccgccgccacgaggaagaaagtggccgccgccgtag

SEQ ID NO: 6862 - DNA, 387 bp, Zea mays
  Peptide Sequence Number=SeqID_48641
atgactttccctgagcctataagagatttgggggccaaggttcctccctcttctctcgcatcctcctcccatcgcaaaatactagaaagccagtgcaccgcgcctatcgccatacgtgccggagcaggagctcgcgccgccgccttggttcccctcctcctgttcttcccggtgtctgcagtgaagaaattggggttcgccaacgggcggtggctgcgtgcactcgtattccgacactcgggagtcattggagtgatgaaaatttctcaccgcgctcctcctccgccgcggtatcgcctctcgtcgtggccagcatcggctcagccgccgtcctcggtgagcacgttccctatcgcctcgtacaatcgttctctccgtgtagcatag

SEQ ID NO: 6863 - DNA, 216 bp, Zea mays
  Peptide Sequence Number=SeqID_48642
atggctgcaaggtcggcgcgtggtttctacgcagggagagggcaggaaaaactcgggggtgtccatgggaggttttatccccaggtcaaaacggacttcaaccgattcccggagcttacggattgcgcgcggagctcgcggcgggttcgcaagcgcggagaagaacgcgctgacaaagctggctcgcgtgacaatgagacggaggagcgcagttga

SEQ ID NO: 6864 - DNA, 582 bp, Zea mays
  Peptide Sequence Number=SeqID_48643
atggccgatggcagcctaggtcgagcccgcatgggccttcacggcggcggacacacttggttttgtcgcatcgagcaccgatggctcgtgccttcctctgacgtcgcaagtgttttccttcctgcatcatcggcgactgtccccgttgcgtcgacctcgcctctccctgcaccaatcgttgtatctccactgtttcaacctacatttatcatacaaattagtaggcatagttgtgcctcattggatccggtcctattctccgtgtctgttggagaaaatattgcttatggtctcccagatgatgttgtctctaaggatgagataataaaagctgctaaagctgccaatgctcatgaattcatcatctctcttccacaggggtatgatactcttgttggagagcgaggtagtctcctaagtgggggacaaaggcagaggattgcaattgcacgagccctcttgaaaaatgctcctattctaatacttgatgaggtaactcaaaactatgaacacattgatctagggaaaaaaggacaaaaacatgagtacatgcgttgcctttttaaccatttgcaggactag

SEQ ID NO: 6865 - DNA, 240 bp, Zea mays
  Peptide Sequence Number=SeqID_48644
atggccagcgtattagacgctattatagaatctgtaaaggcgtcaactcctgcttcagcacctgctgcagagggcgaaaccctaaagaaatctagcaaagctaccatagcgcagaccactgctgaagctagaccatcagtcccccgccgaaagcaaaatcttcggaggctgttgaagaagggcttaattctgagcaaggctttaaaggccaagaagaaagtagaagatgaaagctgctag

SEQ ID NO: 6866 - DNA, 189 bp, Zea mays
  Peptide Sequence Number=SeqID_48645
atgcccagggtcgatgtggatggcgaccgggtcgtacacgggaggcttggtgtgggccagcggggcgtcgggagccgaggcctctgcctagtagctggcaaggagaaacgcctagaagagaaggtagcagaccatgttggtggtggtgcgaatgatgcgttcagcccgaccattctgggagaggtgtag

SEQ ID NO: 6867 - DNA, 945 bp, Zea mays
  Peptide Sequence Number=SeqID_48646
atggcgatctccacctggagcgcgcgccttctcctcacccctgcttcctcccgcgccaccctatcaccccctcgccctcccactacaaacccgctctcatcgttctttcctcgcaatcgtctccatttcgtgcgcccgcgcccgcgcccgccgtgcgcctacatctctgcgccagcgccgggcccggaggccgcatacgcgccgccttctctcgacgccaccgccgcggcagccgatgtcgccgctgcgatatcctcctccgacgcggtcacttgggccggcgtctgggcgctgctctcgcgacacagggcccgcatcgcggtctgcatcgccgcgctcgtcgcctgcaccacctgcacgctctccatgccgctcttctcagggaggtttttcgagaccctgattgggagggggaacgagccattgtggaggctcttatccaagattgcgatactgtacacactggagcccatcttcaccatcatattcgtgatcaatataactatcatctgggagcaggttatggcaaggctgcggagccagatatttcgaaggattctgatccaaaagatgttattttttgatcgtcacaaggttggtgaattgaccggtttgttgacatctgatttgggttccttgaagagtgttatcattggtacactttgtatacttttcacactatcaactgagctagctccagttcttgggctccttatggtgtccgtctccgtgctagttgctattttcaagaggtcaactgttcccacttttaaatcttatggaatcgtgcaagcacgcatatcagactgtgcatcagagacattttcagctattcgtactgttcgatcatttggtggtgaaaaacgacaaatttctttgtttgacaatttggtaaggcatgagttgcttagtactagctccatttttttatttgacgtcggctaa

SEQ ID NO: 6868 - DNA, 333 bp, Zea mays
  Peptide Sequence Number=SeqID_48647
atgggaggcgagacgaggcggaggaacaggaaattatatatgctgtgcacgcgtagcccaaatagcggcaatcaggcgcagaagtccacccatagcagatggacagacattaggatgtgcgcagcggttaccgctagcaatcctccttccccttgcatgccgtctgtaggggcaccctacagccgcagcgcttatggcgccgagctaacacagctcggcgccataggctatggcgccgagatttttcgtttatgtcgcatccagatttatttctcatccagatttatttcttcggcctggaaagagcttgttgccgagacaccaaccatgtag

SEQ ID NO: 6869 - DNA, 429 bp, Zea mays
  Peptide Sequence Number=SeqID_48648
atggcgcctcctgtatttctctggccgtcagctgtggcgctcgtcgtgggcgctgcctgccgtgcccctgtccagttctccacgtcgtcgctgagctcgcccctgcccaagtacggtcgcctctgttccctcctctctgtccgtctggtggcaagtcatcgtcgaccctgccatggtgctggctgccgcagcacctgcgtccttgcttcaccggtccgcctaggtccgaccatggagctcgcccaactccttagccacctctactcgtctctctctatctcagttcgagcagcagcacgctggggcagacatatgtccgcgacgctcgccaagtgctcgatgaaataccgcagcgagctccacctcgatctgtgcagccccaacccgcgacgtcacaatacccttgtttctgccgtgctatttgtttga

SEQ ID NO: 6870 - DNA, 267 bp, Zea mays
  Peptide Sequence Number=SeqID_48649
atgggaggagctggaggcggccatgggaaacatcaaggggacagtgtcctagcttctggcgtaggggctgatgcccaggtgccgagatacaggagaggcgccatgggaggagctggaggcggccatgggaaacatcaaggggacagtgtcctagcttctggcgtaggggctgatgcccaggtgccgagatggagagggcagagactactggacaaagctattgctctggaaaacaagagggttgaatttggagagaagggctattaa

SEQ ID NO: 6871 - DNA, 712 bp, Zea mays
  Peptide Sequence Number=SeqID_48650
cgctgaggctgagtaccgcacggtggccaacggcgtggcagtggcctcctggatgcgccagctcctccacgagctccacagcccccttcagcgcgccaacctcgtctactgcgacaacgttctcagcttccccaccacgctgcagttcgctgacatttttaccaagggtccattgcttggggacaagcaaatgctcgagagggggcagatgtcatgcccgacaaccagggtgacagccaagaggagcactgatgaaggggagactgacagagtcaacgagagcctctggactcgagggcgtaagggcaaattatctgttggaaccatggtatcttttattggttacaccttcacattaacctttgctgttcaaggagctgttaatacccttggtgatctgcgtggcacattggcttccgtagagagaataaattctattctttcagcgaaggacattgatgattcacttgcatatggtttagccaaagaacttgatggcaaagagtttgatgattccaatggagtatctaatgtggagattttaaatggccttgaccttacaattgagtgtggaaaagtcacagcacttgtcgggcctagtggtgctgggaaaagcacagtgccaactcaaggttccatcactgtcgcaggagaagacatccgtgtatttgacaaaagggaatggtctcgagtagtatctctagtcaatcag

SEQ ID NO: 6872 - DNA, 246 bp, Zea mays
  Peptide Sequence Number=SeqID_48651
gcacatgcttaccaaaataatggcacaaaacttggagtgctgaaatctgctaatgaatcattaactcgagtagtcgtctatgtctccctaatggcactttacattcttggcggtagaaaggtcaatgcgatacatgaggtctctgtccaagaagcgtcgaaggcttcgaggggggctcctcatgacttcgcgaaggcgccgccgccatcttggatcgttctgagccaaaaccttggtgaggattga

SEQ ID NO: 6873 - DNA, 549 bp, Zea mays
  Peptide Sequence Number=SeqID_48652
atggcggtgcccatgctgcgtcctgctgaccattcgagcccatttgtaagcccgtccctgggtgattgggcccacctgaccacgtgtaagtcggtcccaacatttggtgcccaccgttcgtgctacgacaaaaacaaacccgcgagggtccccaagaaaacgacttccaaggccaccacctctctggacgatgcggcaaaggcaaccctcgttgagaagaaaggcaaggcgaccctcgtcggcgaagttccccaagtggcacccgaaaacgatggagcagttaaaacaagcgtcctcacacagagaacccacccaccccgaaggcaccgttcacacgtgcagctctatgggcctctctcggaaccctccgccaggttttacccctcagagtctgacgatatcatggaggatggcgaggtcctaggtatctcagctgaagaccagctaaaattacgagcacttcgcattaaaaacaatcacatgcaaaaacagaaggagatactcgcgaccaagcgccatggcatcaacatgcaagccaaagtcaggtag

SEQ ID NO: 6874 - DNA, 175 bp, Zea mays
  Peptide Sequence Number=SeqID_48653
atggcggcggccatggcgccgagcggcgagtggaaaggggaggggggatggggtcagctaggagaggtggaggtgtcctcaccggcgatggggacggatcacggggcaggagcggccgagcggtgccggccgaatctgcagacgtgccaaggagcggcggcgccttacggcaggg

SEQ ID NO: 6875 - DNA, 1119 bp, Zea mays
  Peptide Sequence Number=SeqID_48654
atgaacaatcttctctcggattcctttgagagggatgagaagccagaaagcgagagggacatcgagatggggaatcgaaatcccaaggacaactccgactacggtctcaaagacttctttgaacaggtcaaggagattgaggtgctgttggataagatgtccaacatagttcacaaacttcaggaagctaatgaggaatccaagtcagtcaccaaggcttctgcaatgaaagtgataaaggagcgcatggagaaggacatcgatggagtactgaagatcgcacgcaacgtgaaagtgaagctggaacagatggacagaaacgtatggacattaagcctgaccatgtcttcagcgtgtgattcacttcacccgatgctcgccagagctcattattctcctcttcggtttgcagaatctcgagaacagacagaagccggggtgtgggaagggcaccagcgtagaccgatcaaggatgtccatgaccatgtaagatcctcttgcatttattatgccaatgcaaaagtaatccaacaaaacgtcaacttcgattgcagtgcattgaagaagaagctgaaagaaaggatgaacgatttccagaatctaagacaaactatacaagaggagtaccgagaagttgtagagaggaggatcttcacagtcacgggaacaaagccttctgaggaggtgattgatcgtctcatcgagaccggaagcagcgagcagatctttgagagagcaatccaagggacaggtagaggacagatccttgacacggttgaagaaattcaggaacggcatgatgcagtcatggagatagagaaaaggctccttgaactgcagatgatttttgcagacatggcggcactcgttgatgcacaaagagaggatctagacaacatagagaacctgtgctactggaaaactcaatcaagttcgaaagctgatccattgccaccgtcaggttcaaaatgctgtaaaccatgtggtgtctggtaccgaggcgctacgcaccgcgaagagcctgcagaagaagtcgagaaagtgcatgttgattgcgattatcattctgctggtaattgccgccatagtcgtgctttcgatcttaaagccttgggctaa

SEQ ID NO: 6876 - DNA, 456 bp, Zea mays
  Peptide Sequence Number=SeqID_48655
atgcggcggcggacgggggcatcgggaaacggaagtggaagcggcgcgcgaatcacggcccttcaacaccacgctgacggccgaccacgcagtcttgatgggccacacttctcccacgcacacaccggatgggccgaggttgctggactgttagaggagtctctccaagagaacacggccgacgataaagagactgaggtaggagtataccagcacactgtacatactgaattcagagataaagagactgacgcgaagatgcgccgaacgtgttgggtacttgggtcattgggtgtcgactggtcgctggaggaccgaagcacaagcgaagcggtgaggaagctgtcaaaggccaccaaaaccacgccggacgccggaagtcgcagggcagaagcggtgaacgcgtcgaccgaatccactagcatccctccctcttccgcgtctccgctcctataa

SEQ ID NO: 6877 - DNA, 325 bp, Zea mays
  Peptide Sequence Number=SeqID_48656
cggacaggcgcttgccattccacctttccagctactcgtgatcctcggcaatgtcatcttcgccgtgggccgcccgcccgcccacacagtccaccacagattcagaggtccgacccagaacccgcggcacggggagtcggcccgatattccgctgcggcctgcggcccgccgggcggcacgcggcccggcactgtagcggcccggcacgagcacggcccggcccgcttggagccgtgcccaggccagcccggcacgagcacagtgccgtgcttgggcagctcagccggccccgcggtgcaggcacgggcccggcacggcaaatag

SEQ ID NO: 6878 - DNA, 267 bp, Zea mays
  Peptide Sequence Number=SeqID_48657
atggcgaggcaggcggcgacaagggagctggggaagagagaggccgcgagggaggaagagtcggcggcctggctactgggggagcacaggcagggctcgctggcgagcggggagaagcgtcgtgccgctgctggtggctggcacacggcatggggggccgcgacgacctggggagcggcgccgtcgcgagcgtggtggccacgagcgggtcagtggccgaagggagggaaactagtattaatgttacctaagtactgccccaattaa

SEQ ID NO: 6879 - DNA, 650 bp, Zea mays
  Peptide Sequence Number=SeqID_48658
agccaacggcacagatctgcgcccttctctcgctttctccctgtctcctcgacgccaccgccgccaccgcctgggcacctcccccggcctccgacgctgctaaccgctcgacgtcccgccacctccacaacgcagttgggcgcgcttccagcctccgccggaccggcgagctccggaggtctcaggtgaggcttggcactctagttccccttaccaaggacaatgctggctcatcaaatggatctgtatcaagcattcctatattccaggggcccaatgtagtcgggagggatcatttggttgtcgtcgacaagaggatcagccgcaagcatctgagcctccacgcctctactgatggctccattgaagtagtagtggaaggtccaaaccctataattgtgcgatcgaagggacagaggaggaaggtttgtgctaaagagacagccaagattgctcatggtgatgtcctagaactgattcctggtgattatttcgtgaagtacgtggacatgggtgatgaacatgtaccaatgcatttgagcgacttaatgaagggtaagaggtatagtgaggaacatggcgcagcagtcaagaggattcgacagattatggaagatgaggctttggcaaaaacactacaggttagctaa

SEQ ID NO: 6880 - DNA, 399 bp, Zea mays
  Peptide Sequence Number=SeqID_48659
atggctggagcacgaccaccatgctccgcgtcgctgccgcgcaaggaagatggcatcgcaaggcgggatgcagtcggggcatgtggggcacaacggctgggagccaggccgcaacgcaggctgccgcgccataaagaaaacgaagaaggatgtgccagacttctcacctcacgacacagcctgacggagagagctcgtggatgcctcctggtgaagctccggcacgcggtgctcaacgacggcctggccgacgacaacttgcgatgcttgagaccgatggatgcaattcttgaggatctcttggacctgtgggttaggacccacacacgctttcgctgtgccacttcaatcttgtcggttgatgttgatcgcattgtcgtcattggggttatcggctaa

SEQ ID NO: 6881 - DNA, 327 bp, Zea mays
  Peptide Sequence Number=SeqID_48660
atggctggagcacgaccaccatgctccgcgtcgctgccgcgcaaggaagatggcatcgcaaggcgggatgcagtcggggcatgtggggcacaacggctgggagccaggccgcaacgcaggctgccgcgccataaagaaaacgaagaaggatgtgccagacttctcacctcacgacacagcctgacggagagagctcgtggatgcctcctggtgaagctccggcacgcggtgctcaacgacggcctggccgacgacaactttgcggtagggaccaacacggggcgtgcggctttcaggtggtgctacaacgctgacgaggggaggtag

SEQ ID NO: 6882 - DNA, 486 bp, Zea mays
  Peptide Sequence Number=SeqID_48661
atgggtgtgcctcaccggggaagaagatataggagagggagagagcgcggggaagagggcgtcatggggatagagaggagagagagcctcaccttggcgacgacgtcgaggcacgacgggcgcaggtggggcacgactccggtgagggtgcagcgagcttggcggacggtggggcgctccagcgtgcgacgacggtttccgaggcgcgggcgcggcacttttgtggcattgggcgaggggcgaggcagggagagggcggttccaccttttgggcgtcatgggcacgtggtttttggagtagagagtgaggggtggttgaagatgaacagtgggaagggtggcgctaacgcgcgggcgacagcggcatggcgctgcccgtgccgcgtacgcacgacggcgggctacactgggccggcgtgcgcacaggtcgtgcagggagagtgggctgcgcatggggagcgcgcgctgaatggcaggtcgtggtag

SEQ ID NO: 6883 - DNA, 396 bp, Zea mays
  Peptide Sequence Number=SeqID_48662
atggaggaggcgagcagcaacaacgttgatggtggtggggatgtgcggagcgtggaactgcaagcaaccccagtcatgccgttttcaaaaccctacccgaccaatccgtccaattccaaggctatcggctttgcgttgggagcaccgggatgcaactggacatcgccgtccgctcgtctagctgttgctgctgaagtcccgatgcttcacgccaccgcgatggatatcaagaggagggaagaggcgctgaagaatggtgcagatccacatttgtttttgcataattgctgccatagctccaccaattgtatttcatgggaaatcattaacgttatgggtaatcatgttggtgttacggttggtggtgcgaatgggcattattgtttcctttgttag

SEQ ID NO: 6884 - DNA, 519 bp, Zea mays
  Peptide Sequence Number=SeqID_48663
atgttggaggtgttcgctgctgggcaagacacagcgatcccaccagtgcacgtcatccctgaacatcgtgtgcaagtgcaaattgtgcacttctgtgtgctgcacgggtggacagcggtcgtaccactgccggtggagtgcggcctccccaccgcgtccccgtcaccaccggtgccggtgggtgacgcggagtcatcgacacccgccccatggacatcgatctggcggcaccatcgtctcctccacccgctgcagcggcagttggacgttgttcaccaactccgccgatctcacgccaagaaggagatggtgaccggcgacgagcccgccacaagccacgggaaggctccatcgggagagtccgacaacaagaagagggaggaatcacctccccgcgtcaagtcgcaccggagtggcgacaagaagaagaaaatgaagaaagtggtctactacgagaccgattcttcgtcgccctccacatccggctccgacacgccttcgtcgcccgcgtcaagatga

SEQ ID NO: 6885 - DNA, 423 bp, Zea mays
  Peptide Sequence Number=SeqID_48664
atgtggaagcaattggggaacaatgatgaaattgctaacctggaagacaacattccccctaacggcaatcctcacccattccctgaagatgacaatgatgaagattttctgcaggctatgggggacttcatggaaaatttggtcaatcagaatctaggcggagttcaagaagctcaaggaaatcctcatatctccaaccttttcctcgggcctgtcacatttccatctttacaaaatctcttggattgtgatggaatctacatggatattgttgtttccaccttgcagaaggtggatgttgatagatgtggcgtgccccctgtggaggcagtcgtggaggtgcttcttcatccaggatcgggagaggaggacagcaccatcgctacaaggcatctcaagtggtctagaacccggtgctgttaa

SEQ ID NO: 6886 - DNA, 924 bp, Zea mays
  Peptide Sequence Number=SeqID_48665
atgaggggtttccagctgctactcatcatagtggcattgcttgccggggagttgcactgcgcaagagcagcatcagcagcagatgcaccggaggctgcaccacagtcccccgaagcaccaacagcagatgagcaaacgccaccgcaggcgcctgggccaacatcaccacctccacctccacgacgtcggggatcaccacatcgacggccaccagcaccgacggatcagcaggatccagcaccgccaaggttggtcgtgccaccacaggaacctcctgcaccggcaccacctggaatgacgatcaaccgcactacgggctgtactacactccttgtacttggagactcaaccgtggaccctggaaacaacaaccatctgcccaccacagccagggcaaatttcttgccctacggcttgaacttctacggtcgcaggccgactggccgattcaccaatggccggttagccacagatatgttagctgagaaactaggcatatccaggattattccaggtttctttgacccaaatctgaggctggcccagctcaggaggggtgtgagctttgcatcaggcggctccggatatgacgacagcactgccaacagaataaatgtggtgtcattctctgaacaagtgcacaacctcttccgttacaagctacttatccgaacactgcttggaccaagaagagcagagcgacttgttaacagggctgcctttgtgataagcactggcctaactgaagtgtcaagagggtgctgcggatcgggggtgatcgaagttgggcaaacatgccgagggcgaagaacatgtggagaccctagcaagtacctgtactgggatgctgtccatccaacggaaaggacgaaccaagtcatcgcgaatatgatgatggattccattggagaactctacagctag

SEQ ID NO: 6887 - DNA, 666 bp, Zea mays
  Peptide Sequence Number=SeqID_48666
atggcactttgtctgagacgtctactgcagcaagtctacaaggaaatcaaattggaagattttagtgccggctgtgctgctcatttgaagaaaattgcttctaaacgtttcaataaatttgtgttcaagccttctcgccgggattcaggaggtacaaaaatacctgaagcaataattttcagattcgagaactactggattgcacatcgaggttttcttgatgtggttcagtcaccttggagcagggagatttgtaagatcgtacaaagcatgccaacagacaaggctccaggctacaggtcaagatttctgcttggaatagatgctgacgtcactgcatatcgcagcctagtcggtgctctacagtatcccaccttcaccagacctgattgcactaatcatggtgatttctctatcacatacctgcatggaatctatgaaacatcgcttatgtttatgtttttcttattagttgaccttttgaagccagatacaacagtgatcttccgcaatgccaagattgatatgttcaagggcaccatgagactggcggtggacaagtggggccggattgaggtgactgattcttctgttttcaaggtgaatgaagacaacaacatgtcactggtggagtacgagctggtggatgtggatgaagaggagtga

SEQ ID NO: 6888 - DNA, 321 bp, Zea mays
  Peptide Sequence Number=SeqID_48667
atgaccaccccgcctttctccctgctactcaagcacctccgtgcccgcgccacgctgctgtgccgctcgcttgcgtgctgctgttgtagtgctcatctgcgcagctcatcgtcctctacatcgtgcgtcggagcccttgtcgtggcctgcccctgttcctactatgctctccgcataccggtcgccttgctcctcgtggtcacaccgtcgacgcgccacgccgagcaccaccgtcgaagcttcgccgagtctctttgttatactgcgccaaagctctgctctccttccccgccgctgggacttcgtgactctactgtctaa

SEQ ID NO: 6889 - DNA, 441 bp, Zea mays
  Peptide Sequence Number=SeqID_48668
atgccgaagatgtgtgaaaaagatgcttcgaacgtcgagcctgggctggttaggcttcgttataattataaatttgaagatgaatttggagaacctagtgacgggtggttagattatattgaatcgaaatgtaacgagatacatggattcaaagaagaggaagaagaagatgaaactaaggagaaagatactgctggtacaacactagtcctgaagagcactacaccgcttgctgctgatgagactggtccaagtagcccaaggttggaacaggttactacaacggtgacatcttcgacaatcatggtagccgaagataagggttcctctaagcctgccttggtggaggacaaagggaaggtcctgctaaatttgaagaggccaagaaggcaatcaaagatgatacaccgcttggtgaaggacctttcgaccaagacttag

SEQ ID NO: 6890 - DNA, 219 bp, Zea mays
  Peptide Sequence Number=SeqID_48669
atgtcggcgagcaagaagtgtgagagagaggggcgagctcggttagggaggagcaagggctcgtcggattttatagggagggggcaccgggtgattgaagagaaacgacggccgaccattgatggcattcatggagcttcaatgagggaggtggttgggcaaagacggtgggcggtggacgaggacaaggaggtggagggggaggaggagcacctgtag

SEQ ID NO: 6891 - DNA, 501 bp, Zea mays
  Peptide Sequence Number=SeqID_48670
atgtcgggagatcacaccaagaaagagatggtgaccggcgagaagcccgctacaagccacgggaaagctccatcgggagagtcccgcaacaaggggaaggaaaaggaatccccttcacataagtcgcgtcggagcggtgacaagaagaagaagatgaggaaggtggtctactacgagaccgactcctcgtcaccatccaactccggctctgacacgccgtccgtaacttctaagcgccatgagcgcaagaagtttagtaagatacccctacgctatcctcacatttctaaacatacgccattactttccgtcccattaggcaaaccaccaacgtttgatggtgaagattatgctaggtggagtgatatgatgcgatatcacctaacctcactccacaagagtatatgggatgttgttgagtttggtgtacaggtaccgtccgtaggggatgacgattatgatgaggacgaagtagcccaagtcgtgcacttaaactcctga

SEQ ID NO: 6892 - DNA, 2085 bp, Zea mays
  Peptide Sequence Number=SeqID_48671
atgcccccgcggccgtcgctccactctctgctcctcatggccgcctccgccgccgcggccagcggggactcgggcccgctcctcgctgcgcgccgccgtctagctgcgacggccgccgcaggggggcaccgcatccggctgctccactccttctcgccgggacgcgtccccaggcggcctgaggtgtatataaaaagaactttgagtggctttggcttaggagctaagcacccggggaagtatgttctttcggcaaaaaactactcaactgcttctgaggagaggcttgggaagatcattcagaagttgaaaaacgaaggtattaatcccaagcagtggagacttggaaattttcagcgcatgttgtgtccacagtgcaatggtggatctagtgaggaattgagtctcagtgtctacatccgaaaggatggcataaatgcaacatggaactgttttaggtctaagtgtggctggagaggttttgtccaggctgatggagttaccaacatatcccaaggaaagagtggcatagaaagtgaaactgaccaagaggttgaagctaagaaggcagcaaataaggtttatagaaaaatcagtgacgaggacctcaatcttgagccactctgtgatgagcttgtagagtactttgctacgagaatgatttcggcggaaacacttcggaggaataaagtcatgcaacgtaactggaataataagatatccattgcttttacctatagacgtgatggagctcttgttggctgcaaatacagggcagtcgataagacattttcacaggaggcaaacacggagaaaattttttatggtctggacgatataaagcgtgcacatgatgttatcattgtggagggtgaaattgataagctgtccatggatgaagctggttatcgtaattgtgtcagtgtgccagatggtgcaccacccaaagtgtccagtaagattccagaccaagaacaggcatctaggataatattagcaaccgataatgatcgtccaggtcaggctctggctgaggaacttgctcgtcggcttggtaaagaaagatgttggagagtcaattggccgaagaagaatgatacagatacttgcaaagatgcaaatgaggttctaatgtttttaggtccacaagcattgagaaaggttatagaagatgcagaactgtatcctataagaggccttttttcattcgaacagttcttcccagagattgacaattactttcttggaatacatggtgatgagcttggtattcatactggatggaaatctatggatgatctttacaaggtaaaggagcatgctaggaaactcttagagaagcacattcagaagccattctttaatgctaggtatggtgggtctgcacagcggatgactcctgatgaatttgaagcaggaaaacaatggttaaataaaactttccatcttatccggtgtgaagatgatagccttccatctattaattgggttcttgaccttgcgaaagctgcagttctaagacatggagtgcgtggtctggtgatagatccttataatgaacttgaccatcagcgcccctcaaaccagacggaaacagaatatgtcagccagattctgaccaagattaagcgctttgctcagcaccattcatgtcatgtatggtttgttgcacatcctagacagcttcaaaactggaatggaggcccaccaaatatatacgacataagtggaagcgcacattttataaacaaatgtgataatggaattgtcatccacagaaacagggacccaaatgctggcccccttgataccgtgcaggtttgtgtgaggaaggtgcggaataaagtggttgggcaaataggagatgctttcctgacatatgaccgggttactggtgaattcaaggatgctggtaaggccactacagcacccagtgcaaaagcggcaaaacagtcacgcaaagaggcatataagatgccatttcaacatgctgctgaagacggaaccaatgcctttaatgtggccgtattttttaaaaaagatgcctttaatgtgacccaactgcgaattcagctggaacaatga

SEQ ID NO: 6893 - DNA, 270 bp, Zea mays
  Peptide Sequence Number=SeqID_48672
atggcgctgcggcacctggtcacgggccagaacaactgcgcgccggacggcgcctcgtcgtccaaccccctcaacgccctcgccaacgccttccttggccagtcctccaaggcgcagtcaataaaggaacttcctggttctgttagtgttccatctacatctggcttcagcgcgcctgctcccttgtcaaacatccctggttcagaaaatgagttcaaacaagaccagcgaccttttgtgcaggaacaacctttcagccgccattggatg

SEQ ID NO: 6894 - DNA, 3063 bp, Zea mays
  Peptide Sequence Number=SeqID_48673
atggagagttacctgaacgagaacttcgggggcgtcaaggcgaagcactcgtcggaggaggccctggggcgatggcggagcgtggtcggcgtcgtcaagaaccccaccaggcggttccgcttcaccgccaacctgggcaagcgctccgaggccgccgccatgaagcggtccaaccaggagaagctgcgggtcgcggtgctcgtctccaaggccgcgctccagttcatccacggcctgccgtcgcagggcgactacgccgtccccgccgacgtcaaggcggccggcttcggcgtctgcgccgaggagctgggcgccatcgtggagacccacgacgtgaagaagctcaagtcccacggcggcgtggacggcctcgtatccaggctgtccacctcggcgtccgacggcctcgacgatagtaacgagccgatgacggcggcccggcaggagctcttcggcgtcaaccgcttcgccgaggcggagccccgcagcttctgggtcttcgtgtgggaggcgctgcaggacatgacgctgatgatcctcgccgcctgcgcgctcgtgtctctagtcgtcggcatcgccaccgaggggtggccccacggcgcgcacgacgggctaggcatcgtcgccagcatcctgctcgtcgtcttcgtcaccgccaccagcgactaccgccagtcgctgcagttcaaggacctggacaaggagaagaagaagatcgccgtgcaggtcacgcggcgcgggtaccggcagaggctctccatctacgacctcctcgcaggcgacatcgtgcacctctccatcggcgaccaggtgcccgccgacgggctcttcgtgtcgggcttctcgatgctcatcgacgagtccagcctcaccggggagagcgagcccgtggcggtgagcgccgagaacccgttcctgctgtcggggaccaaggtgcaggacggcgcgtgcaagatgctggtcaccaccgtcggcatgcgcacgcagtggggcaagctgatggccacgctcagcgagggcggcgacgacgagacgccgctgcaggtcaagctgaacggtgtggccaccatcatcggcaagatcggcctcgccttcgccgtcgtcacgttcgcggtgctcacgcagagcctgttctggcgcaagctcgccgacggctcctggctcagctggactggcgacgacgcgctggagctgctcgagttcttcgccatcgccgtcaccatcgtggtcgtggccgtccccgagggcctgccgctggccgtgacgctcagcctcgcgttcgccatgaagaagatgatgaacgacagagcgctcgtgcgccacctggcggcctgcgagaccatgggctccgccaccaccatctgcagcgacaagaccggcacgctgaccaccaaccacatgaccgtcgtcaaggcctgcatctgcggcaaggtgagggacgtgaacagctccgtggagaccaagacgctgccctccgacctgccggcgtccgtcgtggccatgctcctgcagtccgccttcaacaacaccggcggcgacatcgtgctcgaccaggacgggaggcgcgagatcctgggcacgccgaccgaggcagccatcctggagttcgggctgtccctgggcggcgacttcgcggcggtgcgcaaggccagcacgctcctcaaggtggagcccttcaactcggccaggaagaggatgggggtggtcatccagctccccggcggcgcgctgcgggcgcactgcaagggcgcgtcggagatcgtcctggcgtcctgcaccaggtacctggacgagcgcggcagcgccgtcgccctggacggcgcgaccgcggaccgcctcagggccaccatcgacagcttcgccaacgaggcgctccgcacgctgtgcctcgcctacgtggacgtcggcgacgggttctccccgagcgagcagatcccgacggacgggtacacgtgcatctgcgtcgtggggatcaaggaccccgtccgtcccggcgtgaaggagtcggtggcgatctgcaggtccgcaggcatcaccgtcaggatggtcacgggcgacaacatcaacacggccaaggcgatcgcgcgggaatgcggcatcctgactgacggcggcgtcgccattgaaggccccgacttcagagtgaagactgaagaagagctgcaagaactgataccaaagatacaggtgatggcaagatcttcgccgcttgacaagcacaccctggtgaagcatctacgaactacgtttgacgaagttgtcgcggtgaccggcgatggcacgaacgatgcacccgcgctacacgaagccgacattgggcttgcgatgggcattgctggcactgaggtggccaaggagagtgccgacgtcattatcctcgacgacaacttctccaccatagtcactgtcgccaaatgggggcgatcggtgtacatcaacatccagaagttcgtgcagtttcagctgacagtcaacgtcgtcgctctcgttgtcaacttctcctcagcttgcttgatagggagcgctcccctgacagccgtgcagctgctgtgggtgaacatgatcatggacacgctgggagcgctggcgctggccacggagcctccgaacgacgagctgatgaagaggacccccgtggggaggaaagggaacttcatcagcaacgtcatgtggaggaacatcatggggcaggccctgtaccagttcctcgtcatctggagcctgcagtctcgagggaaatcgctcttcgggatcgagcgccgcgccgactcggacctcgtcctcaacaccatcatcttcaactgcttcgtcttctgccaggttttcaacgaggtgagctcgagggagatggagagggtgaacgtgctccgaggcatcctagacaacaacgtgttcgccatggtgctcggcagcaccgtggtgttccagttcgtgatcgtccagtgcctgggcagcttcgccaacacgacccctctcagcgtcgcgcagtggggcgcctgcgtcgccatcgggttcgtcggcatgcccgtcgccgtggcggtgaagatggtgccggtggagtag

SEQ ID NO: 6895 - DNA, 2061 bp, Zea mays
  Peptide Sequence Number=SeqID_48674
atggcggagcgctggagccggcgtaactccgggcccatcggtcggcagtcccctctagccgccgcctaccgctcgcgctctcctcgcgttcgggaaggtcgtttcgccatggcctcggagacggagacgttcgccttccaggcggagatcaaccagctgctctcgctcatcatcaacaccttctactccaacaaggagatcttcctcagggagctcatctccaactcctccgatgccttggacaagatcaggtttgagagtttgacggacaagaccaagctggatgcacagccagagctgttcatccacattgtccccgacaaggccaacaacacgctgacaatcatcgacagcggcattgagagggttgtcgtgaccactaagcacaatgatgatgagcagtacgtgtgggagtctcaggctggtggctccttcactgtcgcacgtgatacctctggggagcaacttggcaggggtacaaagatgaccctctacctcaaggatgatcagttggagtaccttgaggagcgccgcctcaaggatctgatcaagaagcactccgagttcatcagctacccaatctctctctggattgagaagaccactgagaaggagatctctgatgatgaagatgaggaggataagaaggatgaggagggtaaggttgaggatgttgatgatgaaaaggaagaaaaggaaaagaagaagaagaagatcaaggaggtttctcatgagtggcaattggtaaacaagcagaagccaatctggatgaggaagcctgaggagattaccaaagaagagtatgctgctttctacaagagcttgaccaacgactgggaggagcatcttgccgtgaagcacttctctgttgagggccagcttgagttcaaggctgtactctttgtgccaaagcgggcccccttcgacctctttgacaccaggaagaagcagaacaacatcaagctctatgtgcgacgtgtcttcatcatggacaactgtgaggagctgatcccagagtggctgagctttgtcaagggtattgttgactctgaggatcttcccctcaacatctctcgtgagactctccagcagaacaagatcctcaaggtcatccgcaagaatcttgtcaagaagtgcgttgagctgttttttgagattgcggagaacaaggaggactacaacaagttctatgaggccttctccaagaacctcaagcttggcatccacgaggactccacgaacaggaccaagattgctgagctcctgaggtaccactcgaccaagagcggggatgagctgaccagcctcaaggattatgtgaccaggatgaaggagggccagaacgacatcttctacatcactggtgagagcaagaaggctgtggagaactccccgttccttgagaagctgaagaagaggggctatgaggtgctgttcatggtggatgccattgacgagtattctattggacagctgaaggagtttgagggcaagaagctcgtctctgccaccaaggagggcctgaagctggacgagagtgaggatgagaagaagcgcaaggaggagctcaaggagaagtttgagggcctctgcaaggtcatcaaggaggtgctgggcgacaaggtggagaaggtggtggtctccgaccgcgtggtggactccccctgctgcctggtgaccggcgagtacggttggaccgccaacatggagcggatcatgaaagcccaggcgctgagggactccagcatgtctgggtacatgtcctccaagaagacgatggagatcaaccccgagaacgccatcatggaggagctccgcaagcgtgccgaggctgacaagaacgacaagtccgttaaggaccttgtcatgctgctgttcgagacggcgctgctcacttctggctttagcctcgacgatcccaacacctttggcagccgcatccaccgcatgctcaagctgggcctgagcatcgacgaggacgaggaggctccggaggctgacaccgacatgccccctctggaggatgacgctggcgagagcaagatggaggaggtcgactaa

SEQ ID NO: 6896 - DNA, 459 bp, Zea mays
  Peptide Sequence Number=SeqID_48675
atgggcaagaacaataagcgcaagcgtgagccaactcctccatcggaggagtttggtgactcggagtactcagaggaggagttctcctctgagtctgaggggtctccggctcccatccccctgcgtgagtcgtctgacgactcagacgactcccaggggctcgcggcggaggtctggacgtacatccgggccatcgagtgctccgggctcgagggctcggatgagtcggagtactcctcggatgaggaggactcggatggcggcggcgaggacgaggacgacgacgacgacgacgacggtggcgacggtgacggtgacggcagcggcaagggcggcggcagcggcggcggcagcaaggacggtgacggcggcggcagcaggggcagcaaccagggcggcagcagcaggggcagcaccaggggcggcagcggcggcggcagcagcagtgccagtggctag

SEQ ID NO: 6897 - DNA, 297 bp, Zea mays
  Peptide Sequence Number=SeqID_48676
atggcggggacgcagggaggccttgggttgatggtgaatgagctccggctgcacggggagaaggccggtgagcgcggactggcgaaactgaggggatgggagcaaactagagggtgtctcgcgttgctggcgaggaggtggagctcaccgaggcaatggacgcgtcagaagctcaacggtggccatggaacgacggtggaccacagcggagctccatgggtgtgcgcgcagtgcgagagagagagagagagcgagggtgttcggctgagggcacaactaagtgaggggagcgagtga

SEQ ID NO: 6898 - DNA, 375 bp, Zea mays
  Peptide Sequence Number=SeqID_48677
atggcggcccggcgcctgcgcccggccccggctcccccttccctgcggctcggccgcgcccgcccgtccccagctcgcctgccctgccccgacgcggcgccctcgcccggcgtccccgccctcgcccatccccggtcccgaccttggcgcgcggccggagctcggccatggcggccatggcgcgtggccgtggcacgcccagcccccttccccgcggcgcgcgcgctcgccccgcccggcctcgacgcgcctctctcgaattcgctcgccccggcggctgcccgcggcggcccggcgcgcgtgctcgcgccgcccatcctcgttccggcgcggcgcccgctcgtcaccggtgggaggctcgagggagattattga

SEQ ID NO: 6899 - DNA, 1338 bp, Zea mays
  Peptide Sequence Number=SeqID_48678
atggagacgacgacgaagctccggtggagccggcccggctccttcctcctcgtcgccgcggcgttcctggcgtccgccgccgcgtcgggcgtcaacgtcggccagttcgacgaccacttgcagaagcggaaggagctcgccgaggcgtcggcgagggaggcgtacaggcccgacccagctgtcagcagcagtcggcgtgagatgcgggagaggccgaggaagcacaagaagaggggcccgtgccgggcgacgaaccctatcgacaagtgctggcgctgccgcagagactgggcgacggaccggcagcgcctggcccgttgcgccagaggcttcgggcacgcgaccaccggcggcctcggcggcaagatctacgtggtgaccgaccccaccgacctcgacgtggtgaacccgcgccccggcacgctgcgctggggcgtcatccagcccggcccgctgtggatcatcttcgcgcggtccatgatcatccagctctcgcaggagctgctcatgagcagcgacaagaccatcgacgggcgcggcgcgcaggtgcacatcgccaacggcgccgggatcacggtgcagctggcgcaaaacgtcatcatccacaacctgcacgtgcacgacgtcaagcacaccatgggcggcctcatgcgcgactcccccacgcacatcggctcccgcaccagggccgacggcgacggcatctccctcttctccgccaccaacgtctggatcgaccacatctccatgtccaactgcgaggacggcctcatcgacgtcgtgcagagctccacggggatcaccatctccaactgccacttcaccaaccacaacgacgtcatgctcttcggcgccagcgactcctggccgcaggaccagatcatgcagatcaccgtcgccttcaaccacttcggcaggggcctggtgcagcggatgccaaggtgccgctggggcttcttccacgttgtcaacaacgactacacgcactggctcatgtacgccattggcggcggcgacgcgccaaccatcatcagccagggcaaccgctacatagcaccaccaaacatcgccgccaaagtgccatgccatgccatgccatcccaccccctgccgttcgagcagatcaccaagcactacgcggaagaaggcgtgtggaagaactgggtgtggcacacggaggacgacctgttcatgaacggcgccatcttcaatccgtccggcggcgcccccaagcaggtcgacaccaacgagtgggtcaagcccaagccaggaacctacgttacaaggctcacccgcttctccggcacactgtcctgctgcacgggcaagccgtgctga

SEQ ID NO: 6900 - DNA, 486 bp, Zea mays
  Peptide Sequence Number=SeqID_48679
atgggcgcgacgcaggcatcggggcactggcggctcgggaaaggctggcatcccggcggcgcgcagccttggccggtgggcgctgccccggcgacgcgcgagtgcagcccctacacacacgagcgcggccccgggcccggtggctcctgtcccggtgcaggcggtttggccacggcggcgccggggcgcttccctggcagcgcgcggcggcccccatcctcaacggctcggtgcgcagtccccggcggcgcgcacaggcagatccgctcgagacgactcgggcgcggtggcctcggccccggcgtctcccgtcccggcggttgtgggcgaggcagccagccgtggggcagacccggcagggccccagcggcggtgcaggcgcgcgtccatggcgcggcctccttggcatcgcgggcgcgctgccccgacgcgcacgcgggcgagtcccccggcggcgcaggcggccagagcgcggctctctggtag

SEQ ID NO: 6901 - DNA, 393 bp, Zea mays
  Peptide Sequence Number=SeqID_48680
atggacatcactacaccctactcggttgatcgaccaggtgctcagtgctccatcctcgaggcatccctcatcgaaagccagatcattatttcgccacagtcagccaatacaggtgctgcagagtgtaagatcaggttattaagcacgaattgcacatcagcttgcaggtaccagcaggttcattccgatgttaaagtagcccctacatcggacttcaagggcagtagcaaatctgaaacttggaggatgatgatgctctacgacggtgtccatactgataacacttttgggtcatcaattggaggccaagaagtagatcacctttcatttgcttccacatgctacaatacgctcaagcttccaacgtacaagcggtcaagcacgctaagctaa

SEQ ID NO: 6902 - DNA, 228 bp, Zea mays
  Peptide Sequence Number=SeqID_48681
atgaatgcgaagaggctgacaccgattctcctcgccgttctgatgatgacatgcctcgtgtccgctgcaaactgtgaagacgtgctggcaagagtgtcccagtcacaagcgactctgatccacccgatttatgaagcacaccgacgcgatgccctccataggtcccagcgggttctcatgagaaaggatctagcctccaattctctggctcggagtgacaatttgtga

SEQ ID NO: 6903 - DNA, 906 bp, Zea mays
  Peptide Sequence Number=SeqID_48682
atgtcgtcgacgccgattctgctcaccatactcttggcatacctcgcgttctctgcaaactgtaatggcgaacgtggtaatgacgaggacacaccagctgcaggtggtcaccggcggtggcagccaaacggcgacaagacgatttccggaggcagcagcgacgacgaggcggcgacgtgcgtgagcagtgaatgcgagggcagcacctgttactgctgcccaacgatgcccactagcccttgcttcttggatctggatgcttgcttgagagtctgccatggtcgtcgtcgtcgtcgtcggccagccgcaccgctgccggaggatgaaactccagtaccctcaattgctgcggcagttaatcgacatagtcaggaggtttgtagtttaccagcggaccctcagccaagcgacactaacaactcgcagttgcacaacttcatcgcaaatataaccatgccaccagaaccccctctgattcaaacccttccacacaacaatttacccaacacagcaaatgcaatttgggtttcgccccaacagcatataaataggcctggccaagcttccacctccggcaagagatatagtgttagattggctgcaaagaaaaaattaatgttggggcgttctagagattcaatatccaaagctcaggatattctggtagctaaactatacaactcaacaacaaaaaataatctaggctctttggcttcttgctcatctaatgaagtcaatcattttgaacagattgcaaggctttttgcaagacctcttaccaagattcagatggaggagatcatggagctggccaatcatggaaaaggaaagaaaatcaacaacaagaaagggcgcaaggtggctcccttcttagcaccggtcgcccctttggccttggaaggctga

SEQ ID NO: 6904 - DNA, 357 bp, Zea mays
  Peptide Sequence Number=SeqID_48683
atggatcctgaaggcaaggggatgatgatcaacgacaaggaggagaaggagactctctatgttgatgagccaaaaggtgacaagcctaccgactttggcttaaacaacaagaggaaggatggaaagaagaagaggtgtatcaagaagataatctactatgacagcgactcctcatcttcttcaccaagggatgacaacgacgaagtctctttgtcgaaaaagaaaacggattttcgaacccatgttgttgaaggtgaagaaactaccgagtttgctacttctattccaaggttgccccaaagcaggaggaagaaactaagtaaacttatagaaggtgtctaccttccggtggtgtaa

SEQ ID NO: 6905 - DNA, 144 bp, Zea mays
  Peptide Sequence Number=SeqID_48684
atgacatctctggtggaggatgaccaggtgatcttggttgcatcatttcttagaccgtccggtcatcatagtcggactgtactcgcctatcccgaactatctaaccttagtgctcgtaccatccagcgtatgcagtacatgtga

SEQ ID NO: 6906 - DNA, 306 bp, Zea mays
  Peptide Sequence Number=SeqID_48685
atgacgagttggagaccgacagtcggtccaagcagccatctgatggcgtatgcaccagggctaggtccgacgagatggggaaaaagaacggtgcatggcgcagatagagaacgtgcggctggctcgatgacggaaggcgacgacgctgtggacgcggctgctggcgcgagggagccattcatcctcgaggaggcaaagtttcacgaggccggacggccgaccccgatcctcgtcacggcgcgagcgagcccgctcctgccacgtgctaggcaccgccatgtgctgctcccagggagatcacagtga

SEQ ID NO: 6907 - DNA, 1716 bp, Zea mays
  Peptide Sequence Number=SeqID_48686
atgcccatacccatccatcagatacccttcccacactccccatcaccaatcccaggcttttccgaaccccaccataccgcttacccatcgcagcaaaactctcccaaccagcaccaccacaaccttccctttcccacattcgacgacaaagaggatcctgttggccggctgtcccgccgtgagagcttcttctacaatcaagggacgccggaggtggataaagtctggatggccacgtactatctcatgggcactgcacggctgtgtaccgcaccccttccagccagcagccctaaccctaggacaacggcgctcaaacgtcgtggtccagagcctcgcccttctcaccaccactcataccttcttagaagccgcagctccaacaagggctttggagctctttggtacattctttccatccagcgagaagacacctgttggagacaagcatgtatcaatcagactggctgtgatcctacatctttgtactgcgggtatcattcacttgcaaataattctttcttacaaaatgcgtgcccaacaaatagcactgccaatccagaccctatatttggaatctttctaccagctctccaaaatgtttcacaatcgacgagtttctttgaaaaactattctattgcttttggtgggggctacaaaatctaagttcccttggccagaacatgaaaacaagcactaatacattggagaatctgtttgctgtttttgtctcgacatcgggtttggttctatttgcactacttattggtaatgtgcagacctatttacagtcagcttctgtgcgtatcgaagaaatgagagtgaaaaggcgtgatacagagcagtggatggcacataggctactccctgagaatctaaaggatcggattatgcgccacgaacaatataggtggcaagaaacaagaggggttgacgaagagggccttcttaaaaatcttccaaaggatcttagaagagagataaagagacatctttgtttgtcacttctcatgaaggttccaatgtttgaaaacatggatgaacagctgttggatgccatgtgtgatcgtctaaagcctatgctgtacacagaaggaagctgcatcattcgcgaaggtgatccagtgaatgaaatgctcttcatcatgagaggaacactagagagtaccacaacaaatggtgggcaaactggtttcttcaactctaatgttctaaaaggtggagacttctgtggtgaagagctcctcacgtgggcccttgaccccacttcagcttcaaatcttcctggctcaactaggacagtgaagacgttgtctgaagtcgaagcttttgctctgagggctgacgacttgaagtttgttgccacacaatttaggaggctccacagcaaacaacttcagcataccttccggttttactcacagcaatggaggacctgggctgcttgcttcatacaggcagcttggcacagatactgtaggaagaagctggaagaggctttatatgagaaggagaagaggttacaagcagcaattgtaagtgatggcactacttcgctcagtctcggtgcagcgctctatgcttcacgttttgctggcaacatgatgcggatcttacggagaaatgccaccagaaaggcccgtttgcaggaaagagtacctgcaagactgttgcaaaagccagcagaacccaacttcttcgctgaagatagctga

SEQ ID NO: 6908 - DNA, 276 bp, Zea mays
  Peptide Sequence Number=SeqID_48687
atggcggtggtgagatcgacaagggccatcgtcatggtgtcgatcttttgctctagcgctgcgttggcggaattggtcgcggcagcagatgcgacatcgctggtgttgtcgtcgttgcctggcatctctgataccagattgttggagttgcagcttctacgaagggcttacatgactggcaagcatataaattataaggttgaaagcagcaccagcccatgctgtctctgtaagtatgccagcagatcttgtgatttgaaggaccttggagcttag

SEQ ID NO: 6909 - DNA, 1053 bp, Zea mays
  Peptide Sequence Number=SeqID_48688
atgcaggcggcatgcaactgcaccaaggggacgcaccctttcgacttcgacgtgtccagcatggggcccaggcccacacgtcatggcaggcgacacctttggcaagcgaagcgggcaacgcttcacctccgccatgatgaccacgtcaaaaaagggaccgggaaaggggatactctgaaagggatccttctcagcgaaggaagcgggccccgagccctcctactgatcagagattcgaaggctggcccctcggaagggttcgacagccgcctcagagcactcaggctccgcgcccactactggtcagaggttcgaagactggcccctcggaagggtttgacagccgcctcaggccactcgggctccgcgcccactactgatcaggggttcgtaggctggcccccgaagggttcgacagccgcctcagagcacgcagagcgagggatgactctgggtatgtccgatacatggccgaggctcgggctacgctcccgaggtcaaggctccgtcccctcaagggacacgatctcgcctcgcccgagcccagcctcgggcaaagacagccaacccaggaggattcacgtctcgctcgagggcgccataggaagctccgcctcgcccgaccctagggctcggactcaacctcgacctcggacgacggactccgcctcacccgaccccagggctcggactcaacctcgaccttggacgacggactccgcctcgcccgaccccagggctcggactcaacctcgacctcggacgacggactccgcctcgcccgaccccagggctcggactcaacctcgacctcggacaacggacttcgcctcgcccgaccccagggctcggactcaacctcgacctcgggcgacggtccctgcctcgcccgaccccagggctcggactcaatctcgaccttgggcgacggtctccgcctcgcctgaccccagggctcggactcagcctcgacctcggaggagcctccgccttgcccgaccctgggctcggaccgaccacgtcacaggggggccatcattaccctacccctag

SEQ ID NO: 6910 - DNA, 732 bp, Zea mays
  Peptide Sequence Number=SeqID_48689
atggcggagatggagccatggagaaaagccgaaagtggatactggatcatggaggagccacatttacggcagcatggggaaaagttttggctcacagtacttggagtatacgattggtccggagttaacccggtaccaccagaattttggctacttccatattacctgccgtttcacccaggtcgaatgtcttgctattgccgaatggtgtatttgcccatgtcttacatttatggtaggaggttcgttggcccaataacaccactagtaatggaattaaggaaagagctgtacacagacgcctatgatgagattgactggaacaaagctcgtactgaatgtgctaaggaagatatgtataatccgcattcattggttctgggtatctcatggaccattctccacaagtttgaaccgattatgttccattggccttggagaaaactgaggaacaaagctctggcctttatcatgaggcacattcactatgaagacgagagcactcactacatcaaccttggtgctgtatccaaggcattaagtatgcttgcttgctggattgaagatcctgactcagaagcattcaaatgccatattgcacgagtacctgattacttgtggattgccaaagatggcatgaagacgcagatatacgatggcagccaggtgtgggacgacgcaggtttcatgattgaggcccttttggctaccggcctcgtcaaagagctttga

SEQ ID NO: 6911 - DNA, 597 bp, Zea mays
  Peptide Sequence Number=SeqID_48690
atggcccctgggtgttcactttcagtgtattatttggttttgaactgccacaaggtgccttgctactcccagatcctatcgctcggtccagcttcccctagaccttgcagcagctatgcggagctcctggggagcgagcagatgctgtcgtccagcggaccttgcaacagctacaccgacacgaacgaacccctcagatccgggaatgcgggttcctcgccgaatcgcgagatgaggagcacggagcaggagagggcaccgtaccttgaccttgcagaattccgcggcgagggagtaggagaaggcgacgacgctgaggagcacgacgatgccacaaacagcggagagggagtagggaattccgcgcgtgcctttcctccgtttgtctctcgtaggaagggagtgggatggggactacgacgggcatcttgcgggcggggaagagacgcctatgacggggcggggcgaggatgggggcatggcagccctggatttccggcgaggtggcgagggcttggaattgcgctttccatcgagtttgagcgtagcgagcttgaggatggtggagccgcggaggcggacacggaggatccctga

SEQ ID NO: 6912 - DNA, 405 bp, Zea mays
  Peptide Sequence Number=SeqID_48691
atggcggcggtgtcttgcatcgaagacccgcctcctcctccgcttccctgcgtgttccggcgaggagactggttcccgtcgctgaggacacatcccaacagaagtgactctgtgctaccatgggaaacaagagtgaagatcctgagggattgtgcatctgtcctgaggtttcttcacacacaccctgatggatgcattgtccatagagacatcaagctcacaaacatcttgctgacagagaacaatgtgccaaggctggctgattttgggctggcaaagatgctacaaatggaggagaccaaggtgttcacagatgtgaggggaaccattgggtacatggatcccgagtacatcacacactccaagctcacttgtgccagttgtagggtcgagatggcggactag

SEQ ID NO: 6913 - DNA, 855 bp, Zea mays
  Peptide Sequence Number=SeqID_48692
atgggaggagtgccatttggtccacagggacgattcgatgccatcaggctacttgaaaagctgaggaacaagaggttggtgtttgtgggcgactctctcaacaggaaccaatgggtttccctggtgtgcatggtggagatctctatacctgacagtaggcacaagatgcacaccttcaatggctcactcatttccttcaaggcattggaatacaatgcaaccatagacttgtactggtcaccgctgttgttggagtccaacagcgacgacccacttgtccacagggtggagcatcggatcataagggctgacagaattgagaagcatgccagtgcttggagggatgctaacatcataatcttcaattcttatgtgtggtggaggaagcataaggctgacatgaggatgaaggtcatgtatggttcatttgagagtggtgatgcaaggttagacgaagtggaaatgatagatggtttcgagatagcactcaagaaactgaccgaatggctcggagagaatattgacaagaacaagactagaatattttttgctggatcatcaccttcacattcatgggctagcaactggggtggagaaaacagtaacaaatgcctgaatgagacggaaccgatatacaaagtcggatacaaagcagcaactacagattacagtatgatggagaaggccaagtcatattttgggacactggaagagaagggcatacacattcagatactcaacatcacggagttgtctgagtaccgtaaggacgggcaccccacggtgtttaggaaacagtttgcccccagccagttatgcggattgcatgcactggtgcctcccgggtgttcctga

SEQ ID NO: 6914 - DNA, 249 bp, Zea mays
  Peptide Sequence Number=SeqID_48693
atgtccgttctctcatttgcacttcactgcttacctgtggtactagctttctctgaagtgcaggatattcttaagacaggaatctcaactccgctgcaacctactcgaagagttcttcactccactgcgatcttgtcttcgagtagaagggagtatgtggtggacaagggcgaggagcgcgccacggatgtcgcgacgcacaccgaggacgtcctggcctcccctgccgcggaggaggatgggagctga

SEQ ID NO: 6915 - DNA, 747 bp, Zea mays
  Peptide Sequence Number=SeqID_48694
atgactcttgaatttgcattagattttgtcccagaatttgatctacactggattatgtatagtattcaaattcttaaaatctgtgtggacaccaccctaatcatcaccgagcagatgcatgagaggaagggaacaatgaagcgtcaggcgatgatgggaaaagatactgggaatttgcttcggccatggatggaaacgccgtatcagctgattttcttatacaatctatgctctcttaccagaaaaggggttataaagaacatgaggcgcaacattgtagatggaaacagttttgcatttctttgtgacaacatagatgagcttgagcactctgttcaggagaatttacctagagtctctgtagtcatgcctttgaagggctttggcgaacataatttgcaaaattggcgaactcagattacatcactttatggtgggccactggaattcttgtttatcgtcgagagcaaatatgatcctgcttatcatgttgtttcccgtttgatcacagagtacaagatgtggcattttaatggaagggtagcttatagtttgacaaacaacaatatcctgcatatacattatagggctgatgtaccttctttccataccaagtttagcgaacgtcgctacgagcaggccctcgaggtgatcaggaccctgaagcttgaggtgatcaggaccctgaagcttggtatacgaggtttaaacagcctggctgttctgttattgacagcattgatgtag

SEQ ID NO: 6916 - DNA, 468 bp, Zea mays
  Peptide Sequence Number=SeqID_48695
atggtggcgcaaccggcgggtggcggaggtgcggaggaggaggtggtggtggacggcggcggcggccggcatgggcggaggagcggcgacgaggaggcgtggcggcggtgggcggtgctggtggcgacggtgtggatccaggcggtgacggggaccaacttcgacttctcggcctactcgtcggcgctgaaatcgtcgctgggggtgtcccaggaggcgctcaactacctggcgacggcgtcggacctgggcaaggcggtgggctggtcgtcgggcctcgcgctgctccacatgccgctccacgccgtgctcgcggcctccgccgccatggggcttgccgcctacgccgtccagtactactgcctcatcgcggcggcgtcgtccatggccgccgccgtcccctaccctctgggactaaagtttagcccatgtcacatcgaatgtttaaatgccaagttcgagtattaa

SEQ ID NO: 6917 - DNA, 3927 bp, Zea mays
  Peptide Sequence Number=SeqID_48696
atggcgatcgtgaggaccggaggcggcgtccgcctccccaggcttgacggcggcgcggaggcctcactggaggccacggaggacgaagacgaggaggaggaggggtcacgggcaacgccgtcgcatgagtccgatgccgacggcttctccgccgaggaggagaacggcggaggaggaggagacgatgagccagaggcggaggaggaggaagaggagttcgaggaagaggaggacgagggggactcggggatgggctccgacgagctggacgttgcggagctgggcgagcccagcacggagatgtgccaggtcggggaccagagcatggccgtgccgttggagctctacgacctcgatggtctcggtgacgtgctctcactccacgcctggaatgacctgctcagcgatgacgagcgtctgcgcctcgccgccttcctgcccgatatggaccaggagacctttgcgcgcacactcgtcgagctcctcgcggggcaaaacttccacttcgggagccccctcgccgatttcctcaagcgcctcaagggcgggctgtgtgacccgagggtcaatctgtaccgccgcggcattcgcttcgtggagcggcgcaagcattactactggctgcagagctaccacaactccatggtacggaggctccgggagattaaggattgctggaagggccgcgagggatacagccttgatgagaggctgaggatgttggacacgatgaaggcaaagcagcagcaccaacaacaacagcagagaaaagctctagatttcacaaggcgggctgggtcggagactgattcagagagcaggggatctggggaacaggtcttagctcgacccaagcacgataagagtaggcagaagaaggcagggaagttagcgaaggagaagtcgaaggggctgttgcgggtgggtacaccgaaaggagtggatgaggatgacatgggagggtctggccgtgatgctgtggtggcactctctgagctttctcgtcgagggtatgattctggcacacatagagggaagcttcacaggagcatagatggcctttactcggagtcggaggaccttggatatgaaagggattcgtcaagacctcggtttccgaggccgcttcccaagccagtgaagaaggaattgtctacgagctgtgatgtcaatctgtatgcaaataactacagtgataaccatactgcatctccttactactacagcaggaatctcagtgctaatcagggagtcaccttagcagcagcatatgatcctccatattttgataccagaaggaatgcaaggtacttggagagagactgggtgcaaggtggaaaaggtgtgcacattaacgctttaatgggtgatgagatgaacttgccagctggtaatcacactggtaactcagatgactggcagaaggggcaatctgcaggtgattacaggagcaggaaagatcaagctggctatggtctgaaggttaagtcctataaaagtattgagaaagaggttaatgatgcccgtgttggttctgaccctagaagcaagatatcacaagcgaaggtggcaggtaaatccagtagacaactagataggactggccagaagcactggagcaatgctgtctatggtcaaagtgacgagacagaatctgattcatcagaaaagtttgaagatggcagggaagcacattatctcgagcggaagccagagcgtcaccattctgggtatcatagaccagcacatggtgccaaaaaatcaaacaagcttgctaaagtggccaaaatgaactatcctactgctgatgcagatttagaaccttcccagagcaaaggattcaaagggaaggtttcagagactggttatttacgtgatgtggatgtgatgatgacaggacagattagtgatgtcatgaaacctctagcagcaagtggtgaaaggaaacgcaaaggggtggcaaatttggacatgcgtgtttatgataactctgatctgcatgaagtcaatgaagatgcaaatgactctttcaggttggcggaatatgaaaggcttgccagtagatcaggccatgcagtccaagattctaatggtggttatggtggtactgaaagaaccagctctagctccaaaaaagcaaaaggaagagtcgaagttcctagcctggatgagcatggtgagcatttgtcatctggcccaaaggttgttgagaacactggtggatccaagaagaaaagcaaaaagaagccagagagcagcaccacagatgcagttattttagcagaaccagctgttgctgtacctgaaaataatgtgatagctgcagagcctgagaaggttgagaagcccaagaagaagtatgtaccgataacaccaacgatccatactggtttttcattctctgttgtacatcttttaactgccgtaaagaaggctatggtcactcctgctgaagatactcctccagccacagcgacacaaccggatggagaggagggcaaaaagtggttcaacagtggagagcgcagcaaaacgccccatcaagaacaaagtgcaacagatcaaactgaacaggtccttgagggtgcaaatgccagtgctgtagaacagactgtaccaatcaatacaccagcgcttactgttcaagagattgtcaatcgaattagagcaaatcctggagatcctaggatacttgaaacacaggagcccctccaggatttagttcgaggagtattaaaagtactttcatctagaacagctcctctaggcgcaaagggctggaaagcactagttgcctatgagaagtcaaacaaaagttggttctgggttggtccagcaccttctgtttcatcatatgatgaccccgatgaagaaacctctgctgaagcatggagtataccacacaagatgctcgttaagttggtcgacgcattttctaattggctgaaaagtggtcaggaaacccttaagcagataggttccctcccaccacctccaccgccaaatcctgcaaacttggatctgaaggaaaggttcaaggagcttaaagcgcagaagagtctgaacacaataagcccgagctcagatgaagcgaggacatatttccagcgtgaggaatttctgaggtactcaatacctgatagagcattctgctacaccgctgctgacggggagaagtctatagttgcacccttgagaagaggaggtggaaagccaacagcgaaagcgaggggccaccccatgctcttaccggacaggccgccgcacgtcaccatcctgtgtctcgtaagggatgccgcgtctaggttgcctgcaaggactggaaccagagccgacgtctgcacactgctcagagattcacagtacctaaaccatgaagaagccaacaaagaggccgcaattaatcaagtcgtcagtggagctctcgaccgtctgcattacgagcgcgacccttgcgttctgtatgacaacgacaaaaagctgtggacctatctgcacaggggcagggaggaggaggatttcgaggacgacggcacgtcgtctacaaagaaatggaagaggccaaggagggatgtctccgatgctgcagagccaggtgcagcgaatgatgatatcgacgacgatggcgctggcacccctccatcaaacaatgtgaaaaaacagaagacaacattgtcaggagaagctgccaacgatgagggaaatcatccgactcagaatccggcttctggtggcctggaaggtgattctgatctcaatgctgttccgtcttcaaaattttttgaagaaccatgtggagatgcctacattgatgcaagaccagatgacggtggcccaaattcagtagatgcgaaaccgggcagcacagctgacgacaacacggcactccctgggaacaccggcatggacgctaccaccccaccatga

SEQ ID NO: 6918 - DNA, 1122 bp, Zea mays
  Peptide Sequence Number=SeqID_48697
atggcttccgcggtgggcgcttcgaccgccacgcggttcctcccgcggctcccggacccgtggcggccgcgtcgtgcgcgcgcggcgctcccgccgctcacgtggcggcctcccgcggtcacggtggccgcggcgtcgccccgacctggggaagcggaagaaaaggagacgctaaattctactccacgtgctcaaaccaacaaggatgcagagcccgaaccggtgtccagcacgactgggaaaggttctgccattagaagggtgacactggtggttctcgctgcagtgctttttggagttagcattgccttgagggacggggctgagaaggcatcggagtattttgctgggtatttattggaacagagtttgtcggtggacaatctctttgtttttgttctggtcttcaagtatttcaaagtgccaaaagaataccagaaatttgaggcggtgaacttgctgttggctgtgatcctgttattcacttcttacaagtgtattccttctataaaactcggtcagtggggaaagactgcccccacgctatttgctgaagaagaacaagaatctgatctatccgataacttcattgtgaaaacatgccaaaagttcattccagtcactgttgagctcattcccatgtttctcctctcagaatattatgacgacgatcggtttttcacaaatcaagacggtttatggaaagctacaccattgctcttgactttggcagtgattgagctaagtgatattgcttttgctgtaggttccttcccgagctattttcatgtgcagtggtttaacttttatttcatacagattgactcaataccagcagttttcggcgtcacaagggatccacttataatactatcatcaaatatttttgctatttctggtttgcggccactctatgtgctcatttctgaaagcatgagtgaattggagtatctacagcctgccattggtattgtgttgggcttcatagggacaaagatgatctttgacttctttggttatcatataccaacagaagcttcgcttgctgtagtaactacctgtcttagtggaggcgtcatattaagtcttaggaaagcatcaaaagttgagggggacaagtag

SEQ ID NO: 6919 - DNA, 354 bp, Zea mays
  Peptide Sequence Number=SeqID_48698
atgcagtacgtcgccattgctgtcgagaaggtcgaagctgtgaagatatcaaccactttggatgatgttgatttcaagggcaagataggtaagattgttggccacctagaccatgtgtgcaagatgcttgagaatacttcaattgtttgtgaacaagatttggagaataagaaatctagttgggacctttatgacaacccttctaacgttgatgaccaccctttagatgttgatgaacttcttgatgcatacaacacagaagatccagagctaagacagatggcaagatccttccttgaagcttctgaccgatccttcgcctatgatgaaattactctatcgtcatctccctaa

SEQ ID NO: 6920 - DNA, 516 bp, Zea mays
  Peptide Sequence Number=SeqID_48699
atgacctccaaaatcgcctccaatggaagttggctacgagatatggttcctgtcggggagaagaagggccgtgaaccaaccccaaagtgggatcctataccggcatatgaagaacatgcccctctacttgtggatgtagatggatgggacattgaggctgcatcggaatccgacgatgacctcaccgagggggaggatgacctccagttcctcgttgatggggaactagactccgataccagcactaactggccttggacgtttgatggagaatcatcaaatgtggagtccttcgacgacgacgacgatccgatatctagacattggatgggcatcgactcctctaacaaagagaacgacgatgacgagaacgacgatggcagcagtgacgacaacaacgacgacagcgatggaagtggcaacgatgacgacgacgatgatggcggagcaagccaaatatgtgatgagatgccttacaacaagcgttgtcggctccatcatagcttattctggtag

SEQ ID NO: 6921 - DNA, 699 bp, Zea mays
  Peptide Sequence Number=SeqID_48700
atggcgtcgtcgaagctgcagctgcctgctgacgacagcgtcctcctgctcatcacccactccaatctcaccaccttcgcagcggacatccgcgtctcgcaacagaccaccgtggaggcgctcaaggacaagctctggcgcaagaccggcaccgccgtcgcttccatgcgcctccagctccgcgacgactccggcaccaagatcgccgacctcgacgacgacgccgcgccactcgcggcctacgccccctacaacggctaccggatccatgtcgttgatctcgacccttcctcactcacctcagggggttggttggaagacacttcccttgtcgacaagtacacaatgtccgatgaaacatacgataagctcgacactaactttcgaaaattcaaagaaaagatggtcccgaaaaactctccgtcagaggataaagaagtgggtgatagatgtgaagttgagcctggtgccaagaggggcactgtaaaatttgttggtagagctgaagcccttggacgtggattctgggttggagtgcaatatgatgagccacttgggaagcatgacggcatggtgaaaggcattcgcttctttgagtgccctcaaggtcatggggcaattgtgaggccagagaaagtaaaggttggcgacttcccggagagagacccatttgaagacgaggacgatgacgagatttga

SEQ ID NO: 6922 - DNA, 555 bp, Zea mays
  Peptide Sequence Number=SeqID_48701
atggctgtgtccatcctaaatcgggcgtctactcagagcgtggaggcgaggactccattcaattcgagggaaatcaagagaataaatcgacaccttcaagaaggaaagggagtccgcatgagtgacctgagggagcttacatactacctcagcatcaaaggcgcctggcggtgccgcggtggcgggctggcgctggagaggaggcgcggcgcgacgctggagaggaggcgcggccgcgcggaacggcgagcggccgagcgcgctgcggcgctgcctctggtcgctggagactgctcagactggagaagtggagtcgtggagaggacagaggaggcagccaggcaagaggcagccaggcaggaggcgcggcggctggagcagtggagcctagagaggagctgcggcggctggaggctggagctagggttgggatttggggctgggcgcgacggtgggcctctggtgggccgcgagtgccgcccggggctgcagcccaggcaatacggtgtcatggcaatcacagaagcaatgagtggtggatttgtcatcttgtga

SEQ ID NO: 6923 - DNA, 1248 bp, Zea mays
  Peptide Sequence Number=SeqID_48702
atgggatgccttgcggctctgagccgcttcatctcgcgcctcggcgaaagaggcctacccctgtaccgcctcttgagaaaggtcgagtgcttcacttggacccccgaggccgaggaagccctcaggaacctgaaggcgctcctcacgaacgcgcccatcttggtgccccccgctgccggagaagccctcttgatctacgtcgccgctaccactcaggtggtcagcgccgcgatcgtggttgagagacgagaagaagggcatgcattgcccgtccagaggtcggtctacttcatcagtgacgagctggctaagatagcctcggggcgaacaacagttcccccggacgtcttctcccgagacctacatcaaccctcagtcaagaccgacgacactcccgagcccgagaaggcctcggcccagcccgaggcaccctcggctcaacccgagggtgagacactgcgcgtcgaggaagagcggagcggggtcacgcctaatcgaaactggcagaccccgtacctgcaatatctccaccgaggagagctgcccctcgaccgagccgaagctcggcgactggcgcggcgtgccaagtcgttcgtcttgctgggggacgggaaagagctctaccaccgcagcccctcaggcatcctccagcgatgcatatccaccaaggcacccgggggctacacgcacctgctggtcgccatcgacaaattctccaagtggatcaaggtccggcccctaaactgcatcaggtccgaacaggcggtggcattcttcaccaacatcatccatcgcttcggggtcccgaactccatcatcaccgacaacggcacccagttcaccggcaaaaagtttctggacttctgcgaggatcaccacatccgggtggactgggccgccgtggctcaccccatgatgaatgggcaagtagagcgtgccaacgacatgattctgcaaggactcaagccgaggatctacaacgaactcaacaagttcggcaagcgatggatgaaggagctcccctcggtggtctggagtctgaggacaacgccgagccgagccatgggcttcacaccgttctttctagtctttggggcagaggccatcttgcccacagacttagaatactgttccccgagggcgagggcatacgacgaccaaagcaatcgaacaaaccgagaagactcactggaccaactggaggaggctcgggacatggccttactacacacgacgcggtatcagtag

SEQ ID NO: 6924 - DNA, 576 bp, Zea mays
  Peptide Sequence Number=SeqID_48703
atggccaggccgcatgagggaacaaccaggccggtcgaggcatcacgaaaggcattaagacctcattggagtcaaaccactcctccgaggcctcgggggctacacccggcggcctcgggcacaacaggaagctccgcctcgcccgaccttaggcctcggcctcggaaggaggtcttcgccctagggctcggcctcaacctcggcctcgggaggaggtctccgcctcgcccgaccccagggctcggcctcaaccttggcctggaaggaggtctccgcctcgcccgaccccagggctcgcccccggtaacaagtaatgatggctcccccgcgtgcgtccatgacgacggtggttctcagccccctacggaagcaaggagacgtcagcaggatcccagcagcaccgacaactgtgcttctacagggctcagggacttctccgacggccacgttatcgcgagcgtgctcgtcggaggtcaagcgccgtcgcggagcttcaccacgccgtggacccagggcctcttcgccatcatattcggtgagatctatttccaatcgttcatcgcgacctccacatag

SEQ ID NO: 6925 - DNA, 153 bp, Zea mays
  Peptide Sequence Number=SeqID_48704
atggcgatgcttgtggagacagtgggtcaaaaagaggatgaggagaagcaggtgaagtttgagaaggtgaagactcttgcattaggggttgggcatgagattatgacgatggtggatgaaccaattggacatcccttcgaggccaaaggatga

SEQ ID NO: 6926 - DNA, 237 bp, Zea mays
  Peptide Sequence Number=SeqID_48705
atgacagaactagcttgtgttgtctcatggtcttggcctgacgtttgtgatggggacttcttgggccttcccctattgagggaatcactctccctaggggcaaaagcccgatccttcttggacatgcgacggtggcatccacgatgtcagtaccttcctgaaggcgttgcttttgaagttcttctagtccacgacatcacccttcgattgttgctttcgctcctctacgtctggtag

SEQ ID NO: 6927 - DNA, 600 bp, Zea mays
  Peptide Sequence Number=SeqID_48706
atgacggcgaactcagcgccgttcgttgcggaggagaagagagggctcacgcatgggccccaccagacagtcagggaatcagccacaacgcgcgcggaggcgaggacagtcacttgcgagtgggcccgctgcgccagagacaccaccgcgcgggcgacacatgggcttggtgcgaggcccccgcgtcggttcaggtctcacgctggcttggacgcgcaagctctctgtctcttggtgtgtgggctcactgtggggaaggagctcggggtggctgtggccgtcaaggccgtggcgtggcggtggttctggattcgcggcagcggcgtgacgacgtctgtgcagctgcagttggcgtcggccgctgtgcagctgcagttggtgtggagcttggcgtcggccgctgagctcaggggaattgggtctgtcgaggcccccacggagttgggtcacggcgccgtcgtgggcgtgcacggcctccttggcaacgtcgtaggtgtcggggaggggcggttacggttgcgcgaaagaagtggggcgctcgctgcatggttctgtgtgcccgatcggaggatgtggtgtctgacgcagctctacgactga

SEQ ID NO: 6928 - DNA, 429 bp, Zea mays
  Peptide Sequence Number=SeqID_48707
atgccgattttcacaggcagaaaggataatcttcaacaaaaagacaccaaaggaagaccttcgaatggattatcctcagaaatccacttgaaggccaagatagtgccgacttctaaggcatgggacaagattaaagacaaggctgaccctcaaccaaagcacaagaagatcctagaacattcagatggaccagacaaaatgctgcttctctgtttggttcatactgtacctggttccctggtcaaaatctatggagaaaattgtcctctgtggatagtggtgatgcaggcttgcaatggctatagtctaatctgtgtcccactatatgatactgtaggtgcaggagatgttaactacatcattgatcatgctgagattgatgttgtcttcatacaagacaagaaaataaaagagttctgccagctgtag

SEQ ID NO: 6929 - DNA, 341 bp, Zea mays
  Peptide Sequence Number=SeqID_48708
aacctgtttccaagcacattgaagagcaaggattagagtttcttcagtttgccttccgctggttcaactgccttctgatacgagagtggtcgggacaaactgcagaagctggattttcaagagaaggtgatgttcctgcagcacctccccacgaggacctgggcgcaccacgagctggagatggtcctctcgagggcatacatgtggcacacgatgttcaaaagctctcccagccacctcgccggctaggacccacccaagtccaccatgcctcgagacaccgcccatgccttccgggcatggtcatggccttctattgccatgagcaagtcctctcgtag

SEQ ID NO: 6930 - DNA, 300 bp, Zea mays
  Peptide Sequence Number=SeqID_48709
atggcggcggcagcgagggcccaccggatgcccacctcgcgcaatgcccacgggagagcagagggcccaaccagacccagcatgggcacaaggcgtccacacccagcttcaccatgcccccgccgggccgcccttccccaccgcccctcgcctcgggatccagcagcgcgcatgccggccccgtccccgccattcccgcccgcagtccccgcccttccccaccctgtgcaccaaatgccccccgcctccgttcgctggacccgctacgccatccccgctcccgcgccccaatccttctag

SEQ ID NO: 6931 - DNA, 1197 bp, Zea mays
  Peptide Sequence Number=SeqID_48710
atggcggcggtggcgatccaccagttcgccgagtgcatcacctgccacgcctggagcccggaccagtcgatgattgccttttgtccaaacaaccatgaagtacatatctataaattcttcacagacaagtgggagaaacttcatgttctgtcaaagcatgatcagatggtttcggggatagactggagtaaatcatccaacaaaatcgtaacagtttcacatgatagaaattcatatgtttggacacaagaaggatctgattgggtacctaccctggttattctaaagttaaatcgtgcagctttatgtgttcagtggagcccaaaagaaaacaagtttgccgtgggaagcggtgccaaatctgtgtgtatttgttactatgaacaagaaaataactggtggattagcaaggttatcaggaaaaagcatgaatcttctgtcactagtcttgcatggcatccaaacaatatatatcttgcaacatcgtctacggatggtatgttctatcctttgaagcctgcttttactacctcttcccatgtcaacttcagtcttctcctgtttctctttccattgctatcatgccttaagatccatgcaatggtgtctctggaggtcttcgttggacatgttcaaaccatctcaattggtgttggacacacttttcttcaatcggtgctgcccctagcctatcaccaaatcgctcagcttgatctatcatctacctgggtatttggtgtaaggtggtcaccaagtgggaagacattggcctatgcagggcacaactccatgatttatttcatcgatgaagtcgaatcatctcctgtggcacaaaatttggcactgcgtgatctgcctctccgtgatgttctttttgtctctgagcgcacattgattggtgtcggatttgactgcaatcctatgatctttgctgctgatgatactgggctttggactttcataagattcttggacgagaggaaagctgccccatcagcttcaaaagcctcgcaggattggatgcactggggttctctgcactttcgcttccaggatcgaaagaatcgcccgacgcgacggttgaaagctgtgaccaccaggtggagtgggggcggcggcatgaaaccaagccctgctaatatgtggacctgccctgttggtggatccccagacgctaatcctgctttggccccctga

SEQ ID NO: 6932 - DNA, 381 bp, Zea mays
  Peptide Sequence Number=SeqID_48711
atgacgaaggagatcacctcggcgatgattgtgagctcgcgtaagaacccccttgcacgtggtacaacatgtgacgtgggctccactctcgccccaccaccggtagctgcttcgcctcgcctactgccacggtcgttggacaccaccaccacctcccactgtgtccaccgcccccctcgctgccacatcgaacggatgaagtgcctcaccttcacgcgttgggtgttcgacgagatcaactgtctcgatgcggcctcctggaactcccttattactgcttacgatgagcgaaggcgagatctggaggaagatgaatgggaggaggatgaatcaggaaatcaggaaatgtgtttggacagcgagatgtgcggtggcgagtag

SEQ ID NO: 6933 - DNA, 270 bp, Zea mays
  Peptide Sequence Number=SeqID_48712
atgggcaagagcaaaaagggtggaagttcgtcgcaccattccggcgacaagcggaagcgtgagccgacccctccctcggaggacttcggcgattccgagtactcagaggaggagttttcctccgagtctgaggggtcaccagtctacacctcgccctcggcatcatccgatgactcggaccattcccaggggatcgccgctgagctgtggacatatatccgggccgttgagcgctccgggctcgagggctcggatgagtcagataagtag

SEQ ID NO: 6934 - DNA, 114 bp, Zea mays
  Peptide Sequence Number=SeqID_48713
atggcggtcgtatctctccccttctcaggaatccccgcaaaagttcgctctgggttcgccctcgcctctcccacgtgcgccagagacgtatgtttacaatatcctgttttttaa

SEQ ID NO: 6935 - DNA, 1184 bp, Zea mays
  Peptide Sequence Number=SeqID_48714
ggggtgctgacaccgggggcccatccgtccgcgggggaatcggtcaggcgcaagtgcgcatccgcacggaacatgcgcgtggagtcgcgcagctagtggagatcgcagcgcaggaagcggagaggctgttggggaggaagaagacgactcgaacgcagagtgtgacgtgtgggacccggctgacagagagagcggtggaagaaaaacatggacgtaagcgtatgactgccaggtgggaccctcaggtcggcgccgagttgaggggtggaggctgggccgcgcggtgtagtgatggaaaggagactgtggtggaggtgcatggagcggtggcggaggagaagcagcaggtgaggaacggagaggagactgcagcggaggacgactccggtgggtcggatccggattcggactctgaatcggatttagattcggagtcggactgggactcgtattcggaagaggaagaggagcgacagcagcagagaaagaaaaaggagaaacccaaaaacaagaagaagaagaagaagcagcggcggcggcaacagcagcagcagccggcatggctgatcacactgctgagaaccaggttctgggagccatgcaaggagcacgtgtcgaagaacagggcggagcagtgcatgttctgcctcaagtgctgcaaggtgacctgcccccgctgcacccacgacctgcctggccaccgcctcctcaagatccgccgctacgtctaccgctccgtcgtccacgcttccgatatgcaggcgctcggcgtcgacgtctccaggatccaggcatatgttgtcaatgcaaagaaggtgctgcacctgaggcccatgagcaggtccaagcatttcaggcctcaggcagggacgccgcgctgcgtgacctgcagaacctggctccgtagcgcgcccaacctgttctgctctcttgcctgccaggggaatgttgatgtagcgcaagacgacttctcggggcccgaagctgaggtccgctacaggagcctccaagtgcagatggctgaaccatcaggggctgcagccgatgagctgcctggccctgaagctgcgcacgaggtgcctgcgcaggttccgccgccgccgccgccggccgcaaatcagaacgcgtcgctccgcaggcggccgcgcaagcaggcggcgccggagagggcgccgttcttctga

SEQ ID NO: 6936 - DNA, 610 bp, Zea mays
  Peptide Sequence Number=SeqID_48715
ctctgggcttccaaataaccaggcgaagccctggtccaatgttgtcatctggttcagcgacaccaggtcccgcacgcctggtggtggatcccaagctcacgcgtgtggcagtggccccctaaggctcgcgcagaggcggatcccgagggatggcacgaagattcttcaaaggctgagcaacacgaagttatgggccttgaaaaaggcgaagcttctttatatgttgtttggaccaaagatggttaggattcggaccaccgcaaaggtgatcacacttacctcttcggaggtacgacaaggtaccttgcctatctctaaatccatgagggatccatcatcatcaaagcctgctccgaagatgccgaaggacaaaccttcgaagccaagctatattgaaattggtcattccactttgagggagaaggatctgcaatctatgaagagacttggttactttaccagtaaagtaaatgtgggcctccctagggatgaggagaccccgatgccaggaaaggatgaagttgttagagatcgtagagatgctgatgctttctgcatggtgcatgatttgcactatcaaacaaaggccaagggtcagaagattaaatga

SEQ ID NO: 6937 - DNA, 204 bp, Zea mays
  Peptide Sequence Number=SeqID_48716
atgggaacccccaggcagcacaccagggatctggatcgcgcaatgagggtctctatcgccagtctggtgaaccgccatgccgctatctcgaaggccctgatcatcacagagcatggtgatgtgctggggaaggatcaggtacttagggacaaagatctccctggtaatccccccgaccaaaaactccagttcctccagggatag

SEQ ID NO: 6938 - DNA, 405 bp, Zea mays
  Peptide Sequence Number=SeqID_48717
atgcttcggattcctgtggtgagggccacaatcgctggcaactcgaggggaaaggcgtgggaaaatggagcctgtaatcacgcagtggaggtcgcgatggcagatcatacactaacatcaactcttttccatgttatttacaagttgggtattacacccacggagcgcccgagttcagacgggtgtcccgttgactggcgtgggctgtgccatgctcgtggatcatttccgcgtgacaacttggccaacaaagatccggccgcacctactggaaaagtctacatcaccgccattatggcagtaggtggaaacgccgctgtgaaagcaagctacttccatgttgccctgaccgggctggcccggactgggctcatgaacctcaccttaggatcgatctactcctag

SEQ ID NO: 6939 - DNA, 459 bp, Zea mays
  Peptide Sequence Number=SeqID_48718
atgacagtctatgctacaacctatgccagggccttcacacgtatgcttataagactgggcgaaatattggctggtcaggaaatctgcacgatcgtcaagcatcacgactcgtcctttggagacttccctatgggggaagaagcgacatcttctatgccacggggctcttaccgcctagcggctggcactgctgctgcacatgctgcacaacaacacacacaggggcaagcatctaggaccccctcgcgtgctactcctggtgtggtgctattagcagctagggagttgcttagccaccccttgagctctacagcctcaccggggccatggggcagtggcgtgaagatgttgatcgtttcctcggtatggaccagaccgctcctggctcagccagaactgggccacgactatcccaacgtcaatgcgaggcatcgacatccgtacactcaccctcagtga

SEQ ID NO: 6940 - DNA, 957 bp, Zea mays
  Peptide Sequence Number=SeqID_48719
atggcttcgagattaaaatgtcgcgatctaatccgagccgcaaacaacaagatcaacgacgcggatctcaggaatgactgggcatgcctgcgcctactctccaccgtccatcgtcagattaacgacacatgggtcatcttccatcccgcgcctacaagtcacggcggcgcgcccaacctacggcggcggcgcccaccggagaacccccagccgactaccagcgcccgcaaactttctacagtatggcctacgcctatggggccaaaattgaacaggtcacaaggttacttacccatggtgggggctgcggcatactgtgaccacgaaaggaaatggcatcgcccaacagtgagaaattcccgacatcttggtccaagatttcccccacggcgaggtattaaaccttcacagcgcttcggcggactcccgcaaaacttcgccgacgatcccgtgcagaggctggcggtagtctggccacggcgcggcaacgcaaacctggcggcgcaaatcctctcgacgccgagccgccaaacagtgatggtagagaaggtaaaaggaggggaagaaaggaacaagcctaggtccacaactcactttacagacgcgagggtggcaggggcgcaacaaccatcgcgcgacaatggcgcggccatcaccgttacatcccgcatgcaatccgcagagaaaggagaagctactcgttcaaggaccccacttggtcgtggcgcggcttcacgtgcggagtgcgcacgagtccggtctccaccagtaggattctcgcgggatttggttgagtcggggtggagcacaactgagtattccggcgaagttgttagtagtgcgcgcgagctgaccgtggaggagatgacgaccgcgtccctgaccagatggccccaccagcagagaccagcgagggtggtgtcaagaactgggccgatgcgcgcggcggtcaactga

SEQ ID NO: 6941 - DNA, 315 bp, Zea mays
  Peptide Sequence Number=SeqID_48720
atgaccactatggtgaagcttgggtcaggaggacaaaaccgaggtgggcagacaacggaggaggaccttgggcagactggagaccactccaacgagcaatacccaccgcggggagatgttaagcgcagacggggtaggggggttggtgaaaggggaaccaccgtagattttcggtgcgcagagctcaggcaaagctcaccgtggtcgaggcgatggcagaggcccgacgacgactgcggaatgatagggcaatggaaggggcggcgatgcgagctgggtgagagcgagggcagggagagagcgaatgagatgtag

SEQ ID NO: 6942 - DNA, 315 bp, Zea mays
  Peptide Sequence Number=SeqID_48721
atggctgacatgcctgtcaactatcgagaaaccctgttgaataaagcaagtgcaatctatgacctccaaaggaatagaagtaaccttgaatcgctattctgctacgacaaatctgtcccagaggagaatattggaaaaccgtccggtctagatctggaaaagaaggatgtcggggacaaccctccctgctcaagctgtgaagctaaaggcgctgtgctgtgcgcaacatgcgctggttcaggcttgtacgtcgactcgatactggagagccaagggatcatcgtgaaagtcagatgcctaggtaagctagcttga

SEQ ID NO: 6943 - DNA, 597 bp, Zea mays
  Peptide Sequence Number=SeqID_48722
atgacgatcggcacggccacggacgcttggcgaagtcaccctgatggaataatctatgaaccaatcttgattatcggcgataagcaatcaaggtcgaccgattcgagcaacgtgacggggtcctcaacgctgcgccgggcgccaccatgctgtgcagcaggaaagagtcctaaccacggcttcgtgagacggtgggaaattcggaaaaacggaggccagatccagagttggaagaagcagccatcaagaggagtgggaggagagacggggtcttatggctttggccggcgcggcgtggaggcgtgccacatggtgggtgtgaagaacaaggaggacttgttctatgtggtggcagctccggggtattttattggcggggagggcaacggagatcgaccgccgtggctgctagcggcggcaactttccggtggcatcgcctgtcgccgtcgctcgtcattgtaggcgatattaaaaagaaatggatcgatgatatgaacgaagcagagggtgattggatggatggtcgtgttctcggttctcgctttcgttttcgttttgggtacagtacgtcagtacctgcattggcacagcagtag

SEQ ID NO: 6944 - DNA, 729 bp, Zea mays
  Peptide Sequence Number=SeqID_48723
atggatggcatgcttgctgatcctaaggaagccatgactggtatcagagaaatccactttttgcccttcaaccctattgataataggactgctctaacatatattgacgccgatggcaactacaccgtgtcagcaagggtgctcctgaacagcaaaataaatcgttcgaatccaattgttgaaatgaaacctcccaagattatgcggaatcaatcatttgatctgtgctcccccatcgccaccagcgacggtgccacccctgttgcgtccatgggtgccaggaaagacggtcagctaggcaacctcctcaggctccgaagctgtttggacacttccaccaagacgtcaaggactgagaaccaagacaccttcgatactgccatggatggcatgcttgctgatcctaaggaagccatgactggtatcagagaaatccactttttgcccttcaaccctattgataataggactgctctaacatatattgacgccgatggcaactacaccgtgtcagcaagggtgctcctgaacagcaaaataaatcgttcgaatccaattgctgaaatgaaacctcccaagattatgcggaatcaatcatttgatctgtgctcccccatcgccaccagcgacggcgccacccctgttgcgtccatgggtgccaggaaagacggtcaactaggcaacctcctcaaggctctgaagctgttggacacttccaccaagtcttga

SEQ ID NO: 6945 - DNA, 408 bp, Zea mays
  Peptide Sequence Number=SeqID_48724
atggcgagtaccgatgactcttggaacaacccgagagtcgccgacgttggcaacgaccatgaggtcccgctgcttgacgatggacaacgcggtacagccgctttggaccgtgtgcaagcggcggctgcgttggagcttgtcatacacagcggctcatgcgaccatgtaggactgcttccagaggtcgaactggcagtcgtcaagcttcttcttgtcgtcgacgagcgacgccaacctagacgtgggctatatgtgggaatgagaatgggaatgggctttgcgggaagtgggaatgggaaaggcagaacaaagaatggattgtgcggggaggagggaatgggaaagatagaacaggaaatgaaaaatagcagaacacagaatggtaggctactcttgcagcctgaataa

SEQ ID NO: 6946 - DNA, 189 bp, Zea mays
  Peptide Sequence Number=SeqID_48725
atgaagcacatagtgaactttggtccaaagattcagaagcgaaagctgctagtcggagttgcacaactgagagaacagttccagaggagctctctctctctcttcctgtcgaagggtttcaccagtaatggcaataaagatgaaggggatcttcaaaggactgaagataatctctcaaatgttcggtaa

SEQ ID NO: 6947 - DNA, 198 bp, Zea mays
  Peptide Sequence Number=SeqID_48726
atggagatcgggtaccctacagatgtgaagcatgtggcccacataggtctgggcaccagtgacacatccccaaggtggacggctgaattcaaggggacagatgattcatcagcaggctctgtgaggagcacggctgcgcagtcacggcagacttcttggacctctgcagcacgagtaatcgtctgcgcttatgattag

SEQ ID NO: 6948 - DNA, 297 bp, Zea mays
  Peptide Sequence Number=SeqID_48727
atgtccgacgactcggacgattcccaggggatcgccgccgaggtgtggacatacatctgggccgttgagcgctccgagctcgagggctcggatgagtcagagatctcctcagacgaggagaattcctctaactcgtccgaggaggagagcggcggtgacggccacgacgagggcgacgacgacgacggaggcgacggtgatggtgacggagacgacgacaagggcgacggtgacggtggcgacggcaagagcggcagtggcagcagcaaggccagtggcaaagcgccactggcttaa

SEQ ID NO: 6949 - DNA, 954 bp, Zea mays
  Peptide Sequence Number=SeqID_48728
atgccgcaccgcacgcccgcaacggcctcctccctacgcatgcgggaaccgcccgcacagcccgccgcgacccccacgcacgcggccgtccctacgcctgccgcaaaacccccgccgcgaccgctccacgaatcccgcgcgcgtatcccgccgtgcgacgccgctacagcacacccgccagccaccacatccccaataactctagcgcccctgaacctgatcgaggtgtcgaaggccagcaagaggaaggccgccgcgaccgccgagagtggaggcaaggccgtggtggaattcttgttgtcttcatctgcgaccgtggccgccaataaggtggcgaacgacatcgcggcgcttaagctatcaggctgcacctgcaccggggtcctcacatctcaccccttctcccacgatatccacggtacttcagatgctgtaaggcagtacttgtggctatttgagcaacataatgtgatggaaattctaattattgctgggtcaacatgttcctcctcgcagtgtcagagtgcgagattgtactcagcacgggattcagtgggttgtatgagtaatcaagaaagtggattggcagataaaattgcaacaagagggatatccattgccatgtcacatagtcagcgctttggctttcttggtccaaatggcttgggaaagaccactcttattaacatgagggagatcctgatactttggcaagaattaaagcagacacagaagcccctgaagcaaaataagaggtgcaaaataaatcgttcgaatccaattgctgaaatgaaacctcccaagattatgcggaatcaatcatttgatctgtgctcccccatcgccaccagcgacggtgccacccctgttgcgtccatgggtgccaggaaagacggtcagctaggcaacctcctcaaggctccgaagcttttggacacttccaccaagtcctga

SEQ ID NO: 6950 - DNA, 354 bp, Zea mays
  Peptide Sequence Number=SeqID_48729
atgctgatgcaggtgctgctggtggcgtctgcggtggtggcgttcctggtgggctacgtgcgcgcggacttccagctcatgctgctcgtctacgccggcggcgtcgtgctcacggctctggtcaccgtccccaactggcctttctacaaccgtaacccgctcaagtggctcgacgctgccgaggccgagcgccacccgcggccccaggtcagcgccgcccccgcggcaggggctaggagcagcgacggtgatggcaagggtgaggacaggagatggtggaggaaagatgttcttggcttcgtcctggttcttgcattggtgggtgttggtgccactgtcctgtacatacgttga

SEQ ID NO: 6951 - DNA, 753 bp, Zea mays
  Peptide Sequence Number=SeqID_48730
atgggtgaatgttttaggtatggggaagtgcgcggcggcgacagccgttgggctcaggaggcggtgggagaggcgcgagagcgccatcggaggcggagcctgcaacaacgctgcaagcctgacgaggaaagtcaagagtcaaggcgtaatctgggaatacgtttgctcccctcgtatgcggaacatgtgtaccggcacccgtgggaccgggtgacagcggcggcgtggcgcaagttcacggatccggcctcctgtacggcgctctcccacgtcgcagacgttcacaccctacaccgccgcctcgactccgacacgggccgcctccaggccgcgcgctccatcaccgtgcggtccccgccgctccctttcgtcctgcgccgactcctcccgtccgccgcggcgtccccaaacggcgccgcgctctgccactgcgtcgagacctcgctcgtggacgcccagcgccgcgccatggacgtcgtcgtgcgcaacgtcagcctccggggcctcatcgaggtcgaggagcgcgcctcctacagaccacatccggaccggcccgacgactggacgcagttcaggcaggagaccacgatccggtgccgcccgctcgcggccctcgccgccgtcgctgagaaggtcgagacccggtgcgccgagaggtttctgcagaatagcgccaaggggagggaggtcgtcgagcggatctgccggtacctcgaggccgagtccgccggcgccgcgccctccgtaacctga

SEQ ID NO: 6952 - DNA, 597 bp, Zea mays
  Peptide Sequence Number=SeqID_48731
atgagcttggccttgtggggtcgggaggaccgaggccgagccgtgcggcagccgctggattgtggaggaaggcagcccgaacctgccggcgagcgtgtccctaccctagtacagcgttttccttgtgatgccacccaaggcgccccatccgcgcccgcgtcgccggatgagatgcggcaccaggagatcgagggccccacggtggagcgcgatacgtcgccgctggccgacgaaacgcggcgggagctcgacgcgctccgccgcaccgtgcagcgcctcagcggctcgctcgcgctcctcggaggagcgcacctcgccgccggcgcgtggatatcttacggtgctccgcctctcggtgtcggatccgccgcggcagtgcagggagtggcggcgttcgcgttccccttcgcggtcgccctggtgctacgccgcgccatcaagcccatcgccttcttccagaagatggaggccaacgcgaggctgcaggtgctcacgttgtgcctccaggctacgaagaacgttaacctcatgctgctccggacacgggtgatggccatctcttgcgctctgggagtgtctgtcgcgtcagttgctgcg

SEQ ID NO: 6953 - DNA, 273 bp, Zea mays
  Peptide Sequence Number=SeqID_48732
atggcgggtgcgaccgcggaggagccgctggtgggagacggagccggcgcctccgcggccagcgccacggtggccgaggcggcgacgaggacggcgcaggcgatcttcttcatctccatccctggatgcggcggcttattagcgaccgtagagacggcggcggcgggatgggatggaggcgaggaaggtccaacacacgtggcggatcgagaagaaggcatccggtcggcttgttccagttctttccgtcaaactcgtattgtagcagcctaa

SEQ ID NO: 6954 - DNA, 429 bp, Zea mays
  Peptide Sequence Number=SeqID_48733
atggagctccagcagaataattgttcagccttcccgaacttcaacttcagcacctcgcaccatggggactacgtcggctttgcatccgagccactttgccttgtcggcctggacatcgtgtccgtttccgagccccatggagaaaccgccgccgagttcatcagcaacttctcttcgtgccttactgaccatgagtggaactgcatcgttcgtgctggcactcccagggacgtgctgacagagttctacagccaatggaaattgcaggcatctatagcaaaaggggatccagaggatgctataaacaccttcaagaaaacactgtccaatgtgatcattgcagagaaccagttatcttctgcgctagacagtccagaagaagctttcactctgcagacagtggaagagcttacacaatctcaggggtaa

SEQ ID NO: 6955 - DNA, 492 bp, Zea mays
  Peptide Sequence Number=SeqID_48734
atgaagcttgacattcttgctcagactcgcagtggcggtagctgggagagcttgggactggccagacgcgaccaactcaccactgtaataagacgacttttatacatagctgacagtacgcaacctcagttcaggcgcaaggttaactttccagattggaccgcagattgtgagatccaatccaatccaacaaccgaatccaatccaatccaatcagagaaaaagaaagacggcgaaaggctcatgtatgtgtggcaccacatcttgccatcagggaaaatggggctgtcaatctcgtacccaccggacgactacctgccagcagtggaggacgacatggggcggctgttcatctggtctctcagcttcgacgatatggaggctgccgccgattcgccttcgtattcgccttcggcattgcccccccgcctttggctccgggaagctgatcatggagggctccctgggcttcttcgaaagaagagaaactga

SEQ ID NO: 6956 - DNA, 357 bp, Zea mays
  Peptide Sequence Number=SeqID_48735
atgtcgctcatcgttacacatgttgcctcgacatgctgtcaatgtgttccatttgagtgctacatgcacattgcagacaccttcaagaagaaggcaccgaatgccatcaaggagatcaggaagttcgcccagaagaccatgggtaccaccgatgtccggatcgatgtgaagctcaacaagcacgtctggagcagcggtatccggagtgtgccgaggcgagtccgtgtcaggattgcccgcaagaggaacgacgaggaagacgccaaggaggggcagtactctctggtcacagtagctgagatccctccggagggtctcaaaggtttgggaactaaggttgttgaggatgaggattaa

SEQ ID NO: 6957 - DNA, 240 bp, Zea mays
  Peptide Sequence Number=SeqID_48736
atgaagaacgagtcgtcctcatcctcgagcacgcggcccttggcgagatcaataagatccttcatgccactcgccgctcagatgcttagtgggtcaactgtagggatctttccttctacatacgacctgtgggactcgctttttgaaaaatggtccccaatagcttatggtttacttgaaaagttcatgaatactccggcaacagaattcaaggtgatattccagaacaatcatatctaa

SEQ ID NO: 6958 - DNA, 521 bp, Zea mays
  Peptide Sequence Number=SeqID_48737
atgggtactgttgctgatgtggcaagtatgagtaatgatgaacaggaggcggtcgcgcctgctctgccgaaagtgcgggggcacatcggcagcgcctacggggaggaggacgccagggaagccggctcctccagcctcttcggcggtgacggctcctcggacgacacgcatccgagctccggctcgggccaccgcagcagcgtcgcgtcgagccagaagagcctggatgaatttgaatttggtgtaacctgggatggcgatggactgcaggaggacgaagtggagcaaggaaagatctttcttggcgtgtctagacttttcagaggctcagtggtgacatcagctgagtttgctgagaagcagcggacaccagcttccctggcgctaggcacaaagcggttgcggctgtcataccctttccttgagctcgcttcgtttgggagactggaggggcagcagcaagagaatgaggagattggcacgcttgtctggggtgatacagatttatctgacccgcagat

SEQ ID NO: 6959 - DNA, 249 bp, Zea mays
  Peptide Sequence Number=SeqID_48738
atggcgtcccgcgccgcagcgctgctcgtggccgtggccgtggcggcagtgctgttcgccgcggcgtcggcgcaggagacggacctgggagtgccgcccgcgccggcgcccgtcacgggcgcggcagcgggggccgcggcgtcggccctggatgtggcttgctctgtcgtcttatccgtcctcgtcgccggtggcctcatgcaaccaaggtccgatgtcctgtacaggtgcgttggtgaccaaaaatag

SEQ ID NO: 6960 - DNA, 402 bp, Zea mays
  Peptide Sequence Number=SeqID_48739
atgccaggcataccgagggatgtcgctgagcactcgctggatatccgacccggtgcccgacccgtgaagcagcacctgcgccgttttgatgaagagaagcgcagtgccatatgtgaggaggtccacaagctggtggctgcagggttcgtcaaagaggtattccatcccgaatggtttgcttaccctgtgcttgtaaagaaaaaaggtgcaacctaccaaaggtgcatgaaccacgtgttcggagagcacatcggcagaacggtcgaggcttacgtcgatgacatcgttgtcaagacaaggaaagcctccgacctcctctccgacctcgaagtaactttcgggtgcctacgcgcaaaaggcgtaaaactcaatcccgagaagtgtgtcttcggagtcccctga

SEQ ID NO: 6961 - DNA, 899 bp, Zea mays
  Peptide Sequence Number=SeqID_48740
ccttcccgaacttcaacttcagcacctcgcaccatggggactacgtcggctttgcatccgagccactttgccttgtcggcctggacatcgtgtccgtttccgagccccatggagaaaccgccgccgagttcatcagcaacttctcttcgtgccttactgaccatgagtggaactgcatcgttcgtgctggcactcccagggacgtgctgacagagttctacagagaaccagttatcttctgcgctagacagtccagaagaagctttcactctgcagacagtggaagagcttacacaatctcaggggtaactggccaacagtgtagtgcagccaaggcagcagagcgtgaggtgcactaccaggcaacaagaaaaaaaaatatggagctccaggcaaggtgcgtctgcgtcgtcgcgatgctcctggtggccagcttcgcggggctggatacggcgcacggcgcgggggagtgtggccgcgtcccggtggaccaggcggtgctcaagcttgccccgtgcgcggcggccacgcagaacctgcgcgctgcggtgccgccgagctgctgcgcgccatcgggcgcgtccccaagtgcctgtgtgtcgtcatgctgtccggcaccagggagaggagcgccgtcgagcgctcagcgccgggcagagaagaccgtcgggccagggagctccaaccaatcagcgatggagcacagggccgaggaccggggagagggagcgctcggggagaggaggagcgcccaggagagccgtcggacaagacgaactccagctcgagcgccgatccgttctaagaaacgggacagtgagatggactgccgtaacagcgactgcggatcggctaaatcacaccccgatagcaaaattccgaagttgaaaggattataa

SEQ ID NO: 6962 - DNA, 2571 bp, Zea mays
  Peptide Sequence Number=SeqID_48741
atggcttcccttggtgacataggcctcgccgcgggtctcaacgtattgaccgccgttgccttcttgctcgcatttgcattccttcggctgcagccaatcaacgacagggtctactttcctaaatggtacctcaggggaatgagagacaatccaatcgtatctggtgcagctgtgcaaaagtttgttaacttagacgccagatcctacttgaagtttttaaactggatgccagctgctctcaagatgccccaggatgagctcattaaccatgcaggccttgattctgtggtctacctacggatatacgtaacagggctcaagatatttgttccaattacagttctggcttttcttgtactggtcccagtcaattggaccaatgacaccctaggacgcatcaacgtagtctacagtcctattgacaaactttcgatatctaatgtacctaatgggtcgaagaggtttatagctcacttgggcatggcttatgccatcacattttggacctgttatgtactgttgaaggagtatgaaattatttctaacatgaggctgcgctttctagcttcagagaaacgccgaccagatcagttcactgtccttgtgcggaatataccaccagatcctgatgaatcaatcagtgagcttgtggaacatttcttccttgtcaatcatcctgatcattatctacaacaccaggtggtttacaacgcaaataaacttgctgatctggttgaaaagaagaagaagatgcgaaattggcttgactattacctactaaagtatgagcgaaattcatcattgaggcctaccacaaagactggctttcttggatgttttggttccaaggtggatgctattgactattacaaatcagagatcgagaaaatcgggaaacaggaagctgaagagcgtaagaatgtcatgaaggatccaaaatcagttgtgccggcagcctttgtctcatttcgctcccgatggggtgcagcagtctgtgctcagacccagcaaacaagcaatccaacactctggttgacagaatgggctccggaacctcgtgatgtttattggaataatctgtccatcccatttgtgtcccttacaattaggagattgatagttgctgtggcattcttcttccttaacttcttttacgtcatcccaataacattcgtacagtctcttgcaaaccttgaaggaatagagaaggcacttccatttctaaaacccttgattgacttgccattcattaaatcattcatccaagggtttcttcctggaattgctttgaagatcttccttatagtgcttccaactatactgatgtttatgtctaaatttgaaggactgatatcgcagtcatctctggagaggcgatctgcatctaagtattacatattcttgttcttcaatgtatttttggggagcgtaattgcaggatctgctctggagcagcttaaaacttatctccatacatcagcaaacgacataccaaggatcattggtgactccatcccaatgaaggcgacttttttcataacatatgtgatggttgatggttggactggaatagctggtgaaatattgagactgaagccgcttatattcttccatctgaagaactttttcttggtcaaaaccgaaaaggacagagaagaagctatggaccctggcagtatctgctttgactcaactgaacctagaatacagttgtacttcttgcttggccttgtttatgctgcagtgacgccgttcttgcttcctttcatattggtgttctttgggttcgcatatgttgtcttccgccaccagataataaatgtctataatcagcaatatgagagcgccgcacagttctggcctagcgttcatgggcgtataatcacagcgttgattgtatcgcaactgctgctcctgggactgatgagcacgaacgactttgagcagacgacacctgtgctccttgttcttcctgtgctgacctttgggttttacaagtactgcaagaaccgctttgagccggcattcgtgaggaacccgctgcaggaggcgatgaagaaggacaccctagaacgcgcccgggagcccaacttggatctgaaggcgtacctggccaactcgtacctgcacccggtgttcaagggggacgaaggcgacgacaggtactcggtgatggacgacgatgggtggatggaggaggagctagagttctctacaactgcagttacatacatcacctggcctgcctgctctccctaccattctggtaaccggagaacaagcaagcaagaagaaaacaaagaatgctatgctcagacgtcaaaattcttgccggatcagcagcttgacatggccatgtctctttatatagctagagctagctacaggcttaagcagacagagctgcaggacaggagccccgaggagcgtcatgtgggcatcagtggcaacccacgcctgcatgccgccgcaccatccgacatgacagtgaaaacttgcgcttctgtatattttaactgcagtggcctccatgatccgattcctcttgtcggctgcgagtcatgcacatga

SEQ ID NO: 6963 - DNA, 342 bp, Zea mays
  Peptide Sequence Number=SeqID_48742
atgccggtgcacgcacaccttccctgggtcgtggtgacgctatccgaccgaaatcccggggcggggcgcgaccacagtaggggtctcaccgttggcagtcgcgaaaattggtctggcggaggcgtggattcgacggcgacgaaatcccgggatccccggtcaccaccgcacccgaggacagctgcgccctcacccaagaaggttctggggagctttagcacacgcggcagagtacaatcccgcagcaccccggtgtcaatcagaaacggcggcgatagatggctatggcggctccttacggtgcccgatgggaagaagggaaaggcacgaggggttgactga

SEQ ID NO: 6964 - DNA, 216 bp, Zea mays
  Peptide Sequence Number=SeqID_48743
atggcatcaggcatcttgcatcggcgggagcgggacgcagagccccggggcgtcaccgctctcggccagcgggttggggaagaagggccggtcgcagccgctgggcacttcgcgccgcgttgttcggtctctgggaggaagaaaggctccctgtcgttcgatcgtgaatggatgagggggattagatctggggaaggaattactgtgggccattga

SEQ ID NO: 6965 - DNA, 1266 bp, Zea mays
  Peptide Sequence Number=SeqID_48744
atgtttttcgatgggtcgctcatgaaaacaggggcaggcgcgggcctgctcttcatctcgcccctcgggaaacacctacgctgcgtactgcgcctccatttcccggcgtccaacaacgtggctgagtacgaagctttggtcaacgggttgcgcatcgccattgagctaggggtccgacgcctcgacgctcgcggcgactcgcagatcgtcatcgaccaagttatgaagaactcccactgccgcgacccgaagatggaagcctactgcgatgaggttcggcgcctggaggacaagttctacgggctcaagctcaaccacatcgtccgacgacacaacgagactgcggacgagctggctaagatagcctcggggcggacaacggttcccccggacgtcttctcccgagacctacatcaaccctcagtcaagaccgacgacacgcccgagcccgagaaggcctcggcccagcccgaggcaccctcggcacagcccgaggcgccctcggctcggcctgaggcaccctcggcccccgagggtgaggccctgcgcgtcgaggaagggcggagcgggaaggcacccgggggctacacgcacctgctggtcaccatcgacaaattctccaagtggatcgaggtccgacccctgaacaacatcaggtccgaacaggcggtggcattcttcaccaacatcatccatcgctttggggtcccgaactccatcatcaccgacaacggcacccagttcaccggcacaaagttcctggacttctgcaaggatcaccacatccgggtggactgggccgccgtggctcaccccatgacgaatgggcaggtggaacgtgccaacgacatgattctgcaaggactcaagccgaggatctacaacgacctccacaagttcgacaggcgatggatgaaggaactcccctcggtggtctggagtctgaggacaacgccgagccgagccacgggcttcacaccgttctttctagtctatggggccgagaccgtcttgcccacggacttagaatacggttccccgaggacgagggcgtacgatgaccgaagaaaccagaccgaccgagaagactcaatggaccatctcgaagaggctcgggacatggccttactacactcggcgcggtaccagcagtccctgcgacgctaccacgcccgaggggttcggtcccgagacctccaagcaggcgacctggtgcttcggctgcgacaagacgcccgagggaggcacaagctcacgcctccctag

SEQ ID NO: 6966 - DNA, 816 bp, Zea mays
  Peptide Sequence Number=SeqID_48745
atgactactgtcggcgtttcgaccccggggggtccctggaccgacgagttgggtgcgcttgcagtagggggttacaagtgtccgcgcggggggagagcaagggactctacacgtcgccccgtcctcccgcgcggccaaccttctcgtaagagagccctggaccttccttttataggcgtaaggagagggtccaggtcgaggtcgtgtccgagccccaggtcgggcgaggcggagttcgtcgtcttctggggccgagcccgagtccgagccctggggtcgggcgaggtggagttcgtcgtcttccggggccgagcccgagtccgagccctggggtcgggcgaggcggagttcgtcgtcttccgggaccgagcccgagtccgagccctagggttgggcgaggcggagttcgtcgtcttccggggccgagcccgagtccgagccctggggtcgggcgaggcggagttcgtcatcttccgggaccgagcccgagtcagagccctggggtcgggcgaggtggagtttcctatggcgcccgaggccggacttggctgctgtcagcctcactctgtcgagtggcacagcagtcagagcgatgcaggcggcgctgtcttcttgtcaggccggtcagtggagcggcgaagtgactgcggtcactttcggctctgtcgactgaagggcgcaggacatgataagatgttaggccatccttgcattaaatgctcctgcgattcggtcggttggtgtggcgatctggccaaggttgcttcttggcgaagactgggcctcgggcgagccgaaggtgtgtatgtcgcttga

SEQ ID NO: 6967 - DNA, 327 bp, Zea mays
  Peptide Sequence Number=SeqID_48746
atggcttcaggttcccgaggtgcggggattcttatagtgcctagggacgaggccgaggtggggatttcggtcaatggctgcaacggccacggaaagcacgacgcaggtggggtgctagaatccagggcgatgggtcggcattccgttgcgacggcggcattggggaaaggtgaacctgacgagtggggctcacccgacagtgactcgaggaagaagatggctgacagtggcggcccaccagtcaacgaacgaatcggcgcttggaggaaggctgacgaccgggcccgtgcgtcagcgagagctgcaggaatctattttaggatttaa

SEQ ID NO: 6968 - DNA, 1170 bp, Zea mays
  Peptide Sequence Number=SeqID_48747
atggacatggacagggacagcgtggagtgcctctccctcccagacgctgccatggacgtggacaacgtcgacggccacccgcaccacggccatctcggtctcccgctccaccccgcccacctcccatcctctggtgccgggcgcgcgttccccaaggtgaatgccgggggcggcggagcgggcccggctgtagcgggagcggcgggcgcagcaggagcaggcggagggccgccggcgaccagcgtgcacgagctgctcgagtgccccgtctgcactaactccatgttcccgcccatccatcagttatctccattgagtccagtggtcaagaaatatgctgagctaatgaaagggctctcctgtgaaaatttgaagaaaaaggcagatgaaatcggacgcctggtgttgctgcctgccgcctgggccaggcaagaatgtgccgccaccatccaaacacgtccagagtctactgggcaggctgggagtgtcaaaatggacatactttgtgttcgacatgcaaggccagggtgcacaaccggtgccctacatgcagacaagagcttggtgatatcaggttgcccagagatcttcccgtactacagcaagataaagcatgaagcacagtgcagcttcaggccatataactgcccctatgctggctctgaatgtgctgtggctggtgatattccattccttgttgcacatttgagggatgatcacaaagttgatatgcacagtggctgcacgttcaaccatagatacgtcaaatccaacccgcgagaggttgaaaatgccacctggatgctaacagtattccattgttttgggcagtacttctgcctgcacttcgaggcattccagctcggaatggctccagtctatatggctttcctccgattcatgggtgatgagaatgaagcaaggaactatacatatagcctagaggttggtggtaatgggaggaaaatggtatgggaaggtactcctagaagcatccgtgacagccaccgcaaggtccgtgacagccatgatggcctcatcatccagaggaatatggcgctgttcttctctggtggtgacaggaaggagctgaagctgagggtgactgggcggatctggaaagagcagacgaaccccgatggagcctgcattcctaacctttgcagctga

SEQ ID NO: 6969 - DNA, 930 bp, Zea mays
  Peptide Sequence Number=SeqID_48748
atggcggagaacaccggcgcgcggggcgccaaggaggcagtggtgacgtccggcaagcgcgtcgccctcgggaacctcactaacgtcttccgcggcagctgggggtccggcgcggcgaattctgcgtccgatgcgaaattgagttctaccaaaccagatgatgttaagaaaggatcctatgcttgcctgcgcaatgtgaacacggaacggggttctagcagaaggctggcctctgaacagtttgatcaggcagtatcacttcttcagaagaacacatctcttccttctgtgccagacgttgtatcaacaggttgcagctcacccggcctgtctcaggattgctcggtctccatggaggatgctatgtcaacatgcaactcaacagaaagctctgatgttgagtacctcaataataatgacgacccctcaatgacatcttcttcgcattggtgggccagtgatagacctcatttctctgatagtatggatgttgcagaattcaactggaggaaacatagtcctaatcattacacctataaggatccacgactttctacaactcttgcctgtgaaatttacgagagcttgcgagaggctgagactaggaaaatgcctccaacaaactttttggaaaccactcagacagatatgagcaaaaccatgagggcaatattaatagactggcttgtagaagtcacagaagaatatcgtcttgttcctgaaaccttatacctcactgtcaattacattgaccgttatctttctgtcaaagagatcagtcggcacagactgcaattagttggtgttgcttgcttgcttatagctgcatacatgggggtggaacaagaaaacctaaagggcaatgaaggagaagaaagaatgctaccatatccgtatcatggcaagagtgtagacatcatagagaagtag

SEQ ID NO: 6970 - DNA, 1593 bp, Zea mays
  Peptide Sequence Number=SeqID_48749
atggacttcagccctcaaagaaagagcgccgaacgcaaccgcggcagcttcgaacacgatgacagtgatgatgacatcagagctgaatccaccgcctctaataagccatctgcgcattcgcacgacagcaccaaatccaagcccaagacgagccatggcggttcaacccgaagtagctccgaaccgacggcgggcaacaataatgctgacgccaccagcttggacagcggcggggcgaggaggagcaacagcatggagagcagcagcaccgcctcgggcaccacgccggccaacgtccggcggcacaccggcggcgacagccggtgggacgccatccagctggccaccacgtcccaggacgcgccgctgaacctggcccacttccggctgctcaagcgcctgggctacggcgacatcggcagcgtgtacctggcggagctccgcgcctcgcgggccttcttcgccatgaaggtgatggacaaggcgtccatcgtcagccggaacaaggtggcccgcgcgcagacggagcgcgagatcctcggcctcctcgaccaccccttcctccccacgctctacacgcacttcgagacggacaagttctactgcctcgtcatggagtactgcagcggcggcaacctccactcgctccgccagaagcagcccggcaagcacttctccgagcccgccgccaggttctacgtcgccgaggtgctgctggccatggagtacctgcacatgctggggatcgtgtacagggacctcaagccggagaacgtgctggtccgggaggacggccacatcatgctctcggacttcgacctgtcgctgcgctgctccgtgtgcccgacgctggtcaagtcgtcgtcgtcggtgcactccaccgggaccggcagaggggtggacgtcgcggacggcgacgtcatcaccgccaaccaggggtgcatccagccgtcgtcattcttcccgcgcatcctgccccggcgcacccggaagccgtccaagagcgatctggggctcagcggcccgatcgcggtggagttcaacgcggagccgacggacgtgcggtccatgtcgttcgtcggcacgcacgagtacctggcgccggagatcatccgcggcgagggccacggcagcgcggtggactggtggacgctgggcatcttcctctacgagctcctgcacggctccacgcccttcaagggcgccggcaaccgcgccacgctgtgcaacgtcatcgagcagccgctgcgcttcccctcgtccgacggcgcgcccggggccccggcggtcagctccgtcgccagggacctcatccgcggcctgctcgtcaaggacccacagaagaggatcgccttcaccaggggcgccacggagatcaagcagcacccgttcttcgagggtgtcaactgggcgctggtcaggagcatgaccccgccgttggtgccggaccccgtggacttcctgcagtacggagctgccaaggagaagaaggcctccgacagcagtacaacggcggccgtcgaggcggcgccggctggtcccgtcggaagccaaaactccggcgagtcttacacggatttcgagtatttctag

SEQ ID NO: 6971 - DNA, 1341 bp, Zea mays
  Peptide Sequence Number=SeqID_48750
atggtggatggaaatgaggaagaagtatggatggcaatgggtcaggttttagacgggtggagcaaaaacccgcccatgatcgcacctgtgatgcccgtgccagaggacgtgcgggtgcgggctgtgcaccggaacagggcccctaaatatttagggcctccaaatatcagacgtacggccagtgatctcggccagcgatgcttgatcgtacggccagaattaccacaccacgctgcggtgaggactgaggacttccccgcgcgccactgctccgcccgcgtccgcgtctatacaaaggctgtcgcgctcggcactcttgctgtcgcgctctgtgcacagacgaccttcttcccatcccttccctctgctagtctgcttcgttcctcggccatggtggtcctcgccaagggtgagctcgagcagatcgccctcccggctgcagagccgcccccggccgacgtgcggtcggtggacctgtccgccccggcgggccccgcgcgcgaggccgcggcgcgcgcgctggtggcggcgtgcgaggagcacgggttcttccgggtgacgggccacggcgtgccggccagactcgtgcgcgccgcggaggccgcggcggccgggttcttcgcgcggccgcagggcgagaaggaggaggagggccccacgctcgggtacggaagcaagcgcatcggcggcaacggcgacctcggctgggtcgagtacctcctgctcggtggcacacccgccgccgcgccttcctcggcattattgccctgcgccgccgccccgtcgccgtccgcgccggccgggccgttacgggaccttctggacgagtacacggtggcggtgcggcggatggcgtgcgcggtgctggagctgatggcggaggggctgggcatcgccggcggcgccggggacgcggtgctggcgcggctggtggcgcgcgcggacagcgactgcatgctgcgggtgaaccactacccgccgcggccggcgctcaaccccagcctcacggggttcggcgagcacaccgacccgcagatcatctcggtgctccgcgccaacggcacctccggcctggagatcgcgctgcgggacggcgcctgggcctccgtcccgcccgacggggacgccttcttcgtcaacgtcggcgacaccctgcaggtgttgacgaacgggaggttcaggagcgtgaggcacagggtggtggtgaacagcgagaagtcccggctcctgggcgacggcggccggagccggtaccgggacttcacctggagcgagttcaagaccagcgggtgcaggaccaggctcgcggaagaccgcctgtcccgcttcgagaagaagtag

SEQ ID NO: 6972 - DNA, 147 bp, Zea mays
  Peptide Sequence Number=SeqID_48751
atggtggcacgcaggcacgacatccccggcggatcgggtgtgctgccctcggccagcgcgggggagtcctggttatatacatgtgaaggggtgtatcccaagggattcctcttggttggtcaaccacaaccaggccaggaagcttaa

SEQ ID NO: 6973 - DNA, 282 bp, Zea mays
  Peptide Sequence Number=SeqID_48752
atgcagatcggatgtggtgtccagcgtgtttctctgtccggggatccttctcactgggacgagaacgggcgacggtgttctctgcagagggacgtcaatggccccagcatcagcgtcaagggcgtctcccagttcgccatgtacatggtcgaggctaggacgctgcagctgttgcgccccgacgagggcgtggacctcacgcttaccatattatggaatggccaaggacgcttacaattatggaacatgcggtttccgtttgatgaatatttgctctgctga

SEQ ID NO: 6974 - DNA, 339 bp, Zea mays
  Peptide Sequence Number=SeqID_48753
atgtcatttctcctcttgagcgcttcatcagactcttttacccttggtaaaatcacgacgtcagccttatcctcttctcaccgtgaaatcgcgtctctctgtcgacgtcgtgcagagtactccctccctcgccacagccgccgcccaggccttgccaccatccaggacgcgccgccgccagagcccatccagaccacgccggcccacttcgtgctgccgcacaaggcggcggaggaaatggagatcggcgggtacctgatcccgaaggccacaacggtgaacttcatggtgggcgagatggtccgggacgagcaggagtgggactgtgggagaacctga

SEQ ID NO: 6975 - DNA, 729 bp, Zea mays
  Peptide Sequence Number=SeqID_48754
atgaccattgtcacccaaccctatatgtttagggttgctgttgtcaccggagggaacaaagggattgggctggaagtatgcaggcagctggcctccaggggtgtcgcggtgatcctaacggcgagggacgagaaaaagggaacagaagcagtggctacgcttcgtggatccggactaccggatgtacagtttcaccgcctggatgtcagtaatccaactggcactgcccgtcttgctgaatttatcaaggagaagtttggcaggctagatatcctggcactaatcctcagatggaatggaactacaattttcgttatccaattcttcgtctttgttttccagcatttcagtggcgaagatcttaagcaagagctaaacgatattgacaacctgacggttgagaggctagatgagatgccggagttgttcctgaaagactacaggagtgggcagctgaaatctcatgggtggcctgccgactctgagtacctggcctacaaggtatccaaggctctgaccaatggctacaccaggatactggcgaaggcgcacccagagttgcgcatcaactgcgtgcaccctggcttctgcaagaccgacatcaactttgacaccggcgaatacaccgcggaagacggtgccagttgcattgttgcggtggcgctattgccggaaggaggcccaactggcgtgttcttcttccgcagagaagaagtaccctttgtgtaa

SEQ ID NO: 6976 - DNA, 903 bp, Zea mays
  Peptide Sequence Number=SeqID_48755
atgtcgacgagctcgcagtgcacgctcatggaaggcgctatctcccttcctcgcaacacaagggtacatcttactcaaaactacaataacacaaggctcagtgccgttgtggtcggtgctttagcagaattgccgtggttaccggcgcgaacagaggcccgattcgggaaatttggatatcctggtaagtcgtcgtctttccggcgtctcgaaagcttgacggtcaataatgctgcggttgctggggtcgtgtactctcaagatcatttggatgatctagaaccgagagaggaaaagttaaagttagctgcatttaattgctcgttcaatctcatggatagggatcagaggcttgaatggctgtggaggaactgccgggagacctaccatgctgcaaaggaatgcctgcagacaaactactacggcacaaagcatgtgatcgaagccttgctgcctctgctgaaagcctccgatgatggaagaatcgtcaatatatcctccgactttgggttgttaaggcatttcagaaacgaggatctgaagcaagtgctgaacgacgtcggcaacctcaccgaggagcggctggacgaactgctggaccagttcctgagagacttcaaggtcggcacggcagaagcgcgcgggtggccagtggcgttcgcggcgtacaaggtgagcaaggcggccgtgaacgcgtactcgaggatgctggcggcgaagcagcccgcgctgcgcgttaactgcgcgcatcccggctacgtcaagactgacataaccttacactcggggctcctggcgccggaggagggcgcgagtaatgtggtgaaggtggcgctgctgccggacggcggggtgaccggcgccttctttgaggagggcaatgagctggcctccttcgtgtga

SEQ ID NO: 6977 - DNA, 723 bp, Zea mays
  Peptide Sequence Number=SeqID_48756
atgggcggggcggggccggcgagggacgagtcggggcaggtgccggggtgggggcagttggcagcggccatggccgcggcgagcagggcgacggcggtgggcaggacggcggcggtgctctgggcgcgatggacaagttggaaatggaacggcgcggtccggtcccacgtgttaaaatcacttatgtccgtcggaacggcttccatagcgctgaagcgaggcgtgccgcattgggttgttcgagagctcctagtgttgccctactacatgatggagggcgatctccccacgcccgcgaacgctagggttgttgccgtggtcaccggcggcaacaaggggatcgggctggaggtgtgccggcagctggcctgcagcggcgtcaccgtcgtcttgacagccagggacgacgcgaggggcgcggcggccgtggagaacctcagaggcctggggctctccgatgtcctcttccaccgactggacgttaccgacgctccgagcatcgctcgactcgctggtttcctcgagacccgtttcgggaagctagacatcctggtaaataatgccgcgattggcggggttgagtatgttcatgaccaagattgtggctcagtaacgagcgaggaaaaggcaaagagagattaccattggagtaatattctcccaaaccaaatgcacccaccagatatcagccttgttgaagaatttgtgcaggtttttggttag

SEQ ID NO: 6978 - DNA, 441 bp, Zea mays
  Peptide Sequence Number=SeqID_48757
atgttgccggggatcggtgactccgccatcgttctacccgcagagaccaccccgagaagctcgttgcgactcggcgggcattgcgaggaaagggtctgcggcggcacgggtttggcgggtgcggtattgctcgccggtgctaggacctcgctaaccgtaggatctggatccaaggatccgcacggcataccggttcgtgaaggcattgaattaatctgtatagcagggcattctagcatgtaccaccataagatggtcaataccaggaagggaggcggaattgatctacctgccaacccacacaactggaagattattagacaacaacaagaagagatggatcctccgaatcctccaccggctggggcagatccagtggttgtagcgcagatgcagatgctgcaacagatggcgaatactatgacggatacgcaagcttag

SEQ ID NO: 6979 - DNA, 1044 bp, Zea mays
  Peptide Sequence Number=SeqID_48758
atggcaatgccacgcggattgaatgcccgctcagagctccgcgcgttactgaggccgctgtgccacacgtgcttggaaggcaccatcaagaagcgtcgttcggtcagggataagccttcatggcaaggtcacttgtatgtcatgggtgataaccaatggagcagtggtgtagtgattttgaggagccattcgctcgaagccttggatcatcaacgtcgagatttccacccaatcaagttatcctacctcacagaagatccatctttgccctctatcaatagaatccagcgagcactggacaatactcatggaagcgggaccgactggattccgttgcccaaagattacctccacctcctctggagaaggcgaagggctagagcggggcgtgccaccgttcgatgccgggtccggagcaacaatactgacagggtcctcgcccttaagaccccggtggtcttcgtgttgctcgcaccggtcccaatgctagaggtgggcatggatcctccaaccggagccttatctgacgccgtgggaccccctgccactggaagagctgctgttaggtcccttgccggtgcacgagtacccaggggcactacattggtcgtagccgggcatggtcctccagcaacacccccgatggacgacccttgctgcttggggctagacccaccagtagggctggcacccggcgagggacaatcatccctaggcggcagctgtggtggggtcgggaaggcggctgatgcctgcgtgccatgggccagggagctggcatgtgcgctcgcactcacagtcttccggtgctctttggctggctccaaagtgaacactccatcggcacggagcatcctgcgtcgcctttcctcttccaattccccggggctgcctgggatggaagtgttgctcgcagaccccttgcccttgcctagggggctaggggcacgacgggggtggcgctggaggccacaccaccgtgctaggaacccccaaccagcacaccggggatctggatcccttggtgagggtccaggccactag

SEQ ID NO: 6980 - DNA, 171 bp, Zea mays
  Peptide Sequence Number=SeqID_48759
atggtggctgccaccccgggcccacgtgccagcgcgcaggtgaccagctgggccgcgcgcggagaaaagcgggaggtgggccgcgcggggaaggaagtggagtgggccgcgagaagcaattttgggtcttacacgactgccatcgggctcaagaacgagagcgggaactag

SEQ ID NO: 6981 - DNA, 414 bp, Zea mays
  Peptide Sequence Number=SeqID_48760
atggaggctacttatgcgcagcagagggcgtccgaggaggtagggaggtcgttgagccggctcggccagctccgaggtcttgcagcggccgttgcgcgtggtttccatggaggcggccgcggcacaggggataaggcccaaccacccccgatggcgacgagatggcaacagctcatgcgagttcttctccctcccctgcggaccgaaatgggtcagcgcccgtggaggtcacgcggatttcgcgggaggttgaggaagcttctgacatggttgccccaccaagtcagcgaacgaccgagcacgcgcacgacctgcggttctgagcggctgcggtaccgggcccgcatgtcagtctccatccacggagtaggcaagcgcgagagggtggtgatctgtgggccgattgcgcagtag

SEQ ID NO: 6982 - DNA, 540 bp, Zea mays
  Peptide Sequence Number=SeqID_48761
atgctcgacgcgccccgcccgaccgcccctcgccgcgccgccacccctcgccgcgcctccgccccccaccgcgcccgcgcccctcacccctcgccgcgcacgcgcccctcacccctcgccgcgcacgcgcccctcgccgcgcccgtgccccccgccacacctgcccgcccgccgtctgccgcaccctcgccccccgccgcgccctcgcctgcttgccgttgcaccctccacgcccaccgtgcccctcgcccgcccccgccgtgcccctcgccctcgctcgcgcccctcgccgtgcccctcgccctcgctcgcgcccctcgccgtgcccccgccaccaccgccgcgcgccaccaccgccgctggaggccgcctcctcgcgcgccgccaccgctgcccagccacgccacgcgtaccatcatcgcccccacacgagagaagatacttgtcttcctagccgctgcgggtctgcctacaccgcgtcgcgtcgccactgcactgacccgccacagccccactagcctgactccaccgccaccctag

SEQ ID NO: 6983 - DNA, 669 bp, Zea mays
  Peptide Sequence Number=SeqID_48762
atggcgctaagcgaggagagggagggcgcagaaaaagctcacgcagaggcccaggctgcccacactgaggctgacgccgcgcgtgctgaggccagccttgccctcaagcgcgccgccgacgcggagtcagggctgaagagcctacgcagctacatcgagaagacgaaggcctccactcgcactggggttggacgggcgcacacactattcgtggatgcgtaccacgagctcggtgcgcggaccaacttttttggtaggtctggcaaggaggtgggtcttcgctttctcgagtggctgcaggaggagctggagtcgctcccgtctatcgcgacgggcctcatgtcctacgcgttgcttgttacctgcgagggggcggcgaatgccttgtcccgtgagggatgcaagtatttcgaagtcttcgactgggcaaccgaggacttcgaccgtggaatcctccaggtcgaagacaagatgatgaatgaagaagaagtcgaggacttcgccaatcttgacagctcgatgacccagacagatgacgcggaggcgggagatgaagggcactcagcgcctcaagctggccctagtgaagaccatgcagcagcgtctgctccggcgcaggtcagtttctgtgcaggctccgacatccgggcctgcgcgagcaacccctga

SEQ ID NO: 6984 - DNA, 1581 bp, Zea mays
  Peptide Sequence Number=SeqID_48763
atggcgacgcagcaaccgcttccccccgccgacggcgtcggcgataacaccgtcgaccgcgacgtctggctggcctgcgccgcaccgttttcccgcatccccaccgtcggcgacgaggtctactacttccccgacggccacatcgagcagcaccagcacctgtccgcggcgccgctccctgcgcaggaccgcttccactgcaccgtcaccgatgtgagcctcggcgtggacgacaagacggacgaggtgttcgccaaaatctccctcagaccacggccaggccgcgccgccgctcctcctccgggccccggcggcagcagcaacagccccgcgcccgcccccggcccgccacagaagctcagatacttcactaaggatctctcgcaaaccgacgtctacgcaaagttccgcatcccgctggagaacgagcacgtcttacccatacccaaggtcgaaacggacggtgccgaccagcagcgcgtgcagcgccaggacgtcgtcatgcgcgacaccaggggcaaatcgtggaggttctccgaaacctaccgcgtcaatccgagcaaggaacactcgctcggaaccgggtggttggatttcgccaaggccaagcggctcgccgcgggggacaagatcgtcttcatgcgccgccccaacggcgacctcatcgtcggcgtgcggcgcctccacgtgcccaggtaccggccgttcgacttccaaggcccggcccaggacgtcatggaggccgtacgcctcgccgccgcgggaaggcccttcacagtcacctacttcccgagacaggccgccgtggagttcatcgtcccgcgcagcgaggtggatgacgcgctcgccaccagctgggaaccaggcgcagtggtgcgcatggaggtgatggaggacgagaacaggcagcacaccgtgtgggtccacggccgcgtcaatgcgatccgccaaaacatctggcgaatgctcgaggttttgaaattatcgtctcggtggcctgccaaccctagacaaggcctaggacctctcctccccaacggggtccctcccaggagtgagatccaggcgccgccggcgaactccgccgcccctgcgcacgctcggaccatccggcctccaggcgtggaccgtccggcccatcaagcagggaaccagcctctacgccaggtcgcggaccacctatcagatcggccctcaatggtcgatttaaaagatagctctgacatttccactggtaatatcatagagccaacttgggaaaccttgttggttgacaaacagctccagttcgaggagcacaagaagcagctgatccaggaagcaaaagcaaaattcctggccaacttcaaggtggacaggaacaacaaagttgttcgacaacgggtgacagatctggctgtgctccgacctactacagctacccccaaggacgcgaccaaggagagcgttggggcgggcgcgaggaagatcggaggccaggagcacaacgatcggcaagctgggcgagctttgatagggatagccgacgcggtgaccatggctagccgagtaaaggacatgggcgcgcaggagttgacataa

SEQ ID NO: 6985 - DNA, 565 bp, Zea mays
  Peptide Sequence Number=SeqID_48764
cgagtcgaggcacgacgagcccatcaccaggacccgcgctctccctctcccgcgcgcgctcgcgccccggcgagccccgccccgccgtgaccccggtggctttccccgcgccccggcgagccccacccccgcgtcgcccctcacggccgcgccctgcttcccccccgacgagccctccctctccctccccacgtctggcctcggccccggcgagccccgcctcggtcgtgcctgccccggcaccggcgagccgcgccgcccctggcctccccgcgcccggcgagcccgtccccggcccctcgcccgcggccgcctgcgcgcccgcgcccggcaccggcggccgtgcccctgcccgcgcgccctctcccggccgtgccctggtggcctcgccctcgccgcgtgccccggcggccgtgcctggccccgcgccctggtccccgctctcggccgcacgctctcggtcgtggcaatgagattgatggttcttggtaatgactctggtaatggagaagatgaagttgtggaaggagatcgccaggagttccaagattacaatgagttctag

SEQ ID NO: 6986 - DNA, 327 bp, Zea mays
  Peptide Sequence Number=SeqID_48765
atggtgtcgtggaagaagaagcgcggcggcggcggggagtcgcagtcgcccatccggggcgcggccgagcaggagaaggtcccgagagggcacgtcccgatgctggccgccggcgaggacgacgacgcggtagacgtcggcgagcgggtgctggggccggtgacgcttctcagcgacccttccgtcgcggagctgctggacatggcggcgcagcggtacgggtacggccagccgggcgtgctgcgggtgccctgcgacgcgggccgcttccgccaggtcctccacggcgccatgcaccgacgcggcatcatcagctcgtcagcctga

SEQ ID NO: 6987 - DNA, 618 bp, Zea mays
  Peptide Sequence Number=SeqID_48766
atgtcgccagcacagaaaaagtttgcccagttcctgttcctgtacacaccgaaacgcgtatttgattttgaggaacctggaatcaatgacaaattgcttagaagtagcataggtcagcagcagctccactgctccagcgcgcggcgactcggcgaggtcagcactcagcaaagctccagcgtccagccatccagaagcagaaggcagaagcagccccggcgcgtggcgcgtccagtactccagaagcagccccggcgcgtggcgcgtccagaactccagaagcagaagcagtgcgggcggccgggcgcgtccactggtgtcagctctcagcagaagcagcgcgggcgcggctgggctgctccgctgctgggatttgcggtggccggccgccggtgggacctgtgcgcggctgggctgctgggatttacggtgtcggtgggcagcgcctgcgagcctgcgggcaagactgctgggatttacggctggcggctgggctgcgggcaagattgcgggcaagactggtcggtggccggtgggcggctgggcgcctgggctgctgagatttacggctggcggctgctccgctgctgggacctgggaaggggaatcagggattag

SEQ ID NO: 6988 - DNA, 906 bp, Zea mays
  Peptide Sequence Number=SeqID_48767
atggcggccgaggcgctggggttcatggcgcggggagccaccggcgggagggcggcggagctcgtcaccagggacttcctcggcgggtgcgccgccgccgaagacgacgccagggacgcgtccgccaggaatgacgccgtgcccgcgagggtgcaccagcagaagcacgcgtgcccggcggcgccgagggacctgaacctgttcccggtagccgccaccacgaagccctgcgccgcgacggcggcagcggcagcggcaccagcggtcgcgggcggcgccacggctacgtaccacagcgtgtgcacgatcgagaaggtgaagacggccctggagcggttcgagcgcggcaggcagcaccagtccccgcacccgcaccagcagcagcagcacagcggcgcgggcgcgtccccgtcgtcgtcttccgtgaccacgtcctccgtgaagcggccgcggcggcggcggcggcggcggcggcggcgtggagcagggcgacggctgcgactcgccctccggcggcgggatggtggccgcggcgtgccccaggtgcttcctaaccagacaatcccgcagccacaattggtcaaagctgctatacttgtcgatctagcatgttcgagctccgtggtggtggtggtggtggagatgtttgcaaattgtaagcttggatgtgccgccgccgccgccgccgccgccgccgtcccatgggcgcatggcctagtgtccctagtcgccgtcggtcgcagcggtgccaaggcccaagcgcttggcgttcgtgttctctcgtctcctgcggccggccgttttaatgccaagggcagggagttgacgtcgcgggcgcagaggcaggcacgtcgtcggagcagatcactcctccggccttgtgaccggcgtgaatgcgagttttaa

SEQ ID NO: 6989 - DNA, 141 bp, Zea mays
  Peptide Sequence Number=SeqID_48768
atggcctctaatgaaagttggctgcgagctgcagttcctgttgggaggacgaagagtgtatacttaagcatgggtaggtcatggttgaaaggagagcagtatctgtcttctttgctgctttctcaaaaagagatcgtataa

SEQ ID NO: 6990 - DNA, 333 bp, Zea mays
  Peptide Sequence Number=SeqID_48769
atggtgtcgtggaagaggaagcgcggcggcggcggtggcggggaggagccgcccgtccggggcgcggccgaggaggagaaggtcccgagagggcacgttccgatgctggccgccggcggggacgacgacgacggggtagacgacgtcggcgagcgggtgctggtgccggtgacgcttctcaccgacccttccgtcgcggagctgcttgacatggcggcgcagcggtacgggtacggccagccgggcgtgctgcgggtgccctgcgacgcgggccgcttccgccaggtcctagacatcgccatgcacagacgcggcgtcagctcgtcagcctga

SEQ ID NO: 6991 - DNA, 351 bp, Zea mays
  Peptide Sequence Number=SeqID_48770
atggggaggaaggtgacgcagacggcgccaccgccgccgccattgtccaggctctccaagctggagtactccctttctttctccgtccccttgcacaaggtggagggacatgccatccattaccacattgcaaatgatttgggcaatgtcaacgacgacatagtgtggcactccttcacattcaatggtagcaacttggaggagctcgcccacgggttgcgggaggagactggtctggaggacatcattatacgcacacacaaccctatcaatgggcaaattcacaagcaatggaaaaatgcgggatcttcatgtgggtccgaacttggctattgctattgccttacataa

SEQ ID NO: 6992 - DNA, 435 bp, Zea mays
  Peptide Sequence Number=SeqID_48771
atgatggacatcgtcggtcggagttggtgcagcgtcggtggcagcgcgagtacgtcggagccgtgggtaggagatggtgcatcgtgggaggggcggctaggagaaggtgggcgggcgaggcgggggcctagatgctttcagggtacaggcgacggctgtggccggggagaaggtgcggcgacggggcggtgggcaagacgggggcgactaggagaaggtgcgacgacgggtaccgacggcggctggggcaggggcgagtgcgggcgacgactacgatgggggagaactggcggcggcggcggcggtgggctagacgggcggcggctgcggtgggcaagacgggccgaggcggctgcgaggaagaagatgggcggcggcagcggtagaaagccagaagaaatgaagattgaacgctcggacgcgtcctataattag

SEQ ID NO: 6993 - DNA, 813 bp, Zea mays
  Peptide Sequence Number=SeqID_48772
atggcgcctcctgttgacgtggtcggtctgtgccctgggttgggcgatgtggaggctcctccgaggtcgtggtcgagtctgtcttccgaggccgaggtcaagtccgagcccccgggtcgggcgaggcggagaccgttggctgaggccagagctgagtccgagccctggtgtcgggcgaagcggagtttgtcgttcttcggggctgagcccgagtccgtgccctggggtcgggcggagcggagtttgtcgtcttccggggctgagcccgagtccgatccctggggtcgggcggagcggagttcgccgtcttctggggatgagcccgagtccgagccctggggtcgggcggagcggagttcgtcgtcttccgggactgagcccgagttcgagccctggggtcgggcggagcggagttcgccgtcttccggggctgagcccgagtccgagccctggggtcgggcggagcggagttcgccgtcttccggggctgagcccgagtccgagccctggggttgggcggagcggagttcgccgtcttccggggctaagcccgagtccgagccctggggtcgggcagagcggagttcgtcgtcttccggggctgagcccgagtccgagccatggggtggggcggagcggagtttcccatggcgcctagggccgggcttggccgctgtcagcctcactctgttgagcggcacagcagtcagagcggcgcagacggtgctgtccttttgtcagaccggtcagtggagtggcgaagtgactgcggtcacttcggctctgtcgactggagggcgtgcgtcaggataa

SEQ ID NO: 6994 - DNA, 252 bp, Zea mays
  Peptide Sequence Number=SeqID_48773
atggccccctcctcggtgtcactcggccccagattcaacatgctcgaggcaagggaacgacgacgattatggcgcggggatgatgaaaaaaaagggttttgggagaagaaaggaatgcggaaattcccgcaccggacgagagattatacgcgaataaaaagattaggaactattggagatgctctaaggtctaggtctacagctggctatggagatcttatggtcaaccatcgagggaggggatggatttag

SEQ ID NO: 6995 - DNA, 315 bp, Zea mays
  Peptide Sequence Number=SeqID_48774
atggagctcaagacgctcgtcacctcctctagaagatgggcgtcctcgccaagatccggttcaagactgttcctggcacgacaagagcagcaacaacaggagccggtgctcgggctcgcccaagccaggcgccgctcgcccgacgcccgcctaaccaatcagccggctagagaatccctggagctcttactagcactcatggtcatggacgagattttgatgccctttgctgcggtgcagttccattccatgcaggtgcagagcagcggattgctgggtgcctgctgcctgggcaagcaagcaggccagcagtag

SEQ ID NO: 6996 - DNA, 909 bp, Zea mays
  Peptide Sequence Number=SeqID_48775
atggccgcctccgcgctcctcctctcgccgcggctcgtgtctttcccgcctcacccgagcctcgccccactcttcaccaagagaccaccgccctaccccctcggcggcgccggcgcgaggctccgggccgtcggggacgggcccggcgcggggctgccacccgagcaggccacggtctacgacggcgcctacggtccctggaccctggaggactccgacgtgcgcgaggtcctgctgtaccggtcggggctggtgacggctgcggcgtccttcgtggcggcgtcctccgcggcgttcctgccggaagggaaccccgccgcctccgccgtcaccggcgccgccgacctcctgtacgccgccggcgccgcggggctggggctgtcgctggtcctcatccacatctacgtcaccccgataaagcgcttcctccaggcgctgtgggcggccggggcgctcggctccgtcgggacctacctcgtcgccgcccgcccgctggatgagggcctcgtgcagtacgtgctggaccaccccgccgcgctgtggttcgtcggccccacgttcgccgcgctcactggcctcgtcttcaaggaaggtatgcggatgctgctgcttgttcaaggaaggaaagatgttggcagtaactgcatccattccacccacaggtctctgctatgggaaactggaagctggcatcttgactctggtttaatggataacagcacaaaggcaggtcttttaggactgtggatgcttcttttcacaatcttcgccgctagaaaattccagcagcccatcaaggatgacgtcggagacaaatctgttttcatgttcaacgctctccctgaagaggaaaagaaggcttggatccagaaactcgagaggcaaaaggggcaagagttgtttgagtag

SEQ ID NO: 6997 - DNA, 2262 bp, Zea mays
  Peptide Sequence Number=SeqID_48776
atggagtcatctgatgctatcgttcgcaaggtgctcgatgcaatgcacctgatggaagtccgccttaccgagaagattaccggtcgttgtgacatcgttgagcgtcgcatggacgcacggtgcgatgagctccactgccgcttcacagcgcgcggctacaccatccagcaggaagtcgatgcggtcatctatgacgagtcaagcgaccacgacggctacggcgcggcgcccttcgatatcaacggctctggcgagaagtccatcttcgacgatggccccagcttcgacgaggaacattgtaccttcagcgccgacaacgcgcacttcaacgacgtgcttcgcgcccacttgtttgattcgttcctcccgacgacgacgacggtgaaggagacgctgcgtgcgtcgttcatgcgtgaggaggacaagcgccccaaggtgccacacgaccatggatgcagccaaggcggtgcagaggctggccgacctggaggcgctgcggcgccacaacaccgaggtgcgcgtgtgccgggaggccgacgtgaaggtgcgtgctctggacgccatttccagccacgactttcggtaccgcaagtaccacatcaacgagatcgagatggccacaaagcgcttctccgacgacctccagttcggcgagggcgaatacgaccccgtctactgcgcctccatgggccacacccctatcgccatcaaggggctccggcccgacgcgcgctcgccaagcgcatctggcgcaacaccacaacgtacgactactaccaccagatcttcgtcctagatcgtgagccgcccaacggcaagtccgacgagccactgcgagtgaacaacttattccagcacatcaagggcatgctatccggcaagagagccgccgtagccgagaagctcgggctcaccgacagccagtctgcatctaccttgattgatgctcaagtggtgtttgatgaaatgcagcaaagtgatacctcggttggcatcgcacatgatgccttcaacacgttcttcagtgagattggtgttaacgagcatgtgacctggatcatcttcatcgctgtcagcttcacggcaagtgcggtctgggcacgggccgcgaggcgcctggacggtgttgtggtggcggacaacagaaaactacgacaagcatctgtggacggccggaagatgcactgctacgagctgctgaccgatgaggcattggagtcttggagaacgcgcagctcaggacaacatccaaggaaagagtacctggagagccctagggccgatctgcggtgcatggccgaaccaactatcgctagcatcagaaatgctcaggctccccttttcaccactatgtacgagcttgagtatgagagagaagaggatgtcatgttcagcttcaacacgatattctatgaaaatggccaacaatctgacgtctacaacttccatgtagtgcccattgtttcagataccatcaatggaataattgggactataattacttatggtcagtctggggcaagcaagacgtatagcatggatgaaccaagcattttgcatcacaatgaacagaaaactggactagttcaacgagttgtggatgagctttttgtatgtttgggatcatcagcgagcacgtggattatgaagttgccaatggtggagatatatttgcaaaaagtgaggaaccttcttgacttgtccaaagacaacccgcagatcaaggaaagtaaaatccaaggaatttacatctctggagcaatagagatatttatcttcaacagttcagatgtcttagagaacctttttccaggaattgacaacagcgctgttgggaaaacacatatgaacttggctagcagtagaaataactgcttatgcattttctcagtacaatatgaatccacttcagatgagagggtaccatcagggacgattatacttattgatttggatggttctgagaaagttgggacaactggggctgaaggacggggtcttgataaggcgaagacaatcaacattgtcattgactcactaagctttgtttcagtcacaatcttccagcttgaagggattgtattgggtctaatcgccagtgctgtcagattctctgatctgggtgctgtcagcagtggccaaggcaatttttctgtctttgtttgggatcctggtgatcgcgctgtcatgttgctcgcttcaggtgttgttctagtgttgcaagagctgccacatttcagatggagggctgcagaggcgtga

SEQ ID NO: 6998 - DNA, 141 bp, Zea mays
  Peptide Sequence Number=SeqID_48777
atggatggatcaccagatcatgaacccaatggtaagttaattaattacatgggcaaggatggggtgaataagcagacacaggccacgcacatgacaattgatgcacatataaaccacagaaacccaaatccgaagcaatga

SEQ ID NO: 6999 - DNA, 513 bp, Zea mays
  Peptide Sequence Number=SeqID_48778
atggagcctggtggaaagacagctgtcggggatgtcgagtccttgctgacgtcctcttgcttccgttgggcgaggtggaggctcctccgaggtcgaggtcgagtctgtctttcgaggtcgaggttgagtccgagccctcgggtcggacgaggtggagactgtcggcttaggctagggtcgagtccgagccctggggtcgggcgaagcggagttcgtcgtccttcggggctgagcctaagtccgagccctggggtcgggcgaagcggagttcgtcgtccttcggggctgagcctgagtccgagccctggggtcggacgaggcggagaccgtcggctgaggccagggctgagtccgagccctagggtcgggcgaggtggagttcgtcgtcttccggggctgtgcccgagtccgagccctggggtcaggcggagcggagttcgccgtcttccggggctgagcccgagtgaaagggaaatgtgcccttgggccatttctaagtattttggtgattga

SEQ ID NO: 7000 - DNA, 519 bp, Zea mays
  Peptide Sequence Number=SeqID_48779
atgacggcggcggcccctattcacacagcggagcgttgccggagtacaactccccagtgctctagggccctattcacatccccgatcgatactacacggagttctggcagtggcgaacactataagaaacttcgtacctgttttccggcgaagatgagccttggtgacgccgtggggcagcacgatcgcccttgcgatgtccggcgacaaattgggctcgacacagacgatacttcccccttcccaaggtcgcgcacccgccagaacaatccggtgatgccccgggactgcgccaagggctggcaggcgtccaccgcgatgtgggcgatggcagcagcggtcgaccctcccctgtcctacactatcgggtcacggcgctcaagcgggctcggtttggattaccaaaagggaagagttccttttcaaattccaatttcaagggttcaaacagatttaaattcttggtttgtgaaagggaaatgtgcccttgggccatttctagcatattttggtgattaa

SEQ ID NO: 7001 - DNA, 1560 bp, Zea mays
  Peptide Sequence Number=SeqID_48780
atgactactgctattgccattgaagatgtcagacgagaagtcagaatattgagttctttggcaggccacattaacctagtgcaattttatgatgcttttgaggatgaagaaaatgtatatgttgttatggaattatgcaaaggaggtgaactgctggacagaattttggctagaggtggcaaatattctgagggcgatgctaaggttattattcaccaaattctaagtgttgcttcattttgtcatcttcagggtgttgttcaccgggatctgaaaccagagaattttcttttcatgtcaaaggatgagaattctgccttgaaagtcatagactttggtttgtctgactttgttaaaccagatgacagacttaatgacattgttggaagtgcatattatgttgctcctgaagttctccatcgatcttatggcacagaggctgatatgtggagcattggagtaattgcatatattttgctttgtggaagccgccctttctgggcacgaactgagtcaggaatttttcgagctgtcctaaaagcagagcctagttttgatgaaattccatggcctaccctttctgctgaggcgaaagactttgtaagaaggctactcaataaggattaccgccatccatggatccgtggcacacaggaagttaagattaatctagacatgataatctacaggcttatgagggcttacataagttcatcttctctacggaaatctgcattgagggctcttgcaaaggcactgacgacagatcaactcttctacctaagagagcagtttacattattaggtccaaacaagagtggccatatatcattgcaaaatatgaagacggccttgattaaaaattcctcgggtgcaatgaatgattctaggattcttgactttgttaactcaatatgcaatatccaatatggcatgattgattttgaagagttctctgctgcggccattagtgtatatcaaatggagggcctggagacctgggaagaacatgctcaacaagcatatgaattgtttgacaaggagggcaaccgaccaattgtgattgaagaacttgcatcggaacttggacttggcccttcgatctcacttcatgttgttctcaaagattggatcagacattcagatggaaacctcagtttcctcgggttcataaaactactgcatggagtttcttcacgcgcaatcaccaaatggaggattatatgccctccaatccactccattacctttactcccaaacaagcccttatagattggaagcagcctctcggtatttgcggaaggaagatacgaagcagcttctcggtatttgcggaaggaagtgttaagatgaggagtcacctatcttcattccacccaaacatatgggatgttgagtttgggatgcagataccaaaggctggaaatgacgactatgatttggacgaggtggctcaaatcactcacttcaactcacaagcgaccatggtattactcacctctttgtgtagggaggaatacaacatggtccacaggttgcaaagcgcaaaggaaatttag

SEQ ID NO: 7002 - DNA, 180 bp, Zea mays
  Peptide Sequence Number=SeqID_48781
atggctaagggcggcgagaggcagttcactggcctcgtcgacgtctatcggaagacgttccggttcgacggtgtcgccggcgtacatgatgcgttgttgtcgctgctcctgcatgcaaagaaggacaacaaggtggagtcgaagcagagcaagggaaatgtgcaagcacaagctgcttga

SEQ ID NO: 7003 - DNA, 138 bp, Zea mays
  Peptide Sequence Number=SeqID_48782
atggaggtgatcgaagaagagctcggacgattcgccctcaacaaaggagaagagctacaagaaatagacattgatgttgatgcttttgttgagaaccttgctatgattaaaagtcaaaatgaccacatagcaaattag

SEQ ID NO: 7004 - DNA, 375 bp, Zea mays
  Peptide Sequence Number=SeqID_48783
atgacctcctactccctcagtgcagagagatgcccatgtacaattcggcccatgaagcagggccccgcgtcccaacatttggcgcccagcgttcgtgcgacgaaaaaacaacccgcgatgccccccaagagaacaacctcaaaggctgtcgcgtccatcgacgacgcgacgaaggcagcactcctggcggagaagaaaggcaaggccctcgtggacaccgcccccaagaggccttcgaagataacgctgtcaacagcaagagacaaagctaggataaccccacccccgacagcactgtgcacacttgcagttccgagggtgcaccacaagcaccatcaccaggcttcgttcccccagagggcgaagacaccatag

SEQ ID NO: 7005 - DNA, 255 bp, Zea mays
  Peptide Sequence Number=SeqID_48784
atgtggcggtttagcgagcgtagagaggacggctgggaggatggaatggagtcgaggaagaagggtgagcgcggtgaaggaggtgactggctagtggctactggatggctcatcaccggagggaccaggagattggatctagccataagaggaatgcttggtataaataagccacttcttggtcttcgaccccctaagtcactacgagcgcccccgatcagtgcaatgggatgtggctatttatctatctcttga

SEQ ID NO: 7006 - DNA, 315 bp, Zea mays
  Peptide Sequence Number=SeqID_48785
atgggcgagttgaactacttccttgggttccaagtgaagcaactcaaggacggcaccttcatctcccaaacgatgtacactcaagatcttctcaagcgttttgggatgaaggatgccaagcccgcgaagacgccaatgggaactgacggacatgtcgacctcaacaaaggaggctggtctccggcgaactggccactctcgggaaaacttcggcggttgtcggggaccataattaggggtaccctcaagacgcctaattctcagctggtaacccccatcagcataaagctgcaaaggcctgatgggtacgattaa

SEQ ID NO: 7007 - DNA, 381 bp, Zea mays
  Peptide Sequence Number=SeqID_48786
atggcgaacgacacgaacgcgcacggggttagacgggggggggggggcgtcgtgggcggtcgtttctctgaaaaatcgcacggttggtttggagaagatgcacagcgggcgtcctatcgtgtggggccggttgacagcggcggcggcgggcgctccctgcgcggtcgcggttgcgtgcgcgcaacgcgcgctggccactgggccgcggcgctggacgcagtaggcgcgcgcgctaggaacgcggcgagcgcgctgggccgagcggccgtccgcgggtgggctgggagcgcggcgctgggctgggcgcaggcgagcgcgcgcgctgggagctgggccgcgacgcgcgcaggcccacgagggagggagctggcgcggggctag

SEQ ID NO: 7008 - DNA, 354 bp, Zea mays
  Peptide Sequence Number=SeqID_48787
atggagaaaaccgagcaggggcgccgcgatggagggacttggccggcgctggggacgacggagcagaggacgcggccaggaagcaggcgctcgcacagggagctaggagatgccgtggctggcgagctggagttgagcgcggcgagatggggcgcgcgcagggagcttgacgacggccgggcagagagaacgctgcgagctgagcgactgggcaccgagctggaggagcgccggagatgcagcttggtcgctgtgaagaagaagggtgcggcctccaggaaatatcgcccgcggcgcctgggaaaaatctgccgcggaagaagattaaggagggagagagagagcggtgaatag

SEQ ID NO: 7009 - DNA, 453 bp, Zea mays
  Peptide Sequence Number=SeqID_48788
atggccgccaccgcgggcgtggtcgtctcgcagcagcagcacagggactacaacaccggcgacgacgtcgaggctggccttcttcgtggcgcacaacctctagagtccactaacggttgggtgatgtgtaagctcctccgaagccgaggtcgagtctgtcttctgtggccgaggtcgagtccgagcccctgggtcgggcgaggcggagaccgacggctgaggccagggcggagtccgagccctgggggtcgggcgaagcggagttcgtcgtcttctggggctgagcccaagtctgagccctgggtcgggcggagcggagttcgccgtcttctggggcttagcccgagtccgagccctgggtcgggcggagcggagttcgccgtcttccggggcttagcccgagtccgagccctgggttgcgcggagcggagttcgccgtcttctggggcttag

SEQ ID NO: 7010 - DNA, 531 bp, Zea mays
  Peptide Sequence Number=SeqID_48789
atgcacattaggccgctgcgttgctactcctggcaacttttggtttcttcccagagcttttttccccgaccgttgatggagccggacatgttctggtcgtcgactgaacaagaagagcatggactctatgtagggatggcagcgggtcgggttgtgttcgggtatgataatacccgacctgatatcatacccagcccttatacaaatatccatacccacaaagtcaatcagctcggaggcgcagccgcgcagctcggggtgggagcgaggcagcgggcgggcggccgatggacggcgcagctcgaggatggcacaggcgcgcagcttgggcctcggggacagcggacggcacaggcgcgtagggcgcagctcggggacggccgacagggacgcgggacgccgcaggccgggcgggaccacgggagcggggcagcgccagcgggctgtgcgcctgcgctgctggcggccggcagctggggatgggtggggcgctggcggctgggaactaggaagtgggaattagggatttag

SEQ ID NO: 7011 - DNA, 759 bp, Zea mays
  Peptide Sequence Number=SeqID_48790
atggataaggactgccaggagtccacgtggaaaaagcggaaggtgccgctacgacttgtggacatgcgacgtgaggcgaaggtggtgcgccctggcacaaaggattccgttgtggctgcggctgcggcaatgcctccgcttgcggcagctgcaaggaaggtgccctcgcgtgtaaaggctagtgtagttgagggagaaaagggtgctgagattggtggagccgacgaggcgagccgagaattggttgtggatgattacttgatcgagggtgtgagcatgttcgatgctcacaacagactggctgctggcgccacagggtcggggtctagacagatggtcgtgatgtcagtggtggagacgacacatgcaaagtctgcgctggaggtttcactggacccgtgggcgcaattctgcgctgctgtggacgggagcggagggatcgccaatgcctctacggctggcggcgtggcggcatctattgcacggcaactgcaggctgctgccttcaccgatcaggtggcgtttggggcgctggtggacatagcgacctcgcagctgcgctccaagagaaaatgtctggaggacaagattgaatgtcttcgaacgcaaaacatagaggccattggggacaaatctactaatgaaaacaagagacgaaaccttctagagaaggtcgactctcttgtgaaagaaaatgaggggctcaaccgtcaactgagcaaactgaaagatgccatagtgaaagggaaatgggcttaa

SEQ ID NO: 7012 - DNA, 1704 bp, Zea mays
  Peptide Sequence Number=SeqID_48791
atgattcttgtttggtcagggctgcgaggggctgttgctctgtcactatcattatctgttaagcttcgtatattgaaatatacaaggtacgaaatgctaaagaaagcattagaggcttttggtgaactaagggatgacgaggaacttggacctgctgactgggttactgtaaagaaatatatcacatgtttgaatgacctagactatgagccagagcatccccatgatgttggtgacgaagatgactgcatgcatatcatgaacttaacagatatccgagtgcggcttttgaatggtgatagtgaggttgcaagaactgttattgatgaaagtaacgctgagggggaggaagctagaaaattcttggaagatgttcgagttacattcccgcaggtgctacgagtgctaaagacacgacaagtcacatattctgtgctgacacacttgagtgagtatattcaaaacctccagaagactgggctgctggaagagaaggaaatgacagacttgaagaagttgcagaggaatccaccaatagtgaaaatgccaagagtcagtgatcttctgaacactcatcctttagttggcgcgctgcctgctgctgtacgtgatactttgctaagcaatacgaaggaaaccctgcgagggcagggcacaacgctgtatagagaaggatccaggccaaccggtatctggcttgtttctattggtgtagtgaagtgtttcttcatcgaaactgaaaagatagaagagctgctccattcagatccttcgattgagattttcctgtggcaggaaagtgctctggtgcttgccaggcttttggtccctcatagattcgagaaaatgggaatgcatgagatgagggttctggttgctgaaaggtcgacgatgaacatatacatcaagggagaagacttggaagtggagcagaattgcattggcattttgctggaagggttcttgaagatcgagaacctgactctcatcacgcccccagcgttgcttctgccatggaatgctgacttgagcttattcggtctcgagtcctcagactactgccatactgcacgcaggtatcaggtggaagccagagcgcggatcatcttcttcgacgaggcagaggccgcccatcttcatgttcagacaagtgcgtcgctgccccaaggtgagccagcacggagcatgagcaaggagcacagcggcttgctcagctggcccgagagcttccggaggtctcgtggcagcctaggcttagcagctgagatgctgccgggcggcttgtcttccagggccctgcaactgagcatgtacgggggcagcgtggtgagcctctcctccggccagcagggtcaccggcggcagaggccacgtcatcgcgtgcaggcggccacgacgatgacaaaccagaagaagcacagctcttcctaccccaggatgccatccatatccaaggagcggcatctgctctccgtgcagtcggagggctccaacatgaagagagtggcagctctacctgaggttgctgccaccgctcctgctccggcaggggcagcacaggggcagcggagggctatgaacttgcaggaggaatacaactcgagcgaagactccgccggcgaagaagtcatcgtcagagttgactcgcccagcatgctctctttccgtgagtccaccgccgtgcctccgccccaggagcagtag

SEQ ID NO: 7013 - DNA, 507 bp, Zea mays
  Peptide Sequence Number=SeqID_48792
atgggcggcgaggctgagcctgacaacgcggtgctcttcgttggggtgtcgctggtgctgggcatcgcctcccggcacctcctccgcggcacccgcgtgccctacaccgtcgcccttctcgtcctcggcgtcgcgcttggatccctcggggctaacataaaccctgatcttctgctggctgtttttctacctgccctcctctttgaaagctccttctccatggaagtacaccaaataaagagatgtatggcacagatggtgttacttgctggacctggtgtgctaatatcaacagttttacttggcgttgccgtaaagctcacttttccttacaactggagctggaaaacatcattgttgcttggcggactgcttagtgcaactgatccagttgctgtggttgcactgctaaaagaactcggagcaagtaaaaagcttagcacaatcattgaagccttctccaagctggggagcaagaacctaaagtatgatctgtgcaagcaatga

SEQ ID NO: 7014 - DNA, 582 bp, Zea mays
  Peptide Sequence Number=SeqID_48793
atgaatcatggtgccaaggtctttatggttcaacttcaagctaatgccacacatgtattcgtgaaaccctctgattctggcaccctcatgctcatgccactctccctctacctgaccagcgccgactttgaggtcgcctcaccgggccaccgcagcgtcgtcggcttctcggccatcgcggacgcccacgccggacgctgcaagatcttcgatgatgctgcttcaccaaacaatgaaatgctcatgacacatgatggaagaggatacatctacttccttcttctgagccaaccagcagtcgccactgccacacgcgaggagaagaagcaagaaggcgctcaggtgtggtggtggtgctcaggtgcgtggaaggatacaatttggggcaggctctgggcggctggcatcgccggcaagcgcaagaaggtcatcatgagcggcaagcctaaacgcccgccctccgccttcttcgtcttcatggtcgcggatgagctcaccgagcagcaggcctggcagctcaacttcgacctcgattcggcctacaatgccttcttggctgtgctgcccgctgctggtctgtaa

SEQ ID NO: 7015 - DNA, 396 bp, Zea mays
  Peptide Sequence Number=SeqID_48794
atggaggcaagaagagctttcagataccgagtgcacatgagaaggtcatggaggccgaggaacccagagccaggggtaaagaagaagacttgcaaaatcaaggttgatagagttgagaagagatatgattttgacttagaaggtttaatgggatgggtactcagtgcgactcgtgagttcaaaggtgtcctctcggttggagaggactattgtgcttggataggtgcccgaagcactgtttcgattctgctgaaagccgggtacaaacatgtgaaggcatgcacggaccctgacttcaaagtccctgctgacaatgtccaaaggtcaaccgtcgaagctttggaatggtcaaaaaaattctatctgagatttggaaaaggggtggaaaagaattaa

SEQ ID NO: 7016 - DNA, 2076 bp, Zea mays
  Peptide Sequence Number=SeqID_48795
atgggttgcgcggtgtcgaggcccggggtggtgtcctcgccgtcgtacgaggacgacgtgtcgtcgtgctcctacaatatgtcccgcagcgcgtcggcgtcggcggacctgggctcggcgtcggcgtcggcgtcggcgatgtcgatatggagccggccggtgcggctggaggcgttcaaagacgacgacgaggacgagcggcggcggcggcggtcggggagggaggctgcggtagcggcggcagcgcggctggggagcgtccggccgtgcgtggagggcgagcaggcggcagccgggtggccggcgtggctgagcgcggtggccgccgaggccgtgcacgggtgggtgccgctccgcgccgacggcttcgagaagctggagaaggtggggcagggcacgtacagcagcgtgttccgcgcgcgggagctggccacgggccgcctggtggcgctcaagaaggtgcgcttcgacagcgtggagcccgagagcgtgcggttcatggcgcgggagatcctcatcctccgccgcctccaaggccaccccaacgtcgtcggactcgagggcctcgtcacctcccgctcctccccctccatctacctcgtcttcgagtacctcgagcatgacctcgccggactcagctcctcccccgacatcaccttcaccgagtcgcagatcaagtgctacatgcggcagctgctcgaggggctggcgcactgccacgcgcgcggggtgatgcaccgggacatcaagtgcgccaacctgctggtgagcgacggcggcgagctcaaggtggcggacttcgggctggcgaacctcttcgcgccggcgccggcggcgccgctgaccagccgggtggtcacgctctggtaccgcccgccggagctgctcctgggcgccacggcgtacgagccctccgtcgacctctggagcgccggctgcgtcttcgccgagatgcacgcgcgccgccccgtcctgcagggccgcaccgaggtcgagcagatccacaagatcttcaagctctgcggctcgccgcccgatcacttctggcgccgctcgggcctgtcccacgccgccgtcttccgcccgcagcaaccttacccgagccgactccgggacaccttcgccgcgtccatgcccgaccacgcgttccgactcctcgccatgctcctctccctcgaccctgccgcccgcggcaccgccgccgccgccctcgacgccgagtacttcacgacggcaccgtacgcatgcgaccccgggagcctgcccaagtacgcgcccaacaaggagatggacgccaagttccgggaagaatctagaaggaggagcaacctccggagccaaggcggcgagggggcgaagcggctgtcctgggggcacaagagcatgcagctgcaggacacgaaccagagccacgtgcacgccgaggaatcgctgcccgttgtggccaaaagcggcgcggcggtggcaaggaacgacggcgactcgcggctgctcgtcgacctggagcccgtgccggcgatcagattcagcaagcggcacggcgacgacggcgccggcgaccacgcgccgccgtacgccaagaccttgtccagcagcttcaaggagccggcccgtgtcgcggaccgccgccctctctccggccccgggcagctcgccgcgtccaccggtttcgcctgggccaagaagccccggtccgtcgccaggtcttcgacggcggcagccgccgtcacgaagcggagctactccaagggttcagggaccaagaacaacagcagcggaggaggtgacagagcaagaaccacctccgccgccaccgccactgaagcggcggcaccatacgaggtggagaagcaggaggtgatcaagcagtgggcacaggccgctgacgcattcagcgcctctgaagcttacagcagcaggttcaggcagacacttgctgccaggcagctcaagaatggaaaggtgtcactctcacagctcacagtcacaagcattgcagatttgcagtacagtgctgtctgctgtctccttgacaaattttattatgctactaaattttgtagctctgaaggataa

SEQ ID NO: 7017 - DNA, 2379 bp, Zea mays
  Peptide Sequence Number=SeqID_48796
atgggaataaaagttgagggtgagacctatattccaggatactttgacatggaagattctagtgtaaattataatggcaatgtgctgccgtatcacaaggagaacaaaccaagtgtgtttcttactgagaagttcacaataatagcttcaaatggacgagtacattacgacaaggaaatgataaagcggacaatgcttgtacatgaagctacattccggaaacaggtatatgaacttcaccagctttacaaaattcagaaggaactaatggcacggttccaaatagaagagatcaatggttgtcctagttatgctggtttattgcagccaagatcctctccatcacaggcactgcttgatgatgttaaaggaatgcgaaaaactgtgaatcctatttctggacatgatcctaagcagtcatgcatcgatttgataaatgaaagtagttcacaatatagtgtgagtggaactcctttgaggcataacaatgttaggcctcaaaagaaaatgattgacctgcaggttccagcagatgtatacactgacaatgatgatgatgtggagatattagaagtgaggccttccaaaagattgcctggggctaatgggtctgttcttttaggaaatgtcaacctcagccttcaaaatagtgagggctattcacatatgaagagttggagtactgatatacaagcacatcacagctcaactgcgcatatactgaataaaccagttgaagattcatctagtatgaatagatctaattttcttggtgtgggaatatctgctctgcagaaccatcattatgcatcacagggagtaaacttgaaccccataagcttggaagcaaaactaaaggaacaatgtgctggtaaagcatctggttcaaggttctttggaacaaatgaggaaataaggaacaacaatccatttcaacacagaaaggatgactccaactctagcatggcattgtacaaacaaaattgcattggttcctcaatggggaattacgctcccaatgctagcaccttcaatcactccattctttctccgcttggcttcaaccatgcactgaatcttccatggcaaagcaacaacacgagctacttgactaagagtcattgtggtgctgctgaaacattcattcctaaggatgccctttccaatggtatctcagtggattctactccaaaggcgccctatcatcattcactaaagattcacggaggtgccggatatcaaaaacctcctgcactacatgataacctgaaggatatagatctgaatgacacaccagttgatgtcgctgccacttgggaacagggaagcgagaaatcagtggttgatatctcttggctcagcaagaaaccagtaagcctgatggaatcacaagtcccatcaagttatgcaaaggaccactcccagattttgccaagccccacattatattcagaaagtagaactcccacaagagttcctgccttccctttcagtgttggtgctgaaaaagattctcggtgctcacccactctactatatgacctaaacaatggaccatcgattaagcatgaaactgacatggaaattcagtccctgtgcaaggaaagtgacacagatactaggaatctcattgacctgaatgaaaccttgccaataatcgacgatccagaaatagagtctcatgaatcaggtgaaattgttcctcatgaacccaatggcccttcacaggattctatcgctatagcagcagcagcagagacgttggtagaaatgtggaataatagtgatcggcctgcatatcaaccggacattttgcattggtttgctgacctagctatatccaaagataacacattgttggacaaggacagcgatgacgactttgaggctgcaacactgaagctgcgagaaacaaagagcaacgagtaccattcaacaccaagaaccacccaggaggataacactaactttggtcattgctctgcagcttcacttgtctcaaaacctcagagaggtagagggcgaggacgccgacagaggaaacactttcagagggacatcttgccaggccttgcgtcattgccaaagcacgaggtatcagaggatcttcgtgcgctcggaaggtccaagctagtcaccccgacgaaacgtggccgtaacaggcagcaaccgagagggaggcgtcgggcaagaagcgtggctgtcgccatggaggtagaggaaagcgaggtcagcccaccactgcaggcatcaccatctcctgtccctgctgacttggacgcagatgcattggcaataacaaggtggggaaggaccaccagacgttgtcgaaggccgagatgcccgccggtgaacaatgcatcgctgcgtgtagcttga

SEQ ID NO: 7018 - DNA, 450 bp, Zea mays
  Peptide Sequence Number=SeqID_48797
atgagcgggttcctgtggcatggcgtggagtctcggctgtgcatcatgctggttcaaggactccctggatcgcgatgcctccaccgcagcacgcccgaggccctgcacctccgtcactaccaccgtattggggctttgggggtagtttcctcccgaagaggcaaatgtcttcgatgtggcgtttcctcacacggtgacagatgggacaaccacatctacggttcaggaaaagctacgctcgtactcctgccggagccacgcctggccatgcacgcaccggagccacgcctggcccccttcacggtgaacgatggtggctgcaagtacgtcgtgtgcatgtgccgggagaagcggtcattttcctgcgccactggctatgtagacccagcccccgagcagtcacgggaatcctgcgcacctatggttctagagtgcgagtcaaagtcgtga

SEQ ID NO: 7019 - DNA, 219 bp, Zea mays
  Peptide Sequence Number=SeqID_48798
atggcgttcgccagccctcgacggcgctctgaaggcgcgatgccccgggcaacctatgccccatcacctgctgtacccaattccacacatgcaaggagcttggcgaaagaaataggcattcttaccggtgacccaggtgtagatgacgctggccgtagagaatggaaacgcacggccatcctcaacatggctgaggcatcaagagtatcctgcccctaa

SEQ ID NO: 7020 - DNA, 285 bp, Zea mays
  Peptide Sequence Number=SeqID_48799
atgaaggcgcgatgccccgggcaacctatgccccatcacccgctgtacccaatgccacacgattcaaggagcttggcaaaagaaataggcattcttatcggtgacccaggtgtagatgacgccggccgcagagaacggaaacgcacggccatcctcaacgtggtcgaggcatcaagagtatcctgcccccaggcctgcccggcaagagcgcgacccccgttgagcgccccgacgaagcaccacgcgatacccgacgcttcccaggtgtctgccaacggcacgtag

SEQ ID NO: 7021 - DNA, 300 bp, Zea mays
  Peptide Sequence Number=SeqID_48800
atggtcgaccgacgttctaccctcaaggagaaccagagcttagcctcgtgcaggaccacgccctatcgtgtcattggtggggttgttggcgcagttcgtggtttcattgtagctcctttcggcgatcccgaggaagattttccctcgggtgaagttgctatacggtgcagagtcccttctacatccgccacgcaggagttggtcccgaagcagaaaactgctcttgggctaaaggtgatcttgatcttgaagacgacggccatggagttagcattgatcgatgacgtagcccctacctag

SEQ ID NO: 7022 - DNA, 279 bp, Zea mays
  Peptide Sequence Number=SeqID_48801
atggaggcagaccgaaacaacgaggaggaggaggaggatcccgaggagattgagccagcttccagtttggacacggcttactccggagtgcccctcttcacctgcggccagtgctgcctctgctacttagggagctccggcgatgagcagggcgctgctctggcttcgttctacaacagcgacgacaaggagaagggggagagtaagagacactcggggaggtggccggccatggcttcaaggctgccatcgatggcgtccatcaatggggagaggtaa

SEQ ID NO: 7023 - DNA, 210 bp, Zea mays
  Peptide Sequence Number=SeqID_48802
atgccggcgtcgcgattcatacccggtcgaacacagatagcgctcctcgaaaataaggaagagatagaagttgaagaagtgaggactacaccaccacctgaagaacctcaggcaggaaactgcttttactttgatatttgtggagcagagtctgactcacctatcactcaaggaaagccccggtgcattgccacctccttgttgttttga

SEQ ID NO: 7024 - DNA, 858 bp, Zea mays
  Peptide Sequence Number=SeqID_48803
atgtacatgacgattgttgaacgcgtctatgagtcctcgcggcacaaagggaaaaaggtggccgcgccccgcggcgacggacggcgcatcggcctcgccgctgcacaacgccggagacgatacgacggcggctacgggatgacggtcttccacttcctcaactgcgccttcctcaccttcgggcctcacgtcgtctactactccgccacgcccctgtcagagtatgatacaatcggcacttctataaaagcagctgctgtttatcttggaactgcgcttgtaaagcttgtttgcttggcaacattgctcaaagtacctgagaatgatagctttgacccctatcaggagttaatgaaagtttttattggattcatagatgtagctggactgtattttgctttgacccagctgacccacagaaacatctctcagaatcataagttccaggctgttggtcttggttgggcttttgctgattcagttttgcaccgactggcacctctctggattggggcaagagggcttgaatttacatgggagtacatatttcaaggacttgaagcgaatgctaatcttgtgatgaccctctcccttgctgcattggggtccttgatgtggcttaggaagaacaagcctaggactttggttccaataatttatgcatgtgctctgctcttggcaacaatgccatctatcaccagtcgtattgttcactgggctcaacatgctcaaacattgcagctacttgaggaggtcattggagtggcagacaccaaaggtggttggcttcgagctcttctcctcccttgttatggctttcatcagctggcagctgttctcggcttgtcagagaccgat

SEQ ID NO: 7025 - DNA, 672 bp, Zea mays
  Peptide Sequence Number=SeqID_48804
atggtggagtggttgcgttgcccacatggcccctcgatggtgtgcacacacactcaagggggcagaattagagagcacagggatgatagtgagcagttggatcaatgcagacgctttgatgacctatcactatgcaacataagtttcgaactcaaagctagtcagattactcaggaggctgtatctatctctaccatcatgaatagagagaagaattccattgagtgcttaatgactgttatcagagaaattatgcggaacacagaatttgccatacgttcttatgtacaattgagggcaaggtttgtctatccaagtgctgaaagtgcaaactctggtttttcaaatcactctggatcttctggtgctcagactgatttccatcagctcttagccacgacaccaaggtttcgttgttatagtagtgctgccaggcggccttctccttttgtgcaacaaacagttgccaggttcgaggatgattttggttactgctgcaaattgattctagaactagaacaacttctccagatgaaggatggcaagacctttgcagaatctttgaaatctctttcaaacgttgtgtctaatgtccatgactatctaatccatgtggcatctaaggtaagtcttacacagaatgctagtcatcacagatacttcaaaacttaa

SEQ ID NO: 7026 - DNA, 1092 bp, Zea mays
  Peptide Sequence Number=SeqID_48805
atggtgaaggactcagagggtgacgtgaggtacctgatcgagagcatccatcatcgctcagatttgcggaagaagatagcagagaaatctcgtaattcagtaccatcaggctcccaggggcaaactgcaaagccaaggccgttccccgtgcctgatgggataccgaaaacacaggaagagctcaccgaagaagaggaggcgttgatgccagagtctccatacacaaggttgctgagaaggatgggtagataccctgaatggcgcctcagctacggtggcgccaactccccctcgtcctcgaggacgccgcctctcccgctgatctacgggagccccgaggaattgatgacaccgatatctccgcggacgaccagtgcgctatacccagcgccgggagagacgtcgacgccgacggtccgtgtgcccatggatactgcgcttgccctccgccctcccgcgcagccgcagtctcagcaagcgcaggaggcgggaacggcgaggaggatgtcggagcagcggcgtcataaagaagagcgggcgtcgtttgctgagtatagggctggacgaaatactcgtggctcgataactcgctcgactcggctccaggctttatggtcgcaacagcagtcgcagcagctaatgctgtacacggtggacgggcgtgccgccagctacgagaccaagtgggacgagctgcacccggtctcccagatgctgctgcttcaaatcgagggtttccaccaggctatggtggtgaatgtcagcgaaccaacagctaagccggtccgggtctactgcgttgcccacatccagcgctcgttcatcgcgttcgaatattgcctacgtcgtgcaatagctgcgcaccgccgcgacgtctacgatcactccctactttggcgtcgactgggccagaagcctgatacacgtcgttctacattgggcttctgcgtcttccttagcaacttcctcatctcgtggtcatctaaacaacagagtacaatatcgaggtccagcgccgaggccgaggacaacttctctgtcaccacagcgctcgtcgagactacgtgggggtgtcagtggaccaacggctaa

SEQ ID NO: 7027 - DNA, 325 bp, Zea mays
  Peptide Sequence Number=SeqID_48806
atgggccggataaaggaaaccagcagaggctcacagcttgtaaactcaccacaatacagaagaccaccacaggaagtagggtattacgcttctcaaagcggcccgaacctgctcaagcctgcgtgtttccctcatcgtgctaccgcactaaccatcgagtcacaatctacgacgtcgtcctactcgaaagcaccacgaggaggtgattctgcatcacatagcgacttcacccaagaggacatctccctcgggatcgccaaaggaagctacggcaaaaccacgaaccgcgccaacaaaaaccccaccaatggcgcaacggagcatg

SEQ ID NO: 7028 - DNA, 408 bp, Zea mays
  Peptide Sequence Number=SeqID_48807
atggcgatcaactggtgtcattcgcatggacgcatggagcgcacgtcctggcgtgcgcagcgccttgtccccgcacccaagaacctggagcccttgctcgagctcgaagaagtcctgagcaccaccgtcgacgccaccgttcctcggtccccaccggcgcgcgtggaccaaacatctccatccgcgacccgccgagccaagaccaccgtcgagttcgccttcgtcgaccgcacctgtccgccaaattgcctagccatctccaccgtcggatcgcacgaagaagtatcagtggggattgtcgaggagctgccaggaattctcgtggaagagggtgaacctgaagctgaagctcaggagtgtcctgatcatcgcccaattccttcgagaaaggcaagcctcgacatctaa

SEQ ID NO: 7029 - DNA, 336 bp, Zea mays
  Peptide Sequence Number=SeqID_48808
atgtcgcgtgctgctagtccttataaagttcttacaaagatcaacgataatgcatgtcgggaaaacagcactattcaccccgttccgactactatgccaaccaccagggtaaaactagctcggatgttcagcctcgggcgcaacagggagctccgcctcgcccgacctcaggcctcggccgcgggagaaggtctccgcctcgcccgaccacaggcctcaggaggagtcacatcctcgcccgaccttagcctcaacctcaggagaagtctccgcctcgcccagtctcggcctcggaccgactacgccactggggatacatcattaccctacccctag

SEQ ID NO: 7030 - DNA, 1413 bp, Zea mays
  Peptide Sequence Number=SeqID_48809
atggctgaagaatctgagggccggatccatctatgtctgcaccgcgcctatataaacggccgtgggcatgcagcttactcactcaccaccagcgggaagctgatgaagcttgtgtacatggtgaccctcctaccgttgctcttcatgtccggcgttcttgaggctgcaggagcgggcaatgacagctcggctgacggcacgaacggcaacttgcacagctctggcaccagcagacccgccgccgcgcccaggggaaggtcgctgcaagcatcgcagagcagcgtgtacagcgtcgaccgctacggtgcccgtggcgacgggaggaacgatgacacgcgggcgctggaaatggcgtggaaggcggcgtgcgcctcgccacggccggccgtcgtgctcgtccctgacggcaggcgttacctgctgaagctcctcaccctccgcggcccgtgcaagtccagcgtcacgctcacggtgaagggcactctggttgcatcgccaaaccgggcggattggagcgacaatgacaggaggcactggatcgtgttccggagcatcgacaagctcaccgtcaacggcggtggcgccatcgatggcaacggcgagaaatggtggcctcactcgtgcaagatcaacaaggctctcccttgcaaggaggctccgacggctctgtcattccactactgcgtcgacctgaaagtggaggatctgaaaatcgtgaacagccaacagatacacatgtcagtcgaggattctgcaaatgcgctgctggcgcggttgtccatcacagcgcctggcaccagccctaacactgacggcatccacatcactcgcagcaaagatgtacgcgtcacagactgcaagatcaagacaggggacgactgcatgtcaatcgagaacgggactcacaacctccatgtctccaaagttaactgtggtccagggcatgggatcagcatcggaagcctaggagacgacaactcaagagcagaagtctccggcatcaccatagattcagtgcaactacacggcacaaccaacggagcacgcatcaagacgtaccagggaggcagcggatacgccaaggacatcacgttccaaaatatggttatgtacgacgtcaagaacccgataatcatcgaccagaactactgcgacaaggctaagccatgcggagaacaagagtcagcagtgcaggtcagcggtgtcgtcttcaagaacattagagggacgaccagtaccaaggacgccatcaagatgaactgcagtgagaacgtcccatgccaaggcattaccttgcagaacatcgacctgaaaatgcaggacggcaagggcaacacaagaagcacttgtcagaatgcaaaatggacagaatttgggacagttcgcccgcagccttgcactgccataaagtag

SEQ ID NO: 7031 - DNA, 591 bp, Zea mays
  Peptide Sequence Number=SeqID_48810
atggcggccattatgggcgtgaagaagggtctgctggtgctggctcttgggctcgccatggccgctacctcgtcggccgtcatctacaaggtcggcgacacctccggtcttgctccagttgatcatttacagttcacgtacccgccgggcatccacaacgtgctggaggtgaagaaggccgactacgacagctgcaccaactcgacgccgatcgccacgcacagctcgggcgacgacaagatcgtcatcaagagccccggccaccgcttcttcatctgcggcgtgcccggccactgcgccgcgggccagaagctcaacgtccgcgtcctcaagacgcgctcctctgacgccccttccccggcgccctccgcgcgctcagcagcaggctcggcggcggcgacccccagccccaccaccgagacgaccggcgcgtcgtcggcctcgggcggcagcagcacgcccgacgccacgaccgcgcctgcgcccaatgccaacggcgcgggggtcggtgcggcaggccaccagaacgtcgtcgtcgtcgtcgtcgctatggcggtggcggcgctcgcctccatgacgatgctacactag

SEQ ID NO: 7032 - DNA, 231 bp, Zea mays
  Peptide Sequence Number=SeqID_48811
atgtcaatctttatgttgctgtttcaggtccaaagcaaaggagagcatgattctcaagttcttgggcttcatgggtcatggaggcggccacaatcatggccattgctgaattggggagagctcatttttaaagctggtttgagtgagcaatgctgctttgtgaagctcggcgtgtacagtgagatctacagtgtgctgaaacctgtgaagtattttgcgctagatgattaa

SEQ ID NO: 7033 - DNA, 342 bp, Zea mays
  Peptide Sequence Number=SeqID_48812
atgactcaacaccgagtggtgttggatgtagctgccagagctctggaaatccattctcctaccttcggagaccttgcattgtatctacccagccaagattctactcgatcatgcgcttttgccatgatagagttgtccttgaagaagattccagtggtctcccaccacaacaaccctagtcccacccaccttcccctctccaaggtgcagccccttccttgcttggatcttcgtcgcgttggtgcaagtctccaattggattttggtggaaggaagaaggagggagaaaagggggagaattcaaggcacttgatctttgcttttgggaaaggagggaagtag

SEQ ID NO: 7034 - DNA, 162 bp, Zea mays
  Peptide Sequence Number=SeqID_48813
atgtccaccacggcgttcctgggcgaagacgcggcgttccctaagctacgatgcggtacgcttcaggacatggttgaaggtgtgacttggccttccatcctgccactgggctggacggtcgagtgggatgctgctccagcagtagaggagcaggaggagtag

SEQ ID NO: 7035 - DNA, 624 bp, Zea mays
  Peptide Sequence Number=SeqID_48814
atggggatggggcatgcgcgtccctgcgaccagagggagtgccgcggctacaggggcgcggtttggccagggaggagcagccgacgctggagctggaagaggcttcagccatggggaaaacaaggggccggggaggaactcggctgggaggagctcgacgcaatggagcacggaggaaggagaggggtgcgcgccatggatgcgcaggagcgagctccggcagcgcgcgtggggctggaacaccgggctggcaaccggcgcgcagagagaggcgaccgaggaagatggagaagctcggccgagcgccatcggggcgagccgagggagaaaggaagccgcggcagagagctcgccgctcacgcggccgtggcgagcagagcacggcgggccagggcgagcagagagagcagaggagatccggctgacggcgtcgttgggcgagcagagcgcgccgcgcagagaagactccactggagaacgagcagggagaacaaaggatctgggcgagaaatttcacgcgcgggcgccagggaatatgatagggccgagcaggacgccgagaggagggagatgaaggaggatcgagctcatcggctggggatagaggtgcggctgggaagataa

SEQ ID NO: 7036 - DNA, 438 bp, Zea mays
  Peptide Sequence Number=SeqID_48815
atggaactacgccatggtggcagggagcatgcgcgtgatagtcgccgtatcgctgagttgtcagcagaggttgaacgcttgcagcgagagattgtggagcggcatagggctattgactgggctataaattcacgatctatagcctgggattgtgaggtgactgcccgaacccaggtggaagagctaagcatagccctggaaaatctgcaagtgtataataatgctctgcatgaggaagtgcacttgttgtatgaccagctacatccgaacgtgccaccagaggttgcggcgatgggagctggtgcagcaggagcagctggcagaggaccttatggggagctaaatctctttagagcccctccttccatgaacaacatggatgatcgtcctcctgaagctagaagtggagcgggagcagccaaggacacgaacgactag

SEQ ID NO: 7037 - DNA, 231 bp, Zea mays
  Peptide Sequence Number=SeqID_48816
atggaccacgtgcaagcaccggacccctgtccgagcggagagtggataccgagggcgcatgttggcctgaagacttgggtcccacctgccaagggtctaaatgccagccaaggaggtctaggacccgcccataggggtccaggccgcatgcgtggatgtcaaggacccgcccatggaggtaacctcatggttatctgccttgacacaatggagaaggtacctcagttatag

SEQ ID NO: 7038 - DNA, 813 bp, Zea mays
  Peptide Sequence Number=SeqID_48817
atggataggcactggcgccgccttcaagctactccgccgccgctaggcgccgtgcagtactacagagagctaatccactccctagacaccccggtgcaagctgctccgatcatggtggacaccgagccgggccaagccatggctatcgtcggcgccagcagaagcaagtgctaccacctcatcacgccggcgcaggcggcctactactaccgcgtcgtaggcgggcgcctgggatcggcgccgcgcctgatgaagccgtaccgctgtctgggcgcgccggcaccctcgacgacgacgacgaagctgtaccgcggcgtgcgtcagcggcactggggcaagtgggtggcggagatcaggctgccgcggaaccggacgcgcctgtggctcggcacgtacgacaccgccgaggaggccgcgcttgcctacgacggcgccgcgttccggctgcgcggcgatgccgcccgcctcaacttcccggagcttcggctaggcggtacgcaccttgcgccgccgctccacccgaccgtcgatgccaagctccaagccgtgacgacatccgcgccagcggcgcctgccttgccccgacccgagagcctggatatcgagagcgagacctcgacgaccaccacggcaacggcgtacggcacaggcctctgtccatcatccaccggctcatcgtcgttggctaagacggcgccactgcccgatatgcaggagctcgacttctcggaggtgccgtgggatgagggcgacggcgtcgcgctctgcaagtacccgtcgttagaaatcgactggaacgccatcctctcatga

SEQ ID NO: 7039 - DNA, 312 bp, Zea mays
  Peptide Sequence Number=SeqID_48818
atgtcgcctccagatgcccaggtcttcgttgtgtccttcttcggcaacgaacaggcatttccaaaaatgaggaaccgcatccccgacatcacggaggcagctgcagttgaagatttctatcgagggtctaatgactcgtcatttgtccgggccatcctccaaaaggcacccgtcacctcggaacaactgttctgggaggcacatctacatcaccgccgacgaacgagcccaagacctcatcggaagggtcaagactacacctccagcgccgaggaaggacatgaatcagcaattagacaagtgctaggataa

SEQ ID NO: 7040 - DNA, 384 bp, Zea mays
  Peptide Sequence Number=SeqID_48819
atgaagttcacggccgaggaggccactgcggttcctgtcgcgatgtggaaaggggatggcgtggcagtgagtgtgcgacagcagagcgcaggcggcggcggagcatctaggggagaggatctcggtggggtagctggcttgccgcggatctcgatcatgcggttatgccagaacgagcgagcggagcggaatcacgctgaccgcgcggcataccgtgctgacatggagacccacggcgaaaagggggccacaaggcaggagcaaggcgtgcgattttcccggtcttcacgcggctggatgcactattctgttgcggcggagaagacaacgtctgttacggagctcgagcggaagaagaaactggcgttccgggcccacgtgtaa

SEQ ID NO: 7041 - DNA, 852 bp, Zea mays
  Peptide Sequence Number=SeqID_48820
atggcgcccaaggcggagaagaagccggcggcgaagaaggtggcggaggaggagccctcggagaaggcggctccggcggagaaggcccccgcggggaagaagcccaaggcggagaagcggctacctgcgggcaagtccgccggcaaggagggcggcgacaagaagggtaggaagaaggcgaagaagagcgtggagacctacaagatctacatcttcaaggtcctgaagcaggtgcaccccgacatcggcatctcctccaaggccatgtccatcatgaactccttcatcaacgacatcttcgagaagctcgccgcggaggccgccaagctcgcccggtacaacaagaagcccaccatcacctcccgcgagatccagacctccgtccgcctcgtcctccccggcgagctcgccaagcacgccgtctcggaggagtatcatatatcaagtacaaccatacagattggtacaaagattgttaggtctagcttgctgatgtatggttcaggaatcagttaccacaatggttttgctttttttgagagaagtagtatatgggtctatttggttgaggagcgtggtgatgctaaggagattgtatcctctgcagcaatgaggctgtactgcacatcaggaattcaggatgagaacacaagctcacccaagagattacagctccggctaaggcgaggcgccgaacaactattcggcctggaggcagagagagctcaagaggatgagcccagaaggaactcctggcagtttcagcatcagactactattgctgcttgtcagactacctcagtgctatacaagtatgtctacatcagtctgatcagtacatcatacgtatag

SEQ ID NO: 7042 - DNA, 2088 bp, Zea mays
  Peptide Sequence Number=SeqID_48821
atgagctaccggaaggggttgaaggtttgggtggaggagaagggggaagggtgggtggaggcggaggtggtggaagcgaaggagcgcgccgtcgtcgtgttctcgagccagcggaaaaagattacagtttcaccagaaaaattgttgcccagggatacagatgaagatctgggtgggggtcatgtggatgacatgaccaaattgacatatctaaatgaaccaggtgttctttacaatctgaagaaaagatatgcattgaatgagatatatacgtacaccggaagcatcttgattgccgttaatccttttacaaggctgcctcacctgtacaatgaatacatgatggaacaatacaagggcatccgattaggggagctgagtccgcatgtttttgcggtggcggatgcatcatacagggctatggtgaatgattctcgaagccaatccatcctggttagtggtgaaagtggtgctggcaaaaccgaaacaacgaagcttattatgcagtatctcacctttgttggcggtagagccgctcttgatgaccggacggttgaacaacaggttctagaatctaaccctcttttggaggcatttggcaatgcaaaaacagtacgcaatgacaattcaagtcgatttggaaaattcgtagagatacagtttgattcaagtggtagaatatctggagctgctattaggacctatcttttggaaaggtcccgtgttgtgcaaattactgatcctgaaaggaattttcattgcttctaccaattgtgtgcctctggaaaggacgcagagctgtacaaacttgggcatataagcagttttcattacttgaatcaaagcaatacacatgatttggaagggacaaacaatgaagatgagtactggaagacaaaaagggcaatggatattgttgggattagcagagaagatcaggacgctatatttcggacattggcagccattcttcatcttggcaatattgagtttgtcccaggaaaagatgctgattcttcaaaaattaaggattcaacctcaaattttcatctccaaacagcagctaaattatttatgtgtgattcagatctattggtctcaacgctatgtagccgatctatacatactcgtgaaggaataattgttaaagcattggattgtgctgctgccgcagctaatcgtgatgctttagcgaagactgtatatgcaagattatttgactggcttgttgagaatattaataagtctattggtcaagatgtggattccaagctacaaattggtgtgctggatatctacggctttgaaagcttcaaaaacaacagctttgagcagttctgcattaactttgcaaatgaaaaacttcagcaacactttaatgagcatgtattcaagatggaacaggaggagtacaaaagtgaggaaattaattggagctacattgagttcattgacaatcaggatgtgctggatttgattgaaaagaaaccaattggaattattgcactgctggatgaagcctgtatgtttcccaaatctacgcatgagacctttgcgacaaagatgttcagaaacttctcttcccatcttaggctcgagaggacaaaattctcagaaacagattttaccatctcacactatgctgggaaggtcacgtatcaaacagattcttttctggaaaagaatcgagattatattgttgcagaacactgcaatcttctatcatcttcaaggtgcccatttgtttctggacttttcacttcattgcctgaagaatctataagatcttcatacaagttctcatcagttgcttccagattcaagctacaattgcaagccctgatggaaaccctaaactcgactgaacctcactatgtacgctgtgtgaagcccaactctgctaatcgacctcagctttttgaaaatcaaagtgtattgcatcaacttcgttgtgggggtgtcttagaggctgtccgtattagtcttgctggctatcctaccagaaggacttatgctgaatttgttgaccggtttgctgttcttgtgccagaattgatgattggaaggtaccatttatatcctttatga

SEQ ID NO: 7043 - DNA, 327 bp, Zea mays
  Peptide Sequence Number=SeqID_48822
atgtccggtacaccagaggactccaactcaaacttgccaccttcgggaaattccagaggcgactccactataattcatcggactgtctggtgtacactggacatgtccggtgctccaaggaaggatggcctccggaactcgccagcctcaggaattcacttcagctgctccgctataattcaccggactgtccggtgtacaccggactgtccggtgcaaccgcggagcaacgactatttcggcgccaacgtctacctgcgacgcattaaatgcgcgcgctgcgcgcgcagaagtcaggcacgcccatactggcgcaccggacaatga

SEQ ID NO: 7044 - DNA, 330 bp, Zea mays
  Peptide Sequence Number=SeqID_48823
atggcgctgcagaaaggaaacaccgacatattgttgaagtcggcctatcactccttgctcacgcagccatacctctcaaattctgatcttggccagctacattattttcttggtattgaagttcagaaggggctagtttgggagtctcaaaaccggagaggattggaggggctagaatctccttcttattcaattttgaataagaaggggactgtagtccctccaatcccctccgggtttgtggctcccaaactagcccttagtgcttttgccgacgcagattgggctagtgacccagatgacaggcgatcttcagggctttgcagttaa

SEQ ID NO: 7045 - DNA, 333 bp, Zea mays
  Peptide Sequence Number=SeqID_48824
atgctgttcgacctggagctggtgcgcgacgctgccgccgggacggccgcggacgagcagctcatggacacgctgaagctcgcgctgcactgcgtcgacccgttgctggtcgtgttgtgcagcagcaaggtggtggaagagagcatggggattgaggttgtcatcaaggcggcggagatcgaggataccattgctcccaaagttccagcgctacgcccatggttcagtgttttgcaggtggcgccgacgcaggaagccgttgatctacaggggcggaccgtccggacctggctcgcggaccgtccgcgctcagcagaatggcccaacggctag

SEQ ID NO: 7046 - DNA, 2295 bp, Zea mays
  Peptide Sequence Number=SeqID_48825
atggaaagaccaaagttgttgacatggctgtttggcaaggaagatgttcgcaaacagacgagaaacagcagcagctgtaattgttcagaatccacatggagaagacggaagtttgtcatacttttccagaattaccggcaagccactgtggcaattcagtgttcttggagacagaagcttgcaagaaaggagctaaggaaactcaaaatggctgcaaatgaagctggtgcactgcgtgaggcaaagaataagcttgagaaaaagatggatgatcttgctttaagacttacccttgaaaggagactgcgggcttccagtgaagagtcaaaatcagtagaaatattgaagcgtgacaaaataattgaatcattaagtgcagaatgtgctgccgctaagtcagctgctcaaaatgaacatgccaaaaaattgctgctccaaaagcagttggatgattctttgagagagattactatgttgcagagtaaaaagattatgtcagcagaagcagcagaagaaaactccaacctaaagaacttagttgaatcattatctacgaagaactcaatactggagaatgaacttattgtgactcgcaaaagtagtgatgatacaatggaaaaattgaaggaagtcgaggggaaatgcaaccatctacagcaaaacttggacaaattgcaggagaaacttacaaacttggaaaatgaaaatcatgtcttaagacagaaggcatttaatatgccgacaatgaacaatctgtctgtagctccaaagacattatctgagaaattttctgcatcaattgggcttcccaacagtgagccaaagcatatatatgaaagcccaacacctacaaaatatctggcttctcttccacagactttgagtacatcaaggagatcgaggttgcctgttgaaaggcatgagcaaaatcatgaaattttattgagatgcatcaaagaaaatttaggatataaggatggcaaaccagttgcagcatgtatcatttacaaatgtcttttgcactggcgtgcttttgaatcagagcgaactgctatttttgatcacgtgattgaggccataaatgatgtcctaaaggggaacgaagctgatggtagattaccttattggttgtccaatacctctgcattgctatgccttctccaaagaaatctgcggtcaaatggattattcactaccccgtctcgtcgttctggtggagctctagggaagatagcacaagcgggtactctaacagaagccaccaggaaccccgttaagaagcactcgggtagtggaagtagtgagcagcccaccaaggatctagagttgtatctggtggttgaggactgcaaaataggtggacgggatccgttgatctgtaggctcctgtttatgaagcctcattgtgctggttgcattagtcattttttgatgcataaattttgtaagacattgaggtctccttcaaagtttataggccgcagtgatactctaccacatgttgatgcacggtatccagccatactattcaaacagcagcttactgcatgtgtcgaaaagatatttgggcagctcagagataatctaaaaaaggaaatatcacctcttcttaatgtttgcattcaggctccaaagtcaacacgtgggcaatctggaaaagcatccaagtcatctggagttggtgcccacccagcatcgaactccaactgggacaatatcgtcaatttccttgacttacttatggatacattgcgcgaaaattatgtgccatccttctttatacgtaaacttatcacacaattattctccttcatcaatatacagttgtttaacagtcttcttctccgacgtgaatgttgtacattctccaatggggaatacgtgaaagctgggctatcgttgttggagaaatggattactgatgtcacagatgaggttatacaccaaaaaagaaaaaagacgcttgaggagatcaagcaagatctttgcccgtccttgagtgttcgccaaatctatagaatatgctcgatgtattgggatgacaaatacggtacccaaggcatttcaaccgaggtggttgctgcaatgcgggagatggtcaacaaagatacccagaatcttgtgtcaaattccttcttgttggatgatgacttaagtataccattctctaccgaggatctatcaatggcaatcccgtcaatagattatgctgacgtcgatcttccagaatctcttcagcactatacatcagtacagtttctactaaggcagcaggatccacagcctgcccaatag

SEQ ID NO: 7047 - DNA, 762 bp, Zea mays
  Peptide Sequence Number=SeqID_48826
atgctgggtgtagggacggccgcggcggtgctgctcggggccgtggcgttggtgctcgcggatgccgctgcgaggagagcgcactggtggtacagggaggcggctgaggtggtgctggtcggcggcgtggctttggtggtggtggacgccgcggcgcggagggcgcacgggtggttcggtcgcactcgcacgggcgtgtaccaaggcttcatgttcagcagcctgacggtgctgatgacgacggcggaggcgtgcaagcaggtgctgatggacgaggacgcgttcgtgacggggtggcccaaggcgacggtggcgctggtcgggccgcggtcgttcgtggcgatgccgcacgacgagcaccggcgcctccgcaagctgacggccgcgcccatcaacggcttcgacgcgctcacagggtaccgtgccgtaggtgctcttccccatgatttcggcggtggcgcacagcaggtcgtcggccgtgaacgccagcggcccatcaaagtgcaccagcttgccgcccacatcgccaccggactccacctccgccgccgacgaccacataggggcggcgacaccggttctgacgggagaagaaaacggcgcgcggacggacagcgacggagcatgattaatggttctcctcaacggctaataacgattgtgagtctatatcagcggcttcgtgttctctgtatttccatatcgtcgaaatcctcgccgacgcctccgtttcgacgaatccaaatctaccgtgttttataa

SEQ ID NO: 7048 - DNA, 696 bp, Zea mays
  Peptide Sequence Number=SeqID_48827
atgggcacagttgtggatgccgctccagcagttgtggctgaggtcactgagaacatgttgggtggcaagaaagttacagttgtatttgtcctagagattaaatctggctctgagaacggaaccatgattgagaacatgataaaggagggaaagattgttccatcggaggtgactataaagcttttgcaggaggcaatgataaaaagtgaaaatgacaaattcctgatcgatggatttccaaggaatgaggagaatcgtgcagcctttgagaatgttaccaaaatttctcctgcatttgtgctattctttgactgttctgaagaagatatggagaaacgactcctggggcgcaatcagggaagggttgatgataacattgaaactatcaaaaaaaggttcaaaacctttgttgactcaactctgcctgtcattgagcattacaactcaaaggacaaggttaaaaagattgatgctgcaaaaccaatccccgaggtgtttgaagacgtcaaagccatttttgccccatattctctaaagcacacgagcgctgagatggctcagccatctttaccatcggagctgtggcaccagatggtgtccttgggaaccagcacattcggcagctcagcatcacgctggctatatgacgcccacggcaatctacctgtcgtcctcgactacaccgagggctgttga

SEQ ID NO: 7049 - DNA, 504 bp, Zea mays
  Peptide Sequence Number=SeqID_48828
atggcccagcagcctggctgcgctcctgggctgcagctcccgtgtttgcgtcgcctggcttgctcgggagccaggctgtgcgcgtgcaaatttagcctctcaacctggctccacagaaacgagctcaaggaaaacagcgccgcctgccctgctccaactgctgtgccactcgccagggtgaggctaacagcagccgagtccagccttacgcgccataggaagctccgcctcgccgaccccggggctcggcccccgcctcgacctcggaagatggtctctgcctcgcccgaccccagggctcggcctcaacctcgacctcggaagacggtctccgcctcgcccgacccagggctcggcctcaacctcgaccttggaagacggtctccgcctcgcccgaccccagggctcggcatcaacctcgacctcggaggagtctccgcctcgcccaaccttgggctcagaccgaccatgccacaggggggtacatcattaccctacccctag

SEQ ID NO: 7050 - DNA, 1557 bp, Zea mays
  Peptide Sequence Number=SeqID_48829
atggagatgaagctgaccatcaggagggtgcccaccgtcgtctccaactaccaggaggacgccgacaagccgcgcgcgggctgcgggaggaactgcctcggcgactgctgcctgcctgcttccaagcttcccctctacgcgttcaagttgactccggcaaagggctcgcaggaggatgctgcttcaaccaaggcttgtttgggaccaagggatttggaggggattgaagaggctaaaatcctctacgcgttcaagttgactccggcaaagggctcgcaggaggatgctgcttcaaccaagttacttgttgatatcctccttagtgagtgggaggacaggatgactcgaggcttattccgctacgatgtcactgcctgtgagaccaaggtcattcctggcaaccttgggtttgttgcacaactcaatgaagggcgccatcttaagaagcgccctactgagtttcgtgtggaccgtgtgctccagccgtttgaccctgccaaattcaatttcacaaaagttggccaggaagaggttctcttccaatttgagaatagtggtggtgatgacagctatttcctgaacaacgctccaatcattgctgttgatcgggctccaaatgttattgctatcaatgtaagcccaattgaatatggacatgtgcttctcattcctcgtgttctggaccgcctgcctcagaggattgatccagagagcttcttgcttgcactgcaaatggcagccgagggaggtagcccatacttcaggcttggttacaatagcttgggtgcgtttgccaccatcaatcacctccactttcaggcgtactacttgtcagtgcctttccctgttgagaaggcagctacccacaagatcccactctctgaggacacgaagaagaatggggtgaccgtgtccaagctgataaattatcctgtgagaggcctggtatttgagggagggaacaccctggacgacctggccactgtggtttctaatgcttgcatttggctgcaagacaacaatgtgccttacaatgtgctcatttctgactgtggcaagagggttttcctgttcccccagtgctacgcagagaagcaggctctgggtgaagtgagccaggagctgctggacactcaggtgaacccagctgtgtgggagatcagtggacacatggtgctgaaacggaggatggactatgaggaggcatctgaaacctccgcgtggaaactcctcgccgaggtctctctctccgaggagcgcttcgaggaagtgaaggcgtacatcttcagcgctgctggcctggttcagtatgatgaggaagaggaggaagccagcgacggtgagggccctacggcctatgttcctgtcaaggttacccctctgcccgtcgctgaagggtgcctcgtcctcccccctaatttagcatctctctaccttaaatctttacctatcttcggctctacgtcgactaaagacgtcttgggtggcctgccgacgccaaggcacacctataacctcttctccccgacggggtccctcccgggaggcgagatatag

SEQ ID NO: 7051 - DNA, 414 bp, Zea mays
  Peptide Sequence Number=SeqID_48830
atgccgcacggactgcaccggggcatgctgcgtgcagcggtcgtgcacggactgccaagcgggctgcgcaccgaggtcgtgttgaatgcccgtcgcacaacatgctgcgccgagggccctgccgggcgcacgcccagtgctggccacgccgcgggccgagcgggccacgctagccacaccgcgagccgagctggccacgttggccaagtcgcgccggccgctctgctgggcaccacgccgccgcactctggccgagccaagcgccactcgctggccgccgcgccgcgagctcacaccggggccgagtatccacgcgcccgcgccgagctgctgcatgccgaggaagaaaaaaggggaagcggcgcagggaagggagggagggaagaggaggagaagggggaatggtcaccttga

SEQ ID NO: 7052 - DNA, 2487 bp, Zea mays
  Peptide Sequence Number=SeqID_48831
atggaaggccgcgcgcgcctctccctcgtccacgccgccgccgcgctggtggtcctgctgcagctgcatggcggcgccgtcgtggttgcgtctgagccgccctacacctgcggcgccggagcgccgcccaacatcccgttctgcgacgcggggctgcccatcgaccggcgcgtcgacgacctcgtctcgcggatgacggtggcggagaagatctcgcagctcggggaccagtccccggccatcccgcggctcggcgtgccggcgtacaagtggtggtccgaggcgctgcacgggatctccaaccagggccgcggcatccacctcgacggcccgctccgcgccgccaccagcttcccgcaggtcatcctcaccgccgcgtccttcaacccgcacctctggtaccgcatcggccaggtgatcggcgtcgaggcgagggcggtgtacaacaacgggcaggcggaggggctcaccttctgggcgcccaacatcaacgtgttccgggacccgcggtggggccgcgggcaggagacccccggcgaggacccgacgatgaccggcaagtacgccgccgtcttcgtccgcggcgtgcagggctacggcctcgccggccccgtcaactccacgggcctcgaggcctccgcctgctgcaagcacttcaccgcctacgacctcgagaactggaagggcgtcacccgatacgtgttcgacgccaaggtgacggcgcaggatctggcggacacgtacaaccctccgttcaagagctgcgtggaggacggccatgccagcggcatcatgtgctcctacaaccgcgtcaatggcgtgccgacgtgcgccgactacaacctgctctccacgacggcgaggcaggactgggggttttacgggtatatcacctcggactgcgacgctgtggccatcatccatgatgcgcaaggctacgccaagacggcagaagatgcagttgcagatgtgctcaaagctggaatggacgtgaactgcggcagctacgtgcaggaccacggtgcctctgcgctgcagcaagggaagatcacggagcaggacatcaacagggcgctgcacaacctgttcgccgtcaggatgaggctggggctcttcaacggcgaccccaggcgcaacctgtacggcgacatcgggcccgatcaggtgtgcacgcaggagcaccaggacctcgccctggaagcggcgcaggacggcatcgtcttgctcaagaacgacggcggcgccggcgcgctcccgctgtccaagcccaacgtcgcgtccctcgccgtgatcgggttcaacgcgaacgacgccatcaggctgcgcggcaactacttcggcccgccgtgcgtgacggtgacgccgctccaggtgctgcagggctacgtgaaggacacgagcttcgtcgccggctgcaactcggccgcctgcaacgtcacgacgatccccgaggcggtccaggcggcgagctcggcggactccgtcgtcttgttcatggggctggaccaggaccaggagagggaggaggttgaccggctggacctgacgctcccgggacagcagcagaccctcatcgagagcgtcgcgaacgcggcgaagaagccggtgatcctggtgctgctctgcggtgggcccgtggatgtgagctttgcgaagaccaaccccaagattggggccatcctgtgggctggctaccccggcgaggccggcggcattgccatcgcacaggtcctcttcggagagcacaaccctggtggaaggctgcccgtgacatggtatccccaagatttcacgagagtgcctatgacggacatgcggatgcgcgccgacccggccacgggctaccccggccggacgtaccggttctaccgcggcccgacagtgttcaacttcggctacggcctcagctactccaagtactcccaccgcttcgccacgaagccgcctcccacgagcaacgtcgccggccttaagggcggtggaggcaacggcgggcggcatggcgagctacgacgtggaggcgatcgggtcggagacagcctgcacctgagggcgacgcagacggcgcacgtggagttcgaggtgagcccctgcaagcacttcagccgggcgacggaggatggcaggaaggtgatcgatcagggctcgcacttcgtgatggtcggcgaggatgagttcgagatgagcttcatggcgcctgacaccatgaagatcatggaagaccttttcaacatggatgagttagaatatgcatttggtggcaagaacccagctaccttcaaaataaatgattatgatgtgaggattagagaagatgacaagcgaagactgaagatgctggatctgcttctgaaaagagtgatgaatcggatactgaatctgaaaaggatcgaggaacagacacgggctgaatcgagcacagttcatcaggaaaacttgccaggagaagataatatcccagcatatcaaattgggccttcaacctga

SEQ ID NO: 7053 - DNA, 2055 bp, Zea mays
  Peptide Sequence Number=SeqID_48832
atgacgatccataccaaattagcgaggcttttgaataatctgaagtcagtgcatgtgtccatgcgaacaaataagcctaacctttgctcttttcatttacctgggagttgggagactgcgtgtgctggccgcctgggactaggaccatgcgcggtgccgctgcctgcgcgtgcgctagccgcctgcgaggaggactggtcggccgcctgggaggctacgccgctgtgtgaggacgccgctcgccgctgcgcgtgtgcgcgactgcgcgctgcgcggtgtcgcgggcccgcggtgcgcgtgactgggaagactggcggaccggcggtgcagctgcctgggaatgggggcctgggagggaggattagcccgccgtctgggactcgagaacgccgccagccgcctgggaagcgtgtgggagactgggactggatgtcaaatcacaacgcgccctgtgacatccccaagccggcctccgtcgacgagttcctcgccaagaatggcaagaagaagaagtccttcatgtcgggcctcttccgcaagaaagggaggggcgcggacaagaagctgctctcgcggcgggacatcgtcttcgatttggaaggcagaagcggcgacaggatggacctcttggagacgtccgccgctgtccgcaagagcttctcagatcggcactgcacgacgcggatcgagaacctgacgctgagctgcctggattctcccaggagacccaatgtcgatacccgggagtaccgggtgtttgtaggcacatggaacgtgggagggaagcctcctgacagcagcgagatcgtgcctctgaacgcgggcaacgtgctggtcgtggaggacaacgagccggcgggcaagtggatggacctcatctaccaggccctgaacaggccgccgccccaccaggacggccagtcctccggcgacgagctctcgccgccgccgtccacctcctcctcccactaccggagccggccgcaaggtgccgcccgcgaccccagcaacgccgccgccatccccaagacctccagcggcggcatgctctgcgcgcagaagccgccgccgccgctcaagatggtcagcaagtgctaccgcgtcgacaacgcgctggtgaagacgtgcacctgcatgtccgacccgtccaccatgcagctccgggcacgtgagatgcgcgagttcctctgccgcgtcgaggccgccgccgcctcgccgggccgcggcgccggcgccgacgacgacgcgctggcctccatcgaaggcggcgaccagaggggcggcggcggcatgaactactgcctcgtcgcgaggaagcagatggtcgggatcttcctgtcggtgtgggtgcgccgggagctggtgcagtacgtcggccacctccgggtcgactgcgtcggccggggcatcatgggccgcctcgggaacaagggatgcatcgccatgagcatgacgctgcaccacacgagcatctgcttcgtgtgctgccacctggcgtccggcgagaaggaaggcgacgaggtgcggaggaactccgacgtcgccgagatcctcaagaacgcgcagttcccgcgcatctgcaaggtgcccggccagcgcgtccccgagaagatcattgaccacgaccggatcatctggcttggggatttgaattaccgagtctcgttgagctacgaggaaactaagacgctcctggaggataatgagtgggacatcttattggagaaagatcagctcgcgatggagagacaagccgggagagtgttcaaagggtggaaggagggcaagatctacttcgcccctacatacaagtacaagcagaactccgactcgtgtgaccggatactgtggcacggccaaggcatcgagcagctgcagtacatcaggggcgagttcaggctctccgaccacaggccggtctgcagcgtgttcgtgatcgaagccgatgtagatagcgggagcaagatcaggaagggctactcaacgctggacgctaggatccactgcgagtcccccgagatacccaagagacacagcttctatgatgacttctga

SEQ ID NO: 7054 - DNA, 558 bp, Zea mays
  Peptide Sequence Number=SeqID_48833
atgggaggcgccatgaggcagctgctacgctttctgggagcgagcaatggccgccccagggagaagaagacgaagaggacgacgctgcggcggcgcctgctggtgcccacggtggagctcagggtcaggatggactgcgagcgctgcgagcgcgaggtcaagaaagcgctctccggcatcagaggagtggaacatgtggaggtgaacaggccgcagcagaaggtcacggtgactggcgaggtggacccggtggcggtgctgcggagggcccagtccacgtggaagaaggcggagccatggcgggggccggggcacgaccaggacactgccggctactacgcgaccccggcggccgcggccctctacggcgtcgggccggcccagctgcaagcccacgacggcaggtgggccgacccggctgcctactactactgccgctacccgtacccgtacccggccccgggactgagcagcgcggaggcggccgtcgtcgtcggcgccgaacagatcagcagcctgttcagcgacgacaaccccaacgcctgctccgtcatgtga

SEQ ID NO: 7055 - DNA, 944 bp, Zea mays
  Peptide Sequence Number=SeqID_48834
catcaccaccgccgccccagctcgcttccctccccgctacacggacacggccgctcagcgctcaccaccgcttccatgctcctcgcctcgtctcccgctcgcgagacgtagctccagatcctctcccccacccacggcagcaccgcattaccctcagatccacccccgcgagcctcatttcagatccacccatgcgcctcccggtccttttcgccctgcagctggtcgccttggcggcggcagcttcggcggccgaggccgcggcgacgttctcctcgaggatggtgcaccgtctgtccgacgaggcccggctggaagcgggcccgcgcatggggttgtggccgcagcgcggaagcgggggctactaccgcgcgctgctgaggagcgatctccagcggcagaagcggcggctcgcgggcaagaaccagctcctctcgctctcaaagggcggcagcaccttctcccccggcaacgacttaggctgtcctcttgagatgcctgatgtgccaaccataatcctggcattcgctgcaaacaagagcttccaggctgttaatcctatcttgccatttaatgacgaacagggagcgcttgccaggttctgcttagctgtactgccatcaacggaacctattggaattattggccagaatttcctggttggataccacgttgtcttcgacagagagagcatgaagttgggctggtaccgctctgaatgtcgcgacgttgacaacagcacgaccgtgccgctgggcccatcgcagcacggcagttcagaggacccgttgccgtcgaacgagcagcagacttccccgcccgtgacgcctgcaacgacaggcacggctcctccctccagtgcaacgacgaaccgacagatgctctttgctagctcttacccgttgctgtttctgacaatgtccactgtgttcttcatctcatga

SEQ ID NO: 7056 - DNA, 525 bp, Zea mays
  Peptide Sequence Number=SeqID_48835
atggagtcgagcttgaagacatccgcgaagcaccgtacggagggcactcgctgcagaggctccaccgcgtcctctacgtcgcgcacgcactctcccgcagatggcgtggccgcgtcgtcgtacacccgcgcaacgttaatcctgaaaccagcttcccgtgcaggggccggtagtagctcccgaagcggcggcggcaccacgggagaatcgtcctcgtgctcaagctcaacgagacggtcgcgtcgccgccgggcgcggacgcgctctggccagtggccacacgacgggtactatccggatgacaagcctcccgtcgtcggtgcgtgtccgcctgagcgtgcctcgggcgaccagcgacgagatgagcgggggcagccagcgccgcgggcaccgccgcccgtacgacacccagaagccatccaacaagtcatcttcctcttgcgtctgctttgctttcatattatcatcctcttcgtctttctcttcctgctttactactgcctcgacatcctcgccgtgcccaag

SEQ ID NO: 7057 - DNA, 1498 bp, Zea mays
  Peptide Sequence Number=SeqID_48836
atggccggcgggaaggagccgatcgaggtcaggttccggctcttcgacggcacggacatcgggcccaccaagtacgatccctccaccacggtctcctcgctcaaggagttcatcctcgctcggtggccgcaagcgaaggcacactgcccgacagccgccgccgtttcttcctcttcatcttcctcgcagcgccgggccttccatcttccgctccctccccgactcgcccttggcacgcaggcgacagcggcggcgctcaggttcgggctctcagcgacggcggggcaaccccagactcgctgccgtcgtcagcggctcttcctcccgcctctcgccaatcgactcgcaccctcgcctccggtcctcgtcccccccgcataccggccggcgaccctgcatgcgcgcctcccgctccccttccgcctccggtggaccgtcgacagcgcccggccccggcggctgcactgcgcgccgcgtgcggccggcgggcagtgggagccagcagccgctgctccagcaaggcggccgtgccgctttggtagcgcttgcccgaaacgaagcgttacctgtccgcttacgtttcagcgcgagcttagtgcctccttttggaaccctggtaatcatcttagcactaacaacccgatgaggccaaatgattcgttggaggctcaagacatggttcctgctgagggaaaccacagttgcttctcaagtgttcagtccactccagaaattgagaagaagtatgtgcatcgtgtctatgatgccatagctccccatttcagtgcaacaagatttgctaaatggcccaaggttgcaggattcttgaattccttgaggccagggtcggttgtactggatgctggctgtggtaatggcaagtatttgggtttcaaccctgattgtttattcataggatgtgatataagcccaccgcttattgagatatgtgctgggagagggcatgaggtgttggttgctgatgctgtcaacctcccatacaggaatgattttggcgatgcagcaatttcaattgctgtgttgcatcatttgagtactgatgataggcggaggagggccatagaagagctaatccgtgttgttcgaagaggtggtctggtgcttataacagtctgggctagggagcaggaagacaagtctttgctcaacaagtggactcccctctgcgagaaatatactgaagagtgggttgaacagagcagtcctccagtacgcagtaaatctggaactcttctggaaagcattgcagaaactgatgaagatgctggtttcacgaagcaaacagatgaccgattgaaaagctgtcatggtgaggtggaggacaagaccattgactgtagtaattcaaagactgatgaaaatgagaaaaaccagcaggagtactttgttccatggcatctaccatttcaccgagctgaaattggtggtgcatctgctgctctggaaaatggatttgcaaagaaagatgagaagaagg

SEQ ID NO: 7058 - DNA, 963 bp, Zea mays
  Peptide Sequence Number=SeqID_48837
atgggcattgcggccggagccgcgctgccgggccccagcccggccctccttgcctgccggggcgcggccgccggcgcaatgtccctgcggtacctcgacctggcagcggcggccgcgcgctcggccagcggcacctgggccgacgccatgcgcgcctcctcgcccacccgctcccgcgccgccgacgagttcacggcctgggtgaggaagcacccgtcggcgctggggaagttcgagcagatcgccagcgcgtccaaggggaagaaggtcgtcatgttcctagactacgacggcacgctctcccccatcgtcgccgaccccgacgccgcctacatgagcgacgcgatgagagcggcggtgcgcgacgtagcgaagcacttcccgacgtcgatcgtgagcgggcgctgccgcgacaagcccgagtcagttctgtgccaaccagcaagcgagttcctcccggtgatggacgaggtgtacaaggcgctggtggaaaagaccaagtccacacctggcgccaaggtggagcacaacaagttctgcctgtccgtgcacttcagatgtgtagatgaaaagagatggaatggtctggcggagcaggtgaaggcggtgaccaaggactatcccaagctgaagctcactcatgggaggaaggttctggagatccgcccgagcatcatgtgggacaagggcaaggcgttggagttcctgctcgaatcgctcggattcgccaaccgcagcgacgtcctcccggtgtacatcggcgacgaccgcaccgacgaggatgctttcaaggtgctgaggaagaggggccaaggcatcgggatcctcgtgtccaagtgccccaaggagacgaacgcctcctactccctgcaggaccccggcgaggtcatggacttcctgctccgtctcgtggattggaagcggaaatcatcggcggccccgatggttcggccgcgggtgtag

SEQ ID NO: 7059 - DNA, 711 bp, Zea mays
  Peptide Sequence Number=SeqID_48838
atggtgggctcgacggtcaccctcctgccgttgcagtcgcagcccccgaacatgtcgtcctcaggcgtcatggtcgtaggcggtatgctggacgaggtggcgttgaccactgaggctgctggtctccaggctctatcgttgttggcagttgacccttcctcttctaggaccttgctgcccccttctggaggggtctctagaaatcttcctcccttcctccttaagggtacgataggggaggaaatggaggtgaaggaatgtgtctttactctcgctctacggcccgacgggagttgttacaagccgcatggcgcgaggtggagagggtgtgggcggagattgcccgctcggaaggatgggagtatgagctcttctgccttcgagcgagggtcgaccacctccaaggcgaggtggtacgcctttgcattggccgtgatgaggcgcgggattaagcggagaacctccgtggcgagaggtcccggatccaaggtgagcagcgagggctcaggatcaatttgtggctactttcttttagacctcaagaagaagttctctgaagcccatgacgtcatgaaggcagatgaggaggcacgaaaggcagcggaggacgaggtgcgcaagctatcactcgcatgcgactacgcggtcgccgcgcaggtccggatggagacctcgttaagtgagcgtggcgctgaactgcgggggctctag

SEQ ID NO: 7060 - DNA, 3690 bp, Zea mays
  Peptide Sequence Number=SeqID_48839
atggagaccacagaggcggcggccgcgcatccgcagaaggacagtgtgaaggtggccgttaacataaggccgctcatcacggtggagctgcaggatggctgcacggattgcgtcacagtcacgcaaggcgaacctcaggttcaaattgggccccatgtcttcacttttgatcacgtctatggcagctcgggcccttcatcatcattaatatttgagcaatgcgtgcaccccttgatcgatgcattgttcagcggatacaatgccactgttctagcatatggccagaccggttctggcaagacatacacaatgggtactaactatagcggtgaagagaactgcggtgggataattcctcaagttatggatacaatatttagaaaagttgacacctcaaaggatggctcagagtttttaattagagtatcttttattgagatattcaaggaagatgtttttgatttgctcgatgcaaatcaagctgctgtaagacttgatgcaggttctatggcaaaagcatcagcccctggcagagtgccaattcaaatccgagagactgcaactggaggcataatccttgctggtgtcacagaggctgaggtgaagtcaaaagaagaaatggcatcatatttgacacgtgggtcgtcgtcgcgtgcaacagcaagcacaaacatgaatatgcagtcgagtcgctctcatgccatctttacaatatgtgttgaacaaaagagaacatctggtacatccgacaagtcagccagcagtgactatgatatactatcatcaaagtttcacctagttgatcttgctggttctgaaagggctaaacgtactggagcagatggacataggcttaaagaagggatacacataaataaaggccttctagctcttggcaatgttataagtgcattaggtgacgaaaagaaaaggaaagaaggggcatttgtaccataccgggatagcaaattaacccgtcttctacaggattctctaggaggaaacagcaaaacagttatgattgcatgcattagccctgctgatataaatgcagaagaaaccataaacacactcaaatatgccaatcgcgcacgcaacattcaaaacaaagcagtggtaaaccgtgatccagctacagcagagatgcaaaaattgaggagccagctggagcagctgcaaactgaacttttgttttctcgcagtgggagtgcagcgttagaagaacttcagttgctgcagaaaaaggtctctcttcttgagctaaagacttctgagcttaacaatgaacttaaggagaaggaattgtcatgtgagcagttggcagagcgggcacaggctgctcagttggaaagggatcagttgatgctgaagattgaatccgtgaggaatggaaaatcgttggatgatattgaaaatattgataacgaccaagacatggaccttttgaagggctacatatcaaaaatacagcagttggagagtgcgctgatgcgtcaaaacttctccaatgcttgcagacatggcttacatgaccagcttgccatggaccaggacatttttctaaatgaattgggttctggatgtgaagtagaaacaactgatgcttcaaatgaagttgatgaagaagaaaaggagagggaacattcattcatgcaagaccaacttgataaagagctgcaggaactagataaacgacttcagcaaaaggaggcagagatgaaacaatttgccaagagtgatacttctgttctcaagcaacattatgaaaagaagttaactgacttggagcaagaaaagaaagctcttcagaaagaaatagagaatcttcgccatgcattaaccaacatatcttcttctatggatgataatgctcaaaaagttaaagaaaactatcttcagaagctgaatgcacttgagtcccaggtccatgagctcaagaaaaagcaggaagctcaacaacagcttctaaggcagaaacagaggagtgatgaggcagcaaagcgcttacaagaagatattcagcgtataaaatctcagaaggttcaacttcaacaaaagatcaagcaagagtctgaacagtttaggtcttggaaggctgcccgtgaaaaggaagtacttcagctcaagaaggaagggagacgaaatgaatatgagatgcacaagctcttggccttaaatcagaggcagaagatggtttacgataacatgattgtcgcctacaccattctgcttgaaattgccttaatacgagctattgacgatgaactagaagtcactgtaagagcacacgaattacgctcatattacgagcgacaaatgcaagagagagcagcaatatccaaggaaatagcaaaactaaaggaggaatcaaagcacaagatcagtgattgtcctcaagctatgtcacctagtgctagaagttctaggatatcagcattagagaatatgttgtcctcctcatctagtgctatggtatctatggcttctcaactgtcagaagcagaggagcgggagcgtgtattcaatggtaaaggtagatggtaccatgtcaggtccctcccagaggcaaagaatataatgaattaccttttccagttagcatcatctgcaaggtctcaagtactggataaagaagtaatttgtaatgaaaaagaacacaccattactgaattgaaggaaaaggtggttgtgcttaatggtggaattaggcagttggaaacacaagtgagggatctaaggagccaaaatacacagcttttcactgcattgaacaatgcaaagaaatctgctaggtcgaatggcactggatttgctgggcgtaagatgtctgactatccctcatacatgcagagtgttcgatcttcccagcattttggttatagtaaggacaacttcaattgggtggatgatatggacatttcagacagtgagcactcggatgagttagagaatatgagtgatggatccgattcagactgggtacagtcgacgaggaaagccaaaaaacaccagagaagagtgtctagccattcaaatcctaacctggattgtcaaaatacacaaggcagtgcagaaccagagaagccctcagatgaaaagtgcattttgcccaaatacatttcatcagacggctgttcatgctcaaaatcctcctcatgcaagaccaacaaatgcgagtgcagagggtcaggtgcacaatgcggtgcaggctgtggttgtaaggattccaaatgttctaacagggattcttctactatagaaaaagccaatcagggagccatgcttcttcagaccgcgttttctgagaaggaagcccaagatgcaaagccaagaaagcctttgactaacattggtaataatgtggttaaccaaactgccgagacaaagaagcccaggaaaaaccggcgcaagtcggcaattcaactcgtcccaggacctctcctgccgtccgagccagtggccaccgaagctgcccctcgggacattgccaacattcccctcaagctaccgagagccatgtcctcggtgactcctgcggagagcaaccctcccctcacagaccgcaatgctgccaaacccgacgaatcagtgagcaccggcagcaagaatagcaccggagctgcagccacgagagcaccgtctcagctgagaaaaaacgcaaccaccgagaaggagaaccagttgcgataa

SEQ ID NO: 7061 - DNA, 270 bp, Zea mays
  Peptide Sequence Number=SeqID_48840
atggcccccgtgaacccaccgtcacgccgtgactcacgcggggaggctacacctgctgaagtgaagcaccaaaatcaatcggatactggaggacaacgtcagctggaggagctgcctgtccccaactccaacgttgaacgtcagctggaggagctctccacaacacgtgggcaaataatgggtaaccagaagcctgtcgtttgtgttgtgttgtatctcgagttgacaaatctaaaagaggcaagcgttcaaatactcttcagtttgtga

SEQ ID NO: 7062 - DNA, 174 bp, Zea mays
  Peptide Sequence Number=SeqID_48841
atgacagatgtgtacatggcagatgtggaggttttctcttcaaaaaagctacagagagctctgaccttcaccgatgcagaggctgaggaacagctctccttcgaggaagacagtgcttctggaatatacaaccttggactatatgaaagttcaagctggacaaatatcaaatag

SEQ ID NO: 7063 - DNA, 1965 bp, Zea mays
  Peptide Sequence Number=SeqID_48842
atgaggaccctagagaggcattttgtgctgatgatgggctggacgatgaggggcggtggtgcggggactggatggttctgccgcgtccacctcttggttgcttggtctatgacggcgcttgatgctgacaatcttggggtcggtggttcgtcggggttgacgaggcagagtgcccccgtggtggtggcgaagaagtcgagggtgtcgaacctgatgcggctcccaatgatgaacgctgatgaagcggccaccggactgagggatgtcgcttggcacactaaccatctccttacctgggatgtcttcagtacaacttcatcttccgttatccacttgtcgtcacctttcatcatgcgtaggcgcacatctggtacggcatattgccccgtcccctccgacggatacgtatccgacgtcgtgctggacagagaccactcggtactggcgtaccgcttccacagtcctggacatggctcggtgatgtcccatcatgtggaccttggcgggccgttcgaggaggttttttgggccttcacgccgagctgctcggcagatgtgccgtctttggaaggtgtgatgaagtccagttccaatccaggacgctcctccgctctcgtgatgaatgtcgacggcgtttacatgtgcagcacagcgaggccgctggcgccttatgagttgtgggtgtctcctcccaatccgagattgctggagatggttgtagcagtagcttcgtgccaatcttcctccacgcccctgtcaccctacccgtcttcgcccagcctccgcagcttcatcagggacgccccgccttacagcacccagaccccgccgcaggtgcagacggctggtgtcggtggcggcggcggcaatggaaagatcagccctgcggtgctgttcatcatagtgatccttgcggttatcttcttcatctccgggctgctccacctcctcgtgaggatactgatgaggaagcagcacggccgcggtgccaccatgggggagtctgcgccgtcgccgccccggaccggcgcgcgggccgcggcaatggaccggcagctgcaggagctgttccatctgcacgactccgggctcgatcaggcgttcatcgatgcgctgcccgtgttcgcgtaccgtgaggttatcggtggcaacaaagagccgttcgactgcgcggtgtgcttgtgcgaattcgacggggaggacaggctcaggctgttgccggtgtgcgggcatgccttccatctgcagtgcatagatacatggctgctgtccaattcgacgtgcccgctttgccgtggcacgctctttgtccccgggatgactgtagacgacctgctgttcgatgattttgatgagaggttggaggagcctctaccggaggagtgtgaggatggacaccaagtttccaggcagaaacccatggatgaggagcagccaatggccgagaagagggtgtttccagtaaggcttgggaagttcaagagtgttgcaaatcagggtgccatcggcggcgtggttgtcaatggtaatgaagctggtatagtgagtaaggaggcaggggagagtagcagtagcagcttggatgcaaggagatgcttctccatgggcacttaccagtatgttcttggggtttctgaacttcgagtggctcttcagacaggtcatggcagaaacggcgcgagcagcaggtttaaaggaagagttgctggcttaagttcggtcaatgctgacattatggagggcaagaggatttgtgcgaggagcaaaggcgagagcttctctgtatcgaagatttggcagtggtctagtctgaagggcaagctgccagctcctccagacacttgctcagatactgggagcctagcatggatgaaaagaaatgctgctggagataagtccaatatggtgtctcaacaatcattcatcaagggatcaattttgacaggcttgctatattgcacatag

SEQ ID NO: 7064 - DNA, 540 bp, Zea mays
  Peptide Sequence Number=SeqID_48843
atggacaccgaccacggcggcgcgtcggccgcgggcatggacgaggcggaggcggccttcttcgcgcgcgggggccggcggtgctgctgcttcccctggcccgccgccgcctcctcctcctcctcccaccagcgggtcggcggcgccgcggcggcggcggcggcggcggcggaggagacctggtggcagcgcgcggtggacgcggtgctcaaggtgcgcgagtggtcggagctggtggccggcccgcggtggaagaccttcatccggcggttcggccgcagcggcccgcccgcgcggccgcaccaccaccacttcggcggccgcaagctcaactacgacgcgctcagctacgcgctcaacttcgacgagggccacggcgccagccccgagggcgactacaccggctaccgcgacttctccgcgcgcttcgtcggaccgcctgcctccgccaagtcgtccatggacctcggcggccgcgacgcgccgccgctcttcggcccgccgccgctgccgccccacgacggagccggccgcgcctga

SEQ ID NO: 7065 - DNA, 687 bp, Zea mays
  Peptide Sequence Number=SeqID_48844
atggcggatttgagccgccctagcgacgccatcgcaatcactcgcctgcccgctcgcccgctgcgcgtcagcctcgcctcacccctgggcagtcgcgaagggcgctggaacacgacgacatccgcgtcgaaccctaacccctctacgcgtacgccacgggaccccaccctggcgctcgacctctgggacgaggacaagttcgagggcatctccgtgctggaagcgatcccctccgacgactccgtcgcgccggccgaggccgaccagtcagatccctccatcgaggctcctgccgagacgattccgaccgcgaagaggagcccagctgagctcctccgcgcgttctccgtcgagatcgcgtgcgtcagcttcctgatctacttcgtgctcaactactttatggggaagcggcaaaacgagaacatcgcgctggcctgggccaccaagttcaccacgagggactccatcttcgacaagaacttcagccttcttggcacaggcgacggcaaggatagcggtcacattgttaaggattcaaattcagataatattgagaaagagaagtttgagctctgcgtggacaaattaaattttgaattgcttttgccaaatttctacatggttcgcacactgtcaaagttcttttctcctttcaaactcccggagcttgcgaattggatgttctga

SEQ ID NO: 7066 - DNA, 249 bp, Zea mays
  Peptide Sequence Number=SeqID_48845
atgatcacgaaaggtttcaccactggtcgtcccgacaaggagttgtatgccattgaggagcagccgcggacgcgtgggctcattcttcttcgttcactcaaaccgcccctgcccctgcccgacccgagcgccgccgcccctgcccgaccgccgccctgccggagcgccgccctgcccgaggccggcgtcgaggccgccccgcccgaggccgccgtcgaggccgcccctgcacgacgcccgcgcgcctag

SEQ ID NO: 7067 - DNA, 804 bp, Zea mays
  Peptide Sequence Number=SeqID_48846
atgtcatcgtcgctgcggttcctgcggccgaagaacgacggcggcggcggagacgacgggtgcttcgacggcgtcgagctggaggtgacggtgctgtcggcggactcgctgcgcctaccgccgtcctactcgccgctgccccgccggctgcgggccgtacgtgaccgtggcgtcgtcggacgcgcccgccggctcggcctgcagcacggcggtggcagtggggagcggcggcggcggcggcgagcacgcgtggggcgacacgctcgtcgtccccgtgggcgcggacttcctggagggccgcgcccacgttcccacgtctccgtgctctcggagcccgcctgccggctcgtcggcgccacgccgctgggctggtgccgcatccccgtggccgacgtgctcgacggcctccgccccgccgcgcgcgctccgccggctcagctactcgctgcgctgcccgcgccgaggcgggggcgggggcgcgtggggccacggcgtcgtgcacctctccgtgcgcctgcttggcctccgcgacgacgcgccggcagccacggccacggccacggacgcgacgccgccggtgcagcagggttggtgccgcgtggcgatgggcatcccggtgtccggaccgtcgtcggcggccgcttccgccgtcgtcgggatgcccttgtcgtggggcgccaccacgtcacggtgacggggccacgactagccgtggaaaaacggtggaatttttgccggcgatcagtcgatgtcgaccagcgagcgcgggatagtatattggcacaaattgttcttataacttaa

SEQ ID NO: 7068 - DNA, 498 bp, Zea mays
  Peptide Sequence Number=SeqID_48847
atggggttctgggcgacgacgctcatcttcgtcctcgccggcgtcgccgcatccctcttcacgctcctctgctgcaaccgcgggccctccacaaacctgcatgcggatttgggacttgggatcccacgcgcgagatctggctggtttggccgcagatcgttcgattgcggtgatgttggggttagggccactgaacagacaacagaggaggacgggagcgcgctggaggagggtctctgcagactacagccgccgcgcgatagagggggcaaagttgctgctcaagcagagggccgccagagcacaacaggacagcgggagaggagggtagaagccgagaagcgtagggcaaatcagtgtttgtgcggtgtacatgggccggtccacataatagagagccaatccccaaacatcacacctgagttcttgggaaggattaaggatgctaggtccatttggatcactctccaggtgaaggtggctacctggcactcatga

SEQ ID NO: 7069 - DNA, 552 bp, Zea mays
  Peptide Sequence Number=SeqID_48848
atggctttcttaggaaggagccgtaaagcaagggtaaaactagagttttacctccggctccaccaggcccggccccaggctcggtgccggggggttcgaccaggagccagtcgttctaggcagcagtgcggtcgtagtcgacccggagactgcatctcgactgagctccccatctcttccttctccacctcagccttggaagcggagctcgagatgctgcgccactgctcgggccaacttcttgatcacgttggggcccatggtgcctctttgatcgagcgcttggataatgccatgtgccgcgttcgggacattgcagacttaggcgttcatcgcggggccgcggtagcgctactcatggcggaggtctgcctaggatgcaaccttcaggatctcattggtcccccttcatctttcttggatgaagggttggaggatttgctgaaaggctacgatgacgtagctagccgtgtcattcttagggtgtctactcacgacgttgtctactgcatgctaactgcgacgtgctatgcctcggcattatcctcatga

SEQ ID NO: 7070 - DNA, 303 bp, Zea mays
  Peptide Sequence Number=SeqID_48849
atgcccgacgcgcccacctccagtccattatctcagatctcgcatgcaaaaataggtgtcacgggctaccttcgtcgctggacccaggcgcagacgccgctagggcccaaattggaagctgtcacgggctacaatgacgacgacgtgaagtgcaaggcgtgcgagtccgaggagtcggtcgctgagctgatgttatgcgacgactgcgatcgtgggttccacatcttctttctctgccccatcctcctatgtgtccccgtcggttacttcctgaatggtgctacccgtgttgctatgccctga

SEQ ID NO: 7071 - DNA, 402 bp, Zea mays
  Peptide Sequence Number=SeqID_48850
atggtgccccgattcggcaccaagcgtcgggctcgtgagtcggcatttaccgccaccaaggcggtgaagtgtggtgtcgggacgtcggctggggccacgtccctccccctcgcgtggctcgacgctgcccaggaggccatccaacggggcgtcgagatggcctggctagccctcggtgggcaagttgagcaagatgccaccgtcgccgaggtgggagcgtcgcccctggtgtcgttggttaaggtcgttcctctctctaaggaggagacgagggtcgccgatgcacaatcggccatggcatcgcccatcatctccgaccttctacgctccatcctcgacacccccgaggccacccggagcccagaggtggtgaacgtcctgagagcacctagaggggggtga

SEQ ID NO: 7072 - DNA, 366 bp, Zea mays
  Peptide Sequence Number=SeqID_48851
atgaaccggtcgtgggcgccgaactctgagcacgttcacctaaagtccgcgtgcctatattaccctgtgggctctgtcgccgttgcatcaacccaatcgcgagagccaacagaaggatatggagtaaaaccagagaagctcgccgccgcggtcgatttcgatgtgtcgtcggctggaatccgtgaagccgcccaggtgaaaggaggggcgtccgaaagggtatcgcccccggaactggggtgcactacgcaccggaagtccgggaagttctcaccggagcaggtgcgcagccgttgtccgcgaccgaccttcgaccatccaggtgtgatccgggccgttggcattggatccgatgggggcgattag

SEQ ID NO: 7073 - DNA, 3249 bp, Zea mays
  Peptide Sequence Number=SeqID_48852
atgcccggcataccgagggatgtcgccgagcactcactggatatccgagctggagcccgacccgtgaagcagcctctacgccgatttgacgaggaaaagcgcagagccataggcgaggagatccacaagctaatggcggcagggttcatcaaagaggtattccatctcgaatggcttgccaaccttgtgcttgtgagaaagaaaggagggaaatggcggatgtgtatagactacactggtctaaacaaagcatgtccgaaggttccctaccctctgcctcgcatcgatcaaatcgtggattccactactgggtgcgaaaccctgtctttcctcgatgcctactcagggtatcaccaaatcaggatgaaggagtccgaccagctcgcgacttctttcatcacgcccttcggcatgtactgctatgtcaccatgccgttcggcttgaggaatgcgggtgcaacgtaccagcggtgcatgaaccatgtgttcggccaacacattggccggacggtcgaggcctacgtcgatgacatcgtagtcaagatgaggaaagcctccgacctccttttcgaccttgaagtgacattccgatgtctcaaggcaaaaggcgtgaagctcaatcccgaaaagtgtgtcttcagggtgccccgaggcatgctcttggggttcatcatctccgagcggggcatcgaagccaatccggagaagatcgcagccatcaccagcatggggcccatcaaggacttgaaaggcgtacagagagtcatgggatgtcttgcggctctgagccgcttcatctcacgcctcggcgaaagaggcctacctctgtaccgcctcttaaggaaggccgagtgcttcacttggacccctgaggccgaggaagccctcaggaacctgaaggcgctcctcacgaatgcgcctatcttagtgccccccgctgccggagaagccctcttgatctacgtcgccgcgaccactcaggtggttagcaccgcgatcgtggttgagagacgagaagaggggcatgcattgcccgttcagaggccagtctacttcatcagcgaggtactatccgaaaccaagatccgctacccacaagttcagaagctgctatacacggtgatcctgacgcggcggaagttgcgacactacttcgagtctcatccggtaactatggtgtcatccttccccctgggggagatcatccagtgccgagaggcctcgggtagaatcgcaaagtgggcggtggaaatcatgggcgaaacaatctcgttcgcccctcggaaggccatcaagtcccaagtcttggcggacttcgtggctgaatgggtcgacacccagctcccaacggttccgatccagccggaactacggaccatgttctttgacgggtcgctgatgaagacaggggccggcgcaggcctactcttcatctcgcccctcggaaagcatctacgctacgtgctacgcctccacttcccggcgtccaacaatgtggctgagtacgaggctcttgtcaacgggttgcgcatcgccatcgagctaggggtccgacgcctcgacgctcgcggtgactcgcagctcgtcatcgaccaagtcatgaagaactcccactgccgtgacccgaagatggaagcctactgcgatgaggttcggcgcctggaagacaagttctacgggctcgagctcaaccacatcgcccgacactacaacgagactgcggacgagctggctaaaatagccttgtggcgaacaacggttcccccggacatcttctcccgagacctgcatcaaccgtccgtcaagatcgacaacacggccgagcccaaggcaccctcggcccagcccgaggtacccttggctcagtccgaggcacccccggctcggcccgaggcacccttagctcggcccgaggcaccctcggttcagcccgaggtaccctcggcccccgagggtgaggcactgcgcgtcgaggaggagcgaagcggggtcacgcctaatcgaaactggcagaccccgtacctgcaatatctccaccgaggagagctacccctcgaccgagccgaagctcggcagttggcacggcatgtcaagtcgtttgtcttggtgggggacgggaaggagctctaccaccgcagcccctcaggcatcctccagcgatgcatctccatcgacgaaggccaggagctcctacaagaggtacactcgggggcttgcggccatcacgcagcacctcgagccctcgtcggaaacgccttccgacaaggtttctactggccgacggcggtggccgacgccactagaattgtccgcacctgcgaagggtgtcagttctacgcgaggcagacccacctgcccgctcaggctctgcagacgatacccatcacctggcctttcgctgtgtggggtctggaccttgtcggccctttgcagaaggcacccgggggctacacgcacttgttggtcgccatcgacaaattctccaagtggatcgaagtccgacccctaaacagcatcaggtccgaacaggcggtggcgttcttcaccaacatcatccatctctttggggtcccgaactccatcatcaccgacaacggcacccagttcaccggcagaaagttcctggacttctgcgaggatcaccacatccgggtggactgggcagccgtggctcaccccatgaggaatgggcaagtagagcgtgccaacggcatgattctacaagggctcaagcctcggatctacaacgacctcgataagttcggcaagcgatggatgaaggaactcccctcggtggtctggagtctgaggacaacgccgagccgagccacgggcttcacgccgttctttctagtctatggggccgaggccatcttgtccacagacttagaatacggttccccgaggacgagggcctacgccgaccaaagcaaccaagctagtcgagaagactcgctggaccagctggaagaggctcgggacatggccttactacactcggcgcggtaccaacagtccctgcgacgctaccacgcccgaggggtccggtcccgagacctccaggtgggcgacctggtgcttcggctgcgacaggacgcccgagggcggcacaagctcacacctccctgggaacggccgttcgtcatcgccaaagttctgaagctcggaacgtacaagctggccaacagtcaaggcgaggtctacagcaacgcttggaacatccaacagctacgtcgcttctacccttaa

SEQ ID NO: 7074 - DNA, 1062 bp, Zea mays
  Peptide Sequence Number=SeqID_48853
atggaagatgagatatccagcataatagcttgtgctcttgccatatctgatgagcgccaccatttgatagatttaaaatttgagaacggaatggattattccaagggagagtatgctaaagcaatagagaaatcttttagttttctgtctgaaagttctttcagctcatcaccatggtcatctacaaattttgaagcaagcttatcatctctgtcttcattttcatctgatgacttttctggttatgatagctcatttttgttgtccccaatgcatccagaaatgactgtgaatgggaaagtaactctcaaagacaaatattcagttactgttgtatatgataatcaattctttgcactccgaaaaaagtgttgcccatccgagcttgcatatattacttctttaagccactgcaagaagtggaatgctcaagcatgtttaccattctctggacactggaagccaaacttgtctgccaacatattaggaatctatcaggttaagcaaattaagcatggcaaaaaggtaaagatttacttgatggttatggaaaatcttctctttggccacaatatttcacgaatttatgacctcaaagatcaaaattatgttgaggacatgggcttttctccaatctatattggtggaagaacaaagcatcttttgcagcgtgcaatctggaatgacacgtctttcctcacttcggtgaatgttatggactattctctacttgtgggagtggacaaagagaagcatgaacttgtgtttggcatcattgattatctgaggcaatatacttgggacaaacaactggagacatgggtgaagacttctctggtagtacccaaaaatgttttaccaactgtaatttcccccaaggaattcaaaaaaaggtttaggaagttcatggcgaagtactttttgtcagttccagacacatggagtcttgataatccgtctaagccatgcaaatcccttggtcagagcaatcgcaagttggcggaagtccagattggtgataacctgtcagagctcccaaatgaagttgaggggtgtgcctaa

SEQ ID NO: 7075 - DNA, 261 bp, Zea mays
  Peptide Sequence Number=SeqID_48854
atggagttgctggtgccggtgccatggcagtcggtgtcgacgcaccgcacagatggagtctctgtgggcggtgatcgattgaagcttggccaattctgcaccggagcgcttcatcaccgcgtggtcgtctctcatcgcaaacagagaactacactgcgtggaggccgattcggaggcatcgtactgcaacggatgcttcctcgaactcttcaacgcttcgctgaaggactgaccagaggcatctggattgttggtggctga

SEQ ID NO: 7076 - DNA, 1683 bp, Zea mays
  Peptide Sequence Number=SeqID_48855
atggcgccgccgccggagcttgccgttgtcgttccaacaatgaccctgctagtgctagcgctgctgggggcggccgtggcgggcaagatcagttatgctccgagcacaagcccacccgctactactcctactagcccaaaccaaagtccaccaacatatcatgccccaagccagatcccgtcgtcgacctcaataactccacctagcccaagccctaaactaagcctattattacccactaattctcaacctatcccaagtccaatctcctatccaccaagccaaagtccatcaatctcaaatccaccagctaattctcaacctattccaaacactagccctagctcaatttcaccaacttatcctccaagtggtcgaagctcaaacccattaatctcaggtccaccaatttatcctccaagtggaagttcgaatccatcaatctcgagtccaccaacatatcctcaaggtgtaagcacaaatcccttggtctcgaattcgcctacttatcctcaaagtgcaagtccaagcccctccatctcgactccaccaacttatgctccgagtgcaagtccaagctcttccatctcgactccaccaatttatgctccgagtacaagtccatctagttcaatctctacaccacccatttatcctcctagcccaagtccaagtctatcgatcaatagcccaccaggtagccccaccccaagtccatctagttcgatctcaatcccacccacttatcctcccagcctaagcccaagcccaagtagtgctccttcgtcagggcttagtgtcggctactacaagcatacatgctctggagcggagactattgtgagggaggttgtgacgaatgccatagacagcaatcgtggcacgggcgcggggctcattcgtttgttcttccatgactgcttcgttcaggggtgcgacgcttctgttctcctgaacacgaccggctccagcgagccgacggagagagccagcgcacccaacctgagcctgcgcggcttcgatgtgatcgacgcggccaaggcggcgctcgaggctgcctgccccggcgtcgtctcgtgcgcggacatcgtcgccttcgccggccgcgacgccacctgcatcctcagcggcagcgcggtcagcttcgacatgccggccggccgccacgacggccgcgtgtccctcgacagcgaggccgtcgccaacctgccgccgccgttcgccagcctcgagaggctcgaggagatgttcgccgccaaggggctcgacgtcgaggacatggtgacgctctccggcgcccacaccgtcggccgctcccactgctcctccttctccgaccgcctcccgccccacgtctcggacatgaacgacacgctctccggcacgctggccacgcagtgcaacagcggcggcggcggcgacaccacggtgccgcaggactcggtgacccccggcggcctggacagccagtactacaggaacgtgctcaaccacgaggtgctcttcgcgtcggacgccgcgctgctggcgtcggaccagacggcggacatggtgtccgccaacgcgttcacgccggggctgtgggagaccaagtttaaggcggcgatggtgaagatgggccgcgtcggaatcaagaccagcaccgacggtgagatcagagacaagtgctggatggtcaactaa

SEQ ID NO: 7077 - DNA, 279 bp, Zea mays
  Peptide Sequence Number=SeqID_48856
atgcagcagacttcttatagaccaccagctccgagaggcagagggggagaagctttggcagaggaaggcaatcaacagcctacgacttctgctgcttcagcaagtcactctcaaacttcctgggctcagctaccaccactcccaccactggcacctgccccaagccatgatcagcagccagatgggcatcttcggtctcagcaacaaagtgaccttcgggagcagtccgaagctcacacagttaacaatactgtgcctgagtcaaggcatatctactga

SEQ ID NO: 7078 - DNA, 1296 bp, Zea mays
  Peptide Sequence Number=SeqID_48857
atgagtaagccggctgcggccctagtgatgttgctggcgctcgtcgccgccgggccggcggcgggcgacggggggagcaccagactcggctgcttcgtgggttggtccccgctcaaaaccgtgtcctccctgctctgcctgctccagggctccagcacttttccgagcccgaagcctgcgcccacggggcagggcctgagcgtcggttactacaacaaaagcggcagctgccctaaagcggagcagctcgtgagggaagccgtgacgagtgccaccaacggcgcaaaccgtggccttaacgcgggcctcatccgtctccacttccacgacgccttcgttcggggctgcgatgcttccgttctcctggacaagaccgcgtcgaacaacaccgacacggagaagacaggcccacccaacaaggacagcctgcgcggcttcgaagtgatcgacgcggccaaggcggcggtggagaaagagtgccccggcatcgtctcgtgcgccgacatcctggccttcgccgcgcgcgacgcgtcctacatcctcagcaacgagaagatctactacgaggtgccggccggccgctacgacgggcgcgagtccttcgccgacgagaccgaccagctgcccgggccgggctccagcgtccaggacctcaagaagagcttcgccgcccaggggctcagcctagcggacgccgtcacgctgtcgggcgcgcacagcatcggcctcgcccgctgcctcttcttcaaagaccgcctgtcggccatggaccccggatacgctgccacgctgaatgccacctgcaacgctggcggggacagctacaaggtgaaccaggactacaagagccccgacgtcctggacaaccagtactacaagaacatcgacaagttcgtgctcttcgcgtcggacgctgcgctcaagtccagcgagacgattgaccaggtgaatgccaacgccggcggttatggcaagtgggagaaagacttcggggacgccatggtgaagatgggcaagatcggggtcatcaccagccccggctacggtgccgagatcaggaagcctcgggaggtctccgccttgcccgaccccaggcctcaacctcagcctcggcctcgggagaaggtctccgccttgcccgaccccaagcctcagcctcagcctcagcctcggcctcgggaggagtcacatcctcgcccgacctcggccttggccttaggagaagtctccgcctcgcccgacctcggcctcggagtcgactacgctacaggggatacatcattaccctactgctag

SEQ ID NO: 7079 - DNA, 321 bp, Zea mays
  Peptide Sequence Number=SeqID_48858
atggatctcggcatagttatcatggtcgctatggtggccgacaccttggaggcaggtctggggcctatggaggatatggcgcaggaggtcagggccaggaaggttatgggagaggtaacacggcgattgaccaaaggatcgatgttggtgttggccggggctttgttcaagatggtgacctgggtgacgttggaagaggccatggcaccggtggttcaggcaatcgttccattgggggtgcatcaacccttgaattacaggcatttgcccgacctgctgctgatctctcgcaggctgtcacgctgcttcaacaagctctga

SEQ ID NO: 7080 - DNA, 417 bp, Zea mays
  Peptide Sequence Number=SeqID_48859
atgcccatgcagatagacgggcataggaactcgagatccagacagagcggtgactgccaatgggttctcggtgtggcatatgcttttcactggccggttgacatgaaccttgagggcctaaaacttatctccagaaaagttggttacattaatgaaaaatcagtccagaatgatactagaaatcaaacgcgttggtttgtgcgactgtgccggccgctcctcagctgcaactgcaactgcaactgcaagcgaagtaacctgcggttgaccatcgtctccagtgagtccagggaccccaaaataaagggccaaggtaccttgcaaacacgacaaggtcagattggcatgcacatggtggagttcagactgaacaccgcctccaattggcggtactatgtaaccggttcagaaggatga

SEQ ID NO: 7081 - DNA, 459 bp, Zea mays
  Peptide Sequence Number=SeqID_48860
gtagccgttggcgcggaggtagccgttgctccggagttgcacccgaacattccggtgcacacccggaacaatgtccgggagaggagggcgcagtttgattcaatccatgtcaagtcagaggctgctgcgaggtcctgcttcgctttcaggtggatttatcttgcaaatggtatgtggatccgttctagaggcaatgagccttgcagccaggtttattcaatttcggttgtaatgcttctgacaacagttgtatcagtcctcttgtttagcttccatgtttcaccgtgcttgcagaaccaagccaagaaaacagatatcaactgtgatgccacactcaaaagcttgtttggtgggagggacaaggttgggatgctggagatctccaagcttttgagccgtgacttcccgaaaatctccaagcttttgtggtccatggagccagggatggctctttggtaa

SEQ ID NO: 7082 - DNA, 462 bp, Zea mays
  Peptide Sequence Number=SeqID_48861
atgtactgtttgctgtccggtgtgccagtatgggcgcgcctgacttctgcgcgcgctgcgcgcgcatttattgctctgcaggagaggagggcgcagtttgattcaatccatgtcaagtcagaggctgctgcgaggtcctgcttcgctttcaggtggatttatcttgcaaatggtatgtggatccgttctagaggcaatgagccttgcagccaggtttattcaatttcggttgtaatgcttctgacaacagttgtatcagtcctcttgtttagcttccatgtttcaccgtgcttgcagaaccaagccaagaaaacagatatcaactgtgatgccacactcaaaagcttgtttggtgggagggacaaggttgggatgctggagatctccaagcttttgagccgtgacttcccgaaaatctccaagcttttgtggtccatggagccagggatggctctttggtaa

SEQ ID NO: 7083 - DNA, 1092 bp, Zea mays
  Peptide Sequence Number=SeqID_48862
atggatcctaagggcaaggggatggtggtcaatgataaggagaaggagtccttcgtcaatgatccaaaggatgacaagcctactgactcaggctcgggccacaaaagaaaagacgggaggaagaagaaaacaaggcgcatcaaggagatagtctactatgacagtgacaaatcttcctcttcccaaaaggacgacgacaacgactacgagaaaaagaagacggtgagtggcttggataacgccaagcagatttgggacaccctcaaaatctcacatgaggggaacgacgtcaccatgctcaccaagatggagttggtggagggcgaacttgggagattcgcaatgatcaggggcgaggagccaacccaaacgtacaaccggctcaagaccctcgtcaacaaaataaggagctatggaagcacgcgatggacggaccacgacgtcgtccgcctaatgctaaggtcctttactgtccttgatccacatcttgtgaacaatattcgtgagaatcctaggtacaccaagatgacgcccgaggagatacttggaaagttcgtaagcgggcggatgatgatcaaggaggctagatacgttgatgatgcattgaatggcccaatccaagagcctcaaaccactgctctcaaagcaacgaggagcaaggaggcgctacctagcaaggtggcacaagttgaggcggccaggctcaatgatgaagaaatggccctcatcatcaagcgtttcaagacggcgctaaggggtcgcaaggagcatcccaacaagaccaagacgaaggggaagcgctcatgcttcaaatgtggtaagattggtcattttatcgctaattgtcccgataatgatagtgaccaggaacaagggaacaagagggaaaagaagaaggcttacaagaaggctaagggcgaggcacatcttggaaaggagtgggactcagattgttcgtcgtccgactccgacaacgaaggactcgccgccaccgccttcaacaagtcggccctcttccccaacaagcatcacacttgcctcatggtaagggaaaagaaggttattagaaaagcaagaggatcttttgtatga

SEQ ID NO: 7084 - DNA, 642 bp, Zea mays
  Peptide Sequence Number=SeqID_48863
atgcagctgaaaggtggtattgactctgggtattacgctaatctcctagtcaatggtgttgatgaatctcaagatcccacacctactcgtggaacatccaagagttctcagggtagaagcaaaaaatttagagatgaggacattcttctagtttcagcttggcttaatgtgagcatggatcctattcacagagttgagcaaacacatggcacactgtggacaagaatacatgcatatttcaatgcaaacaagacattcgagtcaaatcgttcaaaagttgtaattgcacgagatgcccctttacctattgatgttgatgctgaactatccgcgagacctgacggtaagaagaaggagaaacaaaagctacgacaacgttcaaccatagacgtggtggactatctaatggcaaagaagaaagaagctgatcatgagaaagacttaaagaaagaagagaggtgcaataaagcatttgctctgaaggaagaaaggatcaaattggacaaagaaaagtttgagtttcaaagacagctggaagaggacagaattcttaatttggatttgagcaccatggactacaaacaacagcaatattatgagcaccgtcagaatgagattcttgcaagacatttcaatttatag

SEQ ID NO: 7085 - DNA, 339 bp, Zea mays
  Peptide Sequence Number=SeqID_48864
atgtccggcaggccaaacgaccaatggctctacagtggcgtcaacggtcggcgcgtaatcaacatcggccacgtcagcatagtaatggttgggaagggtcaccggacatgtccggtgcgccaccgggcagttcgatgcccaccagaaatggaaggctaccaatcaaccgatgcggtgaccattgcagccaaacctgtccggtgtgcaccggactgtccagtgcacccgctgatagaaggcaatctggagtttccaaaggaaggagcaacgactctttggccccttagggctataaaagaggcccctatgtgcctctaccagatcaccaagcattcctag

SEQ ID NO: 7086 - DNA, 756 bp, Zea mays
  Peptide Sequence Number=SeqID_48865
atggtgctcgcgttcctggttctactgctgttatttgctcctgttgccgtcagccaacaaggtttcctgagcatcgactgcggcctggacgccagctacagcgggtacaaggacaaggtcaccggcatcgtctacgtctccgacggttcctacgtggacgccggcgagaaccacaggatagcccccgacctggagggctcgttccagggaagggctcagacgctaaggagcttcccgtccgggcagcggaactgctacttgctccccaccgtggctgggaccaggtacctggcgcgggccaccttcgcgtacggcaattacgacggcaagaacagctcggcgctggagttcgacctgcacctgggcgccaactactggcagacggtctacccgaacgcgcggagcagcgacgtgtacgaggcggtcttcgtcgcgtgggccgggtgggcgccgtggtgcctcgtcaacaccggccacggcacgccgttcgtgtccgtcttggagctcaggccgctcggagccgagctatacccactggtcacacccggcctggtcgtatccatgtttgcacgcataaacatggggggcagcgtttcaatgacgcgttttaaagatcacactgacatctccgccaccaacatcatcaagccaaccctggaagcactcccgactgatgatcaacagccctttaatgacctcatgaggcgcgaggaggaagaggtgctgcaacaactaccaaacggcgcgagagggtga

SEQ ID NO: 7087 - DNA, 1650 bp, Zea mays
  Peptide Sequence Number=SeqID_48866
atggatggaccttcgccacacctccatggcggcggcttcctagagctgctatgggagaccctagaagcagcacccttggaggctgccttggacacccagcttcgacagtttgatatcctcatcaacgagaaccaatctgggccgaagctcacggcgtacaacgacacgtggtacctgactccaacccatgtgcacaccaaatcctacagggctgacgacggcaagtacaacgtcactcttgctgcaaccaaagcctccgtgctgcctccgatgatcaatgcgctggagatctacattcgtgtcccttatgagagtccgacgacactccctcaagactttgacgccatcgtggctatcaaaactgagtatggactcagcagaaactggatgggtgatccatgttttccaatcaaatatgcttgggacggtgtgaaatgcagcaacgcaagtggtaacacatcgaggataacatcactagacctctccaacagctctttgcatggcacaatttctaagaactttacactgctcacagcactcgagaattttctagagatgttttttagtgaatccagactacaggctgattacacagtgcaaccagtacccacacatggcccaacaagagatccagaacctgataatgtttcaggaagccaaaaaagttatggctacaacatgaataaaactgagaatcgtcagttcacatacaaagagctggagaagttcactaataatttcaagaagttcataggacaaggaggttttgggcctgtctactatggccgcttggaagatgatactgaggttgctgtcaagatgcgttctgaatcatcgtcacatgggcttgatgaatttttagctgaggttcagagcttaacaaaggtgcatcacaggaatctagtgtccttgattggttactgctgggaaaaagatcatttggcactggtttatgagtacatgtctcagggcagtctttttgatcatctgagaggtaaaaatggtgtttcccaagccttgaattggaggaaacgtgtgcaagtagtgcttgaagctgcacaaggcctggattatctgcacaagggttgcagtttgccaatagtccaccgtgatgtgaagaccaacaacattctcctgggtcaaaatctgcaagctaaaatagcagattttggactttccaagacatatttgagcgatacacaaactcacatatcagtcactccagctggcacagctggttacatggaccctgagtactacctgaccggaaggctcagtgagagcagcgacgtgtacagcttcggagttgttctgcttgaggtagccacaggcgaggccccgacagtgccaggccgaggccacgtcattcagcgcgttaaacagaaggttgccaccggcgacgttggctcgatcgctgattcgcgacttggaagcgcttacgacatcagctccatgtggaaggtaatcgacaccgctgtgatgtgcaccgcggattctgctgctcagaggccaacgatggccacagttgtggtacagctgaaggagagcctggcgttggaggaaactcgtgagaagggcagcagcaacagggtgagccgagggagtgatatagaagctatggcgtccacacttggtccattcgcaagatga

SEQ ID NO: 7088 - DNA, 441 bp, Zea mays
  Peptide Sequence Number=SeqID_48867
atgggcaagagtaacaaacgcaagcgcgagtcgactcctccatcggaggacttcggcaactcggaatactcggaggaggagttctcctccgagtctgaggggtctccggctcctgtctctcccccagcgtcgtctgacgattcagatgactccccggggattgccgcggaggtctggacttatatccgggccgtcgagcgctctgggctcgagggctcggatgagtcggagtactcctcggacgaggaggactcttcggactcgtccgaggagggcggtggcggcgatggtggagacgacgacgacgacggaggcgacggtgatgacggcgacgatggcggtgacggcggcagcaggggcggcagcaagggcggcaacggcggcagcagcaggggcaacaacggcggcggcggcaagggcagcaacaaggccagtggctag

SEQ ID NO: 7089 - DNA, 495 bp, Zea mays
  Peptide Sequence Number=SeqID_48868
atggaggcctactgcgacgagaaggcacccgggggcttctcgcacctgctggtcgccattgacaaattctccaagtggatcgaggtctggcccataacgagcatcaggtccgagcaagcggtggatttattcaccaacatcatccatcgcttcggggtctcgaactccatcatcaccgacaatggcacccagttcactggcaagaagttcctggacttctgcgaggaccaccacatacgggtggactgggcctccgtggctcaccccatgacaaatgggcaggtggagcgtgccaacagcatgattctacagggacttaaaccgaggatctacaacgacctcaacaagtttggcaagcggtggatgaaggaactaccctcggtgcgggatcctgaaaacgacggagtacacataagcggcaaggccaaccgagccgagggactcctacgcctccgggatacggatacctcactcatcaccttctgcgataagtaa

SEQ ID NO: 7090 - DNA, 504 bp, Zea mays
  Peptide Sequence Number=SeqID_48869
atggcgtcgtcagctgctacgaccgcgaagctgatcgcgctcccgccggcgccaacacgcggcggctgctgctgctggaggacacgcaggcccgcgatccccgcggcggcggcgcgcctcaaggtctccgcctccgccgcctcgtcggacgtgccggacttcctctcgtccaattggcttgaaacccgcaagagaaagcccttcggtcccaggttgaattttagtgcagaagaagcagtcgaataccagcttgagtccttaaagtacaatgatctgccccgcccagattatgggatagaggtcatgtaccggtttgcaggctttgaccccttcgagaggtcaacttactttggacgacagtttgatctaggacagaaccagttcaagcaaagagtttggatacaaggagcccgtcccgaggaagaagagatatttcaattcacaatggttcaggtgcagactagcaggtggcttgaaaaagctgagagacatgttggtgtgtag

SEQ ID NO: 7091 - DNA, 420 bp, Zea mays
  Peptide Sequence Number=SeqID_48870
atgaatggaatgcgcgagggagcagctgccatggaagggcgatgtgggggaggcgcggttgggaagaaagatctagcgtggagggagcacgcgatggatggaatgcgcgcggtgggggaggcgcggtttctgggagagctcccaaatggatggtggccgatgatgctgagtgaggatcctgaagcgtgtcgaaggaagtggcatctgctctcaaggctgacatgttcgagacagttccttttacaagcctggctcagggaggttgagtgccatatggatgagaaggtcccacagttgagtcaggcgacgctggaaaagaagatgcacatgggatctcctcctgctggcacatgggagctgtgggcactgctggaactgaatcaaggccgccaatcaaggttgcatgcaactgctcagtag

SEQ ID NO: 7092 - DNA, 297 bp, Zea mays
  Peptide Sequence Number=SeqID_48871
atgcggagtccgttcggggtgcacgcgagctggattgaagaaggggaatccgaccagtggagcccacaccgctgcgacccagagaatgcgcctggtgcacagagaatgcccggtgggacccatcggtcgggcggccgtgttgagctgcgcgcgttgatcctttcttttccggtcatggtctcattgattcgaggtcagtgtatatccgcagagttagggcatatgatcgaagtagttatgggtgagttggactacatgatggaggtcaaaatattgtttgatgttaggcggggatag

SEQ ID NO: 7093 - DNA, 600 bp, Zea mays
  Peptide Sequence Number=SeqID_48872
atggcgcacacgtcgcccacttccatccatggcagatcttccatccgcaaaccgtgcctcccccaggcattgcatctgatattgctgctaaatgtttccgcagctgatccacccaaggccgaggaagctattagatggttttatccatcagcatctgcaggcaatgctcgtgctcaatacaacctaggcctttgcttgcagaacgggaagggtgtcaaacagaatcagaaggaagctgcaaaatggtatttgcgagctgcagagggagggaatgtacgggccatgtataacatttccttgtgttacagctatggtgaagggcttggacaggatccagtgcgtgctaagaggtggcttcaactagctgctgattgtggtcacaagaaagctctttatgagtgtggtattaagctttgtgcggcaggagacaaggtcaagtgtttcatgtatctagagctggcgacacggcgtggagaagctgctgctgctcacatgagggatgtaatacttgaatcgctctctgttgtgaatgcgcaacgtgccatgtcggatgctgataaatggaagcctaggacactccatcctagacctagaaggtga

SEQ ID NO: 7094 - DNA, 651 bp, Zea mays
  Peptide Sequence Number=SeqID_48873
atgccttgtcgcgcgccctcccaccaatccgtctccacgcagagaagcgcctacgccgtctcagcggaggcatccacctccacggcgctctggcttctcgagtcctcggcggagccacccgacgaggatgcctacgtgatgttgttctgcctcagcgagtggcaccgcgcggtggagccgaagctgcgagcgtgcgcacatacggacgaccgacacacgtggttcagggtccgcctcgggaacgccatgctccgcatgctcgttaggtttggggacacgtggcacacgtggagggtttttgccaagatgcccgagcatgctgtcttctcctcgaacgtcatgttgggtgggtacgggaaggctggattcctagaacaagcgctagatttgtaccgtaggatgatgtgggtaggcttgaggctggacgtgtacatgtttccctacgtgctacagagatgtgggggtgtcccaaactggatgacaaggaggaaggtgcatgctcatgtccttcggtttgggtttagagaggtcgatgtcctaaatgcactcatgaccatgtacgcgaaatgtgaggacgttgtgtatgcgcacaaggtgtttgaaaatatggtcataatggattgtatctcatggaaaatgaaagtcgcatag

SEQ ID NO: 7095 - DNA, 288 bp, Zea mays
  Peptide Sequence Number=SeqID_48874
atgcctccacctccgcagatcacgcctaccctgccccgcccgcgacagcctgcaagcattaatgaagttgtctgttttgcaataactatgtggagcggtttgatcatcactgtccatgggtcgttgtgttgtgtcctgtcatctatacaacaaataggttaccatgtaccaaccttgtgtcagaagatgaccatatcacatgtgcaaactgggcgttatggtgttctctggtttgtcatcgagaatagctctttctcttccgtcaagggtttcaccaatggcttgtaa

SEQ ID NO: 7096 - DNA, 312 bp, Zea mays
  Peptide Sequence Number=SeqID_48875
atgaaggattctcaggatattcagagcacaacagagttgcagtcatcagcacagggtactaatgaagtgcaaagtcagcaaccaaacccgatgaccactgatgctcctgcaggaaattcgggttccttgtctatagctagtaatgacagtaagaaggtgtctcgcgaagacattgaacttgttcagaatttaatagagcgttgtcttcagctatacatgaacaaaggagaagttgttagaactctttctactcgtgctagaatagaacctggcttcactactttaggtgacgtgttcatgctccaatggtga

SEQ ID NO: 7097 - DNA, 390 bp, Zea mays
  Peptide Sequence Number=SeqID_48876
ggaggaggggcgcagccgggcctgagggcctggcggcagtgccaggtgcgtgaggacgggcgccggtccccgggagaaggccggcggcgccggcggcgggggctggaggtcggcggcggcggccgcacagcggcagaggcccagtgcgcgacgggcgcgcaggggaggggcgacgggaggcgctccctgggcgcgacgggcgcgcaggagaggggcggcgggaggggccggcggccgagggagggaggaggggccggcggccgagggagggaggaggccggcggcgctacagtggagggaaaaacccctggcggctgcgcaggggagaagatgcccctggcggctggcaggaaacagagaactaaacctagactgaagataccatgttag

SEQ ID NO: 7098 - DNA, 1875 bp, Zea mays
  Peptide Sequence Number=SeqID_48877
atggccggctactccatggccgccgtcgcccttgccggcatcgccctagcgctcgccgccgcgacgacgacgcaggtggcgtcggccgccggcgggcacgactaccgcgaggcgctgagcaagagcatcctctacttcgaggcgcagcggtccgggcggctccccggcagccagagggtcgcctggcgcgccgactccgggctgctcgacggcaaggccaacggggtggatctggtgggcggctactacgacgccggcgacaacgtcaagttcggcctgccgatggcgttcacggtcaccatgatgtcctggagcgtcatcgagtacggcgaccagatggcggcggccggcgagctcggccacgccaccgacgccatcaagtggggcacggactacctggtcaaggcgcacccggagcccaacgtgttgtacggagaggtcggcgacggtgactcggaccacgactgctggatgcggccggaggacatgacgacgagccgccaggcgtaccgccttgacccccagaatcccggctccgaactcgccggggagaccgcggcggcaatggcggcggcctcgctcgtgttccgcagctccaaccccggctacgccaacactctcctccagcactccaagcagctgttcgatttcgccgacaagtaccggggccggtacgacagcagcatcacggtggcgcgccagtactacgcctcgtccagcgggtacggggacgagctgctgtgggcggcggcgtggctgcacgaggcgacgggcgacgcgcggtacctggactacctggccaacaacgccgacgcgctgggcggcaccggctggtccatcaaccagttcggctgggacgtcaagtaccccggcgtgcaggtcctggccgccatgacgcttctgcggcggcggggagacgccggcgccggcgcgcacgccgacgtgctgcagcggtacaagcagcaggcggacctcttcgcgtgctcctgcctcggccggggcgggcccaacagcgtgcgccggacgcccggcggcatggtctaccaccagaactggaacaacgtgcagttcgtcaccagcgccgcgttcctgctcgccgcctacgccgaccacctcgccgcggccggccagggcgcgcggtgcccggccggcgggaccgcgcagccgtcggagctgctggcgttcgccaggtcccaggtggactacatcctcgggagcaacccgagggcgacgagctatatggtcggttacggcgccacgtacccgcggcaggtgcaccaccgcggcgcgtccatcgtgtccgtcagggccaacccctcgttcgtcagctgccaggccggatacagcagctggtaccaccgccgcgctgccaaccccaacctgatcgtcggcgccaccgtcggcgggcccgacgagtatgacaacttcgccgacgagagggacaactacgagcagacggaggccaccacctacaacaacgcgccgctcatgggcgtgctcgctcgactggctgccggtcacggcggtggcggtggcaagtttggtcatcactcgctcgccgccgatgattcagaacacccgtcggcgtggcccatcgagatcgagcagaacgcgacggcgtcgtggacgaagcagggcaagacgtaccgccggtacgcagtgacggtgaccaacaggtcgcccaagaccgtccacgagctccacatcggcatctccaagctctacggccaggtgtggggcgttgacaaggcgcggtacggctacgtgctcccgagctggataccgtcgctgctcgccggcaagagcgccgtgttcgtctacgtccaggctgcgccaccggccgacgtctgggtcaccggctacaagctcatctga

SEQ ID NO: 7099 - DNA, 789 bp, Zea mays
  Peptide Sequence Number=SeqID_48878
atgacgacggcggcgcgccccacctgggcgccggccaagggcggcaacgagcaagggggcacccgcatcttcggcccctcccagaagtactcgtcccgcgacctcgccgcgcatacctcgctcaagctcagaaaagacggtcaacagacccaagaggagttacagaagaggaatctcagggaggaacttgaggaacgtgagcgcaagcactactcttccaaggataagtcctatgctggtatggctactttctctgtctcgttcttttgttctccccttcaggataagtttctagctgaagaaagagaccggcggaaaagctcaagccagctactcctagaaggttcaaagagagaggcagaggataagatagttccacgagaaatcgatgcagatgactccgatgtggagcctaaaagtgatgatgagagcgatgaagatggcgacgacgacgacaccgaagctctaatggcagagcttgagaggattaagaaagagagagcagaggagaagcttagaaagattatgagggacatgacgagaattgttccatttcaggagcggcaacaagcagaggaggaggccaagatgaaggaggctgaactgatgcggggaaaccctttgattaatatcaacaatcctggctccttcagtgtcaagagaaggtgggacgacgacgtggtgttcaagaatcaagcacgtggagagaccaagacgccgaaacggttcatcaacgacaccatcaggagtgacttccaccgtaaatttcttcatagatacatgaagtaa

SEQ ID NO: 7100 - DNA, 588 bp, Zea mays
  Peptide Sequence Number=SeqID_48879
atgcccagagcagcggacacagcacgaatcaatggcgacagcggatcacagcacggctccacgctaacccagccccgtggtgactacagcgaggatagaattctagacccagggttgagggttgggtgcactggggaatttatatcacccacggtttggaaggggagagtccagtcacggcgcccccaaccacccgacgagtttcacggcggggagcagcccatgccgacgtgcggagcggcggtcatctatgtctccggtgaccaatttgctgctccagtagacgatttccccccccaacagtcgcgtgcgcaccatcggcctcatcctaatggatgcttcgggggcgatttggatggtgacctctgctttattacttgggatgacaaactgattccaaagaaggttgattctatggactacactgcaatgaggttccaggaccagctaagtcgggttattcaggtgatagagatggatgagtgtgcgtatcaagagatgattacacacttgcacctttgctccatcatgtgcccaagaagggatgccaagatgagcccgaggcagagtccagggatgctaagatga

SEQ ID NO: 7101 - DNA, 435 bp, Zea mays
  Peptide Sequence Number=SeqID_48880
atgggcaagaacaagaagggtcgaggttcatcgcaccactccggcgataagcggaaatgcgagccaagtcctccctcggaggactttagtgactccgagtactcggaggaggagttctcctccgagtccgagaggtcgccagggatacccgccgaggtatggatgtacatctgggccatccaacgctccgggctcgagggctcggatgagtcggaggtctcctcagatgaggagaactcttccaactcgtctaaggaggagagcggcagtgacggcgacgacgagggcgacggcggcgatgacagcgacgatgatggcaagggcggcgaaggcgacggcggcaagggcgacggaggcagcggcggcaagggcggtggcaacggcaagggcagcggcggcagcagcaaggccaatggcaaagcgccattggcttaa

SEQ ID NO: 7102 - DNA, 2655 bp, Zea mays
  Peptide Sequence Number=SeqID_48881
atgccgcctcccaataaccgtctctgcgtagcactagctattgcgctcgtcgtcttctcttcgctgcacactccagctgctgcttctgctgctgacggcgacactcttgcggcaggccaggcgctcgccgccggcgacaagctcgtctcccgcaacggcaagttcgcgctcggcttcttccagttccggcaagccctgccaggcggcggcggcaccggtacgtccgcatccgtcgtcgtcccttcccccggctggtacctcggcgtatggttcaacaagatcccggtctgcactccggtctggatcgccaaccgagacaggcccatcaccgagtccgagctcaaggtagcccaattcagagtcgcatcgacagacggcaacaacaagctgctcgtcgtcgccaccagtaacactaacaccagcgccgacaattccatcataatcgtcgccaacaccaccacgaacggtagcagcgtccatgtcgtgctcatggacaccggcaaccttgtcctcctgccgcaaactgaagccctactatcctctgcttcagcgcccgccgccagctcctcctcctcctcctcctcctcctcctcctcctcctcctcctccctgtggcaaagcttcgactacccgaccgacgtcgggctccccggcgccaagatcggctggaccaagctcgccggcggccgctacttcagccgccagttcatctcgaagaagagcctggtggacccgagccccggctcctactccatcagcatcgacaccaacggattcatgcagctgactcgcaacgccccgagcgtgcagtactggtcgtggacgtcggggagcctgggaaacctcgtgacggcgctgactgccctgatcgacatggatcccaggaccaaggggctgctgaaaccgggctacgtggccaccgccgacgaggtgtacttcacctacagcatcaccgacgagtcggcctccgtgttcgtccccgtcgacgtcaccggccagctcaagctcatgctctggtccgactccaagcgggcctgggagaccatctacgcccagccttctgatttctgcgtcacctctgccgtctgcggccctttcaccgtctgcaacggcaactccggcccgtcgccgtcgtccttctgtacctgcatggacaccttctctatcaggtcccctcggcattgggagcttggtgatctcacagaagggtgtgcgaggacaacccccttggactgcgaagctgctaacagaagcagcaatggtagtcccgctcctgcaggctccacggacgtgttccaccccatagctcaagtggctttgcctttgccctacaattcccggccaatagaggacgccactacgcaaaacggctgcgaggcggcttgtctcggcgactgcaactgcacggcctactccttcagcaccgatggcaaatgctctgtctggaatggggacctgctcaacgtggaccaggccgacagcaccataagctcccaaggtgttctttaccttcgtctcgccaagagtgatttccagggtttgagcagaggcaacaagaggacaccgacggcggcgatcgctgcaggcgctgttggttctggaatactagtgctcgccgtgctagcgctcgtaatctggaggtgcaacaatgtgccgccgccgctacacgccggcgtcggagacggtggcggaatcatggcgttcaaacacaccgatctatgccgcgctactaagaacttcagcgacaggctcgggggaggtggtttcggctccgtgttcaagggactgttgggtgactcgaccgctgtggcggtgaaaaggctcgacgatgcccggcaaggcgagaagcagttccgggctgaggtgagctcggtcgggatgatccagcacatcaacctggtcagactgatcggcttctgctgcgaaggcgacaagaggctgcttgtgtacgagcacgtggtgaacgggtccctcgacgcgcatctgttccagcagagcagtgccgccgtcgtcgccactgcgctggattggagcaagaggtacaggatcgccgtcggggtcgcaagaggattgtgctacctgcaccagagctgccgcgagtgcatcatccactgcgacatcaaaccggagaacatcctcctcgacgcgtccttcgcgcccaagatcgcggacttcgggatggcggcgttcgtcggccgagacttcagccgggtcctgaccacgttccgagggacagcagggtacctcgccccggagtggctgagcggggtccccatcacgcccaaggtggacgtctacagcttcggcatggtggtcctggagatcgtgtccgggcagaggaacacgccgccgcaggctctcagcaggagcggttactaccacgccgcggcgtatttcccggtgcaggccatcacgaagcttcacgagggagacctgcagggcttggtggacccgcgcctacagggagacctcagcctggaggaggcggagaggctgtttaaagtcgcgttctggtgcatccaagacgacgagtgcgaccggccgaccatggctgacgttgtccgcgttctcgagggcctccaggagctcgatatgcccccagtgccaagactacttgcagctattacagcacgcgccaatgcggatttcatgtga

SEQ ID NO: 7103 - DNA, 2217 bp, Zea mays
  Peptide Sequence Number=SeqID_48882
atgacggcagctctcagccccttacgtcagcaaggagacgtcagcaaggatccgacagccccgacagctgtggtgacgacggtggtgctccgtggtggtgctggaggacgaggaggagggctgggagcgatgacgtcgccgaggaaggacgcggggttcctgacgcaggaccagcgggagaagctgcggatcgcgcagtacgagctgcagatgctggagcagaagcgcgccgccgcggccgccgccgccgcccggggcggcggcggcggcggaggtgggcccaggcacgtgcgccggtcgcattccgggaaggccatcaaggtgaagaaagatggagctggcggcaaagggacttggggcaaactaattgagactgatgcagaggcatgccttgatcgaaatgatccaaattatgacagtggtgaggagccatatgagttagttgaggcccctgtttcaaccccactagaagactacaagaaatctgttgtccctttaattgaggaatatttcagcaatggggatgtaaaattagctgcttctgatcttaaagagttgggtcatgatggtttccactgttactttgtcaagaagcttgtttccacagcaatggataggcatgacaaggagaaagagatggcatcagtgcttctgtcgtatctttatggcaacgtggtcagttcaactcaaattaggctgggatttgtgctgctattagaggctgttgatgacttggctgttgacatacctgatgtggttgatgtgctcgcccttttcattgcacgtgcagttgttgatgacattctgccacctgctttcctcagcaatgcaaaagtgagtctgtcaggatcttcaaagggtatgcaggttgtacaaattgcagagaaaagctatctttcagcaccccaccatgcagagttaattgagcgacgatggggtggttcaacccacatcacagtagaagaggtgaagaggaggattgctgatcttctgaaggaatacatcagaaatggtgatacagctgaggcttgtaggtgcattagagaattggcagtgccgtttttccatcatgaggtggtgaagcgagctcttactcttggaatggagagtccagctgctgaagctcttattgtcaagcttctgaaggaagcatctgaagaatgtttagtaagctctagtcagatgatgaaaggattccaccgtgttgctgagagtcttgatgatctcattcttgacataccatctgcaaagtctgaatttcagttgttggtatcaaaagccatttctgagggatggttagattcttcctatgtgaactcaggtgtcaacggaagcgttgaagacgatgaacatgagaagctggctaggtacaagagggaggctgtatccataatacacgaatactttttctctgatgatacaacagaggtcatccgtagtgtcaaagagcttggttatccggaatacaatccgatcttcgtcaagaagctcataacaattgctatggaccgcaagaacagggagaaagaaatggcatcggttcttctcccttcattaagcatggagctgttctcgtctgaagacatcgccaagggatttgtaatgctccttgaatctgcagaagacaccgcgctggacatattggatgcctcagatgagctgggactgttcctagccagggctgtgattgatgacgttctcgcacctctaaacttggatgagattagcagcaagcttccaccaaactgcagtggggctgaaacattgaacatggcacgctcccttgcgtcggcccgtcatgccggtgagaggcttctgaggtgctggggcggtggaaccggatgggctgtggaggatgccaaggacaagataacaaagctcctggaggagtatgagagtggaggcgatgtaggggaggcatgcaactgcatccgtgagctgggtatgtctttcttcaaccatgaagttgtcaagaaggcgctcgtgatggcaatggagaagaagaacgagaggaccctgaacctgctgcaggagtgctttggtgaagggatcataaccatcaaccagatgaccaaggggttctcaagggtcagggatgggctcgacgatctggctctcgacattcctgatgccagggagaagttcctttcctatgtgcagcgcgcgaagaagagtggatggctcctgcctgggttcggtgtggcatcttcggcttga

SEQ ID NO: 7104 - DNA, 624 bp, Zea mays
  Peptide Sequence Number=SeqID_48883
atggccagcgccggcgggcggcggcggtccaaggcgaagccgcgggcgagggccgggggcaaggcgaagaagaggaccaagtaccttagcctcaccgagctgctggttaaggcgcacgcgcaggtgggagcgtcgccacggtccccgtgggaggacgaggaggcggtggcggcggaagtgaagccggaggacgacgcctgcggtgacgacgacgacgaccaccaccaccaccaccacgaggcgtccaccctgttcgaggccgtgccggcgccgtcgctctccgacatcctgggcccgtcgccgcccgagtcgccggccgggctccggctccggggcgctgccgggcgccgaggaggaggacctcccgcgccgcgcgctgcggggcagggccagggagcgctgggtgtactgcaccggcgggccttcgccgccaccgccagcgacggcaaccggcaccgccaccgccaccgcgtcgccgtgctcgtccgccgcgagcacgggcgcgtcgccgcgctcgctgctgctcaagctggactacgacgagatcctcgcggcgtgggcgggctgcgggccgctctacatcggcgccgccgtcagcccgcgtccggtcctcgcggacgctga

SEQ ID NO: 7105 - DNA, 627 bp, Zea mays
  Peptide Sequence Number=SeqID_48884
atggccaaaagtgggccggcagtaattgcagcggcagacgagcagaagcagcgggaccgggaaaggggatgttgtggaaaggatccttctcggcgaaggaagcgggccccgagccctcctactgatcaggggtttgaaggctggcccctcggaagggtttcgacagcctccccagagcactcgggcttcaagcccattactgatcaggggttcgaaggctggcccctcggaaggtcacttcgcccctcctcttttactgtccgatatgacgggaaaacagcggcgcccgccccgctccgactgtcgtgccaaccacctaggcgaagactgacaacaagtcacgatcaaccaccgagttcggcctcgggcgcaacaggaagctccgcctcgcccgaccttaggatccggcctcgggaggaggtctccgcctcgcccgacctcaggctccggcctcaggaggaggtctccgcctcgctcgacctccggactcagcctcgacctcggtctcgggaggaatcgcgtcctcgcccgaccccggcctcggcctcaagagaagtctccgcctcgcccgaccttgggctcggaccgaccgcgccaacaggggatacatcattaccctatccctag

SEQ ID NO: 7106 - DNA, 870 bp, Zea mays
  Peptide Sequence Number=SeqID_48885
atgaccctcgcgccccaccccgctgccccggtaatctcgcttcatgaccccgcgccccacccccgttccatcccccaatctcgcttcgtgacccccaatctcatggaggcagtactgacggggaagggtgaggcggagaggaagaagagatccggagacgagcgagcgtcgaggccggtgtcacccgacccgtcccgtcaatccccatcagtacaagaagagatccggagacgagcgagcgtcgaggccggcgccacccgacccgtcccgtcgatccccatcagtactgcctccgtgaccgccttgcgcacctctccgcctcctcctcgacgaccaccaccgcgggctgttcaaatcgcagctggaggcaccctgcacgacgtgcttccaggtcgggcggtcatgggcgatggtgacgatgaagattcttccgtggtcgcgaccgtaacctgcaggacctgcttccatggtcgcgaccgtcgtcaagtggaagatatgtggcttgttgtagagaaatcacaattccccaacatcacacatgaattcatcattgcatcttcattccacatctggaggaacaatttcacagaaagcaaacaaggacaaggacatgaggagcttgatggagccagcttgcgagaacatgaagaattcacaaaggtgaaaaatatcacaaaggttgaactggggagatatgagatagatacatcatacatggtacgcacgtatctcatgtgtgtgttgaggcagaggcggcgaccagcaagagcggcatgcgcacctcaggccagcctcttctctcaaccaaccacagtgcttgtttatttgactgctagaactagcaaaaatattgaatgttccctgaactag

SEQ ID NO: 7107 - DNA, 702 bp, Zea mays
  Peptide Sequence Number=SeqID_48886
atggcagccaccaccgaccgcagcaggatgcaggcagcagcactcgtgctaaccctactggcgctcctcccaccgagcatcctcggcgcccgcaccagaccgccgtcgcctccgcaccatagccagggcggccacaagcgctcgccgccgcctcccgcttctcttcctcctccccctcccccacctcctccgccgccgcccgcggccgacgccggactggtccgcgccacgtgcaactcgacggcctactacgacctatgcgtgtcgacgctgggcgccgacccgaccagcgccacggccgacgtgcgaggcctctcgaccatcgccgtctccgccgccgccgcggacgcctcgggcggggcggccgcggccgacgctctggccaccgccgccggcaacaccacggcaacacccgtcgacgccaccacccgggcgctgctccgctcgtgcgcggccaagtacggcgaggcccgcgacgcgctgtccgccgccagggactccatcgcgcagcaggactacgactacgcggccgtgcacgtcagcgccgccgccgagtacccgcaggtgtgccgggtgctgttccagcggcagaggcctgcggactacccgccggagctggcggacagggaggagcctctccgacggctttgcaccgtcgcgctagacatcatcacgctcctcgccaacaacgacaccaactga

SEQ ID NO: 7108 - DNA, 1181 bp, Zea mays
  Peptide Sequence Number=SeqID_48887
gggagtatctcgcctccggtgctgatggtggcggcatcaccctctggaaactgcatcccgctgacgacggcgaggcatggaaaattcacaagacgttactattccatcacaaggatgttcttgaccttcagtggtcgcatgacagcacatttcttgtttctgcatcagtcgacaacacttgcataatttgggaagctagtaaaggcacagtgcaacaaaagctagagggacatctgcattatgttcagggtgtggcatgggatcctttgggccagtatattgcttcactgagttctgacagaacctgtaaaatatatgcaaaaaagcctcagggcaaatccaagaacgcggagaggttgaactttgtttgccagcatacactagtgaaggtagaataccagaatcatgatgaatctaagccaccaaccaaatctcatttgtttcatgatgagacactaccatctttcttccgaaggccttcgatacaactccctggggcaagtaaagctatagtggcagtacgcttctgccctgtactattcaaaccacgtggttctaactcagatggtttcttcaagcttccttatagagttgtctttgctgtggctactttgaactctctgtatgtctatgatacagaaagtgttcctccaattctagtccatgctggtctacactatgctgccattaccgatattgcatggtcttctgatgctaagtacctggcagtgtcatcacgagatggctactgtactataatagagtttgagaatgaggaactgggacagcctcacatactccccggatcaaaggaagttgctaatgggaatctgacacctgagaccaagaagcctgtatgtgctgatagcatgaaggttgataatagtgccaacaagcttaagatggaagccagtcctgttgctgtaggagttagagcaccactgctgccaactgagaacatcaagagaacaggagagcttgccgaaggaaatgtaacctgtgaaaacaaggagccggtaacaatagacagtatggaagtagatgccgatgataccaaaggcaaggaggcaaccatacccgtggcagctgaagtgacaccgccaccagcggtaccggcagcgaagaacagcgcatctagtaagcctgctaagaggcgaattactcctatcgcaatcgactag

SEQ ID NO: 7109 - DNA, 1068 bp, Zea mays
  Peptide Sequence Number=SeqID_48888
atggcagcgagcttgttctccactctccagcacgtcgatccagcgagagcaccttcgaactcaccggtgaaaatggaagaacgtatgaagctagacttgttgcaatttatagacataactttgaatggcaaccagttatctggatctttgcctgatgagattggttacatgaggaacttaaacatattacaaataaatgagaacaacatatcaggccccacacctaactcttttgccaacttaacaagcattaaacatcttgaaagacttggttgtggacaacctctacgtttcacttatccagcgtacatgtcctcaccttgccacagtgagttgttcctgttagagaaggaagatcccatgaagaaagagctaatgcaattggttgtaaccacacgacttgaccctgaactagaagtgcccttgttactcaccggtccattaaaattagtccatgcatttctggtttccccagctgaagtagatttggctgcagcttgtgtgatgcatgttggacgtcccttttggctgcattgccctggattcttccagaaaatatgggatacattttatctcatcctaatatacagtgcggtttctcgaggttctatttcattgcttgacatccctttctctgatttatctgatgtggttgctgcagatgattacttctatattgaaggtgcttctgcgagtattccacggtcgattgctaaggtgacattaaatgaaagcaaaaccaaagtagtcaatttctcaatagcctggtcgtcctcaccagacctcgtacaatatagacctttcttcagcacaccagaacttgttgagttccctacatccaagcctggccagaaagcttatgcctatttctacccaccatcaaatcccaattttcaaggtttgccttatgaaaagcctcctttgcttgtcaaaacacatggaggaccaactgctgaaacacgtgcaattctggacctcagtgtccagtattggacaagtagagggtgggcgtatgtcgatgtcaactatggaggaagcactggtttgttcttaactttgattgtttag

SEQ ID NO: 7110 - DNA, 189 bp, Zea mays
  Peptide Sequence Number=SeqID_48889
atggctgtcaaaaaatggggagagaaatcattaactgaactggaagcagaaaagcggttgtcctactcatgtgagaaggaacagagcgccatgaatcacgcagaattgacaatcatagaaggcgacatgaagcgggccttcgatagaaagattgagtctgacagacgtgagggttacaagcctcattag

SEQ ID NO: 7111 - DNA, 2538 bp, Zea mays
  Peptide Sequence Number=SeqID_48890
atggcgaggctgatgatttgcctccaccaccccctttggctgctggtcaatttgaagtatgaagatgatacaccggttgatcggaaagggtcgggaagaaaagtgatcgaaaaactgcagcaaacttatgctgctgaacttgcaaataaagattttgcatatgatggtgagaagagcctgtttacaattggtgcccttcctcaagttaaaatggaattcactgttgtggatgaagacgtttcaactggaaagactcctgcaaatggcagtccaggcaatgatagtcctcctggaagtgacaggaaaagggtccgaaggccttacaatacaaagacatataaggttgaactatcttttgcggcaaaaatccctatgagtgcaatctcacaggctttgaggggtcaggagtcagagcacactcaggaagcaattcgagtgattgacattattctgaggcagcactcagctaagcagggttgcctattagtaaggcaatcgttcttccacaataatccttccaattttgttgacctgggtggtggtgtagtgggatgtagagggttccattctagttttcgtgcaacccagagtggactttcactcaatatcgatgtgtccaccacaatgatagtgaaacctggtcctgtcattgactttctgattgccaatcagaaagttaatgatccaagcatgattgattgggcaaaggccaagcgctcactgaagaacttaaggataaaaacaagtccggcgaaccaagaacagaagattgttggtctcagcgacaggccttgccgtgagcaattattcacactgaaacataaaaatggtgaatctgaagagatcactgtttttgattactttgtaaagaaccgtggcataaagctggaatattctggtgatcttccttgtatcaatgtgggaaaaccaaagcgtccaacttattttccagttgagttatgcagtcttcttcctttgcaacggtacactaaagcattgagcacacttcaaagatcatcactcgttgagaaatctaggcagaaaccacaagaaaggatgtctgttttgtctgatgtgctgcaaagaagcaactatgatgcagaacccatgctgaaggcttgtgggattacaattgctagaaatttcatagaagttgatggtagggtactgcagccccctaagcttaaagctgggaacggagaagacatttttacgcgcaatggcagatggaatttcaataataagaagctcattagagctagcagtgtcgagaaatgggcagtagtaaacttttctgcacgatgcaatgtccgggatcttgtccgtgatctcatcaagtgtggaggcatgaagggcattatggttgatgcaccatttgctgtatttgatgagaatccttcaatgagacggtcacctgctgtaagaagggttgaagacatgtttgaacaagtgaaaactaagcttcctggagcacccaagtttcttttcattatgccattgacctttacagggccttggaagaagaaatgccttgctgaatttgggatcgttacacagtgtgtggcaccaactagagtcaatgatcagtatcttacaaatgtcttgttaaagattaacgcaaagttgggtggcttgaattcgttgctccaaattgaaacatccccagcaattcctctcgtatccaaggtcccaactataatcttgggtatggacgtatcacacggatctcctggacattctgatataccgtctgttgctgctgttgttagttctcgtgaatggcctcttatctcaaaatacagagcatctgtccgcacccaatcaccaaaaatggaaatgattgactcgttgtttaagccacgggaaactgatgacgatggtctgattcgggagtgtctgattgacttctacaccagttcagggaagagaaagcccgaccaagtcatcatcttcagcaccaacctgatttgtgtctctgattatagggacggtgttagtgaaagtcagtttaatcaggtgctgaacattgagttgcaacaaatcattgaggcttgcaaatttcttgatgagaaatggaatcccaagttcacattgatcattgcccagaagaatcaccacactaaatttttcattcctggaaagccagataatgttccagctggcactgttgttgacaacaaagtctgtcatccaaggaacttcgatttctacatgtgttcacatgctggaatgattggaactaccaggccaactcactatcacatcctgcatgacgagataggcttcaatcctgatgacctgcaggagctggtgcactcgctctcttatgtgtaccaaaggagcacaacagccatatcagttgttgctcccatctgctacgcccaccttgcagccgcccaggttgggcagttcataaagttcgacgagatgtcggagacttcatctagccatggggggcatacctcggcgggcagcgtccctgtacaggagctgccccgtctgcatgagaaagtgaggagctccatgttcttctgctga

SEQ ID NO: 7112 - DNA, 969 bp, Zea mays
  Peptide Sequence Number=SeqID_48891
atggcgtcgggctcccgcggcggcggcgggagcgacttctccgtggtcgtggtgggctccgacgccggcgccggcgcagcgctcctcgttccctccgaccgccactcgtggcacgactgcctcgccgaggcggacgcctgcttctccgacctcgaggagcgccaggtcgtgcgcgtccagggcaccgatcgggcccgccgaaccatcgtccgtgtcgtcggcaagttcttcccgggtgcgcgaatcggccacgtatttgctccccttacagctgcagttgctcggtgtgagcttgccggttgcaatcctacagtaacgatcgatgctgcagattgtggaatgcggaccaaccaacttctattcaatggatggcttagtgttattgcgtcccagacttctcttggtgtcagtgtttacatggcatttacttcggaattttggtttccagctccagcaattgacggtgaacgtctgaaaaagtatgtgttctacaaactccgcaccgaattgcctgtgggtccattctgcatcttgtacatgcacagtactgtgcagtctgatgataacaaccctggagtgtcaatcttgaggacaatttatgaggagctttcacctgagtacaaggaaaggcttcaggttttctacttcttgcatcctgggcttcgctccaggctggccatcgccacacttggcaggctatttttaagtggagggttgtattggaaaatcaagtacattagtcgactggagtatctctggggcgatataagaaagggagaggttgaaattccagattttgttattgaacatgataaggttcttgagcaccggccactcactgattatggcatagaaccagatcccctacatcttgctgatgtacctgctgaggaagtggggtactcgcttggaagatacgaagataaatggactccagaagatcgatggtattcagggaattacatgtga

SEQ ID NO: 7113 - DNA, 1287 bp, Zea mays
  Peptide Sequence Number=SeqID_48892
atgccgctccacgggtcgcccgccgcggcgggggccccgacgccgccgtggctgccgcgcgacctccgctccgacgagcgcggcctctgcctcatccacctcctcctcaactgcgcggcggcggcggccgcgggccgcctggacgccgccaacgccgcgctcgagcacatcgcgtcgctggcgtcccccgacggcgacgccatgcagcgcgtggccgccgccttcgccgaggcgctagcgcggcgcgcgctccgcgcatggccgggcctgtgccgcgcgctgctcctgccccgcgcggggcccacgcccgccgagctcgccgccgcgcgccgccacttcctcgacctctgcccgttcctccgcctcgcaggcgccgccgccaaccagtcggtcctggaggctatggagtccgagaagatggtgcacgtcgtcgatctgggtggcgccgacgccgtgcagtggctcgagctgctccacctgctggccgcgcggcccgagggcccgccgcacctccgcctcaccgccgtgcacgagcacagggaagtgctcgcgcagacggctatggtgctcaccaaggaggcggaacggttggacgtgccgttccagtttaaccctatcgtatcccgcctggaaacgctggacgtagagtccctccgcgtcaagaccggcgaggcgctggccatcacctgcagcctgcagctgcactgtctactggcctccgacgacgactccgccaaggacagctgccaccaacagagcagcggcgacaagcggcagcggagcccggagtccggggtgtctccgtccacgtcgcgcgcggacgctttcctgagcgcgctgtggggcctgtcgcccaaggtggtggtggtgacggagcaggaggcgtcgcacaacgcggcggcgctgacggagcggttcgtggaggtgctcaactactacgcggcgctcttcgactgcctggagtcggcggcgccccgcgggtcggtggagcgcgcgcgcgtcgagcgctggcacctcgcggaggaggtgaagaacatcgtggcgtgcgacggcgccgagcggcgggagcggcacgagcgcctggaccgctgggcggcgcggatggagggcaacggcttcgcccgcgtcccgctcagctactactcgctgctgcacgcgcggcgggcggcgcaggggctcggctgcgacggcttcaaggtgcgggaggacaagggcgccttcttcctgtgctggcaggagcgcgccatcttctccgtctccgcctggcgcggtcgccgcttcgactga

SEQ ID NO: 7114 - DNA, 774 bp, Zea mays
  Peptide Sequence Number=SeqID_48893
atggggttgggccgggctggacgatcgggttcagactggttgaggaatgaggacaatgtggcgtgcaaaggtggtgcaatgaccttctccaagagcttgctcaagaaggcacacgagctcgccgtgctctgcaatgatgagcggctaacgaccctgttcctgactgcacaacggcagctcaagcagacagggaacatcccgccggaggcgcttccgccgtcgccgtcgttgttcgggtgccttgtgaagaacaatgtggggatggccaaaaccattctggccatcgtggccattaactctctgctcgtgccgctcgcagcggcgacagaccatgactcctacaacgccgtgcccgcgcccgcccccgtgccctccaagtttgccaccgctgcagctgcaccgacgagatatgcaatcgatgaagacaagaataaggagaagaagagcatcctgaccattgttctcgttgtcgccatcgctggcttaggtctgactgctcccttagtggcgattgtcctgtacgagcgatcgcgtggaaggcagcaggaccgtcatcaacaccgagggcaggcagcgaggaagatcacggtagtgaggtttcacagcgacgacgagcctgctggagatgactgctccatctgcctggacccgtacgcggaccgtgatagagttggcctccttccctgcaggcacagatttcacgccgtctgcatccgcaaatggatcgtagacggcgtgagctctacgtgcccaacctgcagggaggtggtctga

SEQ ID NO: 7115 - DNA, 150 bp, Zea mays
  Peptide Sequence Number=SeqID_48894
atggcctggccacggccccctgcccgtgcgagcttccccctaggtggcgatgaggaggatggttatgattatgcttatggtaatggtaaagaagaaggcgtcgaggcggatctccaggaattacaggatgtcgatgagttcgaggattag

SEQ ID NO: 7116 - DNA, 579 bp, Zea mays
  Peptide Sequence Number=SeqID_48895
atgcctttgcagctttgtgctgatgggggttaccagctgagaattaggagccttgagggtacccctaattatggtcccccacagggaaagggaagggatcagtcatcagtgagagcactcacgcgcaggcgggcgcggcttcttcggggtccgcggaagcgagatgtggacaaatcgggggtgtgccgcaccgcagtggagtgcgacgagcgctccgagcacaagtccgcgctcgcgcgcgcattttccacgcgcctttgggtggtttactttctctcccggcgacggcgaggcaggcgcccgccagcgtcacaggtggtgacgaggcattccggtgccgaggaggatccaaaggacagtcggttcgtcctggcgcggtcgagacgggccgggccctcctccctcctgtgcgtgggagccagccagccagccaggagcggcgggccccgcttgggcgagcgacgaattttcgggcgctttgactcggctcggctcacggctcctggatattggacgacaaagcggtggaagcttcttatttggaccggccgcgggccggctgcaaggaagagcggctga

SEQ ID NO: 7117 - DNA, 141 bp, Zea mays
  Peptide Sequence Number=SeqID_48896
atggagtataagctgaaatcttgcagcattcaagctcacaaaggtgacaacgttatagtggactaccccgaaagtgggacatgtacaagtacaatagagcattgtaatattttgaaaaatgctattaccattggtttttaa

SEQ ID NO: 7118 - DNA, 273 bp, Zea mays
  Peptide Sequence Number=SeqID_48897
atggtcgacccgtgcccgcaaatcccgtcgtggccactgcagccgccaaccaacgccacagttccagtggacatagcgcccaattcgttgatcatgccccgcatcccatgccaacatcctcatccggtagcgaccaaccatatcccatcagagctggtgcatacccctgccatctcctctttcccctacattcccacgcccccgtcgctggagaggaaggaggatccaaaggaaaaggagcttgccacgctgccggagaggaaggaaatctaa

SEQ ID NO: 7119 - DNA, 336 bp, Zea mays
  Peptide Sequence Number=SeqID_48898
atgcggccccagccagatgcacgtgggtgcaggcccatgtggccccgtgcaggacgtgcccccggtcactgcaaagatagacagctcctgcgcatcgaccctaccaaagctggcttcgccatcgcactatcgggcggctatgggctgttcggctggtcctctgtttgcagttcagcccaaactacaagctcaagcatcaagggccagaggccccttccctggggtaaaagcaaacgggcctctctcatgtatgtactatgggctacaggaaggcccaagacgggagatgaatgcacgtgcgctgcacgcgacaggcgtatagatgacaataggtaa

SEQ ID NO: 7120 - DNA, 870 bp, Zea mays
  Peptide Sequence Number=SeqID_48899
atggcgacgctatccacatcactgttggctgcagtggtcgtgcttgcgcttctggtgagccccattgcttgctctcgcaagcctaggcccaagacaaagccgatcagccacagacaggcgcccctaccggctagaactagccacaagctgacaactgcaaccaaatcccccccaaccacacctcatcaccctccacctactatggttccgacagctggctgtcaggcgctggtgccacgcggcgcgtgcggctaccagaccgccgtcgggaagcagtcgttcaactcgatgatcgccgtcgagagcgcactgctgtacaggggaggcgaggcctgcgatgcctgctatgaggtgaaatgcacgagcaacgcggcctgctccagcaagccggtgaccatcgtcatcaccgacctgtcccccggcgggctgttccaccgcgaggttgcccacttcgacatgagcggcacggtcatgggcaccatggcgaagcccgacatgggtgacaaggtccgcgctggcggcgtcgtgaggatccagtacaggagggtgccgtgcaagtaccccggcgtgaacgtggcgttcaaggtggaccagggtgccaaccccttctacttcaacgtgctgatcgagttcgaggatgctgacggcaacctcaacaccgtcgacctgatgttggctgacaacagagagtggacacccatggcgcacaactggggcgccacgtggtgcctcaacaacggcaggaggctcagagcgccgttcggtctccggctcacctccgactccggcagggtgctcgcccccaacaacgccattccggtcgcatggaagctcggcaagacctactgttccttggtcaactacccctga

SEQ ID NO: 7121 - DNA, 279 bp, Zea mays
  Peptide Sequence Number=SeqID_48900
atggcgatgaagggcgaggagtggagccgcaatgcgccggacgacctctccatcgtgctctccaacgtgaccacggaggccaggcaagagaacaccaagttggtcgagttgcagcacgtcgtcatacgcgatgagaacacgtgcatgcgggacatcctcaagcaggccgtggccaaggccagcaccgtcagggactcgctcgagctcaccagggttgagaatgcgtgcctcaaccgcgccatcaccgacaaggagagcgcgatgcagagccttcgctag

SEQ ID NO: 7122 - DNA, 1035 bp, Zea mays
  Peptide Sequence Number=SeqID_48901
atgtcatcacaaactggaggtggcaaagagagtgacgccggccctgggcaacacaggcagatgcaaagtttggcaagacaagggtctttatacaaccttaccctcgatgaggtgcagaaccatttgggggagccattgcttagcatgaattttgatgagctcctgaagagcgtgtttcctgatggtgtagattcagatggtgctgtcacaggcaagcctgatcggacctcgagcctgcagcgacaggggagcatcctgatgcctccgcagttgagcaagaagactgttgacgaggtgtggaagggcatccagggtggaccagagaccagtactgtggtggatggtctgcagaggcgagagaggcatccaacacttggggagatgacacttgaggacttcttggtcaaagctggggttgttactgaaggacttgtgaaggattcagctgattttccaagcaatatggatacagctggcagcagtgttgttgtggctgctgcttctagtttgaaccctggagcacagtggttgcaacagtaccagcagcaagttttggggtcccagcaattgagtttggcaggttcatacatggctagtcagttgcgccctcagccattgtctattgctacaggtgctactttggattcaatttactctgatgaccagattacttcgccatcatttggtgcactttcggaccctcagacacctgggcgcaagcgtggtgccttaggggaggtagtggataaggtggttgaaagaaggcagaagaggatgataaagaatagggaatcagctgcgcgatcaagagcgagaaagcaggcttatactaatgaacttgaaaacaaggtattccgtctagaagaggagaataagaggctaaagaaacagcaggttgacagccttgctaacattgcctttttgttggggtccttcacttcaccttactttcaggagttggatgagatactgagctctgctcctcccccagaacccaaatatcaactcaggagaacgggttcggctgccttttga

SEQ ID NO: 7123 - DNA, 693 bp, Zea mays
  Peptide Sequence Number=SeqID_48902
atggctgaagctgattatgaaggatgggacaaagggtatatttcgaaattaaaaagagcacagagggctgtcaaacaaattgctggaggtgatgatagcatggatgagcaggaggatgaaacacaagaaaatgtttggggcaaaggtaaaaatgcatactatgctcctggtgaacaatctggtgatgatgagatggattacgaggaggcacaaaggatacaaaaaaataaggaaaaaaggctgtctatgaaggattttggattagaagatggtgaaagtgatgaagagggtaatgcaacaaaggtatccaaccatgaatccaaaatgaaagaagactttgttgtcttatcaggcgatgagaaaatggatgtgctatacagagaaactaagaacttaagcaccaggggaggcgggaggatggagaggggcggcgtgcttccgtgggagcacccaagcagttccggcgccgagaaccacaacgaactgggcggagtcgcgcgagcagacaatggagggatgcgtgcgtgtgtccgtccggccggatcgggaggggacgggccgggcatgcggacagattgccagcaaatggagtgtgggcggagtcgttaccttcgattagctcgtcggctcgtcgcggccgcgaagtgcgcttgcggctcaggctcctccgaccgggatcttgccaacgaatag

SEQ ID NO: 7124 - DNA, 108 bp, Zea mays
  Peptide Sequence Number=SeqID_48903
atggcgttggtgcgattaggctgcccgcactggcgtactggaaacacgactggaaaggatgccgtggagtctatcctcctttttgtgaagggctacaaaccactctag

SEQ ID NO: 7125 - DNA, 1203 bp, Zea mays
  Peptide Sequence Number=SeqID_48904
atggacgcgttcctgcacaggctcaagcggctggacgcgtaccccaaggtgaacgaagatttctacaagcggacgctctccggaggcatcgtcacgctcgtcgccgccgtcgttatgctgctcctcttcatctccgagaccaggtcatatttttattcgtcaacagagactaagttagtcgtggacacatcaagaggggaaaggctacgagtaaattttgatattacttttccgagcattccttgcacactcctcagcgttgatacaacggatattagtggagagcagcatcatgacattaggcatgacatcgagaaaagaagattaaattcacatggtaatgttattgaagcaagaaaagaaggcattggcggagcaaaggtcgagaggccgttgcaaaaacatggaggaaggcttgacaaaggtgaacaatattgtggcacgtgttatggtgctgaagagtcggatgagcaatgctgtaattcttgcgaagaagtcagggaagcatataagaagaaagggtgggctctaacaaatcctgacctaattgaccagtgtgcaagagaggattttattgatagagttaaaactcagcaagatgaaggttgcaatgtccttggctttttagatgtcagtaaagttgctggaaattttcacttcgccccaggcaaaggattttatgaatcaaacatagatgtgcctgagctgtcattacttgagggtggtttcaacattagccacaaaataaacaaactgtcctttgggacagaattccctggtgttgttaatccacttgatggtgctcagtggacacagccagcttcagatgggacataccagtatttcataaaattgtatggcttaatggtgcataaaaaacttaccgagtttcctattaaggttgtccctacaatatacactgatattagaggacgcggtattcattcaaaccagttctcggtaacggaacattttagagatggaaatgttcgtccgaaatcccaacctggagtatttttcttctatgatttctcacctataaaggtgatattcacagaagaaaatagatccctactccactacctgacaaacctttgtgctatagtgggaggtgtgttcaccgtttctggtatcattgactcgttcatataccatggacagaaggcgctcaagaagaaaatggagttaggcaaatacagatga

SEQ ID NO: 7126 - DNA, 1170 bp, Zea mays
  Peptide Sequence Number=SeqID_48905
atgacctccaactccaaggctctgagcccagtattaaaagctgcttcggacggggtgagaaagagaaggaaaaagcattccaacgctgcatctgcactgcacgctagtcgcgtcgagtcgacgcgcgattcctgccatttgggtgggccagcctttcctggcaatctcggggggcgtttcgcctcgctgcgtggcagaaaggtcgaggacgtgcggtcgctcggccggtgctacgccgtgtccaagcggctctgtgggctcgtttccctcgtccatgatgtgtatgtcaagattgaccgcgtcgttgcggtcgacggcgacgccgagggcacgctcaacctgtcctcgccgaagcctcggagcatcttctcgcacttcctgaagctgatgctcttcacaatcatcaagccgttccacaacatgcgcagccctaatggtactgcgaggccattgttcccgcagctctcgcagcactcaccggcacaggtgctcaggaacttcacgcacgtcaggaaccttcggatcgagctcccctctggggatgtgggtactgaggagggagttctcctgaaatggcgagcagagtatgggagcacacttgagaattgtgtgatcctggggggtacccgggttgaccgcaagcctgttggtggagagcatgagccagctttggaggacaatggaagcatgccagagtctttctataccaatggtgggctgaaacttcgtgtcgtctggacaatcagctctctaatcgcggcatcaacaaggcactatcttctccgctcaatcatcaatggccatcccacactacagagcttggtactgacagatgctgatggccaaggcacattgtgcatgggggcaaagcagctggaggagttcagagagaaccagttgtcgacctcggcatgttccaacaggactcaggtcccagcctgcaacatgaagctcaagtatgctccatatgttgaactgcctggtggtatggcgttgcaaggcgctactttggtggctatcaaaccctcacctgagggaagcaatggaagccaccctaaccgcaaggaagccgaaggattcgtctttggagcattcgatgggccatttaaagctgctgtgaaggcgctgatgaagagacgcacttaccttctggagatgaatggcttctag

SEQ ID NO: 7127 - DNA, 1311 bp, Zea mays
  Peptide Sequence Number=SeqID_48906
gatgagctccgtgataatgagcttctggtgtttgcaaacaaacaagatgtgcctaatgccatgaatgctgctgaaatcaccgatataagcttggcttgcactccctgcgccagcggcactgcggagctgaaggtcgagtggtcgacaagtgaccggcggcagacgcaacctcctggaagcgttcgttggattggaactggacggacggcctctcgcacgcggtcaatgccatgctgtgctgtgctgtatacaccggaaatttcttcggacgttggggctgcaactgcaatgcaagaatcagctctcaatccgcgccttgttgacacctttttgtgtgtctctctctctgtgcaagcaggaagggtttggaggatgacagaagctgcagttaatacaaggtactggtgccatggatgcgagaaggtcatcgaggaggccatggtgggggaggatatcaagtgcccgttttgcggtggtgggttcatcgaagagatggccggggaggattccgaggggttgcagttagagcgggagtggggaacgccgccaggggacagcgaggacgacgatgacgacgatatagcccatgagttcgagggctttatcaggaggcacggacgggcatcggctctgcgccgggtgctcgacagcatccaggacgaccttagagccgacagggaaagggacaactccgtcctcatcaacgccttcaaccaagccctcgcctcgcaaggctcggcgctgctggatgccgacgaggcccgagacggccgaggtggatccagcaacagcaacgacgatggcttgctggaagagtatgatgtcctgggggctgggctgagcctactgcttcagcatctggccgagaacgacccgaaccggtacggcacccctccggcgaagagagaggcggtcgaagctctgcccactgtccagatagcggaggccgtcagctgttcggtctgcctcgacgatcttgagctggggtccccggcgaagcaaatgccctgtgggcataggttccactcttcttgcatcctgccatggcttgagctccacagctcttgccccgtgtgccggttcgagctgccgtctgaagagacgaaagatctgaacgagcctagcgatgtgcacagaagaacagagagcacccgagagaacgacagcgagagcggtaacagcgcgtggccccttgtcccttggttcttcagcgggctgttctcggtacctgaaccgtcgcacactgacagaggcactctcaccaccgatcaacagagtccttccaccaacccaaatgctggaggaaattga

SEQ ID NO: 7128 - DNA, 1311 bp, Zea mays
  Peptide Sequence Number=SeqID_48907
atgggcattggagtcgttacgaggtcgaagaggaggagattggacgaggaacagcgcctcgccgacaggatcagcagcctccccgacgacgtcctcggtgaaatcgtgtccctccttcccaccagagccggcgcccgcacgcaggtgctctcctcccgctggcgccacatctggcgctccgctcctctcaacatggacctccatcccgacggccctgaatggcggcacatgcccgtcgagcagatcaggcgcgtgctctcggcgcacccgggccccggacgccgcctctcggtccccagcagattcggctacctccactggatggacggctggcttcggtccgcagccgccctagggcctagacaacctccaggtgctcgaactgaactcacacagccgtcgtcctcatcactggtcggccttgcccacgcggccgcttctgccgccatcggtgcaccgcttctcgtccaccctccgcgtcgcctgcttccgcggcttcgggtttccgaccagtgccaaggcccaaggccctcccctcagccagtccgcctgccgcgtctccagcagctgactctctcgggcgtcaccatctccgagggctccctgcatgccatgctcgctggcgcccctgccctgcggagcctgctcctgctcgacagcaacgggtttgcccgactgcagatagcgtcctgtagcatagaaaacatcggcgtgcgttcccggtgcagaggtgctaagctacaacacctcgttctggaggacacgccgtctctgaagagattgctactgttcgaaggaaccaatcacatggatatctcggtggtctccgcgccaagattggatgtttttgggaaactctgtgacgacgccaccaaacttaagtatagcagcgccacgacggatcttcagggatcacccactgttagcgtgctgcacagtgtgaagcttctagctttgtctagtgtgaggatttcgttgcatgcgctgattgacttgctcaagtgcgttccccacctggagaagctgtacatcgagatttggccggtttatcaggcatcaagtgtttgtgtgagaaatggatcgtatcataaataccggaagcacatcggcaccctatgcgtccgtctgaggagggtcgtgctaggagggtacctaggcagcaagccacacgtcaacgtagccaaattcttcgtatcgatcgcgagagcgctggagtcgatgaggctcgagtcatgggtaattataagcaaagcctggttggcgagacagcataggctgcatgctcaacagcaggaagagggcgtcgtctag

SEQ ID NO: 7129 - DNA, 915 bp, Zea mays
  Peptide Sequence Number=SeqID_48908
atggcaacgcttgcctccgtgccgaccccaccaaaccctaaccccgtttccggcgacctgccgtcgctgctgctacagcagcaggaggaggaagaggtgtcagagccagtcccagagacggcgctgacgcccctcaccacctcgatcgaccccaccccctccagcggcaaggagagcgagagcgatgactccttgtccgtctggtcgacgccctcctccgcgcccacacatgtcctcgccccctcccccgcggccaaggacatcctccacatctccttcaaccaggactacggctgcttcgcagcgggcaccaagtcgggcttctgcatctacaactgtgaccccttccgagagatcttccgccgggacctcaccgccgagggcggaatcagcgtcggcgccaggggagggggtatcggcgtcgagatgttgttccgctgcaacatactcgcgcttgtcggcggcggagataacccccactaccctcccaacaaggtcatgatctgggacgatcaccagagccgctgcatcggggagctctccttccgctcccctgtccggggcgttcgtctccggcgcgagcgcatcatcgtggtgctcgagaacaaaatctttgtctacaacttcacggaccttaagctgttgtaccagatcgacactttgagcaaccccaagggcctctgcgccgtgtcacagcagcccgggtctattgtgcttgtttgccctggtgcccagaaggggctggttaggtggaacactataaggcaaggaagaccaagtttatcaatgcacacacttcccgcatcgcgtgctttgcgttgtcgcgggatgggaggctcattgcgactgctagcatcaaggggactcttgttagaatctacaatgcagctgaaggcaatctcctgcaggaagtaa

SEQ ID NO: 7130 - DNA, 474 bp, Zea mays
  Peptide Sequence Number=SeqID_48909
atgagtattaggatctcagagattgaagcgatgaactcacaacaagacgaccgccttgctgcactcgaagttgagataaaacagctaaaggaaaaccatgaagctgaaaccaataaattaagaattgaagctgctgaagcgaagttcgacttcaaacttgaaaaagataaaaaggaagatgtagatgagaaggatcatttagataaacttgttggaaacttctggagcttgaaagatgattgtttccatgtggctacaagatgttgtcaagaattggagaggaccttctcttcagttggagcaagatctcaagagagaaattttatcgatggagacatagttggtgcgatgagatggatctatggcaaagtgtgcaccttcaaagcatattgtaggcacagaaggcagctgagaaggtcgcggtcatcagaaaagctctacaaccgaaggagcctgaaggaaccttacacttag

SEQ ID NO: 7131 - DNA, 576 bp, Zea mays
  Peptide Sequence Number=SeqID_48910
atggagctgcaccaccttaatgtgaggaatggtgtaatcttggaggacagctctgaggagattttggcaacacctactccactattagagtctcatacctttgctacaggagcttcatcttcagcaccaccggtgccaatatctcaagtccctgctcttggaggtgatgaccctgatgattctggtaatgatggagacgatgatgatgatgcagaagaagaagaaaacaacaatgaagatgccaacaatgaaccagaggacaactttgttgggatgtggcctgtcacagagcactacacctcaatgttcgagctcaatgttcgagacgggacacttctcaaacttgctgcaggatgtgttttgcacaacatggtatacaggcaccttcccctacatcctcacggagagagccagacaggtgttattctaggcgaagctggagaagatcgcctcaacacccttgtaggtgttgtggcaggtcttaacaccgacctggacagtgctaccttggacttctcaagggtacatgaagagcttgaagatgcacatgagaggattgtagccctcgaagcttag

SEQ ID NO: 7132 - DNA, 2412 bp, Zea mays
  Peptide Sequence Number=SeqID_48911
atgaggcacatcatgacgtgcccagacaccattaacagctacgtgggcaacctcacagaatcctacaccgacaagagcaatgagcccaacatggtggcagcctccgtcatgatgttcgccctcgccgggctcttcttcaacctcaacctcttcagcggcatctccgacatcagcgccatcctcgaccctaaagtccggctcttcctctcgtcggcgctctccctcttgctccccgtcatgtcctacctcttctcggaagccaagaataacgccggcaacaccacccgcgtgggcactgtccacgtcgctgacctctcgctgagggccggcatcatccttgcatggatgctcctggtggagctcctgcgcaagaaggtggacgagatccgcatgcgcggctactccggcaccgtccagcgcgccggccgcgtcgtctggctgggaaccctcgtcttcttcaacatcaaaagcaccgggcggaaagcggtgttcgccatcctctggatcctctgcgccacccgggtgctgcagaggatcgccttcaccgagttcgggaagcgctcctacgcccatggcaagaacgcccgcctcatcagctcgtacatggcgcagatcctggaacaggaggagcctcgagcttctgtcgtccatggcgatgctgctgctggggacgaggtgctcaagagctgcaactacattgtcatgggagaggatacgctggtggacattgagcccactgcagatggctacaagctggacgagcaggccagcggctccccaccacgctacgacgacggcggcgttgtcaaatgggtcagagaaaacgatagcatcgtcaccgtcggcaaagtctgggagctcgatgacagtgacaagttcttcacctcccaaaatcagatccagcgcctgaagaggatctgcctctcgttcgctctcttcaagctactgcgccgaaggtttgagcacctgccggcgttgagcaaacaagaagtggacgactccagggacctactcctgaagggcctctacaacaatggcgaaaccagctgctcggccgaagcaatgttccaggtcatgaacgacgaggtggtcttcatcaatgagtactaccactccgttgtccccgtcgtccttgcgagccccttcttcctcgtcctaaactacttcctcctcaacatcgtcgtagccatcctgtgcgtcatgaccgtcatcctctgcgccaacggtgacgtcccctacgcgttccagagcatagccaaagacaactacaccttggattctggggtgtttaagatagccatctgcctcctgcagagagtcggcacgccttcaaacttcttctccgtcgtagacctctccatcaccatcctcctgttcgtcatctacttgtacgaggagatgtgggagttcttcgtcttcctcctctccaactggttcatggtgtccctgctctacaactacatctccaagccacggtggctgaggcacaactccttccggggcaccatgttctcggtgggtttcagcgtcatcatgtggctgaggagcaagatgacccagccgagcctaaccctcaagcagttcaccgtcctcaacgtccgtttgccgctcaagctgccgctcttccccgcgttcaccggcctggcggtggagaagaagccagtgccgaacagtgtgatgagatccgtcatcgactacctggcgaaacgtggacatggtgccccgaactacgactacgacctcgaccgtggcaggtctgcgctgcggaggaacggcgtcttcgacaagctgtcgtgggcgtgcgagagcgacagcgtcgccgagaccatcctcacgtggcacatcgccaccagcatcatggaggtgaaatgccgcccgcggacgacggcgggcagcagcgccgcggaggaaacaacctcctccagcagggtggccgtcaggctgtccaagtactgtgcctacctggtggccttccacccggagctgctgccggagaacccggagaaggtggagcgcgtcttcgagggggccaaggaggagctgaaggggatgatcggctgccgggactactacttctcgccggagcgggagcgggtcaggaagctcatggctgacgggacgacgaccctgacccccggtgatggatgcagcagcagagttgtgcgtgacggcgtgaggctagcagggaagttgctggcgatagacgaccataataataaccagtggcaggtgttggcggacgtgtggacggagctcatcatctacctggcgccgtcgagcgaggaggagcgtgtgatggggcacgaggacgccctggtgcaaggaggcgagttcatcaccgtgctctgggcgctcaccacacacatcggcgtgtccaggccgcagcagccggccagcaggccgccatgttga

SEQ ID NO: 7133 - DNA, 168 bp, Zea mays
  Peptide Sequence Number=SeqID_48912
atggcgttggccggccggaattggctcgccggggtgcggcgagggctgttcctcgtcgtggaccttggtggcaatgagattgatgcctttggttttggctctggtaatggagaggatgaagccgtggaaggagaccaccaagagttccaagattacgatgagttctag

SEQ ID NO: 7134 - DNA, 306 bp, Zea mays
  Peptide Sequence Number=SeqID_48913
atggcaccattaatgaccatcaatgggggagaaacggctccattgaagcgatggcgaacgggtgaggcggcgtcgcggcggcttggcgggatggccggtgtcgaggcagcggcaaggcctgggcgcggctgctggcttcctgccggcgcgcctaggagagaaggggaagcgaggagagagggggaacgggtgggggcccgcgcgcgagtgggagagtggagagatcagggggcggcggcggctgtctggggagaaggtcagggggcggccggctacaggaaaatggcggctagtattttcatttaa

SEQ ID NO: 7135 - DNA, 288 bp, Zea mays
  Peptide Sequence Number=SeqID_48914
atgccgcagagaaaggatgccagcgcaacagctagcgacgacccagctggcgagctaagcgcagaggataggctacgtgcgactatggagatagaggctgggagtctgcggagaaaaggtctaggtgagatccggtgcatgcgggtggttgcaacagcttcaggaagaagccgactgcctgcatggccccatgcgcgagcgtcccttgcgcggcgtgagggtctgagggatttgcatgatgatgtaatgcgtgatgtcatgccaatgtcactttcggctagagaataa

SEQ ID NO: 7136 - DNA, 246 bp, Zea mays
  Peptide Sequence Number=SeqID_48915
atggaggagcgggaccacggtggcgccatctcttctccctctctctctctctctccgctcttggttttttttcagtggtggctgttcgatctatcgcagtttatggccaaaggggaggcagcctcgacacttatacccagagtggtggatgtggatgtgaggggctgcaaaggagtgcatttgatgcaaagaattttttttcctacaatggcggttggtggtctggatccacagtttcatttctag

SEQ ID NO: 7137 - DNA, 381 bp, Zea mays
  Peptide Sequence Number=SeqID_48916
atggagcactccctcccagccgagccctctctctttctcccactgccgagctcgctctcttctcgcgcccttcttcctggccgagaccttgccaccggagctcgcccacaccgcctcgccagaactcgtgctcgccggtcgaaccgtctgcgcccaccccggccacctcgaccgagctcccttccgctcctctgcctccgtgaccgaccaccaacaccgtcgttgcccgcgtcggagctctgctcgtgcctacgcgctgtccgtcgttcgccgtccgttccggagtccgtaaagctcgcccacgcagcaccccgacaaccgtgcccacgccgttcgccgtcatccgttcacccaaggttgaagagaaccaaaaccatttga

SEQ ID NO: 7138 - DNA, 273 bp, Zea mays
  Peptide Sequence Number=SeqID_48917
atggcgagctcagtggagaggcagcggtggcggcgggctccgaggctgatgcgatggcaatgggcgcgtgggattgtcggtgcggcggttagggcttcagagaaaatatttggcagcctgacggcgctcaggcgcgccggcaggaagccagcagccgcgcccaggccttgccgctgcctcgacaccggccatcccgccaagccgccgcgacgccgcctcacccgttcgccatcgcttcaatggagccgtttctcccccattgatggtcattaa

SEQ ID NO: 7139 - DNA, 1116 bp, Zea mays
  Peptide Sequence Number=SeqID_48918
atgaacaccaagtgggcgaagaaaggcttggatctgaccaaaaggcaagaagaggctgcgaagaaagccatagggttgccggcactgtctgaggaagttggcgaaaggaccactaattggattcgtgctcagaaaccaaaagaaaccgacaccggtttgtcctttgatgacccattgctcgaagaagtaacaaagagcttttttgaggcagcagctaaacaacaggaaggaacattcaagccgcaaagggagagggacatctttacggctggtctgggtaaccccgagcatcctggtcatatgagcactcaatctccccagatgcagatagttccaacaacgtcacaaccattgggaacacaatatcctagcagtgtcgcgtctacggcaaccaagggtagagaagtgtcgaaggtcgtccaaggatacgaggacgacatgctagagatctccggtcccgaggggattgagaaacttggacaagcaatcaagaatttcattctttggcctcgacgggatgtccagctgagtgacccaccaccttcctctctagccatcccactaactgaggagacatcaccgatcctgcctcctctagacccaccgtcaccacctaaccctctgccaccagcatcgccatccaattttcctcctttccctctgcccaaagaaactgaacaaacaagaagtgagccacaaaagagagctggggtacgaaaattggtttcccccatccaagcaacgaagcaaaaaagtgctcgcacgaccaagtttttatcaggaatagcacggacgcgcacgtcgcgtatcgttgacttggctgaatacgagaagtcagcggaaaaggctgagattagaaccgaaatgatcaggaagccaacgagggaggactaccgagatgtccctaagacatatgtgccgggcagacctctgctaagctgggataaactgaaaaaggtgccagcgcgtataaaaaggttgcatggctggtacatgcgagcatcatcggttggcatcgacacgatcaacgtatctatcccaccagctgcttttattggtgaacgtgaaatggccattgttacgttcgaggacatgtggttgatgatgaacctctag

SEQ ID NO: 7140 - DNA, 492 bp, Zea mays
  Peptide Sequence Number=SeqID_48919
atgtctgaggcagaggtagagatgacaacggggaattccccgtctggggacactcccccatctccgtctccgtggggaagaaaaatacccgcccccgtccccgtaaagcctcgcggggatcatttccttcccatccctgtccccgacgggtttcatacggggaatttgtccccgcaaattttcacagtaaacagcttcgcgtcaaggaaaaatcgacatcatcagctaaaagttggagctcgtgggcgtggaagacaaagctgtacagctagtgttattgatacgcaaaaatcatctgtgaattcgctgatggtcgcggtcgaagcgccacccaaaccttgcgcggcgccatggcagtcttcggcgtgcagcacaagtgtgcggtgggacggcacacggcagggtctgggcgtgcgacagaagtgcgcaggaggctggggcctagtgtggtcgccgggcggtggatacgaaggaaagaagatgagggactga

SEQ ID NO: 7141 - DNA, 468 bp, Zea mays
  Peptide Sequence Number=SeqID_48920
atgccgcagagaaaggatgccagcgcaacagctagcgacgacccagctggcgagctaagcgcagaggataggctacgtgcgactatggagatagaggctgggagtctgcggagaaaaggtctaggtgagatccggtgcatgcgggtggttgcaacagcttcaggaagaagccgactgcctgcatggccccatgcgcgagcgtcccttgcgcggcgtgagggtctgagggatttgcatgatgatgcactggctgatccatattttaaaggtcttgcagaagtagagagagaaccatcatgccagccaataacaaaagtggagttcgagtttgagcgaacaaaggtgaccaaagagggtgtcaaggaacttatactgagggagatactggagaatcacatgaatggaactgagaaaacaaactttatatatcctaggtatttgtttgccagtgataaaaatggagcttaa

SEQ ID NO: 7142 - DNA, 2055 bp, Zea mays
  Peptide Sequence Number=SeqID_48921
atgcctggcatatcgagggatgtcgccgagcactccttggatatcagagctggttctaggccgtaccatgcccttcggcctgaggaatgcaggcgccacatacagctgtgtatgaaccacgtgttcggggatcacatcggcaaaacagtcgaggcttatgtcgatgacatcgtggtcaagacaaggaaagcccgagacctcgtctccgatttagagatcgcgttcgcatgcctgcgggctaagagcgtcaagctaaaccccaagaaatgtgtcttcagggtcccccgaggcatgctcctgggattcatcgtatctgagcggggcattgaagctatcccagaaaaaattgcggctatcaccaacatgggtccgatcaaagacttgaaaggagttcaacgggttatggggtgccttgcggctctaagccgtttcatctcacgcctcagcgaaaaaggtttacccctgtaccgtctcttgaggaaaaccgagcgcttcacttggacccccgaggccgaggaagctctctgcaacctcaaagcactcatcaccaacacacccatcttagtgccccccaccaaaggcgaggcccttttgctctacgtcgccgcaaccactcaggtggtcagcgccgcgattgtagttgaaaggcgcgaagaagggcatgcttcgcccgtccagaggccggtttacttcatcagcgaagtactatccaagactaagacccgctacccacaaatcgagaagctactgtatgcagtagtcttggctcggtgcaagctgcgtcacttcttcgagtctcacccggtaacagtagtgtcatccttccctctgggggagatcattcagagcaaggaagcctcaggtagaataggcaagtgggcagtagagctcatgggggaaacactctcgttcgcccctcaaaaggctatcaaatctcaaatcttggcagatttcctggctggatggaccgacactcagctaccgacagatccaacccaagctgagctatggaccatgtacttcgatgggtcgctgatgaaaataggggctggcgcgggctcgctcttcatctcacccctcagagtgcacctacgctacgtgatacgcctccactttgccgcgtcgaacaatgtagccgaatacgaggctctggtcaacggtctacgcgttgccatcgagctaggagtccggcgtcttgacgttcggggtgactcccagctcatcatcgaccaggtcatgaagaactcaagctgccacgacccaaggatggaggcctactgtgaagaagtccgacgcctagaggacaggcaaggtttctactggccgaccgcggtggccgacgctactgagattgtgcgctcctgcaaaggatgccagttttacaccaaacaaacgcacctgccagctcaagccctacagaccatccccattacttggtcgtttgctgtatgggggttagacctcgtcggacctttgcagaaagcacccaggggcttcacgcacctgttggtcgccatcgacaaattctccaaatggatcgaggcagtggctttcttcaccaacatcattcatcgtttcggagtcccaaactccatcatcaccgaccacggcacgcaattcatgggaaggaagttcttggacttctgtaatgactaccacatccgtgtggactggtcagccgtggcccacccgaggacaaacgggcaggtggaacatgccaatggcatgatcctacaaggccttaagccaagaatctacaacgagctgaaaaaatttggcaagcgatggctcaaggaactctcctcggttgttttgagtttaaggacaaccccgagccgggccacgaggttcacgccattcttcctagtctatggggccaaggccatcctgcccacagacttggagtatggctccccgaggctaaaggcgtacagcgaccagagcaaccaaatcggccgggaaaattcactcgaccagctggaagaggctcgggacgtagcgctgctgcactccgccaggtatcagcagtcactacggtgttaccacgcgcgatga

SEQ ID NO: 7143 - DNA, 732 bp, Zea mays
  Peptide Sequence Number=SeqID_48922
atgcccacctcggccaaccgctccgaccccagaacatgcgcatttaatgcagtctgtacggccacctaccccactgcaggtgctaaagcaacgccctaccccggcctcggcctcgggagaaatctccgcctcgcccgagcacggcctcagccaactgccccaatagggaagctcacctgctctactgcaaaccccgctgaagctaggaggagcgcgaccgcgtttgctccgctggccagaggagggacatccagacctccgtcgctgtccctctcaccggcagagacggagacggagacggagcagccgcaaccgtgccacgggcagcacttctcacgtagccggcacttctgggtagagggacggcgcagactcccttgcgagggacctgtctggtgtcaccctcacgccgagaacaacgacggccgcacgcgtgggccccacgacaagcccaccgactcctcctcccgtggtctgagagggcatcacctacggtcaacgctggatctgctcgcgacatctccaacctcggagcatatgaactccgaggaagaagatagcatggacttcggtctagacttttccgggctccgcaacgctgactccacgcggcactttctattcgcatgcgactactacctctccgacggctctgacgactatggctctgacgacgagggttacgacccaactcgggaatgcttccatgtcgagcacgagcacgaaggatag

SEQ ID NO: 7144 - DNA, 687 bp, Zea mays
  Peptide Sequence Number=SeqID_48923
atgggctccgagccctctactgttcaatggttcaaaggttggcccctcggtggggttcgacaaccgccccagagcacagagtcagtgatgaacatgggtacgtccatacacgaccgaggctcaggctacaatcctgagggcgtgcccgcctcggcccaccgctccgaccccagaacgtgcgcatttaatgctgtctgtacggccacctgccccaccgcaggtgccaaagcaacgcccgaccccggcctcggcctcgggagaaatccccgcctcgcccgagcacggcctcggccaactgccccaacagggaagctcggctgctctactgcaaaccctgctaaaggtatgggggctacagaaacgacaagaccggtgtcactgtccaagatgacgaccggaccggattaccacacgcttttccgccatattgagcgctgtttcaactactccgactcgacaccctcagatacgtcccattcgcacctctgtacaagacgggctcggggatcggacatccgctacagggatcggccatgccgctacagggctcggatgcgcctccggccggccatgccgctacggggctcagagacgccgcctctgaccacaaaaatagcacagcaaacatctgtacacatgggcctccttgcgactataaaggagaagcccagggccttctataggtaa

SEQ ID NO: 7145 - DNA, 336 bp, Zea mays
  Peptide Sequence Number=SeqID_48924
atgtcggtcggcttgtggaaccagcctcagtatcacgatacttacccggaccgaggcatggccagcctcctcggcgcggaactttttgggcccctggatctcgcggtcgccgtctgggggaggtcggcagcccgcttcattgccacctccaccttggatgcgcgaggagccccgcccgccgaggccgaggggtcaattgccccctcggtcggcatttgcaccttgggccgaggcgccgatgcctcgagcctaggcgccagcgcctccagcccaccagatggctggatcggcacccccgtcaagggcggctcggaccgaggcctcacctcgggctaa

SEQ ID NO: 7146 - DNA, 225 bp, Zea mays
  Peptide Sequence Number=SeqID_48925
atggttttggttatgactggtgctggtaagtggtattctttccgtttggaaaaggttgtcagcattgcaaccactgctcaggcgaagatgaagctgtggaaggagacttccaagagtttcaagactacaacaagttctaggcgtgggttagcggcaacccccagtcggctgcctgtgaaggccgcgtttatctacgtttcttttccgcactttgatttattgtaa

SEQ ID NO: 7147 - DNA, 729 bp, Zea mays
  Peptide Sequence Number=SeqID_48926
atgcaggtggcgtgcaactgcaccacggggacacaccccttcgacttcgacgcatccagcatggaggcccaggcccatacaacatgtaaccggcgtgccgattactacgtgcgaaagactgcaccgccacttgcgccaatgccgcgccttgtcgactgcggaaccggtgccgcgactcgaggcaaccctgtgcatggcccaacagtgccaaccgagcacatcggtcatgggccagtcaaccgcgggagaagggaccgggaaaggggataccccaaaagggatccttctccgcgaaggaagcgggccccgagccctcctactgatcaggggttcgaaggctggtccctcggaagggaaaacagcgccgcctgccccactccgactgctgtgccacccgccagggcaaggctgacaacggctaagtccagcctcaggcgcaacaggaagctccgcctcgcccgacctcagggctcggcccctgcctctgcctcggaaggtggtctctgcctcgtccgaccccaaggctcggcctcaacctcgacctcggaggatggtctctgcccgcccgaccccagggctcggcctcaacctcgacctcggaggatggtctccgcctcgcccgaccccagggctcggcctcaacctcgacctcggaggagtctccgcctcgcccgaccttgggctcggaccgaccacgccacagggggatcatcattaccctacccctag

SEQ ID NO: 7148 - DNA, 261 bp, Zea mays
  Peptide Sequence Number=SeqID_48927
atggcggacgtgggtgcgctggtgcggtgcccatcctcgccgcatagatctgagatacttactattttaagggaccgaggcaaggcgctggtggccgccgcggaggccgtgtccaagaccctgcacgtcatccgctctgcgttcaaggacgttgagaactgttgggggccttcgtcttccgaagcgccgaagctacgcgcaaggaagcttcggcatgacagcagggaagggaaccgacttaaaggggaaaaggctatttag

SEQ ID NO: 7149 - DNA, 492 bp, Zea mays
  Peptide Sequence Number=SeqID_48928
atgggtagaggcaggaggggtcatggttggcctcaccacgctgatggcaagcgcaagcgtgctctgagtcctccctcggaggacttcggggactcgaagctcagtgggttggatgagtcaggggtctcctcggatgaggcggactcctctgactcctccgaggagtggagtggcagcgacggtgatgatgagggcgacaacagcagcagtggcgacgacgacaagggcgacgatggcaagaacaacggtgacgacggcagtagcagcgacgacaggaagggcaacggtggcgacagcagcagccacggtggcaggggcgatgatggcgacgatagtagcgacagtggcaagggcgacggtggtgatggcagcagcgacagcggcaatggcgacggtgacggcagcggcaagggcgacgacagcaatggtgacggtgacagcggcaggggtggtagcggtggcaaggccagtggcataatgccactggtttaa

SEQ ID NO: 7150 - DNA, 483 bp, Zea mays
  Peptide Sequence Number=SeqID_48929
atgaacgtcaacgagagggagtggttcgacaggcaggtaacgacgaggtttggacggggttcggggacgtctccggcgagcaggggaacgggcgcggacgacgacgacgtagacgaactccggcaatggctcctggcgcgcggcgtcgggctgcagggtgctgcttctggcgcgggcgcgttgggcgctgggcgtcgcggtcgcggggcagtcctgggcgtggctcggcggctggagggcaaggaagccgggcgtcggggcggctcgcttgggcgcgcgggagccctcgcacggatggcagggccgaggcggctccacggcatggcgcggttggggaagaaggccagggcgggccctcctgcaagtgagaggaggggaggggaaaggaagaagcctggcggctggcacagggagaggtgggagcggcagccgctagtagggaggagccaggggcggccggctagggttaggggttgggcctaa

SEQ ID NO: 7151 - DNA, 414 bp, Zea mays
  Peptide Sequence Number=SeqID_48930
atggaggaggggttcatcggggcgcgcaggaggagctgcaatggctaccagcggctacgggcaccaccgccgccgactccgggcataggcacctgcaggctcggacgacgagcggtcctcggctcgggaggctggaggtttgtccggctacgccgctgccgtgccagcgcgccgcggtggtcgtcgacgctgcagctgctcagccggatcctcgacacgtacatcacctccatgctgtcgcagccactgaacatgccgccgccgaagctgcgccgtgatgcttcaccggggacggggtcgtcgagacgccgtgatgccggcgagagcgggagatgcgtcttgctcgcggaggcggcgcccgagaacgccacgacggagggaggaggaggcgactcctcatcgcggaaggcctag

SEQ ID NO: 7152 - DNA, 1011 bp, Zea mays
  Peptide Sequence Number=SeqID_48931
atgcaggcggcatgcaaccgcaccaagggggcgcactctttcgacttcgacgcgtccagcatggaggcccaggtccactcgtcatgtaaccggcgcgtcggttactacgtgcgagaaactgcaccgccactcacgccagtaccacgccttctcgactgcggaactagtgccgcgactcgagggaccggaaaaggggatactccgaaagggatccttctccgcgaaggaagcgggcctcgagcccccctactgattagaggttcgaaggctggcccctcggaagggttcaatagccgcctcagagcactcgggctccgcgcccactactggtcagaggttcgaaggctggcccctcggaagggttcaacagccgccttaggccactcgggctccgcgcccactactgatcaggggttcgtaggctggcccccgaagggttctacagccgcctcagacacagagcgagagatgacccggggagacaacgccgcctgcgtcgctccgactgttgtgccactcgacagagtgaggctgacaacagccaagtccggcctcgggcgccataggaagctccgcctcgcccgaccccagggctcggcccccgtctcggcctcggacgatggactccgcctcgcccgaccccagggctcggactcagcctcggcttcggaagacgacgaactccgcttcgcccgaccccagggctcggatttagcctcggctccggaagacgacgaactccgcctcgcccgaccccagggcttggactcagcctcggctttggaagatgacgaactccgcctcgcccgaccccagggctcggactcagccttggcctcagacgacggtccctgcctcgcccgacctggggctcggactcgacctcgacctcggaagacagactcgacctcgacctcggaggagcctccgcctcgcccgacccagggctcggaccgaccacgtcacagggggggccatcattaccctactgaaagggaaatgtgcccttga

SEQ ID NO: 7153 - DNA, 1068 bp, Zea mays
  Peptide Sequence Number=SeqID_48932
atggggaggcaaccgtgctgcgataaggtggggctgaagaagggcccgtggacggcggaggaggaccagaagctcgtcaccttcctcctcatcaacggccagtgctgctggcgcgccgtgcctaagctcgccggactactgcggtgcgggaagagctgcaggctgcggtggaccaactacctgcgcccggacctcaagcgcgggctgctgtcggaggaggaggagaggacggtgatcgacctgcacgcgcagctgggcaaccggtggtccaagatcgcgtcgcacctgccggggagaacggacaacgagatcaagaaccactggaacacgcacatcaagaagaagctcaagaaaatgggcatcgaccctgtgacacacaagccactccatcagccagctcctcctcctcctcttgaggagccagctggctcgtcgggggaggagaagcagatcgtcacggcgatcacgtcaggatacgatgatgcatcgttctgcaccgacgacgtgcccatggcgctcctcctggacgacattgacatcgtgttgccaggcgacgacgtggtcagtgcacaggccgcggcctgcttcggcactgtttactcgcccgagtcgtcttcttcctcctcctcgtccaactccgcctccgcggcagcatcgagcggtggcaccagcagcgtcgacggcgagtggcttgattggccgccgatgatggactggccggagccgatgtggcagctggaggacgtggttactgcgcggaagccatgggagttcgaggaccccttcgtcacataccagaggatcgccttgtccggcgtgggcggggctacggccggcggcgacgggacaggacagccggggctgaggcgggccggcgtggccgcgacggggcggctggggtgggggcggtgcggcacggcgctgaggcaggggctcgacggggcggctagggaaggggctggcggcggcgggacgcggagggacatccggagtgctgcggtgggagtgagcggtgatttcctgcgtgctacggcgggagtgagcggcggcgtcggagcgatcgaatga

SEQ ID NO: 7154 - DNA, 1353 bp, Zea mays
  Peptide Sequence Number=SeqID_48933
atgcacatcgcgacctgcgtgtggcaagagaaggcggcgccggccggcggcatggggggagctcgagttgctggtggaggtggtggcggcgagtggggtgcgagggccgcggcggcggcggcgctgggcgttgccgggcgcgcgctcaactgcgcggtgagcttcgtggtgttctcggcgctggacgtgctggacgtggtgctgtgcctggcgtacaagctggcggactacgcggcggaggcggagtggaggccgtgctactgctccgcggcggcggacccgcgcgtggcgcagcagctgccccccaagcccaaggtggtgcggctgtcggcggcgtcgcccgccaggttgcacttgcagctggaggacgtgtcggacacgctgtacgcgcggccgtcgctgctggccgacgccacccgagccggcggcgacggcgtcgcccctgcgctcaccgtgagccccgccgccatcgcggcactgatccgcgagaagacggaccgcgcgccgcggcaggcgccgtgctggtctgactgcgactgcaaggtgtgccacgcctggagcgggacgtcccccgcgtcgttgtcccacctctacgtgcacgtccaggcgccgccggcgatgccgatggcagtggagacggaggacgtggtgttcatccacggcttcatctcgtcgtccgcgttctggacggagacggtgttcccggccttcagccccgccgcgcggtcccggtatcggatgttcgccgtggacctgctggggttcgggcgcagccccaagccggccgaatcgctgtacacgctgcgcgagcacgtggagatgatcgagcgctccgtgctgcggcgctaccgcctcggctccttccacgtggtggcgcactcgctcggctccgtcctcgcgctcgccctcgccgtcaagtaccccgccgccgtcaagtcgctcaccctcctcgctccgccatacttcccggtgccggagtcggaggccgagtcggcggcgcagtacgtgatgcggcgcgtgcgccgcggcggggtgcgctcgttcctgatcgaggcgttcatgtgccacacgcacaacgcggcgtggcacacgctgcacaacgtcgtgtgcggcggcgcggggcggatgggagcgtacctggacgcggtggaccgccgcctctcctgcaaggtggcgctcttccacggccgcgacgacgagctggtccccgtcggctgcacgttggcggcgggggccagggtgcgccgcgcgcgcgtcaccgtctacgagcgcaaggaccacatcaccatcgtcgtcgggcaggagcgcctcttcgctgccgagctcgaggccatctggagcgccgaccaatag

SEQ ID NO: 7155 - DNA, 498 bp, Zea mays
  Peptide Sequence Number=SeqID_48934
atgaacaactctaaagcacaacagtccggtgtgcccatcgacaacaacgactggaatagtggttggggctataaatacctcccaaccaccaccattcaagccatccaagcattgcaacttcctcattcaatactagagcaaaagaatacactccaaaacacaatcaaagcatcaaatcctctccaagttccacaatcaagtcaagtgatcaaaagtttcacctattcaccctctgtgggggacagatatcccctgggtccactagaaggcgaaaaccctgcctggggccacgtgccagtcgccccacaaggccaccgcgtcgtagaccgggcgaagatagtggtggaaatgggccgactcagggaggcgatgggctcacgcccggattattcgcagcttgggcgtgatcctgttgaagttgcttgcttttcccgcgtccgatgtcctcaaacgctggggacagctcggaatggaggtgccgagttttcctcgggataa

SEQ ID NO: 7156 - DNA, 495 bp, Zea mays
  Peptide Sequence Number=SeqID_48935
agccgcccgccgccagccgcctccgccgcccacaccaccggccggccccgcctccgcccgcccccgccgcgcctgcccacgccgcggccgccccggcccccgtcagccgcggacgcccccagcccagccctatcagccgcggcggccgccgcccccggccacgcctgtcggcccgcccccgcccctgcccgctgcggcactattctgctggctctgttcgtgtgtgcaggggagcagttccatttcgacgattgcggcatttgcagagtaggaggaaaggagaacttcttccactgccaaacgtgtggatcctgctactcgacgacccttcgcgataggcactgctgcatcgagaactcgatgaagaacaactgccccatctgctacgagggagacgtcggtgctccattgcggccacaccatgcacctactgtgcttccacgagatgttgaagcacgacaagaagttagtcagctgtcggcgctgacggcgtga

SEQ ID NO: 7157 - DNA, 387 bp, Zea mays
  Peptide Sequence Number=SeqID_48936
atgggattgaggaacgggaacgcgatggattaccttgatcactgggcagcgctgcaaacagagcattcttcttctttatccagcgcaactgaagctcttaaagcaagcacattgcgtcttccagtttcaggaggagctaaggccgatgtacttactgttaagaatgctgtcagttcagcagttgacattatgcaagcaatggggtcatccgtttgccatttgctatcaaagttacaggcttcacactctctggttacagaactttcagctgttgctgctaaagaaagtaccttactcaacgagtacagagaactcttggcaacagcagcagcactacaggtccaagagtcgagcctaaggacacagctcatacaagaaacagagtga

SEQ ID NO: 7158 - DNA, 336 bp, Zea mays
  Peptide Sequence Number=SeqID_48937
atggcaaccgagaagggcacgcaggagcagagcagaagctctaggtgtgataaaccgggcccaaacaagcaagtcccaagtggcacgttgtcagaggtagcaagtggttctcgcatcgagtccgtgacgtcgtcgcctgtctgcggtccagagccgtctccgccaggcaagccacaagaagattttgaccctcaacggcgcccacgtcttccacacgatcgcgagagtgcgggagttgcagtgcaggctgtattaacttcatccaacaagatgtgcatgaccttgctcgcagattccaacggctttgcgagtttagtgccttcactgattggataa

SEQ ID NO: 7159 - DNA, 336 bp, Zea mays
  Peptide Sequence Number=SeqID_48938
atggcgggcctccatctccacgcgcggcaaatcggcgagctgatgcggaggcggccgaggaggcgctcgacggctcggcgctgtccagtaatcagtaggcgccgctgcgtcggcgacttcttctccccaccagcgtggccgcgtgcagggttcaggttgtatatttggtactgctttggagttcgcagtagggttgttcaggctgtcacggaactcaagggtattagtgatatacaaaagtttgctttatggcaagtcagctatttccaggagatggtcccagttacattacatggttctgttggacacaatgaagccatccagatatgctattaa

SEQ ID NO: 7160 - DNA, 1617 bp, Zea mays
  Peptide Sequence Number=SeqID_48939
atgacaacgccctctaccgcaccagcgccactggcatctctcctccgcgtctccgctgccgctgttccagtggctcgacgacgtcctaagagccccgcggctgcggcggcggcacggtgggagggaggtgggggcagaaggaggtgccgggcggcggtggtggaggaagccggggtgctgctgcccaaggagggggagggggagggggagggggaggaggccccggacgcggcggcggggcgctacgactggagggaggagtggtacccgctgtacctggccaaggaggtgcccgacgacgcggcgctcccgctcaccgtcttcgaccgccagctcgtgctctggcgcgacgcccacggcgtgctccgctgccacgaggaccggtgccctcacaggttagcgaagctatcggaagggcagatcgtggacggcaagctggagtgcctctaccatggctggcagttcgacggcgacggcaagtgcgtcaagataccacagctgcccgagggcgccaagatcccgcgcagcgcgtgcgcgcgcaactacgaggtgcgcgactcgcagggcgtggtgtgggtgtggatgtcggacgccaaccctcccgacgaagggaagctgccgtggttcgagccgtacgcgcgggcggggttcacggacctgtcgacggtgcacgagctcccctacgaccactccatcctgctggagaacctcatggaccccgcgcacgtgcccatctcccacgaccgcaccgactggacggccaagcgcgaggacgcgcagccgctcttcttcgacgtcaccgagcgcacgccccgcggcttcgcgggctactggggccgcaccggcacgccgcacctccgcaaccttctgcgcttcgaggccccctgcgtgctcaccaacacgctagagttcgccgacaaggacggcagggagcagtgcttctccgcgcacttcctctgccgccccgccgggcagggcaagtccatgctcctcgtgcgcttcggctccaccctcaggtcgccgctcgccaaggtgctcccgtcctggtacttccaccagaacgcgtgcaaggtgttcgagcaggacatggggttcctgtcgtcgcagaacgaggtgctgctccgggagaagctgcccaccagggagctctacctcaacctccgctcctccgacacctgggtcgccgagtacaggaagtggatggacagggcgggccacggcatgccctactacttcggccacagcaccctgtcgccgccgcccgtgccggccgtcgtggagcaggcgcccgcaggggccgtcgcggggatctcggcctcgttcccggccaagggcggcgtcggcatggtgcacgcgcccaacccgaccaacaggtacttccgccacgtcgtgcactgcaagggttgcagggcaaccgtcaaaaagtacacctcgttgaagaccgtgttcgcggccctcgcggcggcggccctatcggccgccatcctggcggcgacgagacagtggaaggccgtcttggtggcggcgtcggccgtgctagccgccgcatcctatgcgtgtgacgcggtgctttctttgatcaccaccaacttcatcaggacacacaggagactgtaa

SEQ ID NO: 7161 - DNA, 396 bp, Zea mays
  Peptide Sequence Number=SeqID_48940
atgggcgacggcgacggcgacggggcccgggaccgggagagagagtcgtcccatatatacataggggttgcaaactgcagagcagcggaggcggaggtggggggcggcgagagaaggaccacgcacgaggcttgctgcatcggtgttccgggaggagaacacggccgcgagttattgctgctctcgtttgctgcatcttccatgtggagtctccgtccgaccgacgaggcccagaggtctgttcgggcttcggcggggaggctcggcggagcggacgccgacgccgacgcgtcctactcctaccaactcgcctgctgcgcctccgtcgcacgcgccggccgggatgtcatcatgtttagcatggcattgacatgcccatatggctggcttgcgtaa

SEQ ID NO: 7162 - DNA, 987 bp, Zea mays
  Peptide Sequence Number=SeqID_48941
atggcgagcagctcgtctccgtcacaggtcatctgcgcctccttcaatcaggacaacagcatgttttctgtcgggaccaaggatgggttcaagatctttgacgctcgtaatgggaggctctgctacgaaaagagtcttgggggattcaacattgtggaaatgctatttggcacaaacctacttgccattgtcggaaccggtgaacaggataggacttttgtttatgatctaaatagcactactatattggacgaaattgaaacggtacccaatacaaaaggtctatgcgcatttgctcctaattctgaagagtgttatttggctctcccagcaagcacatccaaaggatctgctttagtatacaaagcatcaaaaccggaattaatatgccagatagatgctcatctggctccgttagctgcaatggttttttctttgaacggcatgtacctggcaacggcttctgaaaagggtaccatgattagggtgcatcttgttgcacaagcaaccaagtcacatagctttcggcgaggaacatacccatcgacaatctattcactggcatttagtccctctgttgatctgcctgacgttcttgttgccacaagttcatcaggatctttgcacatgtttttccttgatgcttccaggaacgcaaggagacaagcaaatacattgttcagctcagtgattcctggatctgtaactgatgctttggatccagctaatcatcatgttattcacaatgttgtcactgcagacatcaagagttgtctagcagtacacagtgttgaaaattcccaaaattcttccaaatttccctcgctgaagactgttatttacattgtaacacacaatggatacttccgagagtatctgatcggcacaaccaagtcaaatgaatcttcatggttgttggagcgtgaatttaatctcctggatgcttattcgggtagtcccaagcagaacgagctgcacatagactga

SEQ ID NO: 7163 - DNA, 327 bp, Zea mays
  Peptide Sequence Number=SeqID_48942
atggcgcaggagtatccacctgcacctctttttttacggtctccggttaaagtactctctaagaggcgggccggcgggcagtgtagaagaccctttagggttcctggagtcagccttagaggagttgcattaatccgcgagacgtggatgaatattgtgagccacacaaacaaaccctgctgctggtccagtccaggttgcaaatccgggttcagaggaagaaaccacgctgatctgtccctcgacatgctcgaaccatcctgcgcaaatgcaactactggagccctcctcccgcaggttattcgggtgaagtttcgtcgagtttga

SEQ ID NO: 7164 - DNA, 621 bp, Zea mays
  Peptide Sequence Number=SeqID_48943
atgaacaagagcaaaattgcaactgccatgctatttgcaacagttacgtcatacatggagggctcagcgttcccgaagctgcttagtgtgcacaggctactctacgcactccagggtggtgttcagatgatagctcttcaagcgcagagcactatcgtgaggccagagaactcactgccgagagtgcgaggaatcgccggcggagatgtggccggcgctaatgatgtctcactgcccaggccacaattcctcgcaatcagctcggcgctgcagcagcagctccccggtgctctcgctgtagatccacacgttcaccgctcggtggtagtttccgtccctgtgcacctccgacctgaggaaaacgaagcaagcgagcgacgaaatcacacgatcagatcgaaggaatccaaccgatacgggagagttcggttcggggacgggggcgtgcctgggctcggagattccggtcttctcccggaggcattgaggagtgaggacgccgagtcgctcctctggtgcgccaggtgcggcggccatcaacgctgcgggcctgcggcgctggcggccgtttctgtgggagttggagcgagaaagcgaaacggtgttatggtgggcaattga

SEQ ID NO: 7165 - DNA, 1593 bp, Zea mays
  Peptide Sequence Number=SeqID_48944
atggcgggcgagggcgaggacgaggcggcggccattgagcggcagctggagcagcagctgcaggagcagcggtcctccctcgccgcggtcgacgaggccctcgccgccgacccctccaacgccgacctcctcgaggttcatgaggagcttcttgctgcgattaaggatgccgaggagggtcttctccatttgaagcgctctaggctactgaagcaagtagatgagatctttccagataaggaatcaatatcccaatcacccgaagttgctattgagtcattagatccagatgatgttgagccagaaccactggagtcacatgatttttcagttggatcaaagtgtagattccggcacaacaatgggcgctggtataatggatgcattataggctttgaaggttcaggcgatgcaaggatctcatttctgacacctacatctgaaaatatgtcgccaaaacttagtgaatatgagcaggaaaagaactccaagagagattcacagatatgcaagttcttcctacagcagcgatgtcgatttggtagtaactgccgcatgtctcatgacatagagaggtatacccgactaattcagaacttattttcaggtattgtaatgccttctaaagccttgaagcgattcactccaactaggtgggagcagtccttggtaggctccagcatactggcaacttctgggtataactctggcctttggaggagagcagagcttgagtcatgggatgataatctgaagattggccaagttgtttttcaagatgatgggagttctgcgagtctgccaagtgattctctttctgtctcggaatacgctgacatgagtgacgaagatgaaggaagcttaagtgacgaagaatctgagttcagtgacgatgctgatcaagaggacggaagtgttcatcagggtcttggccttttagaattcacaaattttagtggcattcagacagataccatgatcttcgcaaaatgggagcaccacaccaggggtgttgcctccaaaatgatggcaaaaatgggttaccgagaggggatggggcttggtgtgtctggccaaggcatgcttgatccaattccagttaaggtactacccccaaagcaatcacttgatcatgcacttgcttcaagcgaggctgacggaggcagtgggaaaaagcgcagtaggggtgggaaaaggaagcgtgagaagaagtttgcagaacaggccagggctgctaaagctgaagaagctgagagatctgtctttaattttatcaacagccatctagtaagccaagaaggttcgaccaccaaagttagaaagggttcatcagttgagaccaatggactcgctaagaaggaagacagaagatccttggttgcatacggtgaggaagtgaaggagctgaggattcgagttgagaaactggaagagatgaagaaccgtaactgcaaagacaaggcattctttgaagcagcttcaaggaaactggaagagactcggaaggcactcgctgatgctgaagctacccacgcttcagcgacgagtgcagttactagaaaggagaaagagaagaaatggttgaaattctga

SEQ ID NO: 7166 - DNA, 1023 bp, Zea mays
  Peptide Sequence Number=SeqID_48945
atgtgggcggcatcgtgcctggcgtcgtgctgcgcggcgtgcgcgtgcgaggcgtgccggacggcggtcggcagcatcggccgccgctccgcccgcatcgcctactgcggcctcttcgcgctctccctcttcgcatcctgggcgctccgcgaggtcgccgcgcccctcctccagtcgatcccatggattaaccacttccacaagacccccgaccgcgagtggttcgagaccgacgcggtgctcagggtcagcctcggcaacttcctcttcttcaccatcctcgccgtcatcatggccgggataaaggaccagaaggacccccgtgacaagatccaccacggcggatggatggccaagatcttctgctgggtcatcatcgtcttcctcatgttcttcgtgcccaacggggtcgtcagcttctatgaatctatatccaagtttggctctgggctgttccttctcgttcaggttgttctgctgttggattttgtgcacggatggaatgagaactgggtcgccaaggatgagcagttctggtacatggctctgttggttgtctcggttgtctgttacattgccacgttctgtttctcgggtctcctatttcactggttcactccatctggacatgactgcggactcaacctgtttttcattgtcttcacgttgattcttgtttttgcgtttgctattgttgccctgcacccaaagatcaatggaagcttgttgcctgcatcagttattgggaccgacaagccattgcttcccttcagcaaggcagacgaacaagaagataagaaggatgtgccgaggccggtgacatactcctactctttctttcacctcatcttctccctggccagcatgtactcggcaatgctcttgactggctggtcaacttcggttggtgagagcggaaagcttgtggatgttgggtggccatctgtctgggtcaggattgcaacccagtgggcgacggcagggaattctaagttcaaccacggcattgtgccactatcttaa

SEQ ID NO: 7167 - DNA, 897 bp, Zea mays
  Peptide Sequence Number=SeqID_48946
atggcagtcagtattgctgcctactggcgggccggtcggtcagctgccttgcttgccgcccccactgctgctgctggtactgtaccagcaagcaggctgcacctgcgctgcacgcgctgggggactgacactgggcccccaccccacgtacgtagtatatttccccagcgcgacggcgagggcgatgaggggacggctgcctgcctgcctgcccggggggagagtgcgcccttcgatgcggcggccggttctgcccctggcgactcgccctggccgcggcgtggggcgcgggggcaggacagtcattcgcgcaggctcgctgccttgccgcgcatatctaggcgccctatttcagttcgtgtggattggacacttcaaagaaagcccccccagcccccgctgctgctggagaaaagagaaggggctgcgcagcgaggccagccaaaagtagattcggcgccgtgggcccgccgtcctccagctgaggaggaaaggcagctatcggcgaggaagggtggtggactggtggtgctagcggtggtggtggtggtggtggtggaggatcccctctcacgtcaagcgctgtgtggaaagcataaaggcgggaggaggaggagagggcgaaggcgcagagcttccccgccgcacaaagcgaaaaggcttcagaaagaagaaagcttccgccttgggagggagagcgaggcatcctgcgtgtcctgtagctcgcctggtgctgtgtcggagacggtggcaatggcattgcaggagcaggaggcggacggcgacgagggcggggaggaagacgacgaaggcgaggatgagcggatgacgggatacggtgtgggggagctgatatctgcttgtcccgaggcgtgctgtccgcttgcggcggtgtag

SEQ ID NO: 7168 - DNA, 378 bp, Zea mays
  Peptide Sequence Number=SeqID_48947
atgcctgttgtcgaggatgtgccaggcgtcacgaatgccttcgatgcggtgctttatgtggacacacgtcgaagtagactgggaggcctgcgccccttgctccaagacgaggtcgtgtgttccatgactctccgtgctggtgtgttgccgccaatcgaccttggcttgttgtgttgcagccctctccaccaagttgtggaggttctgagagaacagatcaagtcaaggatggaggcaagaagagcttcgaggtaccgagtgcataggagaaggtcaaggataccaaggaacccaaagccaagggtgaagaagaagacttgcaaagtcaaggttgatcgagttaagaagggttatggtgcatcaagaagcactatataa

SEQ ID NO: 7169 - DNA, 585 bp, Zea mays
  Peptide Sequence Number=SeqID_48948
atggggatcccacatgatgtttttaggcaggacgacattgttgatcgcgactcgatgtctggacgcgacccaactgtacgccttgctaggcgaacaatcgggggcccattaggcagcccatggaacatttctatgcttataaggacccatgggatatctatctcctacaaggccccaaggctcaagccaacttttaggggctccaatggctgggggaagaacggtaagggcaagcgcggtgagggcaccaaacgaaggcgtcctctgacaccagcgtcggaggattttggagactccgagttctcgaaggaacaactttcgtttgaggacgagagactagagggctttgatgactcggacgagagctctaaggagagcaccgatgacgacgatgacgaggacagtggcaaggttggtggcgatggtggtggcgacgtggcggcatcaagggcaacaatggaggcggtggcgacgggggcggcaacagcagcgatggcaaaggtggcagcaacggcaacaacagtaggggcagcaacgatggcagtggagacaagggcgacaattctggtggcgaggcaccgctga

SEQ ID NO: 7170 - DNA, 312 bp, Zea mays
  Peptide Sequence Number=SeqID_48949
atggcggctggcgtggccatggcccactgcggcgcagaggcatcgcctgcacgggcgacggcccgcggtgccgcaaaaggcccgtgcggcctttatcctggtgctatctcagttatggcaaatcaatcaagttgtaatctatatatgtatgagccacggttgaggctgtcggtgaacctgatcgagtttggatcacggtgttctgcgcctgtgacctttcagacttccaaatggggtgcagggccaagaacagcggcggtggccgcgctaggtaacggcacgttcatttcaatctcaatccatgtggattga

SEQ ID NO: 7171 - DNA, 741 bp, Zea mays
  Peptide Sequence Number=SeqID_48950
atggcatggatgaccgctgtatctgctcctgtcgtgctcaagtcgtcacaggttggtgggttgtgcgcgcctagcgattctaatgaaaggatgttggtctatgaacggctttatcatggaagcttagataagctactctttggaagatcagatggtcatttcatggactggtctaaacgtttgaaggttgccctgggtgctgccagaggtctagctttcttgcatgatgaaggaccctttcaggccatgtacaacgagttctcaactttgaacatccaaatagataaaggtttcactgctaagctttcaggatatggttgtgttggcttcaataccgaggagatatctaatgcacctgtgatctgttttcttcggtctgcagcaaaccattcggtggagaccttggagaagggtttactcactcagtttgtctattgctgcaacaagtcggggctggaccgttccaaagtaaatgtaaatggaggcacgattgcccttggacaccctttgggtgcaacaggtgcccggtgcgtggctactcttctaaatgaaatgaagtgccggggcagagactgcagatttggtgttgtcaccatgtgtatcggatctggaatgggggcagcagctgtgttcgagctatgttcggcccggctggaggtatcgaccatcactcgtcactgtaacccgatggtgatcgacgaccctgttgatatatttgttatgttgtggaatgtggtgtaa

SEQ ID NO: 7172 - DNA, 456 bp, Zea mays
  Peptide Sequence Number=SeqID_48951
atgcaggtggcgtgcgaccgcaccgcggagatgcaccctttcgacttcgatgcatccagcatggaggcccaggcccacacgtcgtgtgaccggcgcgccggttactacgtgcgaaaaactgcaccgccactcgcgccaatgccgcgccttctcgactgcggaatcggtgccgcgactcgagtcaaccccgcgcgtggcccaacagtgccaaccaagcacatcggtcacgggaaccgggaaaggggatattttgaaagggatccttctccacgaaggaagcgggccccgagccctcctactgatcaggggttcgaaggctggcccctcggaagggttcgacagccgccccagagcactcgggcttcaggctcattactgatcagaggtttgaaggctggccccttagaagggttcgacagccgcctcagaccactcgggctccgctcccactactga

SEQ ID NO: 7173 - DNA, 201 bp, Zea mays
  Peptide Sequence Number=SeqID_48952
atggcgcaagcgcactggggcccgctggtacgccaggaagggtttagggagattcaggggagtgcggcaaacatggctaggggcacaacatcagcacaagggcgctggagggggcggttcatggcaaggcggctcggcgacgacgcaatcctactccgacgagcaatcgcgcaccaccaagggcagaccagggaaaaatag

SEQ ID NO: 7174 - DNA, 450 bp, Zea mays
  Peptide Sequence Number=SeqID_48953
atggcgaactccgacacggaacgagttgggcacaaaggctctggcaatgtcgtgatgctgaactccgttgaggtgaaaggcagctcgacgtcgacgatgaagcgcggacgacgggcacaacaggcgacgacaaacagcaagcgatgtcgcgggagcggagcagtgccggtgcagcgtagttggcgaatgcgagcagagaagcaatcccgcggaggcgcagcagcacgacgtgggagcgagtgtgagaacgagcgtggcgaggagagccggggcgacgccgggaaggggaagcagacgccattaatggagacaaggtggagaaaacgtccgggcctgaggaggcgaggcggcaagaggcatggaagccagaacgaaggggacagcggcatggccaagcagatcggcggagcgtcaatctgcgaacaagcagcgaacagaaggatccgctag

SEQ ID NO: 7175 - DNA, 1632 bp, Zea mays
  Peptide Sequence Number=SeqID_48954
gtgtcatgtggtatttcattaacagctgtgctaaccataacgggtgttgtatttaccattggaagcaaggaccatgggcaattagggaatcctcgatctgacactgacagcgcatgtatttgtatggttgaagggccacttaagactgagtttgtcaaagatatatcctgcggaagttcccatgtcgcagtcttggcaatgaatggaaaagtgtttacctggggcaaaggcacagaagggcaacttggtttaggggattacgttgacaggagctccccaactctagtggaggccctggaagataaacaagtggacagtatagtttgttcttccaattccactgctgcaatttgcgtgcacggggaaatctcaagcaaggatcaatctgtgtgcagcagttgcaggttggcatttcggtttacaaggaagaagcacaactgctacaactgtggttccatggtctgcaattcttgcagcagcaacaaggttcatagggctgcccttgcaccagacaagagcaaaagatgccgcgtctgtgatgcttgtttcaacgagctgaataaaacagccgagcacggtaaaatgagctgtggatcaaagatccaaaaagaaccgtcttatttagcagaaacaaggacatacacaccaaagttatcacggatgctgaaggaagcaaatttcatcatggagaaaatgggttcctccgcacaaagtcccggccagagaaatcaggaacccgccactccgaatcaaatgcaaaaggaaaggtggggacaggtagaatgccccgatcgattcaaatgcgcaagagacaacattccacatcgtttgacaccaaagaagcagacaattgatgattatcctatgaggagaatggctgatccagtctcacaaaagactgctgcccctttaacacaaactactagtgataggaggaaagaacaagatttgatagaaaagatactgctggaggaggtgaaacagcttcaagcacaggtaaccacgctagcagaagaatgccggcacaggagcctgaaagttcggttgtacaaacggaaacttgaggaaacctggttgatagtgagggacgaggccacgaagtgcgaagctgcagaagagattataaaggttttaacgaatcagaggaacgctttgtcaaacaaacttttagatggtctggaactagatggttccagtatcgtgcctaacccacccgacaaagctcttgccacctgcaaaaccccaccgctaaacagcatcagggatcaacacaacgcagaggcagaggaagttttggatacgcgatccacagcgtcttccaacaccgtcgcggtggatgactcagctgcgcatcagaacggcagatctagagcctccagtagcagcagaggctactacgacgatgggggaacagatagcacagctgctcctactgactccaacggggtcatcgagcaaattgagcgtggtgtgtacattacagtcgttacgtcccccagcggtaagaagggaatcaagcgcatccggttcagccggaagcatttcggggaggccgaggcacagaaatggtgggagcggaatgagagcagggtattcgcgaagtacgacagcgtggaatacctggcagcgtaa

SEQ ID NO: 7176 - DNA, 354 bp, Zea mays
  Peptide Sequence Number=SeqID_48955
atggtgtttgagatgtttgtcaatggtgtgcgaccatcacagcgcgtggaggaagtggtccatcttccagttgcggctgaacagcagcagcgcgtggaggaagcggtcgtgctcgtcggcagtccacttctcccgtcatcgacaactctgtgcgcagttgcagacttgcaggtgcagcagcaaaagagggtttgtgagacagagcagctcgatctgctggcagtggcactaagcagcactggagttgcaaggagggcgagcgaggatccatgtgttttgtgttgccagaagcaggagaggccaagaatttataggcgtcgttgcatccctcgaccagaagctcgcttagggtaa

SEQ ID NO: 7177 - DNA, 348 bp, Zea mays
  Peptide Sequence Number=SeqID_48956
atgcggcggcgcactggagcttggccgcctggccggacaactggatgcagcaagtggatgcactggagcagtggagcaagtggatgtagcaagtggcagcaagtggatgcagcggcggcaagtgggcactggagcagtggagcttggccgggcaagtggatggactggatgcagcggcagcaagtgggcagtggcctgtgggctgtggcacggcggtcggcggcgcactcgcctgtgggcaaactggaggagggggccggcggcgtacctggcaggagggcggtcgcactattggaggcgcagctgggcggccggccgggagatctccaggcttccagcgctggctga

SEQ ID NO: 7178 - DNA, 168 bp, Zea mays
  Peptide Sequence Number=SeqID_48957
atgacctccagttacaggcttcacactctctggtttacagaactttcagctgttgctgctaaagaaagtaccttactcaacgagtacagagaactcttggcaacagcagcagcactacaggtccaagagtcgagcctaaggacacagctcatacaagaaacagagtga

SEQ ID NO: 7179 - DNA, 228 bp, Zea mays
  Peptide Sequence Number=SeqID_48958
atgaagcttttttgccattgtcgagaccgaggtggtcgttcccgtgttggcatagaaagcaagaatatggatctctttgcggagtctgctagaaacgagcgagcaagcataccgcccatcggtgccaacaactccctcaaatgtggatggggaatggtgccttgctggagttggtctaaggccattctcagtggtttcatccccatgaaactctaccatctccaataa

SEQ ID NO: 7180 - DNA, 1074 bp, Zea mays
  Peptide Sequence Number=SeqID_48959
atgccagcgacttgggcgagatccaaactagagcagcagcacaccggcaagcagggacaactggcgaactccggtttaggcgaatggaatgcgacacagggagctggtgcgcgcgggcagaggaccgcgcgcgcaaggcgacaacgcccaggaacaggaagcctggacagggcactgtacggaggagttcggctgggacttggcagggagctggctgggcgcgttgcgcgcaggagcaagctcggcaaagcacgagcgagcagggggataggggcgagctcgcgcgcagagaaagagatagtgggagggagaagccgagcaaggaaatcgcggttagaaagatggacgccatggcgagaggagcagagcgccgagcagaaagggcgcgcgagggagaagctcgaggccggacgagtggccgagctgggcgaacagaggagagaggagggccatcccgacgcgcaggaagactggaccagggcgcggcggccatgggagacagagagaactgagcgtcgagcacagggagccgccatggtcgagctcatggccgggaggaggctggaaaccgggctgggcgccataggcgagcaaggtggagcgagcgccgtagggagccgcgcggtccaagctggggagcgagcaacacgccgtcctgggcgagctgaagacggtgggggcagagggcgtgcgtccgtgagaaacggaaaggaaaagcaggggaagcaagcagggacaacttcgcgaagtacagctccgccactgggccagtacacgctcgtcttcgccaactaccttgacggtggcctcaaggttgacatggacgtccgctccgtcatatacaacatcgacccgaccactggggaacgcaatatctctccatgggagcctccgtgctaccctccttctacttcctcttctacctccactatgccagcctcaccgctgtctgggtctccatccttcttccataggactgatgccccgaatggcactgaccgcggcaccgacgaattacctggggagcagagggaagtgctattgtcgggatctacggtcttgataatcacctag

SEQ ID NO: 7181 - DNA, 198 bp, Zea mays
  Peptide Sequence Number=SeqID_48960
atggcgtcgtggcagtttcacgcaagtaacgtggcaccagcggtcacggagccacacgagatcgcttctcgagcaatcaggcagcaccgcgaaagccggacgaggccagcaggaaagcgacagccatggcgatatagaggaccaaatttagagaacgttgctggagatgaagaaaatatagaggatggaatcttttag

SEQ ID NO: 7182 - DNA, 477 bp, Zea mays
  Peptide Sequence Number=SeqID_48961
atggcacggggagtaactggcgacgccgcgggaagtagcgccgccgacgagcgggggaggggggaggccgcgccgccgcagtctgcaacgtggcagcgggtgcggagggccgggcagggggtggcggcgcacgcgctgttgctctgcttcaccgcgctcctcgcgctcaagctcgacggcgtcctctcactctcctggtgggtttgtcataagattgctagaaacactgaaacaggtcatgtggagcctttcatcatagatttaaagcttgtgttccttccactcttggctttggaaatcattacactggttgacaacttcaggatgtgtggtgctttaatgcctggacatggagaaactataaccgaagaagcaatttgggagaggcttcctttgatgctagaatcatttagttctaagtcttatttgggagtcttcatgacagaagatggtatctccagttttttcctgttttag

SEQ ID NO: 7183 - DNA, 177 bp, Zea mays
  Peptide Sequence Number=SeqID_48962
atggtggcggcagcacactacacccgcaacgatgagtcaccaaaggtggtcgggatcctcggtgttgtaggagatggaagcagagggggagggcaaggtttgctccaaatgaatgaattaaacaaagaaatcctaccatatgattatcctagtttatgcaagcctaagtatttttaa

SEQ ID NO: 7184 - DNA, 333 bp, Zea mays
  Peptide Sequence Number=SeqID_48963
atggcggccgcggcggaggtgtaccggcgggtgctgaaggcggtgcagaagcacgtcggtaggggcgccaccaagcagcgcttcctcgacttcggggcggccgagttccgtgcccccgtcggcacggaggccgacgctagggcgaggctgcggctcgccggggactacgcctacctcctcaccagcgtccaccaccacaaggtattggagattgatccggatctgctgctctcgtacaatatagctgtggatcgatctgatgaaacgaagaagatactgaacaaatctgccgccagtgtaggcctccagcttcctgatgtctacaagccatga

SEQ ID NO: 7185 - DNA, 681 bp, Zea mays
  Peptide Sequence Number=SeqID_48964
atggggcgtgggaaggtggagatgaggagggtcgagaaccgggtgagccgccaggtgaccttctccaagcgccgcaaggggctgctgaagaaggccgacgagctcgccgtgctctgcggcgtggacgtcggcgtcgtcgtcttctccgagcgcggcaagctgttcgagtactcctcgccgaccagatccctaacaccaacactctccaccgttaccatttttgcgaagcttggtggatctgattcgccgcagcagcagcagatggccgctgagatcagccagctgcggagtgagtgcgagcagctggaggccagcctgaatgcgtacacgggagaagacctgtcgtccgtgacttcggtggtcgagctcctcgagctcgagcagcggctggagtcggccatcggcaaagtccgtgcaaggaaggatgagctgctcgtcaacctgaccgaggagcttcaggtcaagaccgaagagcacgggcgccacgacggcccaccagccgccgcgggcgtggaggcgacagtggcggagccgccgctgccacagtcgccgtcgttcgcgtacctcctggccctggaggagaagtccgcggcgagcacaatgctgcgtctgtggccgccgacggacgaggacgccgacggcggcgggagctccagcccacgcgatctacacctgtggtaa

SEQ ID NO: 7186 - DNA, 849 bp, Zea mays
  Peptide Sequence Number=SeqID_48965
atggctacattttctggtctaaccactattatggaactggttgactggttgtgcattgcatcctgtcttccagcgttccaatctgagattaaggtcattgtgattatagtatgccacaggaagctctggaaagatcatagatttttgggcaatagcaagtggacatggaaccatcctctcagcctcagcctgcgatgggtgtcgccgccgtcagtgcaaccattcccagccaaccctgcccatatgagtgctcagcaccagattgtctaccaacaagctcaacagttccaccaacagctccagcagcagcaacagcagcagcttcagcagttctgggtcgaacgcatgactgaaatcgaggcaacagctgatttcaggaaccacaacttgccacttgcgaggataaagaagatcatgaaggccgacgaagatgtccgcatgatctcagccgaagctcccgtggtcttcgcaaaagcttgcgagatattcatactggagctgacgctgaggtcgtggatgcacaccgaggagaacaagcgccgcaccttgcagaagaacgacattgccgcagccatcaccaggaccgacatttacgacttcttggtcgacattgttcccagggatgagatgaaggacgacggaatcgggcttcctaggcccgggctgccacccatgggagccccagctgacgcatatccatactactacatgccacagcagcaggtgcctggtcctgggatggtttatggcgcccagcaaggccacccggtgacgtatctgtggcaggatcctcaggaacagcaggagcaagctcctgaagagcagcagtctctgcatgaaagggactga

SEQ ID NO: 7187 - DNA, 279 bp, Zea mays
  Peptide Sequence Number=SeqID_48966
atgggtgtcatggggatcgccgctgaggtgtggacgtacatccgggccgtcgagcactgtgggcttgagggttcggatgagtcggagatctcctcagacgaggaggactccttcgagtcgtccgaggaagggagcggtggcgacgacgatgacgagggcgacggcggcgacaagggtgacggggacagcaccaagctcgggggtggcagcggcaagggcgtcggcggcagcggctcccctggagcggcatcggcagggccagtggcaaagcgccactga

SEQ ID NO: 7188 - DNA, 471 bp, Zea mays
  Peptide Sequence Number=SeqID_48967
atggccgtatctcaggagaggtattccaatcccgatgacgacgacgacgagcaatccgtcagggcaaattccggagcggctgccggcgcggcagcgtctcgccttcctcgtcatgtcccattcccgaatcccgactccagtccaggcccatcaagtgtcagcactactacgctactgacgctggtaatcgatgaagactaccagaaccaggcgtggctcagaagcaataagcaagggggatggaatcatagcggaagagcagcttgcgggacaggcatctgttcttcctcctcgtgcaaaaaggaggggaatcgacttgactcgactgatcataacgaggtcacgccgcctgatcagcagatcaatggccgacacagccgtgggatcacagctctttcaagccgcgttgctgaagacggaacatgcgcagagttggaagaacggaacgcatctgaggatagtggcacctag

SEQ ID NO: 7189 - DNA, 1138 bp, Zea mays
  Peptide Sequence Number=SeqID_48968
tagtgatcggatggacagcacaagctgcctgctggacgacgcgagcagcggcgcgtccacgggcaaaaataagccggccccggtcccggctccggctgcggtgaccggcaaaccgctacagcgcgtgggcagcagcggcgccagcgcggtgatggacgcggcggagccgggcgcggaggcggactcggacggcgccaggcgtgccccaggaggcgtcggcgggaagctgccgtcgtccaagtacaagggcgtggtgccgcagcccaacgggcggtggggcgcgcagatctacgagcgccaccagcgcgtgtggctcggcacgttcacgggcgaggccgaggccgcgcgcgcctacgacgtggccgcgcagcggttccgggggcgcgacgccgtcaccaacttccgcccgctcgcggagtcggacttggacccggacgccgccgccgagctccggttcctcgcgtcccggtccaaggccgaggtcgtcgacatgctccgcaagcacacctacggcgaggagctcgcgcagaacaggcgcgccttcgccgctgcggcggcgtccctggcctcgccgcagctgccgccggccaagaacactagcccggcggcggcgcgcgagcacctcttcgacaagacggtgacgccgagcgacgtggggaagctgaaccggctggtgataccgaagcagcacgcggagaggcacttcccgctgcggcgagtgcaaggcggtcgtgctccgatcctcagcttcgaggacgccgccgggaaggcgtggaggttccggtactcgtactggaacagcagccagagctacgtgctgaccaaggggtggagccgcttcgtcaaggagaagggcctccacgccggcgacgccgtcgggttctaccgctcggccgccgccggcaggcagctcttcatcgactgcaagctccggcccaaggcggtgaggcttttcggcgtggacttgctcactgagccgccgaggtcagcagcagcagtggcgcagccggagccggagcaggaggagatcgccgtgtcgaagaacaagagagctagggacgccatcgccgcgtctgctactccagtacacattgctttcaagaagcaacgcgtagacgtcgcgctgacgacgacctag

SEQ ID NO: 7190 - DNA, 516 bp, Zea mays
  Peptide Sequence Number=SeqID_48969
atggcgccctccttttgcgccaccgtcaccctagcgcctcttggcgggccacgagccttcccacgtgttcatccaaggcaaggaggctctgggcacagggccgatgcaacagataaggcaagaaggcccgatagagcagccaaggcagtcgtcgccacccaagatcaggttcatgccgcttgggacaccctcgccagggaacgccaggccgcctccgaccttaagtgcgctatgggcgtcacccacaacgccgccttcccaccagcccagggcgacgccctgaacaacgacgtcgatgttgttgaagaccccgactacgaggccaccctcatcgtcaatcctcacacgcaggcggcgaaagtgcgggtggtcatcaagggagcaggagggcaccacgactccggcaattgctcgtcggagtatcttcaacagcaccggatcgccaagcatcgtggccggcctccttcgaccccgattgcctgtgagtaccctccacccatgttcgcaataccataa

SEQ ID NO: 7191 - DNA, 432 bp, Zea mays
  Peptide Sequence Number=SeqID_48970
atgggcgatggagacataaacccgatctctgatcgggaaaaaagacgcagtagcaacagatctggtacatcatctgggaccctaatggaggtgtggccaccagcgcggggagaagacgaagggcattgtggcaccaaggctgccgcgagcaaagtgcagtgcgaaatcgggacggagcgagacttagcccatcctccccacgacgtgccagtcccgagggttgcccagccgcattctggccaccagcggagcgaatcagttggccctgtggcgcatcctacgagggcgctgccccgactaagagtgatctccccgggggcggcacgacagcagaagacgaagaccaagagtttgaacctagacttgtcataccatataagaaggcacaggacacaacacagacaaaattacatttatgcccttgacaactaa

SEQ ID NO: 7192 - DNA, 375 bp, Zea mays
  Peptide Sequence Number=SeqID_48971
atggcttggtgcgggtccgcagtggtcgcttctcagcccgcggcggtgtccgccgccccgaagcccgagcaggtccagcgatccccacccgctcgtgctccacgctatggcaccgaggagaccacaaacgaggctctgatgatgcggatcaggggaggtagtcgacgcgcggcgaagtggtggaccggatctgcgcatttatggcccccagggaacaaggaaaccacccaagcgagcacccaggcgagaaactcggtccatgcgcaacctcctgggaagaagaccgagctgacctccgtggcccacagcacagcgtcagtcacagaggctgcagaccgggcccttctgtcagcgagcggggcacagaaacgatag

SEQ ID NO: 7193 - DNA, 951 bp, Zea mays
  Peptide Sequence Number=SeqID_48972
atggggcgagggcgagcgccgtgctgcgccaaggtggggctcaacaggggctcctggacgccgcaggaggacatgcgcctcatcgcctacatccagaagcacggccacaccaactggcgcgcgctgcccaagcaagcaggtttgctgcgctgtgggaagagctgcaggctgcgctggatcaactacctgcggccggacctcaagcgcggcaacttcaccgacgaggaggaggaggccatcataaggctgcacgggttgctcgggaataaatggtctaagatcgctgcctgcctgccggggaggacggacaacgagatcaagaacgtgtggaacacgcacctgaagaagaaggtggcgcagcgggagaagaagaaggccggcgcggggagcggcgacgccggcacgcccgccactgcgcccttgtcctcggcgacctcctcgacgacgacccacaacagctccgggggcagcgactccggcgaccagtgcggcacgagcagggagcctgacgcgaccgacccaatgccgtcgccgtcctcctcgtcctccctgacgacgtgcgtcggcggcgtggaggagctgatcgagctgccggtgatcgacatcgagccggaaatctggagcatcatcgacggcgagagcgctgtggcgcgccatggtggcgatgcagccgcgccatgtacgggcaccggcaccgccgtcagcaccagcgaagcagaggaagcggcggcgaacgattggtggctggagaatttggagaaggagctgggcctgtggggctacgcggaggaggatactcaggcccaccctgacctactggaccactacacaggtttgagcccactctgcgccctggagggggacccagtctccacctacttccagaccgggcccgccgccgcggaacctgagctcctggtggtcgtcgaaccatctgccgttctgctatga

SEQ ID NO: 7194 - DNA, 531 bp, Zea mays
  Peptide Sequence Number=SeqID_48973
atgggcgagggcagcaggttggggaggaaaaacagggcgaaggttgggaagacgaatgagacgtccaacgacggcgaaaacgatgggcttctgaccctggcaaggaagcctccaaccgactccaaggagtcacacgaaggctcgggggcagctgtcgggtatccaggaacggggtaccaaggcaaggcacacaaacctcgaccaagtctccgtcgggtgagaaggaggccgaccccgggcgggagacgcaatcacgactcacccgaggccaacctcggacgggagacgcaatcattactcatccgaggacaacctcgggcgagagatgcagtcatgactcgcccgagaccaacctcgggcgacagacgcactcacactcgcctcaggccaaacccagacgagagacgcagccacggcttgcccgaggccaacctcggacgagtagcgcatttccgactcacccgagttctttgctcggatctctgtgatccaccattcgtagtaatgacagtaggaataaacaaatggtga

SEQ ID NO: 7195 - DNA, 144 bp, Zea mays
  Peptide Sequence Number=SeqID_48974
atggccccgtcgtggggagctatcggcgccgccgcacctgtcggcctgagttggggagatcattatgttaatgggaacatggagcgaccacccgggaaaacagtgctaccacaagggtataatgggacgcccttggctgattaa

SEQ ID NO: 7196 - DNA, 240 bp, Zea mays
  Peptide Sequence Number=SeqID_48975
atgccgagaaatatggtactccttaggatgattggttgctggtgtgacttggcctccatccctgccaccgggatagatggtcgactgaactctctccccccggaaccgtatgacccttacaccgatccaaccctaaagggcacttttgatgaattcaaaattgtgaacgcaacactagatgaagctgttgagaaacttctaaacgaagctgcagaaaaagtcctgaaggaggatgattaa

SEQ ID NO: 7197 - DNA, 393 bp, Zea mays
  Peptide Sequence Number=SeqID_48976
atgggagaagaaaagggcccgctcgccatggaagagagggcacgggggaggtggagctgctgttgggcgccggtccgaggtggaagaaggggcgcctgcactttcctgcgcgatggcgaggtcgagctgggagacgcagcgtgcgcgaggagcatgaaggaggatggcgcaatggaggagagggagctcggctggaattttctgggcaccatgggtgtagcagacttgcgcagaggagggaggaagggtgagcagcagcaggggagggagctcggcggccatgggaggctggaggaagaagctcgccgcaggggaaggctggcggccatggagctcctgcgcgctggctgctgttgccgtggagtagggacgaagaaggctgctggcggctga

SEQ ID NO: 7198 - DNA, 393 bp, Zea mays
  Peptide Sequence Number=SeqID_48977
atgggagaagaaaagggcctggtcgccatggaagagagggcgcgagggaggtggagctgctgctgggcgtcggtccgaggtggaagaaggggcgccgacaccttcctgcgcgatggtgaggtcgagctgggaaacgcagcgtgcgcgaggagcatgaaggaggatggcgccatggaggagagggagctcggctggaattttctgggtgccatgggtggagcagacttgcgcagaggagggaggaagggcgagcagcaggaggggagggagctcggcggccatgggaggctggaggaaggagctcgccgttggggaaggctggcggccatggagctcttgcgcgctggctgctattgccgtggagcagggaggaagaaggctgctggcagctaa

SEQ ID NO: 7199 - DNA, 378 bp, Zea mays
  Peptide Sequence Number=SeqID_48978
atggcgggctctcttcttcgcgacggcggccacgggctccccttcgtggacgaacggcgaggggcgcgggagctctgcgggcggcgtcgtggggccgggcgcgggagctctgcgaggggccggcggtgcggcggcgtcgtggggccgggcgcgggagctcttccaagggccggtggtgcggcggcgtcgtggggctgggcgcgggagctctgcgaggggctgggcggcgcggcgggcgtcgtggggggccggggcgtcgtgggagctctgcacgggcggcgaggggcgcgggaactctgcggcgttggcgtgcggcggcgcggcgtggtgaaagaacggtttgaaacgagcgagagaaggctggccccgacgatgtag

SEQ ID NO: 7200 - DNA, 651 bp, Zea mays
  Peptide Sequence Number=SeqID_48979
atggtcgcgctctccagacggttcgtcgcgctctccagaccggtcgtcccgctcgccgtcgggaccacgcccaccgccgggacagcgtgcagatcgctctctcctgccgcacccagcgccctggactctggaggctatggagccacaggcagaccagactacggaccagatcatggcttccacggatttttaggtaaaaccatcgagaagaggaagctggtcattgatgtcaagtatttcttcttctatgtgcactcggaaccccgcgacatctacggagagacttcatgcctagcaaccggagacttcatgctgtccctcgactttgccacgaataccttttatcagaaaaatggggggaacaataaaggatgttggaaaatgaaatatattattatagctaataaattggctttcccggaggcactaggatttggacccagccaagtggccaagttttgtctattttacacaactgacagtcttcagttgaatttaaggttcctcttcccttgtttggaagaggttatgatcattaggatggtcatcagaatctcaaagatgaagaattgccataaaggtgctgatgagttctttgatgatatatgtaatttcaattacatgaactacaagaaagtgcaaattgaataa

SEQ ID NO: 7201 - DNA, 390 bp, Zea mays
  Peptide Sequence Number=SeqID_48980
atgatggtgaagccctggcgctgcctgtgcttggcgttgacagtgcattggatgaaaaaagatgccctggcggcagttgaggagaggagggaggcgaccgatgcggcgaggtgctcagccacgcggacgaacagggtggcagcagtttatccgaggcaggcgctctcccggatgagcatggtagccgccctgtggggccaggggcggaagcggtggaaggttgttgaaggttcgcacggacgggaggggatgtgtgagatagatgatgtagattcgatggaaatatacgaacggtgtagatttttggaagccataacaagattaagtccatacccaagttttaacaaggatgatgaccataaaaaggatgatgttgtccacaatggttga

SEQ ID NO: 7202 - DNA, 123 bp, Zea mays
  Peptide Sequence Number=SeqID_48981
atggcgatggcgtacgggatagcagaggtggccatggtgacggcgggctggtggccatggttcttgtggaacctatacttgaagtcagggcaggagctgctcgagctatggggtgtcttataa

SEQ ID NO: 7203 - DNA, 927 bp, Zea mays
  Peptide Sequence Number=SeqID_48982
atggcattggtggtgaagcggtaccgatgtacgcactccgtgagctgtgcttgcctcaagggccatgtcagggaggatgcaatgtatctcgtgtttaaacacatgaactggaacccgaagatgattgctatcttatcaagtgtatgtaagtggttcgatgaatttgccaagagggtgctctggaaggaattctgccatgccagggcaccaaagatgatgaaggatttgcactctgacggaagtcatatcgttgatggcaactggaaggccctagggaagcttcttatctattgcgcagggtgccctagtggagacctgttcagtaatatccatgacccagtcccggggcactttgtctacagaacccgtttttctaggacattggggaagagcttactggcgccacagtgcaggtctgatgcgttgtatgtctcagagtcctgtgaacatcttgaccagggcgaggaaggtgacttgggcctcttccggggtatcttcaagtcgtttgctgcgtcgaagatgaagaaaatgttgattgagaggcaggcaaacttccatttgaataagatgtgtccttattgtaagacaaagctatgggacttgatgcaaccaaatatgataccaagtagtgccgccgtgagattgggtgcggaagatggttctgttgagtactatgtatgccttaatgggcacatccttggttcatgcactctgatacccatctctgattctgagggcacaaaggaagaagcacctgcatattgctttggtaccgcactgattgagctgcagcgggtccatgcagttgtagcatcaggcgaggcgaaggaagcatggatgatggatgctgctccgttgccagtttgcaacttgcttcgctcccgagcatcatttcgtttttctacttcgggcattcggttcttttaa

SEQ ID NO: 7204 - DNA, 4158 bp, Zea mays
  Peptide Sequence Number=SeqID_48983
atgggggttactggaaatgctgttgcagcctttgcagaacttaagggttcctgtaccagaaaatctcgcccgctacgggaacagcagctcaaatgggagtccaagcacttctcctttttaggtcaaggatccttgttggatcagtacaatggtgtacatgatgcttcccatggcttgcatcggaagcgaaaaaagcaccctgatggtgccggcgatgatgatcatgcagatgcctatagtaacaaaatgatggaggatcactaccgtgcgatgctcagtgaacatgtccagaagtaccgaaggtcaaagtttaaggagggtgcttttatttccgatccttctcaggtggcaatcccccaaataaaacacaaaaacggtggtaaaaaagttatgaagcacattagtaatttcagggatattgcggcattaaatgggatagaagcttcacatgagtataattggatagaatgtattgaaactcatggtggttttaataagcttgtagcatccgttgattccacctatttagatatgggggataatatacactacttagttccagagggttatgataagttagcattatcccttaacctccctatttcttctgatatacgtgttgaggagcacttcttgaagggcgcactagatttgtgcaccctatcagcaatgcttggtactgaccaaaggtttgaggcttccagccatggtggattatctgaacccctgccacaatttgaatctctcaaggaaagggtaaaggtgcagaaattttctcttcaagttaccgaggacccctttgcaattccggaaggagcagctgggaggatacgaaggtctattatatcagaaactggcaatttgcaggtccattacgtcaaagtcttggaaaaaggagatacatatgagattattgagcgcagcttaccaaagaagcaaatagtaaagaaggaaccttttgtaatcgtgaaagaagagtctgaaaagacttacaaactctggcagtatcttgctactaaaagcattccaaagcatcacaggaattttacttctttgatgaagaaacgacaagtagatgcgaagcgcttctctgatagttgtcaacgagaggtaaaattcaaagtaaggaggtcactgaaactgatgagatgtgctgcaatacgtacaaggcagttggctagggatatgctgatattttggaaacgagtagacaaagagcaggttttctttttgcccttgcgttgtcttcaaaacatgtcacttaagatgatgacactcaaattcttttcccggtatcagtatgagttgagaaaaaaagaggaaagagaagctgctgaagctttaaaacgtgaggaggagcttcgtgaagccaaaagacaacaacagaggctaaactttctgctgtcacaaacggagctttatagtcatttcatgcagaacaaggctggtggctcagcgccacctgatgaggaagatgtccctgatgaagatgaggaagaagatcctgaagaagctcaattgaaaagagaggccttgagggcagctcagcatgccgtttctcaacaaaagatgaggactaatgcatttgatagtgaaactgtgaggcttcgtcaaacttctgagtctgttcttccaactgatgattcatctagcatggatcctagtaagattgatctattacacccttcaacaatgcctgagaagtcatctgtgcaaacaccagagttgtttaagggtgtattaaaagaatatcagttaaaaggcttacaatggctggttaattgttatgaacaggggttgaatggcattcttgctgatgagatgggtcttggcaaaactgttcaggctatggcattcctgtctcatttggctgaggacaaaaacatatggggcccctttctagtggtggctcctgcatctgttgtgaataactgggctgaggagttgattagattctgccctgacctaaagatacttccttactggggcccagagaggatgattcttcgaaagaacatcaaccccaagcgtttgtatcgcagagatgctagcttccacattcttattacaaactatcagatacttgtgaatgaagagaagcttttgagacgtgttaagtggcaatacatggtactggatgaggcccaggctatcaaaagttcaagcagccagcgctggaagacattactgagctttagctgtagaaatcgtctacttcttactgggacaccaatacagaacaatatggctgagttatgggcacttcttcatttcatcatgcccactctatttgacagccatgaacagttcaacgagtggttctcaaagggtattgagggtcatgctgagcatggaggagctttgaatgaacatcagcttagtagattgcatgctattttgaagcccttcatgctccgccgggttaagattgatgtcattgctgaaatgaccaaaaagaaagaagaaattgttccctgcaaattgagttctcgtcaacaaattttctatcaagctataaaaaataagatctcgcttaacgagttgcttgatggaagtcgtggcaatctaaatgacaagaagttacttagcctgatgaatattgtcatgcagctacggaaggtctgcaatcacccggagctgtttgagcgcaatgagggaagctcttacttttactttgctgatatcccaaactcacttctttctcccccgtttggggcattacaagatgtacattatgcaggcaagagaaatcctataatctttgagatcccaaagttagtttatgatggaatcatctgcaacacagaaaattctggaagcatctgtggatttcagaatggatatttgaacaggttgtttaatatatttttgccaagcaatatccatcgctcagccattccagaagttaattcatcaaatgagtctgttttatcatctggtgcatttggctttacacgtttgtcaaacctgtgcccagttgaagctttcttcctggccacttcatcattctttgagggactagcattttcagtaatgcgatggaataggaactacactgatgaaattatggatgcattccttgattcagaagatactgacatccagttcagtcagaatgattccacaagagttcgtgcagttgcccggttgttgctttcttctacaaaggccaagcccagcttacttaggacaaagattggaactggcccaagtgaaggcccatatgaagcactggtgctttctcatcatgacaggcttgcttcgaacataagggttcttcgttcagcatacacttatattccgccagctagagcaccacctccttttgccctttgccagataaatgtttcatgtgctgatcgaaattttgcctataagttcactgatgagatgtatgatccttgggtcatgaaactgttcctgggatttgctcgtacttccgagttcaatggtcctagacaaccagttgctcttcatcctttgatacaagaactcaatactgatttgcctatccttgagccgatgctgcagctaccctataggatatttgggtcttctccaccgatgagtaattttgatccagctaaaatgctcactgattctgggaagctccacaccttggatatgctactacggcgccttcgagctgaaggtcaccgtgtgcttctttttgctcagatgactaaaatgctggacattcttgaggattacatgaattttagaaaattcaagtatttcagacttgatgggtcttctgcaatctcagaccgccgtgacatggtccgagctttccagaacaggaatgatgtatttgttttcttgttaagcacaagagctggggggcttggtattaatttgactgctgctgatactgttattttttatgaaattgactggaatccaacacaagaccagcaggcaatggatagaacacacagacttggtcaaacaaaggaggtaactgtgtacaggcttatatgcaaagatactatcgaggagaaaatattgcaaagagcaaagcagaaaaatgcagtgcaagagttggttatgaaggggaaacatgttcaggacgatcatttgttgagacaagaggatgttgtttcattacttattgatgacacacaaattgcacataagttgaaagaaatatccatgcag

SEQ ID NO: 7205 - DNA, 225 bp, Zea mays
  Peptide Sequence Number=SeqID_48984
atggtggggttgtcgcggaggctggcgagcattaatggcgaggcgacgaggcgaggggcgctcggcagcgatcgcgccgatgagggatgggcgagggagaaggagctgactggtggggtcggctgccatgtcttttgtttcttaaccaaaaattctctaaatgaacttggtgataaatatggcctatgtgaggtgcttcaaatcattttaagtatatgcaaatga

SEQ ID NO: 7206 - DNA, 840 bp, Zea mays
  Peptide Sequence Number=SeqID_48985
atgggtcgacacccagcttccagcagctccgatccaaccggaactctgaaccatgtttttcgacgagtcgctgatgaaaacaggagcgggcgcggcctgctcttcatctcacccctctacgtgctgcgcctccatttcccggcatccaacaacgtggccgagtacgaggctctggttaacgggttgcgcatcaccatcgagctaggggtccagcgcctcgacgctcggggcgactcgcagcttgtcatcaaccaagtcatgaagaactcccattgccgcgacccgaagatggaagcctactacgatgagaaggcacccgggggctacacgcacctgctggtcgccatcgacaaattctccaagtggattgaggtccgacccctaaacagcatcaggtccgaacaggcggtggcgttcttcaccaacatcatccatcgctttggggtcccaaactccatcatcaccgacaacggcacccagttcactggcagaaacttcctggacttctgcgaggaccaccatatccgggtggactgggccgccgtaactcaccccatgacgaatgggcaggtagagcgtgccaacggcatgattctgcaaggattcaagccacgaatctacaatgacctcaacaagttcggcacgcgatggatgaaggaactcccctcggtggtctggagtctgaggacaacgccaagccgagccacgggcttcacgccgttctttctagtctatggggccgaggctatcttgcccacagacttagaatacggatccccaaggacgagagcgtacgacgaccgaagcaaccggacctaccgagaagactcactggactag

SEQ ID NO: 7207 - DNA, 351 bp, Zea mays
  Peptide Sequence Number=SeqID_48986
atgtcgggggccgacgggccggaatttgagggtttctttcacctcgtcgtttccaacccatctctccctcgcctcctgctccctcacccgcgccacatatctcgactggtgccgtcatcaaggaggtggatgaacactccactaaccctcagatctgtctcctccctctttcgccgttgccgccctcaaatctctagatttgcgatgacaaccagccgccatgaggtatatatcctccaaatccaaggtggctcatacgacaaccaagctggggtcaagttctatgaggtggtgtgcgcagagcacaacatcaacgctagcagccgctacgacgacgacttcgacctctag

SEQ ID NO: 7208 - DNA, 102 bp, Zea mays
  Peptide Sequence Number=SeqID_48987
atggctaaggagaatgttcatgtgttgggagatgaagttgatgagctcatctccttagggtttggaactgataaagtatttaaggaggtgcatctaaattag

SEQ ID NO: 7209 - DNA, 387 bp, Zea mays
  Peptide Sequence Number=SeqID_48988
atggcctccctcatcgacgcagccgctgtcatggccctacagaccatcgcggctgtagtcaccgccgccaccggaaccggtacggtcgacccggtcctcgtcctcaaccctgctatgtacaacaccatggctgcggccagcgcagccgccgtggtccgcaccaccaccatgcttggccctcctgcgcgcagcgcagccgctgtcgccgcgtccaatgcttgtgtagccaacctccacctcttaaggctcaaactctcaggctatccgacgtgcacgggtgccctcgccgccatcgtggaatcgggacctctctcgtcagcccgtctctcccggcagccgctccctggcttctccaccactcgcccactcgtcgcaaaccccacctag

SEQ ID NO: 7210 - DNA, 3480 bp, Zea mays
  Peptide Sequence Number=SeqID_48989
atgtctatgtatgcactgctgagatctagcaaacagcctcccactgaagaccagattgaagactgccttgcaggaaatttatgtcgttgtactggctaccgaccaattatagatgccttccgtgtgtttgccaaaacagataatttggcatacaccaattcatgttcagaagatgcaaaggaccaagctatctgcccttctactgggaaaccatgttcctgcaggaatgagacagatgtcaatgttaatgagtcctcgttatcatcgtctgtggaaagatattcaccttattcatacaatgaaattgatgggagtgcatacaatgaaagggaactcatcttccccccagaacttcagttgagaaaagttatgccacttaaattaaatgggtctaatgagatcaagtggtataggcctcttaaactaaagcaattactacatttgaaatcttgctacctggatgcaaagcttatcattggtaactcagaagtgggagtcgaaacgaagtttaagaatgcccaatataaggtcttgatcgcagttactcatattccagagcttaataccctcaaagctaaagaagatggcatacacattggttctgctgtaagacttgcacaacttcaaaattttcttaaaaaggttgtagcagaacatgatttgcctgaaacttcgtcatgccaggcaatagtacgtcagttaaaatggtttgcgggtacacaaatcaggaatgttgcatccattggtggtaacatttgtactgctagtccaatatcagacctaaatccactttggatagctgtaggtgcgaaattccatataatagatgtgaacggtaatgttagaactacccttgcaaaggacttctttcttggttatcgtaaagttgatataaaaccagaagaaatattgctttctattatactaccatggacaaggccttttgaatatgtcaaagaatttaaacaggcacatagaagggaggatgacattgctttggttaatgctggaatgcgtgtgtatttacaagaaactgaacgaaattggataatatctgatgtttcaattgtctttggtggggtagcagcagttccacttagtgcttcaagaactgaaaacttccttactggaaagaaatgggactctgggttgctggatgatactttcaatttattgaaagaagacatctctatttcagagaatgcacctggtggaatgattgaatttcgcagatcgcttactttgagtttctttttcaaatttttcctgtctgttacccatgaaatgaaaataaaagggttgttagcagatggattgcatgcagatcatctgtcagctgtacagccttacagtaggcctgttactgttggaactcaaagttatgaattagtaaggcaaggagcttctgtaggtcagccaatggttcatatgtcagctatgcttcaggtcactggtgaggctgaatacactgatgacacaccgacacctcccaatactttgcatgctgctttggtgctgagtaagaaggctcacgctcgcatattgtctattgatgattcacttgccaaatcttcccctggctttgctgggctgttcctttcaaaagacattcccggtgttaaccatactggaccaattatccatgatgaggagttttttgcatctaacattgttacttgtgttggtcagatcattggaattgttgttgctgatactcatgataatgcaaaaactgctgccaacaaagtacatatcgagtattgtgagctcccagcaattttatctatagaggaagctgtcaagattggaagctttcatccaaataccaagaaatgccttgtgaaaggcgatgtagaacaatgttttctgtctggtgcatgcgatagaattgtatcaggacaagttcatgtcggaggtcaagagcatttttacatggaacctcagtgcactcttgtctggccagtggattctggaaatgaaattcatatggtctcatctactcaagctccgcagaagcatcagaagtatgttgcaagtgttcttggtcttccacaatcaaaagtcgtttgcaagactaagcgtattggtggtggatttggtggaaaagaaaccagatcagcaatatttgctgctgcagcatctgtaccctctttctgtctgagaaggccagtaaagcttgttttggacagggacgttgacatgatatcaactggacagaggcacagtttccttgggaaatataaggtgggatttaccaatgaagggaagatactggccctagacctggaaatttataacaacggtggccattcacttgatctatcccttgcagtactggaacgtgctatgtttcattcagaaaatgtctatgacatagaaaacatcagaatcaatgggcaagtatgctttacaaacttcccaagtaatactgctttccgaggttttggtggtccacaaggcttgttgattgcagagaattggattcaccatatagctacagaactccaacgaagtcctgaagagataaaagctggcgctcttgtgcaagtttacactgatggcactgtcctggtaacacatggcggggtcgagatgggacagggtttgcacacaaaggtagcccaagttgctgcctcgtcattcaatatccctcttagctctgtatttatatcagagacaagtactgataaggttcctaatgcatcaccaacagcagcctctgctagttcagatctgtatggagctgcagttttggatgcttgtcaacaaatcaaggttcgaatggaacccattgctagcaaaggaacccacaactcgtttgcagagttggctcaagcatgctacatggaacgtgtggatctctctgctcatgggttttatgctacacctaatattgggtttgactggacgattggcaagggaactccattcaattatttcacgtatggagctgcatttgcagaagttgagatcgacaccctaactggggatttttacacaaggacagctgatattgttatggatctcggattttcaattaatccagcaattgacattggccagattgaaggagcttttatccaaggattgggctgggcagccatagaagagctaaaatggggggatgataaccataagtggattcgacctggacacctcttcacctgcggtcctggttcttacaaaataccctctgtaaatgatatacctctgaatttcaaggtttctctattaaagggtgttccaaatccaaaggctattcattcttccaaagccgtgggagagccaccatttttcctaggttccgccgtcttatttgcgataaaggatgcgatctctgcggcaagggctgaggaggggcacttggactggtttccactcgacaacccggcgacaccggaaagaataagaatggcatgtgtggattccattacaaagaaatttgccggtatagattatcggtccaagcttagtgtatag

SEQ ID NO: 7211 - DNA, 573 bp, Zea mays
  Peptide Sequence Number=SeqID_48990
atgagctactacggccagcagcagccgcccgtcagcgcgccgccggcgcaaggttatcccgggaaggacgcgtacccgccgccgggctacccgcccgcgggatatcctccgccggcgcagggctaccccccgcagggctacccgccgcagggctaccctccgcagcaggggtatccgcagcagggatacccgccgcagtactcgcagccgccgccgccgccccgccagcagcagagcagcgggccctctttcatggagggatgttttgccggagacgacgccctgggcggtggcgctagtggccgcctagtgggcgtgttgtgtggcgcagacgtgatcgcggtcgcggactcgcggttggcctgccactgtcagcgccaatcggcgagcggttggatgggtcgtggtcgtggagggtccaggccaggcgccctccgcgcccgtgaagttgaccgcgccctgcgctcctccaaaagccctaaccgtggtccccagtccccactacccccacgacgtttatctttgctcgaccgtctggccatccagagtggcagctctcgtctagttggatga

SEQ ID NO: 7212 - DNA, 267 bp, Zea mays
  Peptide Sequence Number=SeqID_48991
atgggaacaaatgggcatctcgacctcgacacgggagacagtctggtgaattatagcggagcgactctgggaaaaccccgagagcggccagttcgtggggctgctcggcctgggcaccggacagtgcctggtgcacagcggacaatgtctggtgtgccactggcagcaccaatgcttgtctttgctccaaactttgtagagttccccaatttattttctttgttggtttatgttgaactttatgcacctgagataaatgacaactag

SEQ ID NO: 7213 - DNA, 348 bp, Zea mays
  Peptide Sequence Number=SeqID_48992
atgaggggcacgacggtccggagggctccgccgcgtacacctcctggtgctggattcgtggtggcgcttgttgttgcttgtatgttgacagttggcgacgtccacggcggggacagattccccgtggggttccccacagggataaattccccgacggcgacatggatgggagaaaaagctcccccgcaagcgttcacggggatggggacggggacggggaatttttctccctgcggggacggggagacattccccgacagggaaatccccgttgtcgtccctactcctggtagagcgcttaggcgccatgcttgcgatggctggtgcgtcgagactggcgagacgtag

SEQ ID NO: 7214 - DNA, 462 bp, Zea mays
  Peptide Sequence Number=SeqID_48993
atgaagctgtggaaggagacttccaggagttccaagactacgacgagttctaggtgtgggttagcggcaacccccagtcggctgcctgtgaaggccgcgtttatctacgtttcttttccgcactttgatttattatcggacatcaagcggcgccctatgccgatctgtggtggattcacgaccgaagtcaacgacagaggtgaaatttgtggggaggagaaggtgtcagcagcagcacacaggtggggaagagagtggtcgagcggggagtgtcagcagcagcacgaggttggtgatgacgtcccgcgaaaagaggtgaacttaccacaggtcgagcggaggaagcagcacgaggaagatgaactatcgccggggtggatgggtggcggcgacagagaatacgcgagacgagaggaggaaacaaatcaggataaccgcccgaccttcggacatcggatgtga

SEQ ID NO: 7215 - DNA, 453 bp, Zea mays
  Peptide Sequence Number=SeqID_48994
atggtcaccagcgaaaagcccgaaagctcgggaaggaagaacgaagaacggactccgtcaaaggaggccggcgacaagcacaaggaggaatccgcttcctccatcaagtcacataggaagggtgacaagaagaaaaagaaaatgaagaaggtggtctactatgagactgactcttcatcactttttacatccggcgctgagtctaccacttcgaaacgccaagagcataagaagtatagcaaaccaccatattttgatggtgaggattattgtatgtggggtgataaaacgaggcaccatctaacctcactccacgaaagcatatgggatattgttgagtttggagcgcagacaccacaggtgggcgacaaggactatgactccaatgaggcaacccaaataaggcattttaattccctagcaacttctatactcctcgcctccttgtgttga

SEQ ID NO: 7216 - DNA, 933 bp, Zea mays
  Peptide Sequence Number=SeqID_48995
atggggtggggaagtgagtgcgggtgcgggcggtgctcaaaagggagctggggtgcatgggtgggcgacgtggccgagcatcccggcgaacgtgcgtgcgtgcgtagtactggtccatggcaggtcgcggggatggcggaactgacaggggggtcccacgacacagcgagagggagagggcgcgcggggaaacagttcggcgcgctgacgaggcgggcccgtgaggcagagtggggaaggggcgcgcaagcgagggaaagtggcgccgacagagcggccccactgggcagagggagaggggtagggggttacaagcgtcagcgtgggagggagcgagaggcctgcacgcgccgtcccgtcctccccgtgcggccaacccttcgtaagagggccctggaccttccttttataggcggcaatgatggcccctcctgcgacgtggtcggtccgagccctgggtcgggcgaggcggaggctcctccgaggtcgaggtcgagtctgtcttccgaggtcgaggtcaagtctgagcccctaggtcaggcaaggcggagaccgtcggctgaggccagggccgagtccgagccctggggtcgggcgaggcggagttcgtcgtcttccagggccgaggtcgagtccgagccctggggtcgggcgaggcggagttcatcgtcttccagggccgaggccaagtccgagccctggggtcgggcgaggcggagttcgtcgtcttccggtgccgaggccgagtccgagccctggggtcgggcgaggcggagttcgtcgtcttccggggccgaggccgagtccgagccctggggtcgggcgaggcggagcttcctatggcgcccgaggccggacttggctgctgtcagcctcactctgtcgagtggcacagcagtcggagcggcgcatgcggcgctgtcctcttgttag

SEQ ID NO: 7217 - DNA, 576 bp, Zea mays
  Peptide Sequence Number=SeqID_48996
atggagagacagggcctctcacctgtcagtgaaaagatggtgaagatcgtggagatcaaagaagaacaggacgatgcgtgccccgacgacgacgattgctacgagataggtatcgaggagttcgctaagaaactgaacgtgaaggaagacgatgacgtgattctcgtcgcagcaaaaggagagatcgttaaagtggaagcaggtcaaccggaggactcggcaaaagcacgtgacgtcgacgctaacgccgagtgctcatgccgcattcgtggctctggtggtggtagtagagggcgacgagctgccgccgccggtggtgattgcctggacaaccggccgtataaggtcgccgacgatgagacgagtctcgttactgttggggacatggcgtttgtgatcgggaagccttctgacgttcctggcgtgctgctggtgccgcctgttgtcaagtccgaacctgccggtgacaatggcgtcgaaactgctgaagaagcttcgtacgaccactgtcctgagacaatggccttggcccatgagaagcggatatttgacgaggacgatgacgaggacgcctga

SEQ ID NO: 7218 - DNA, 351 bp, Zea mays
  Peptide Sequence Number=SeqID_48997
atgacacctcgctcgtcagccgacaagctcagccgcggaggatacaccgacgtatggcgaaaggctgaaaagctcccacccaagctcagctgtgcccccggggtcataggcggcgaccgctggcagaacgcggtgatactcaaggtgaccattgccatccagcagccgagcgcaagaagccataatgatgaaggctacacattcgtcaacatggcctccttggaatccattggtagggccccatgggccaggagcaaggccagagcagtccactatgctgacctgcgtcctggtcccccggcgcgtgcggcggccacaaccttctgccgcacaaactcatggcgcacttag

SEQ ID NO: 7219 - DNA, 384 bp, Zea mays
  Peptide Sequence Number=SeqID_48998
atggctatgaaggctctggaagacactgagagattcaaacttgacgctagtcaatcttgcttcatgtatgaagaaggccatgattgtttatgtctatcaggtcagcttctggattgttcacttgcaaagcctcttgctgataagaaggacgatacatcaacacctaaaggaggtccattgctcccaagttataccccacttggatatggactgatgggagcctataacccacttggaaatggcctggcagtggtaggcgcttacaatccgtatggaaatggactggcaggtgcttatggtttgcttggtgcttgttggggaccttcggcatccgaaggtcctcaaaaacaggatttaacagtatttctggagtataatgtgtga

SEQ ID NO: 7220 - DNA, 426 bp, Zea mays
  Peptide Sequence Number=SeqID_48999
atgaatcaggatttccaggagaacaggctgttgatgtcatttgttaatttccatgagcaagagaagatctctaaagaaatcgtaacacacgctatagaaagctgcatgaagaaacaagcagataacctgttgaattcactggacgttatcaacggtaggttgtcacagttggagttatactgctatatactggaaaggtccattggagaattacgaagtgacgtgatggattatcataacgaagcaaatctgaacttccggtgcgttgaaaagcaagtgaaagagattcatggacaggttcagaaatctgtgcaggctgttcaggaaaagcaggagcttgctgaaactcagaaagaactgaccaaacttcagatagtacatgaggattctgcacaaaagagtgaagatttgagttggtacatttga

SEQ ID NO: 7221 - DNA, 207 bp, Zea mays
  Peptide Sequence Number=SeqID_49000
atgacggactcccgcactgtggggcattatgggctgcaagaactcctcccagccctttttccctggcgccgaggtctccagccgaacggcaagagctgcaggctgcggtggatcaactaccttcggccggggctgaagcacggcatgttctccccggaggaggaggagacggtgatgagcctccacgccacgctcggcaacaagtaa

SEQ ID NO: 7222 - DNA, 105 bp, Zea mays
  Peptide Sequence Number=SeqID_49001
atggagacatcgttgattgctcgtcgtgccttttccaccaccgccgtgccgcccgacatcgaggacagcgccaccaccgtcacctctgccgttgcaataatttga

SEQ ID NO: 7223 - DNA, 651 bp, Zea mays
  Peptide Sequence Number=SeqID_49002
atgcaggcggcatgcaaccgcgccaagtgggcgcaccccttcgactccaacgcgcccaacatggaggcccaggcccacacgtcatgcagccggcgcgccggttgctacgtgcgagaaactgcaccgccactcgcgccactaccgtgcctcctcgactgcggaaccagtaccacgactcgaggcaaccctgcgtatgacccaacagtgccagccaggcacatcgatcacgggtcagtcagccgcgggaggaggcgcgacggtcgatacggccaaaaatggacaaagccagaaggacagcgccgcctgcgccactccgactgcagtgccactcgacagagtgagtctgacaggcagtcaggccttgccaaaggcgccataggaaactccgctccgcccgaccccagggctcggactcgggctaagacccggaagacggcgaactccgctccgcccgaccccagggctcggactcgggctaagacccggaagacggcgaactccgctccgcccgaccccagggctcggactcgggctcagccccggaagacggcgaactccgctccgcccgaccccagggctcggactcgggctaagacccgggaagacggcgaactccgctccgcccgaccccagggctcggactcgggctaa

SEQ ID NO: 7224 - DNA, 1056 bp, Zea mays
  Peptide Sequence Number=SeqID_49003
atgaccagtctgacagaaggacagcgccgcctgcgccactccgactgcagtgccactcgacagagtgagtctgacaggcagtcaggccttgccaaaggcgccataggaaactccgctccgcccgaccccagggctcggactcgggctaagacccagaagacggcgaactccgctccgcccgaccccagggctcggactcgggctaagacccggaagacggcgaactccgctccgcccgaccccagggctcggactcgggctcagccccggaagacggcgaactctgctccgcccgaccccagggctcggactcgggctaagacccggaagacggcgaactccgctccgcccgaccccagggctcggactcgggctaagacccggaagacggcgaactccgctccgcccgaccccagggctcggactcgggctaagacccggaagacggcgaactccgctccgcccgaccccagggctcggactccgccctggcctcggtcgaacgatctccgcctcgcccgacccgggggctcgggctcggcctcggccacggaagacagactcaacctcggcttcggaggagcccccacgtcacccgacctagggcacaggcccgccacgtcaacaggaagcgccatcatcatcctaccccgagccgactcgggtcacagagaacaagaccggctccgttgctactccgacagccacgacattacgccagcaaggtgccaagacctctccggctgccacattggcatggccttcttagaggaggttggccgcgcgggaccgaggacgagacaggcgctctcttggggccgctcgcttccctcacccgcgtggacgcttgtaacccccctactgcaagcgcacccgacctgggcgcgggacgaacacgaaggccgcgggatctccacctctctcacgcccgtctccggccacttcgcctctccccccttcgcgctcgcccacgcgctcgacccatctgggctggggcacgcagcacactcactcgtcggcttagggacccccccggtctcgaaacgccgacaataa

SEQ ID NO: 7225 - DNA, 405 bp, Zea mays
  Peptide Sequence Number=SeqID_49004
atgtggattgcatgtgatcaaaccggtcatcaacatgtgacatcatgccttgaaactgaccatcaatatgagtctagagcccttgatgcatttgttgaatatagggatcaaaatagccaggtgcaggctgccagtattgtccttactgctatggaggtggaggtggtggcatttgctgagcgggatgcgcttcaggctgatcatcaaaagcatctccctacgctccctcatcatcaggaaacgaggcctagagtctcgccgaaacgcctaggtatacccagcctggtcttcaagggagaagctcaaaagatacaaaggttgacacagcgccgaagctgtgaagcaggaaagcttcggcatgttcgcagaaaagggaaccgacttaaagatgaaaaggccatttag

SEQ ID NO: 7226 - DNA, 1284 bp, Zea mays
  Peptide Sequence Number=SeqID_49005
atggatggcaaggaaccatcatcaatcaacggagcacagaagaccgcctggaggcgtgcgcaaggcgcaacgcaaagactagaggcgagtgcacagcggcagcgcagaaagccagaaaggtttcaggtctgtgtgcatgcttgctttgggggcctactccacgtgagcaggcccgacgctccggcatcccgtcgctcgctcgtcagtccgctagccactcccgtggtccacacgtgcggttgggccgtcaacgtgtcgttctcccggcactgcggcgggatgctcgggaccgcgtcgttaaaaaatcatccaagccgccgccggagccgcctggcccaccgtcacaccatcggcctcggccattcccttctcttctctctccacgtttggaaatgggaagctgagcatgccccgcggccgtccagattccactccgtggcaagcgctgcgtactccccacggccgacgtgcgggctgtgtcagggtgacgccagccggtgcgtcgaggacctcgaggagactctgctgcttgtggccgcaccatggcggatcccgcgccggcgcggtctgcagcccggccgatgtggactggagcgcgacacctctcgcgacttgcgtatggctgtctcagaaatggcggcgctccaatccgtgcactcacgcacagatccggtgaggggtagccaccacacgggtgggcaagccgcgcaccagcgcgggtgggcgagccccggcggcgaacagcctcgcgccagcatgggcgggcaagtcgcgcacacgcgcgcatgggccaacccggccatggggcgtcatccacggcgcggccttgcgcgggcgcagacagcctcggccacgggcgagaccggcgcggctccgtcggcacgagcaagcgctcataggcaggcgctcacaggcgtgcgctcggacatgggcgtgcccgccgtggacccgttggcgcgaggagccgctcctaggtgcacgctcggtcacgggggagcccggtgcggccccgtcggtgcatgggcaactccggccacgcgtgaccatggccccggcagccccggcggcgggcgcgggcgtggttcagccccggcctcgcgcggccagtgggcgcgggcgcagtccggcctcggccactgcgcggcctcgcacgggactcagcccccagcagccgagcgctctggcctcggcgcgggccagccccggccaagacgcggcctcgcgcagccgagcgctccggccctggcgcgcggggaagtcggccacgcacggccaccaacgtga

SEQ ID NO: 7227 - DNA, 675 bp, Zea mays
  Peptide Sequence Number=SeqID_49006
atgcaggaatcccttgcaggaccgccatcgcagcaaaatcctcccgagggcctccctacactgaccactcccctactgcccttgcccctttcgggtaagatctcagcgaccaggagctttcttcttccttacgccgttgcccacatctacctacgtatcgacgctggtgcaaagaggcagcacaccggcactagcggcttgggagagggcaaggtactcaccgacgatggaggagggccgaacgacctcggagcgcaggtcacggccgggcgccgaactccgacatcatcaccatcatctagtgtcacgcctgtccaatgcgcggctgggcggtggtcgagtccgacagcaggggagatggagaccgagcggtcgaccaccaggcagattgcacgaggaagaagagaaggctgggtgggagagaaggcaggaggaagcccagcacacagccatttatcgcccatgctttatggggccagagaagtccgtgcgcggagtcggggtcaccaaagtccgtggttcatgtgcggcgggtatggcgcgaggcaatcggtgtccgttgtaaggatccgaggaagaaggaagcgcccgcgaatttcgcccgagcgcagacgtgctcccgcgcagccaggggctcctgcacgcgcggcgtctgttaagatccgcccgccataa

SEQ ID NO: 7228 - DNA, 255 bp, Zea mays
  Peptide Sequence Number=SeqID_49007
atgggcgataaatggctgtgtgctgggcttcctcctgccttctctcccacccagccttctcttcttcctcgtgcaatccgcctggtggtcgaccgctcggtctccatctcccctgctgtcggactcgaccaccgcccagccgcgcattggacaggcgtgacactggatgatggtgatgatgtcggagttcggcgcccggccgtgacctgcgctccgaggtcgttcggccctcctccatcgtcgatcagatcctaa

SEQ ID NO: 7229 - DNA, 318 bp, Zea mays
  Peptide Sequence Number=SeqID_49008
atggccagacctcaatgcctggcgcctcccagcgacctccgcacgtggggcccaaatagtccctgcgcctctgatgtcgacgagccagcggctgatgacgacgtggcctcgtcgctactggagatgggggcgctcgtgctatccaccgccgaccccctcaccaaggcacgacgcacccatgccaccttctccaggtgggccgttgggctccctgtcggccaggcgacggccccctaccacctcgacgagcccctcgtgtatgaatcaccaaaagtgctggcaaaggaatgccccaaccctgatgaggatgaccattga

SEQ ID NO: 7230 - DNA, 1209 bp, Zea mays
  Peptide Sequence Number=SeqID_49009
atgcaggcggcatgcaaccgcaccaagggggcacaccctttcgactccaacgcatccagcgtggaggctcaggcccacacgtcatggaccgagaaaggggatactctgaaagggatccttctccgcgaaggaagcgggccccgagcccccctactgatcaaaggttcgaaggctggcccctcgaaagggtccaacagccgcctcagagcactcgggctctgcacccactactggttagaggttcgaaggctggcccctcggaagggttcaacgaccgcctcaggccactcgggctccgcgcctactactgatcaggggttcgtaggctggcccccaaacggtgcgacagccacctcagagcacgcagagcgagggatgaccctgggtacactaggacatttccgagaccgacgggaacgattttgtaacggaatcccaccagagggaggcatcgagccctcggaccccgtcaaaaggggatcgggtccagcgaatcacccgcagggctcggacaccgcctcggcctcggaagacggtctccgcctcgctcgacccagggctcggactcaacctcgacctcggaagacggactccgcctcgcccgaccgcaggggtcggacacagcctcagcctcggaagacagtctccgcctcgcccgaccctagggctcaggctcaacctcgacgctggacgacagactccgcctcgcccgaccctagggctcggacccagcctcggctccagaagacgacggactccgccttgcccgaccctagggctcggactcagcctcggctccggaagacgatggactccgcctcgcccgaccccagggctcagactcaacctcgacctcggaagacggactccgcctcgcccgaccccaggggtcggacacagccccggcctcggaagacggtctccgcctcgcccgaccccagggcttgggctcaacctcgacgctggacgacggactccgcctcgcccgaccccagggctcggactcagcctcggctccggaagacgatggactccgcctcgcccgaccccagggctcagactcagcctcggctccggaagacgatggactccgcctcgcccgacccaaggctcggactcaacctcgaccttggaggaatcgccacctcgcccaaactcgggtccgaaccggccacgtcgccaggggggccatcattgccctacccctag

SEQ ID NO: 7231 - DNA, 582 bp, Zea mays
  Peptide Sequence Number=SeqID_49010
atgggaaagagaggggtgaaacttgggaaggcagcctatcaagagctgacaggggtaaagaagccagtgctggatgagcagggcgtgctccactggcctgttcttctgctctacccagagggtggttttggcaaacctttgtcccgaagtgaggtattaagatatcttctagaaggcaatgtagattcgaaggcgcttccagatagccttcttgacggggaagacgaagaacatgacagtaccaaatgtaccactgttacatcaagaaggtgctttcgtgttcttctatatagtcctattagccaaaatacatcactgcaagaaactctcagtattgtcactcgtcaacttgtcatgtttgcactaaccggtcttctatacaactccttgcattctggttttgatttgcagctgatagctccatgttcttcgttgtttcaaggaagtccacattctataaagacttcaaggctggaaactggtctttgccatgaaacagaaccggacactaaggttcagcttaaatcgatctctgagacgggcagcggatatggcaagaaagcagaagatgccctcttgtga

SEQ ID NO: 7232 - DNA, 528 bp, Zea mays
  Peptide Sequence Number=SeqID_49011
atggagcaaaccgaggcggcggtgagcggcgcgcttggagcgggagtggaaggtggcgacaagacggcgaggaaggcgctgaaggtggtggcggccgtggacgcgagcgaggagagcctgcacgcgctgtcgtgggcgctggacaacgtcgtgcgcctatcggtccgagatctgacacctgaacggttcgtgccacgtacgctgatgatccaagaaggcatcgtgtacgccccgtcctcggcggtggagtccgtgcgggcggcgcaggaggagagctcccgcagggtcgtggcgcgcgcgctggacatctgcaaggagaggcaggtggacgccacgggggccgtcgtggagggcgacgccaaggaggccatccgccaggccgtggagcgtatgcaggccgggcttctcgtcctcggcagccggggcctcggcgcgatcaaaagggcgttcctgggcagcgtgagcgactacctcatccatcacgcctgctgcccggtgctggtcgtcaggcccaggccgaccaagtga

SEQ ID NO: 7233 - DNA, 186 bp, Zea mays
  Peptide Sequence Number=SeqID_49012
atggccaatattccagttacgttccaatccatgaaacaaaaaggtggtagatatatcactgctacaaatgtcaagcaatatggctatctcagccaatatagcctaatcagcgtggattttgtcacaagtgaagatcaggtgggtgacattgtgacaaaaaggctctactgctctagactgaggtga

SEQ ID NO: 7234 - DNA, 693 bp, Zea mays
  Peptide Sequence Number=SeqID_49013
atggcgcctcctgttgacgtggtcgatccgtgccctgagttgggcgaggtggaggctcctccgaggtcgaggtcgagtctgtcttccaaggtcgaggtcgagtccgagcccccgggtgggacgaggcggagaccgtcggctgatgccagagctgagtccgagccctggggttgggcgaagcggagttcgtcgtccttcggggctaagcccgagtccgagccctggggtcgggtgaagtggagttcgtcgtcttctggggctgagcccgagtccgagccctggagtcgggcgaagcggagttcgtcgtcttccggggctgagcccgagtccgagccctggggtcgggcggagcggagttcgccgtcttccggggctgagcccaagtccgagccctggggtggggcggagcggagttcgccgtcttccggggctgagcccgagccctggggtcgagcggagcggagttcgccgtcttccggggctgagcccgagtccgagccatggtgtcgggtgaagcggagtttcccatggcgcctagggtcgggcttggccgctgtcagcctcactctgtcgagtggcacagcagtcagagcggtgcaggcggcgctgtccttttgtcagaccggtcagtggagcggtgaagtgactgcggtcacttcggctctgtcgactggagggcgtgcgtcaggataa

SEQ ID NO: 7235 - DNA, 456 bp, Zea mays
  Peptide Sequence Number=SeqID_49014
atgccctctcacctgcgctcccctctcccgtgctccgtgtttgtgcgcaactgtcacccaggaccaggagttgtgcagctacgtacattgggttccggggttcacgaactgagcgcattccagcacgctgtctactcttgctacggttggacggcagcgttgctactgacacattcgtgcgcttctttagagctaaagaccctggagcatgcagagaaaaccaaaaaatatcagggtaagcttgcagcacggttgaaggccaaatatttttccaacaagacttttgaagaaggatatgtgtttgaagaaattgttatagaatcaaagaccgtccggttaagcaggtggccgtttacaaggttgtttgcagatccagcaagattttgccgagaaaagagctctactgagaagggcatttctcgacctctggctggtgaagccatgccagatgactag

SEQ ID NO: 7236 - DNA, 675 bp, Zea mays
  Peptide Sequence Number=SeqID_49015
atgtcgcactttggaaggacgggtccgccggacatccgcgacaccttctcgctgctcgtcctcaacatcagcttccgtgagcgagacctaaccctagcccccgcccccttccctctgtctctaaccgcttccttctcatattcgtcttcaccctctgctcaggaaccacggccgacgaccttttcccgctcttcgagcgctgcggcaaggtcgtcgacgtcttcatcccgagggaccgcaggccgtaatgtggatgggaggaacatcatggtgcagtttgcaaagtacggccccaatgctgtgccaatccacaaaggaagggtcaaagagggggttgagaaatcaagagacaggtcaaggagccgtagtccaaggccaagttcttcacctgcccggcgcagtgctagtcctcccaagagcccaccgccacagaggagccccactcctgaaaagcatgccaatggaaaagattcacctctgtcacgcagtgtatctccatcaccgaagcgtgcaagctcccgcagcccaggcagcgatagcaagttatctgttcgtgagaggggttgctgtttaccggtagaatggtattgctcgggaccgactatggtggatgatgtcttgctgttagtctttgtcattggtgttgatatggggatgacacagctgatgatgtga

SEQ ID NO: 7237 - DNA, 426 bp, Zea mays
  Peptide Sequence Number=SeqID_49016
atggccgttgggaaggctgtctgtcgacgggcgcaccagacaatccggaaaaggtttgaccctatttccctttcagttatcatgccaacgggtctcaacccatcattgtttgccagggcttcctccccctctgctcccaagggcgcgccttcttcgccgggtaccatgcccaccggcgggtccggctctcagcaacaggcgtctgctgggagtggtgccggcggtccgcccccggccgctgcaactacgccaatggctaccacagcctcaacgatggcgacgccgtcgagtacaccatcgacagtggtcgaggaggtcctagctgcgctcgcccccgccatggggggtgacgcagggggcgcgtccagctccaacccgccgccctctctggaggagtcggaggtggttcttgggcggcggctctga

SEQ ID NO: 7238 - DNA, 378 bp, Zea mays
  Peptide Sequence Number=SeqID_49017
atgggctccaactccaagtcgccgaatggcggcggtgccgatgcctcgaggaggaacgtgaccgtggccctgccgcgaatcccgccacccaggctgtactcccacaatttggtagcgcgtgcgtccctgaccccccgagctcgtgcagtccggaggtccgtgcccaccccacccctcagagatttctccctccctgaggagctagaggcggcggtggcatggctgcgtcgggagaaggaggtcgcagaggatttgagtggattcaagaggaatagatggaggtggagtcctgatctggactccgctgtggtgctgcagatgcatggtttgagatcagggttgtatagacaaccagtaaagatatcaagcaaagggtga

SEQ ID NO: 7239 - DNA, 372 bp, Zea mays
  Peptide Sequence Number=SeqID_49018
atgactgccagatctacctgggtggcgggattcgcggcagggccacggtcacgttcctcctcgaggcatcggcaccgccgccattcggcgacttggagttggagcccatcagcgccgccgtcccgcctcacccgcggacgccgtcgcccgatgccggcagagaggagctcaggacaggagcccccgtgcctgcgcaagaatttcctcgtggcgctgggcctgcgcgccgacctgcccgtgcacttcatcgacgacgagaagtgcttgaaagccaccgacctggaccctcaccagaaccgggcgcttggcgtgcggatggttgcaggatttgcagcgggggagtgctgcgcgcgggcgcttcacggctgggga

SEQ ID NO: 7240 - DNA, 330 bp, Zea mays
  Peptide Sequence Number=SeqID_49019
atgacccttaggaagaaactcaactctaatgactgtaatcttgctgacggagagtacgtcctcgtgccggagcaaggagctgctcaggaggtagccccagacccagcaccagagcctgcaccagaggacctgcctgccaccgctttggaaggcaagccccgcaatccatggggattggttgtctacgaggtgggaactggaataaggattaaggtgtggtaccgttctctggaggacatggttgctggagtgacttggccgtccaccttaccaccgggttggactgttgagtgggaccctgcctcggctgaggaggagcatgaggagtga

SEQ ID NO: 7241 - DNA, 129 bp, Zea mays
  Peptide Sequence Number=SeqID_49020
atgggggagaaaaaggaagcgctcgagcgccgcctgcaggacatcatgatggccaccgatgttgtggaggactggtacgggcaagagttcgaggaatggtacgctgcccctgctagtgctttgctatga

SEQ ID NO: 7242 - DNA, 396 bp, Zea mays
  Peptide Sequence Number=SeqID_49021
atgactaaacacggcgacgacgtcggggctgcggacggtggggaggagcagagggtatggccgaccaacaaggaggcagggagcagcgtggtgaaggagatggggggcagggcgagctcgtccatgggagaggcagagagcagtgccggttgcgcccgccacacgcgtcacaatgtcaggccacagagagacacgtgcaacgcaagcgtgaaagaatttcaaacgaaatttaaggaaccagattcaatttcaaggattagagtttgggcaagacgtcgatggctcaacccaaacgatactggattcgatgttccgaaaattaccaaagtctgcattttacaaaataaattaggacaatttagacagatggagatagacacgatatcaaaatcgtga

SEQ ID NO: 7243 - DNA, 333 bp, Zea mays
  Peptide Sequence Number=SeqID_49022
atgactaaacacggcgacgacgtcggggctgcggacggtggggaggagcagagggtatggccgaccaacaaggaggcagggagcagcgtggtgaaggagatggggggcagggcgagctcgtccatgggagaggcagagagcagtgccggttacgcctgccacacgcgtcacaatgtcaggccacagagagacacgtgcaacgcaagcgtgaaagaatttcaaacgaaatttaaggaaccagattcaatttcaaggattagagtttgggcaagacgtcgatggctcaacccaaacgatattggattcgatgttccgaaaattaccaaagtctga

SEQ ID NO: 7244 - DNA, 279 bp, Zea mays
  Peptide Sequence Number=SeqID_49023
atggacgcgccgggagcgttggccacgagccacgccgcgccgggggccgaccgcgcctcacggggccgccacgagcagccgcgccggggccgccgcgagcagccgcgggccgagcagcacgccaggccgcacgcgaccacgcagaggaagggagggaaaggggaaaggagaagtagggctcacctcgacggggacgggatgcaaacgcggcaaatccggcgagctccgacagggaacgttttcgaagctcggcaccgtgcggtttggggaagagagtaa

SEQ ID NO: 7245 - DNA, 2748 bp, Zea mays
  Peptide Sequence Number=SeqID_49024
atgacatcccgtttctggggacagggggacagtgagtctgaggaagaggaggaagaagttgagtcagaacagggcagcgataatgatgatgatggaggtcatggtggtgcgggacgcggtgcccaaaaccgatatttgaagaatcaagaagatgacagcgatgagtctgacacaggtcaccgtgagatccgctccctgagggacaagcacaatgaggagatgagatctattgttgatcagatgcgtaatgcaatgaagatcaatgactgggtgagcttgcaggagagttttgagaagcttaacaaaaatcttgagaaggttgttcgtgtcaatgaatctactaaggtaccaaaaatgtatatcaaagctcttgtgttgctggaggacttcaaggctgaagcccctgcaaacaaggaggccaaggagaagatgagcagcagcaattcaaaggcactcaataagatgagccaaaaactcacgaagaacaacaagcaatataaagagcagatccagaagtgcagggagcatccagagagttttgaagatgaagctgcggatgataaagatatggatgatgatgatgttgatgaaagtgatgcagagatcgaagatcctgataaaatagctatgtcagaatcagaagaggatcacgatgaagaggatggcgacaaggagggttgggaacagaaaaggagtaagaaggataagatgatggataagcagttcttgaaagatccaagtgaaatcacatgggatattgtcgataagaaactcagagagattatagcatcaaggggaaagaaaggtactggaaggatcgagcgtgttgagcagttaacgtttttaacccgtgtggccaaaacaccagctcagaagcttgaaaccctcttccatgtgatttctgcgcagtttgatgttaaccctagtctacttgggcatatgccagtcaatgtgtggaagaagtgtgtcaataatatgcttcttgtgcttgacatactccagcagtatcctaacattgtagtagacacctcatttgagcctgatgagaaagaaactcaaaagggtgcagactacaatggaacaatacatattgtcggtgacctggttgcattccttgagagactggactctgaatttttgaagaccttacagtgcacagatccgtacacaaaagattatgttcagaggcttagagaggaacccctgtttctggttgtcgcacagaatgtccaagattatcttgaaagggttggaaacctcaaagctgctgccaaggttgcactgcgtcgtgttgaactggtttactataaaccccaagaagtgtatgatgcaatgagaaaacttgcagagcagcctgaagactgtgtggatgatgatgatgcagaggctggtgatgaacatcaagcagtagatgacaatagaggaccatcaccatttgttgcaattccagaggttgtgcaccggaagcctacttttccagagagtggtagaactttgatggatggattgatgtccttaatttacaagtatggagatgaaaggaccaaagcccgtgcaatgctgtgtgacatatatcaccatgcgatctctgatgagttttcagtggctcgtgacttgcttttaatgagtcatttgcaagatggtgttcagctcatggacatatcatcacagattttattcaatagagtcatggcccagttagggctgtgtgctttcagggctggtttgataaatgaagcccatggttgcttgactgagctctactttacagggagggtgaaagaattgcttgcacaaggtgtgcaacaaagcagataccatgaaaaaactcctgaacaggaaagacttgagaggaggaggcaaatgccttaccatatgcatataaacctggagcttttggaagccacacacttgatctgtgcgatgctgattgaagtccccaatatggctgccagcacctatgacaagcggaggcctatgagcaaaacattccgaaggcttctcgaagtgagtgaaaggcagacatttgttgggccgcctgagaatgtgagggaccatgtaatggctgccacaagagccctcaaaaagggtgatcaccaaaaggctttcagtgtcataaattcgctggagatttggaagcttttgaggaacagagagcatgttcttgagatgttgaagcttaagatcaaggaggaagctcttagaacctatctttcatcatactcgtcttcctacaagtcgttgagccttaaccagctcaccaccatgtttgatctcagcgagcagcatgcccacagtattgttagcaaaatgatgatgcatgaagagcttcaggctagctggcaccagccaacaaagtgcaccgtgtttcacagcctggatcaaaccaggcttcaggagctactcttccaggttgcagaaaaaatatcggtcctggtggagacaaacgagagggcatacgagttaagaactggtggtactcttgaggggctaccgcccaggcgcaggggcgaggctcaggattcatccaagtggcaggagagctttgtcgcatcacaggggcggcagggtggtggcaaccggtttggatactccggtagaggtgcagcatctggtcaaagtggtggactccagaggggcaggggcaatcatgtttcccgcgggggatacggtggcaatacacgatttcaggatgcaagtgcacacatggtgaacctgaacagggttggtagggttgttagtgtttag

SEQ ID NO: 7246 - DNA, 2973 bp, Zea mays
  Peptide Sequence Number=SeqID_49025
atgcccgacataccgagggatgtcgccgagcactcgctggatattcgggccggagcccgacccatcaggcagcctctacgccgattcgacgaggagaagcgcagagtgattggcgaagagatccacaagctaatggcagcagggttcatcaaagaggtattccatcccgaatggcttgccaaccctgtgcttgtgaggaagaaaggggggaaatggcggatgtgtgtagactacactggtctcaacaaagcatgtccgaaggttccctaccctctgcctcgcatcgatcaaatcgtggattccaccgctgggtgcgaaaccctgtccttcctcgatgcctactcagggtatcaccagatccggatgaaagagtccgaccagctcgcgacttctttcatcacgccgttcggcatgtactgctatgtcaccatgccgttcggtttgaggaatgcgggcgcgacgtaccagcggtgcatgaaccatgtgttcggcgaacacatcggtcgcacagtcgaggcctacgtcgatgacatcgtagtcaagacaaggaaggcttccgacctcctctccgaccttgaagcgacattccgatgtctcaaggcgaaaggagtcaggctcaatcctgagaagtgtgtcttcggggtgccacaaggcatgctcctagggttcatcgtctccgagcgaggcattgaagccaacccggagaagatcgcggccatcaccagcaagggacccatcaaggacttaaaaggtgtacagagggtcatgggatgcctcgcggccctgagccgcttcatctcacgcctcggcgaaagaggtctgcctctgtaccgcctcttaaggaagaccgagtgtttcgcttggacccctgaggacgaggaagccctcggaaacctgaaggcgctccttacaaaggcgcctgtcttggtgcccccggcggatggagaagccctcttggtctacgtcgccgcgaccactcaggtggttagcgccgcgattgtggtcgagaggcaagaggaagggcatgcattgcccgttcagaggccggtctacttcgtcagcgaagtactgtccgagaccaagatccgctacccacaagttcaaaagctgctgtatgatgtgatcctgacaaggcggaagctgcgacactacttcgagtctcatccggtaactgtggtgtcatccttccccctgggggagatcatccagtgccgagaggcctcgggcaggatcgcaaagtgggcggtggaaatcatgggcgaaacgatctcgttcgcccctcggaaggccatcaagtcccaggtgttggcggacttcgtggccgaatgggttgacacccagttgccgacggctccgatccaaccggagctctggatcatgtttttcgacgggtcgctaatgaagacaggagccggcgcgggcctgctcttcatctcgcccctcggaaagcacttgcgctacgtgctgcgcctccatttcccggcgtccaacaatgtggccgagtatgaagctctggtcaacgggttgcggatcgccatcgagctaggggtcagacgcctcgacgcccgcggtgattcgcagctcgtcatcgaccaagtcatgaagaactcccactgccgcgacccgaagatggaggcctactgcgacgaggttcggcgcctggaagacaagttcttcgggctcgagctcaaccacatcgctcggcgctacaacgaaactgcagacgagctggctaaaatagcctcggggcgaacgacggtccccccggacgtcttctcccgggatctgcatcaaccctctgtcaagatcgacgacgcgcccgaacccgaggtaccctcggctcagcccgaggcaccctcggctcagcccgaggcaccctcggcccagcccgaggtaccctcggcccccgagggcgaggcactggacgtcgaggaagagcagagcggggccacgccagatcgagattggcaggccccgtacctgcaatatctccgtcgaggagagctaccccccgaccaagtcgaggctcggcgggtagcgcgacgcgccaagtcgttcgtcttgctgggcgatgaagaggagctctaccatcgcagcccctcgggcatcctccagcgatgcatctccatcaccgaaggtcgggaactgctgcaagaaatacactcgggggcttgcggccaccacgcagcgccccgagcccttgtcgggaatgctttccggcaaggcttctactggccaacgacggtggatgacgccactagaattgtccgcacctgcgaagggtgccaattctatgcgaagcagacccacctgcccgctcaggctctgcagacaatacccatcacctggcccttcgcggtatggggtctggacctcatcggtcccttgcagaaggcgcccgggggctacacgcacctgctggtcgccatcgacaaattctccaagtggatcgaggtccgacctctgaacagcatcaggtccgagcaggcggtggcgttcttcaccaacatcatccatcgcttcggggtcccgaactccatcatcaccgacaacggcacccagttcaccggcaaaaaattcttggatttttgcgaggatcaccatatccgggtggactgggccgccgtggctcatcccatgtcgaatgggcaagtagagcgtgccaacggcatgattctacaagggctcaagcctcggatctacaacgacctcaacaagttcggcaagcggtggatgaaggaactcccctcggtggtctggagcctaaggacgacgccgagtcgtgccacgggtttcacgccgtttttcctggtctacggggctgaagctatcttgcccactgacctggaatacggctccccgaggacgagggcctacaccgatcaaagcaaccaagctagccgagaagaatcgctggaccagctggaggaggctcgggacaaggccttactacactcggcgcggtaccagtag

SEQ ID NO: 7247 - DNA, 330 bp, Zea mays
  Peptide Sequence Number=SeqID_49026
atgggtgacaatggtcacagcctagtgccttgctgcgcagggcatgctcggaatgcgcagggatcgaagaagatgttggctgtcaacggtgggctcaccgacaagtccatagaaaaacatgaaacctcccatgccatcctcgccacgctccccgccatccccttccatcggcgcccgatggcctccaagatggtcgccctcgcctgccccatcaaataccgggtggatccatgcttacccatcaataatccggcccagacctcgcaaccccgcacccgctgcttcgctgagccagcaacgacgacatatcatgaggacacggacgcctag

SEQ ID NO: 7248 - DNA, 375 bp, Zea mays
  Peptide Sequence Number=SeqID_49027
atgacaaatcaagcgccggcgaaaaaggagctctgccgcacgtgtgccccgccgctgccgttcggtctgaccctaggcaacgggtcgagaaggagcgcgagcccgaggattgctgatgagctagccactgaggatccagaggttcagcaggtggagactgctgagcaggagctcgttgaaggcaacttggaacgagccagcacgcttggctaccgcgcgcttggggagaaggagctgggccgcgcaaaaaaagaaaagggaaaattcggtggagaaaaggaaaaaggggggaaaggaagggaggccgcggctgggccgccgtggggctgggctggaatggggggtggccgcaccaggtgggccgccaaagggtga

SEQ ID NO: 7249 - DNA, 501 bp, Zea mays
  Peptide Sequence Number=SeqID_49028
atgcactccggcggccgtttcttcaacttccgcccacatatcttgcgcccacattgggagaatcgcccacgacgccctagtccaaagaaactggcctcctttctcccctgttcaacccaaagctcctctctcgctcgacactgcgcaggaaaaccgaatcaccgattggagctccccgcggacctcgccgacggccgtcgagagaacggtctggttgaggagtccgaagaattcacaggagaagaccctgagcaacatctggtggtgatgagaatgatggttttggtattgactatggtaatggttgtccgcgttgcaaccactgctcaggagaagatgaagccgtggaaggagacttctaggagttccaagattacgacgagttctaggcgtgggttagcggcaacccccagtcggctgcctgtgaaggccgcgtgtatctatgtttcttttccacacttcgattattgtaaagactatgtggatgtctcagacatttga

SEQ ID NO: 7250 - DNA, 570 bp, Zea mays
  Peptide Sequence Number=SeqID_49029
atggcggcggcgggggcgctgctgctggggttcagcgcgcagaccaagaccgtgctcttcatccagaagaaggccgtccccaaggacgtgcaggccctctgttctttttaccacgcttgcgcggtcgctgatcgatgtccttgcgtcgcgcgcgcgtgcctgcctgcctgcgccgtgcatgccagggtgctgatcgtggcggccgcggcggcggcggcgtaccacgtggcccagctcgcccggtgcctctgcatggagcgcctcgccatcggcggcggcggatgccggcgtctcgggagagccgtcgcgtgcgcctccttcctcctcgacaagggatgcgcgtacatggtgttcgcgacgacggtggcggcgctgcaggcgtgcttcgtggggctgctcggcgtcgacgccctgcagtggagcaagctctgcaacatctacacccgcttctgcgagcaggcggccgccggcatggtctgcagcctgctggccgccgccggcatggccgtcctctccgcgttctcggctcgggacctcttccgccgcccctgctccccggagtatagatga

SEQ ID NO: 7251 - DNA, 309 bp, Zea mays
  Peptide Sequence Number=SeqID_49030
atggcgcgtggatggcaagggagccacaggggcgcaggctgggaggctcgcctgggcactggcgggcgcgccgcgctggctgccatggccgagccacaccgagctgccgcactgctgcgggtaagctgcacaaggacgcgagctggccaggccgatcggctacgcggactcgacactcctagacgcggggcctgggaatggcgcagcgggtgtgcgtcaagagaaaagggcgagacgagggagagagagacaggaggtggagtagtgcaggcgtggagcgcgtttggcggcgggagacgaggcgactag

SEQ ID NO: 7252 - DNA, 372 bp, Zea mays
  Peptide Sequence Number=SeqID_49031
atggagagctccttcgagggactttctgtaaaaaacatatcaagagcgaataatgaacatgctgatatgctagctaaatcaatagcccaggggctccctctacctcccgaagtattcttcaaaatactgaaagcaccttcagtagagttaatggaaagagctattttgacagtctctgccactcacagcgaagaatggaggatagagatcatatccttcttccagggaaatcacccaactgatgacgaagtctacattaagagaatgcaagctaggaaaaagccatataaaatcatagaagggaactattcaaagaaggtgtttgttcgccccaactcaagtgcatttctagagacaaaggctaagatttga

SEQ ID NO: 7253 - DNA, 351 bp, Zea mays
  Peptide Sequence Number=SeqID_49032
atggggagtctggagatggtggccgacaatgaagatgaaggtcatacaggttttgacatggaacataacaaatcacttggcctagaagccaagtatagtggccatataagtctcgtggttttatcattgtcatgggtccttctcagtcatggctccgacgtcttcgtgtgtagcggagctcacactccgcacgcgctcgacgcgcaggaggacagggatgcgcgcatccacgagctcgaggacaggatccgggacctcaacaacgccactagcaagtggtgcttctactcatacatcgacggtagatctccggtggcaatgcaactaaagctagattcatcaaattattag

SEQ ID NO: 7254 - DNA, 312 bp, Zea mays
  Peptide Sequence Number=SeqID_49033
atgggaggggctatccatggcaacaagagagggggctggcgtccacaccatgggaaggagcagggagggcgctggacagagggcaggggcgagctccagggagtggcgtcggccaccaggaaacagaagcaggggtgcgcgctgggatggatgctgagcagatcttggaagccatggaaggagaggccgtcggccatggggagggatgagggagggacggccatgggggaggagcagaagatgaccggcaagctggagcacctcgtgcgcagagacagggaaaaggggcagcgcgccaggctgaggaattga

SEQ ID NO: 7255 - DNA, 180 bp, Zea mays
  Peptide Sequence Number=SeqID_49034
atggggcgacggtggcgggactccgactgcgcgaaggttgctccgggtgttacacacctgttccacaacagacaccatgttgctgctgaagccgaagccatttctgacagagctataaaaaaggctgaagatgatgagatcttaaagatctgcgaactaatttatgacaaagctatgtga

SEQ ID NO: 7256 - DNA, 216 bp, Zea mays
  Peptide Sequence Number=SeqID_49035
atgcaggagagagatgcggtcgagagaggaagggagaggcgccgggggagaaagaaacgccgacataactccattgatggcattcatggaggtttgaatggagggagagagaaggggaaatggggggaggaggagaagcgtcgactgtccggctccggggtcacggtcgggcacggggtcggcggcctaggcgcgggtggctgctcggctggttga

SEQ ID NO: 7257 - DNA, 141 bp, Zea mays
  Peptide Sequence Number=SeqID_49036
atggaaaatggaataaggattaaggtgtggtaccgttctctggaagagatggttgctgggataacttggccgtccaccttgccaccgggatggaccgttgagtgggaccctgcctcggctgaggaggagcatgaggagtga

SEQ ID NO: 7258 - DNA, 1341 bp, Zea mays
  Peptide Sequence Number=SeqID_49037
atgcccggcataccgagggacgtcaccgagcactcgctggatatccgagctggggcccgacccgtgaagcagcctctacaccgattcgacgaagaaaagcgcagagccataggcgaggagatccacaagctaatggcggcagggttcatcaaagaggtattccatcccgaatggcttgccaaccctgtgcttgtgagaaagaaaggagggaaatggcggatgtgtgtagactacacaggtctaaacaaagcatgtccaaaagttccctaccctctgcctcgcatcgaccaaatcgtggattccactgctgggtgcgaaaccctgtctttcctcaatgcctactcagggtatcaccaaatcaggatcaaagagtccgatcagctcgcgacttctttcatcacaccttttggcatgtactgctacgttaccatgccatttggtttgaggaatgagggtgcgacataccaaaggtgcatgaaccacgtgttcggcgaacacattggtcgaacggtcgaggcttacgtcgatgacatcgtagtcaagacgaggcaagcctccgacctcctttccgaccttgaagcgacattccggtgtctcaaggcgaaaggcgtaaaactcaatcctgagaagtgcgtcttcggagtcccccgaggcatgctcttggggttcattgtctccgagcggggcatcaaggccaacccggagaaaatcgcggccatcaccaacatggggcccatcaaggacttgaaaggagtacagagggtcacgggatgccttgcggctctgagccgtttcatcttgcgcctcggcgaaagaggtctgcctctgtaccgcctcttaagaaaggccgagtgcttcaattggactcctgaggccgaggaagccctcgggaacttgaaggcgctcctcacgaacgcgcccatcttggtgccccccgctgccggagaagccctcttgatctacgtcgccgctaccactcaggtggtcagcgccgcgatcgtggttgagagacgagaagaggggcatgcattgcccgtccagaggccagtctacttcatcagtgaggtactgttcgagaccaagatccgctacccacaaattcagaagctgctgtacgcggtgatcctgacgcggcagaagttgcgacactacttcgagtctcatccggtgactgtggtgtcatccttccccctaggggagatcatccagtgccgagaggcctcgggtaggattgcaaagtgggcagtggaaatcatgggcgagacaatctcgttcgcccctcggaaggccatcaagtcccaagtcttggcggactttgtggctgaatgggtcgatacctag

SEQ ID NO: 7259 - DNA, 750 bp, Zea mays
  Peptide Sequence Number=SeqID_49038
atggcgtctcccattatagagcatgtgtcggggaccataattaggggtacccccaagactcctaatctcagctgggctcggactcggactcagccccggaagacgacgaactccacctcgcccgaccccaaggctcggactcgggctcagccccagaagacgacgaactccgcctcgcccgatcccagggctcggaatcgggctcagccccggaagacgacgaactccgcctcgcccgaccccagggctcggactcgggctcagccccggaagacgacaaactccgcctcgcccgaccctagggctcggactcgggctcggccccagaagacgacgaactccgcctcgcccgaccccagggctcggactcagccctgggcctcagcagacggtctccgcctcgcccgacccaggggctcggactcgacctcggcctcggaagtcagactcgacctcaacctcggaggagcctccgcctcgcccaacccagggcgaggaccgaccacatcacaggaggcgccatcattaccctaccccaagctaactcaggctacaggggaacgagacctgcgtcccatctggctcgccccgtggctctcagcccccttaccgaatcaaggatacgtcagcaaggactcgacagccccgacagctgtccttccgctcggctccagcgtcctcctgactagcatgagtcaccagctagggatgcgaatcgctctccgaggtggcccgagggtgtgcaggtag

SEQ ID NO: 7260 - DNA, 372 bp, Zea mays
  Peptide Sequence Number=SeqID_49039
atggcacttagtgaggacgcgatgggcagcggcaacaacaacatcggcgatgactccatcactgaggtattaccttttgtcgatgatctcgccgcagaggcagatgagctcacaactactttggctagtcaggacaagtttcttaggttttctgctcgtgagaggaaagaatacaagagcaagaccgtacaactccaaactctccaccctcgggtttctcaagtcgcgctccgctataattcaccggactgtccggtgcaccagcggagcaacggctacttcgcgcaacggtcgcctgcaaaagctgaattccagatgaacagtgcgcaaacagtgcgtggtagagcagagcagtcgtcagaggcgcactag

SEQ ID NO: 7261 - DNA, 294 bp, Zea mays
  Peptide Sequence Number=SeqID_49040
atgccgaggagggagaaaggacgcgatgggccacggtcgagctgggctggccaagagggtgtgggagctgggccgtgggaggggcgagctgggctggctgagagggaaaaacaatttataccaccaaattcagggtgttacactaagtggccgaggcagaggatcctaagagtgggtgaggcaaagccgacgacatgtgtggaagacagggtgttgaaggcagaggagcaccatagtagggcatggtcagcagagctggctatggtggacgcggcaaggaagcacctgtggtga

SEQ ID NO: 7262 - DNA, 2037 bp, Zea mays
  Peptide Sequence Number=SeqID_49041
atgcgtccatcctcgcgctgctcgaggcccgaacgatctgcttgttccggcgatgtccctaccgtggcactgccggcgctagagaacatctcgcacgggcagctgcaggtgctgtctggggtgcttccggaccacccatcccttgcgacagaccccgacaagccgtccttgtatgtgtgcacgccgcctcccctcatggagggtcacggggtgcccaagcagttccagggtcgcttccatgtggtgcccaagcactcagattggttctccccagggacagttcataggctggaaaggcaggtagtgccacacttctttacagggaagtctccagggcatactccggagaagtatgtcatgttaaggaataaagttattgctaaatacttagagaacccaagcaagaggcttgcttttgctgagtgccaggggcttgttgggagcacatctgaattgtatgatctgagtaggattgttaggttcttggacacttggggcatcatcaattaccttgcggctgggtctgtgcaccgtggtctgaggatggcaacttcgcttctaagagaggaacctacaggggaactgcaattgcttacagcaccattgaaatcaatcgatggtctaattttgtttgaccggccaaaatgtagcctcccagtggaggacatttctaggatggcagcgacttcatcgaactcggaggctgtggattttgatgctgcattttcagacttggatggaaagattagggagcgtttgtctgagagctcttgcagttattgcttacagcctttgccaagtttacattaccggtcgcaaaaggaggcagatatttttctatgttctgattgcttccatgatgcgagatatatcactggacattcttgcttagatttccaaagagttgatggggataatgatgaatcagaaaatgatagtgataaatggactgatgaagaaacattgttgctgttggaaggcattgagaagtacaatgacaactgggatgacattgcaggtcatgttggaacaaaatcaaaggcacaatgtatctaccattttattcggttgccagtggaagattgtttgctagagaatgttgagatacccaatgcacccattccatttcgaccacaaagcaatggttatcaatgtttagattccaatggcagcacatcaggagctccagttcaaaatatccaacaaggcaatgagcttccgttcataaattcttctaatccggtcatgtcactggttgcatttttggcctcttcaattggacccagagttgcagcatcatgcgcacatgcagcattatcttttttgactagagacgaggattccagggtgagttcagaaggctcacatgctggtggtctgggcaatggtgcaaatccaaattttcagaaccataatggtgcttcaccatccatttctccaggaaatgttaaatatgctgccatgcttggtctgtcagcagcagcaatgaagtctaagctctttgccgatcaagaagaacgcgaagtgcaaagactaactgctactgtaataaatcatcagttgaagagattggagttgaagctgaagcagtttgcggaagttgagaccttgctcttgaaggaatgtgagcaagtagaaagggttagacacaggatttcagctgaacgcgtcaggatgaggtcagccctattaggtcccaccggaagcggtctaccagggggcagttgtagcactatgccatcaaatccagcaggcatgagccccagaccagtcggtgtgccaggctacatgccacagaccagcatgccagccacatatgccaacaacctgcaggggcatgggaatcctcagatgccgttcttacatcagcggcctcagatgctttcgttcggccctcgcctaccactctcagccatccagactcaaccatcaccacaatcatcaaacatgttcaactctggcatgcccaattcgattgctcctaaccaccatcagttgctgagatcatcctccggaaacaattctagtgcaggatag

SEQ ID NO: 7263 - DNA, 1427 bp, Zea mays
  Peptide Sequence Number=SeqID_49042
atggatccacaaataaccgatcccagagaaccaatttggtgcgaaattgaaaatcagaaaggaagaaaaaccctgaatcagggtaaggaggtctggaagaatttcaaaatcaaacacctaccgattgaactgaaatggtctgattgggtacctaccagggatattaagtgcagagatatcagagagaaggaacctggagtatacgttcctgcgtggttaacaccacctagaaaaaaaagtaaaaatagagttgaggtgatttctgggaaatacagggggggtgaagcaaaaaaacctgaaccaggtcactttaattcgcatcacccacccgagttggcaaaaggtgcccagccccttcatacgagtgagacaaaccctaagtctcccactctctcacatctcagccgcttcgtcggccatttctgggggaaaccgcgaagatcctttgcaagtgtggtaaaaaacccccgcgcgcccaccacggtggtgaagatgcaacctagaggagccgggaggcggggaggtgttgcctctcgaggtactggtcgcagatcggcgcgggagaatgtgtggagaagggtggaagaaggctcatcaagcgctcacagacaggaagctgacccgacagatgaagagaagatgaagggagaagaaccccatcagcagaacccttgggaacagcagagaaaaagccccgaaggaaaaagcggaatagattggaggcatgttgctgaggatgaggattttaaagaagagaatatcaaaaaagaggaaagcattgatactagaatgataagggagcggtctagtactgcggtgatctctgtggttcaagggacagttggggaaaaacagattgagcaggagtttgtaaatctagttggaaaaaacatttggaggtggactgccagatccattggtgaaaacaagtttttaatgaggtttccagaccctaaaatgattaaagacctgggatactttaggccactggggatgcgaacggcaaaagcgcaaataaccatcgatccttggtctccagctgtcagtgccaaaagctgtttacaaagaggttggtttagaatcagaggtatcccaattgagcagagatctatcaaaaccattgctaaagtgggtggattagtgggaaaggtagttgaaattgatgaaaaaacccgtgtgagaaatgaatatgtaagggtaaggattgcctgcagagatgtcagtattgttccatgcacagttgagagttccttgggtctctttatatatgattttcactttgaaagggaaattcaggaagaggacccccatgacaatcgtggtagtggcatcaaaattgatgatcaagatcagaataatgctaagagaacaaagtttgaaggaaacccctggagtgaagggaaaaacaaaggcaagactcaagaagg

SEQ ID NO: 7264 - DNA, 753 bp, Zea mays
  Peptide Sequence Number=SeqID_49043
atggctagttccttcatgttgtgcacggtggttgttgcggcgtgcctcgccgccgccgccgccgactggtctcaaggcactgccactttctacggcggagtcgacgcgtccgggacgatgggtggcgcatgcgggtacgacaacctgtacaacgcggggtacggcgtcaacaccgcggcgctgagcccgaccctgttcaacgacggcgcgtcctgcgggcagtgctacctcatcacctgcgacgggacgcgtccgggcggccagtactgcaagcccggcaactccatcacggtctccgccaccaacctgtgcccggccaactacgcgctccccaacggcgggtggtgcggcccggggcgcccccacttcgacatgtcgcagccggcgtgggagaacatcggcatcttcgggggcggcatcatcccggtgctgtaccagcaggtcaagtgctcgcgcaccggcggagtgcgcttcggcctcgccggctcgcagtacttcctgctcgtcaacatccagaacctcggaggcagtggctccgtgggggccgcctgggtgaagggcgacagaaccaactggattcagatgtccaggaactggggcgcaaactggcaggcgctcgccgggctcgtcggccaggggctcagcttcgccgtcagcactaccggcgggcagtacattcagttctggaacgtcgcgcctgggtggtggcagttcggacagaccttcggcacaaacctgaatttctactactaa

SEQ ID NO: 7265 - DNA, 339 bp, Zea mays
  Peptide Sequence Number=SeqID_49044
atggctcacagacagcagctcacgacgaagcgcggatccgagacggtgctgcggtcacggcgagcaatccagacgccgaatgaggttttcccggccccaatccgccacgatcacattccacgagttcaggcgaaccaccctgaccacgtgctgcccccgacgcggcgctccagggacgcccacatcggactcgagaagtggaagcttctgaaaatgcggcccatagttgtaagcgcatcggtgagcatgcgcggaggctggcggaagaatcgcaacaaccccagcgtggttaccgcccacagacttcgtttgagatttggggaagcatgcgtccagtga

SEQ ID NO: 7266 - DNA, 384 bp, Zea mays
  Peptide Sequence Number=SeqID_49045
atgaacggaggagcgagacgcgtccgacaagcgggcccgcgcgccggtgaggtgagcgtccgtgagcggatggggaaaagggagaggctgactcaacggacccacatgacagccgctgttgaagagcgtgtggtgtgcctgaggcagctagctaggggtaggataatgatggatccccagttgtgtagttggtccaaggccgaagtcgggcgaggcggcgactcctccgaggccgaggatgaggttgggcgcggatgtgactcctcccgaggccgaggtcgggcgaggcggagatttttccccgaggccgaggctgaggctgaggcctggggtcgggcgaggcggagaccttctcccgaggccgacgctgaggccggggcctga

SEQ ID NO: 7267 - DNA, 150 bp, Zea mays
  Peptide Sequence Number=SeqID_49046
atggttgcactgttatcccgggtggtcactccacgaacaggtccttacagagaggacataataggtcagaggacacttgccttcactaggttgttgctcagggaggtctccaacaacacactcaagaacctcggactgctcgttgtctaa

SEQ ID NO: 7268 - DNA, 294 bp, Zea mays
  Peptide Sequence Number=SeqID_49047
atgcgcgcgccaaccctggtctctctgacgtgccgtctttgctccactgtcgtgtgggaccacactgtcaggagaactgccgcccgaaagaccggaattcctcaccgtacctggagctccgccgcggatccgcaccgcgtcgtggacagcttcagcggcccctccattcctgggcgcaaggatctccggggctggccatggcgccgtcgcattgctctgagcgccgcccggtttgggtccgtagggagaaggtggcctcctggccgttggatcgtcccctacggtggagattag

SEQ ID NO: 7269 - DNA, 273 bp, Zea mays
  Peptide Sequence Number=SeqID_49048
atggctagggctcgagagcataaatccctccttctccccctcgtgtgtgacagcccccatcaactaccccacgccaccaccgttgccttacccgttgccgtcatccacgcccctgaccgcttagcgccgccggagctccacgccactgaggtcgcctgcagtgccccaaggggactcgagttgtttctcgagtaccactttgtaaggacctattctttggatgaccacccgagaaaacagtacaaccatgaggatggtatgggacacccttag

SEQ ID NO: 7270 - DNA, 483 bp, Zea mays
  Peptide Sequence Number=SeqID_49049
atgtccacgctcagagaccagggtcgcgcgccgggatgttgggccgccgctccggggtccagagcaggggggcgggcgggccacgacggggccggggagcgccgccgcggggtggggcaggggcaggcggaacgcgccgccgcgggaggcgcaaggacggccgcgccgccagggggaggggcaggggcgggcgggccacgccggggctggggagcaccgccgcggggaggggcaggggtgggcgggccgcgccgccgcggggagggcaggggcgggcgccgtcacgcatggggccggggcggggtcacgccgcaccgccgcgggcaggggcaagccgcgccggggcagggtcgcgcgcgcaggggagaaggggagggcgcgcgcagggaagagaacatgagggagagggagagagagagaggagatgggaggggagctcacctcagggatccaactccggcgatcaccgtctccaaaacctag

SEQ ID NO: 7271 - DNA, 915 bp, Zea mays
  Peptide Sequence Number=SeqID_49050
atggccaccgacgaagccaccaagccgtccccgatcccaccctatcccgagatgatcctggcggcgatcgagggtctagacgacaagagcgggtcgaacaagtccgccatctccaagtacatcgagggcaagtacggctcgctgccccccgcgcacgcgtcgctgctgaccgcgcacctggcgcgcatgaaggagtccggagagctcgtcttcctcaagaacaactacttccgcgcgggcgcccccgacgcgccgccgaagcgcgggcgcgggcgccctcccaaggcgcgggacccgaacgcgccggcgccggcgcccaagtcgccgtcgtccacggggcgcggccgcgggcgcccgcccaaggccaagagcccgctggaagccgccgtgaagcaggccaccgcggggatgcccaagccccgcggccgcccgcccaagaaggccaagaccgacggcgccgcgtccccgtccccgtcccctgcccctgcccctgctggcgacgggtccacccccggcaagcgcggccgcggcaggccccccaagtttcaccgtgtgtctctggtgttatgtgctggatctgttgacgcttgggagctgcagctgtttgcttctgccgtgcattcatgtggtgtgggaacactgggtaggggtgggctagctggacctgtacgtgacgaggacgagacttggggcgagcaagtgtccaccgttgacactgagtcagcccgcccggaggggctacgccggcgtaccgcgtaccacctgcccgaacctgaacacctcgggttggggtgggtcattgggtggcggggcgactgcttgcttgcaagtcggggtgttgggggacggaacgtgggtgcaaggggcgtcatccagggccggatccagagctggggcatacttcaaccagcttag

SEQ ID NO: 7272 - DNA, 3399 bp, Zea mays
  Peptide Sequence Number=SeqID_49051
gttctactgagagggtcatgtcgggaggagctcaagaggattaagcgtgctgtacaacttgcagtctttgctgcttatcacctttctcttgaaacatcattctttgcagatgaaggtgcaacacttcctaaattgccctcgagacatgtggtagttgatccagatacaaggaattgtacaaatagcaattcagctgcattgaccaatgttggtatgcctcatggacgtaaatcagaacatgacaaactctcacagactgctatggtcaacattatgtttgaaaatacccctgtgtcacctagttcattgccatcgaatggagaaggccacatgtttgtgggtgcatgtcagcataaagaaactgaatattctgttgatcataagaactcttgtgaacattgtgtatcccgtgcaactggttcatgcaacgggtatgaaacatctttatgttcatcagataatgattcaatgacacagaatcaaaatttgcagaactctgcaaagcttacatcaaatgctcaccaatatgagtttccagcaaaggaatgtcaacaagtagaccactgggatagacaaccacatgatgatcaatcagtagatcagcgggacctgaataaattttctggtgaatactttcctggttctgacaatcatcagagcatattagtttcgttgtccagtacgtgtatcccaaaaggcttggtatgcgagcgctcccatcttttccgcatcaagttttatggtagctttgataagccacttggtagatacctccgggacgacttatttgatgaggcatatcgctgtcagtcatgcaaagagccatcagaatcacatattaggcgttatactcaccagcatggtagcttaacaattagtgttcggaggcttcaatctcgaaagttgcctggtgagcgtgacggaaggatatggatgtggcacaggtgcctcaagtgcaaacctaaggatggtgttccacctgccacacggaggataatcatgtcagatgctgcctggggtctgtcgcttgggaaattcctagagctaagtttctcaaaccatgcttctgccaaccgagttgcaagctgtggacattcactccagagggactgccttcgtttttatgggtatggaaacatggtggcattcttcagatattctcctgttgacattctctcagttaaccttcctccaccagtactggacttcaattgttgtagtacacaagagtggctaaaaagggtggcagttgagatatttggcaaaatggaatccttgcatgtggaggtgtctgaatttcttcactgtactgaaaagaacattgtaactgaggatgaacctgtgagggaatgtgttcaaaggcagattatcgagatgaaggattggcttaaaatgcaaagaaatgaatatgaggtgatgttgcttttaccagtcatgagggaaagcaatcaccccatgcagacatcaattgatattctggagctcaaccgcttgcggcgtggtcttcttcttgatgcttacatttgggatcggaggctatgccatatagactcggttcttaatacacatggccatatttcaaaaaccaatccagataatcttgatattctcctatgcaccagactgaaggagtggaaagctgatttgctttgtggggatactgagattgaaaaatctttagggagtccaaagaaatctttgttatccagagagggccatttgaatgataatgagtacagtgttgctgatacaaatttagagatttgtttggagggtcatcctgtggatgatgcagatgatcttgacaaagtctacaacaaattcagtggagtaaagaagcggcctactgctgaacctactgatggcttggaacctgttgagaggttaccctcacttgcatccattttctctgatactattgatttggcatggactgggtcttgtgatttgcagcatgatcttccacaagctttcaccaaaattgatgaaaatgtatcctttaatttggacagtccgaagtacagcaatttagtaacccctgttagaattcactcgtttagttctacgctggggttgcggcagagagaacgaactggattagttccagcttctttgcatctatcatcattcaaatctgctgagtacttcggagctatgagaagcatcctgaaggacccaatgccaaatatgcgaaggtcctgttctcaaaggtctcctgggacgatagagaaattaaatgttgttcttgcacgtaaacccacatatatctcatctacttcaaatattatcaatgatggggcacggctactgttaccccagactggatatgaacatgatgtcgttgttgcagtatacgaggatgagcccaccagtattatatcatatgccatgacatcagaagaatatgtagaacaagtaacacacagactgaattccagtttgagtttttctcatcaaccaaatactaatgggattagcagccatggacttgaggcgtcctctccatctcaaggagaccatttgcattccaagggaactcattttaagttatccttcgatgatgactcaccgatttctccagataaaacaaagttctctgtgatttgctattttgcaaagcattttgctgcgctgagaaagaaatgctgtcccaaagatattgattacatacgttctctaagtcgctgcaagagatggaacgcgcagggtggaaaaagcaatgtttactttgcaaagacactggatgaaaggttcataatcaaacaagtcacgagaacagagctggagtcttttgtagagtttgctcctcagtacttcaagtatttaatggaatccttggcttctggtagcccaacctgcctggccaaaatagtagggttatatcaggttggcgtcaagagcttgaaaactgggaaggaagtgaggatggatctgatggtgatggaaaatgttttctttgaaaggaagatatctcgggtgtatgacctaaagggttcattgcgctcacgctacacggctggggacagcaaagtcctcttggatgcaaacctcatagaggcattgcatacgaagcctatatttttggggagcaaggcaaaacgaagattggaaagagctgtctggaatgatacttcattccttgcgttggcggatgtgatggactactctctccttgttggcatcgacgaggagaagaaagagctcgtcatcggcatcatcgactacttgcgccaatacacctgggacaagcagctggagacgtgggtgaaggcctcgggcattcttggtggccccaagaacgaatcccccaccgtcatatctccaatgcagtacaagaagaggttcaggaaagccatgtccaagtacttcctcaccgtcccggaccagtggtcctcttga

SEQ ID NO: 7273 - DNA, 801 bp, Zea mays
  Peptide Sequence Number=SeqID_49052
atggtggacggaccagccgccgcacacgccctggtctctgtcgccctaacctcgcccttccatccgttgatggatttcggggatgcattgatggtcctcgctcgacccgttctccgtcgatggcgtccacagtgcacccatgctcctgcccggacgcgccgcctacccacctcccccgtcgtgacagtcgcctccccatccgttgccccgccccatcagccgcatcatcctgccttcccccgaaccccgctccgcgcctctcccaagctccgacgtgtcatccccaccctcccctcgaaaccccgatcgagcaccaccagtcgcagaattatgggcgagcaccaccagccaccatgggcttcgccaccgtcggcgccctcctcctcggctccgcgcccgcctccggccccagcgacagcggtggggcgcccaggtccgtggagtcgtacatcgggagtcctctacaacatcaacaccgaggagtccagaatcgtcctgcacaatggtaatagccttccccttctccaacccgtttgctccaaagcgtcgttttcctcatatgcgaaccttctagacctatattggttgttgtctggtgcacccaacctggtgctgtcaacagtgaggaaccaccccgcctcggatagtgagagtgcaggggcggacatcgctctgagcagggtcaagtcgctacctgtcgactctagcggggaagtgatctcgtcgggtgggagaaccgacgatgcctgcggcggctcatccattggcgacgagcgtgagccgaccgtcgggaacgaatag

SEQ ID NO: 7274 - DNA, 681 bp, Zea mays
  Peptide Sequence Number=SeqID_49053
atgccctccccctcccgctcgccaacgacgcctccggtcgcctcggagtggagctgcgtgcggtgcacgttgctcaaccctgaccactccgattcctgcgtggcgtgcgaggcctcgcgcccagtggaggttgacatcgacagccccgtcgtcgtgggcgccgccctcgcgttagcctcgcccaagcggagccggaggaagaatgaacgcagtgcctctcctccaccccagcggtttgggaggaagagggagcacgatgcatcgccggaggtggtcgaactctgcgatattgcgggaaaggggcccgccaccaagaaaggaaatcttgagatttgtttggataagaagaccttcaaaatcatgacatacaatgtctggttccgggaggatttggaattgagaagtaggatggatgctctcggggatcttataaagcagcactgcccagacttcatatgcttccaggttgacgctttgagctatgagttattttctttccccgtccttatggttctaatatgtggaactgtggggcaggaggttacaccatacatatatatgcttatgcaaaaatctgactggtggcaacaatacacatgcttgttgtcacatgagaatgctattcagatgccgtattactgcatgcagcttctcgatgaatgttctcaccattgttattaa

SEQ ID NO: 7275 - DNA, 534 bp, Zea mays
  Peptide Sequence Number=SeqID_49054
atggcggagaggcgccatcacatggaacgggaattgctcattggagcgattgaatcctgcccgcgatccacctcatgttgcgggctgggcaccgtccgactcgacgaatcaatccaccggagcatcgcgaatcgctcatcagtgtcgaacctccgccacggtgccgcatcttgtcgcggggcgagtccgctgccactccaccgatggcctcatagtgttaccctgcctcgcctcctcggtagaggtgtatccgtgtatgtgaaagggaaatgtgcccttgggccatttctaagtattttggtgattgagtgccaactcaagtgcttaaatgtgaatttatgccatggatgtatagagggcaaatcaagagcaaaggaagaaaaagaaaagaaaagagttggctgtgtacagccagaaggctgcttcggtctggagcaccggactgtccggtggtgcaccggacagtgtccggtgcgccaggctgcctcggccgaagaggccgctctcgggaattggctgacggtgtacggctaa

SEQ ID NO: 7276 - DNA, 1119 bp, Zea mays
  Peptide Sequence Number=SeqID_49055
atggcgggcttccctctaggcggaggaggccacggccgcggcgaccaccaccaccaccaccaccctcacgtgaacccttcctccgcctccggctccgactccgccaccgccgccgcctacctctacacggccgccgcgccgcgcggcgggttccagctatggccgcaccacccggcggaggagcaccaccaccacttctacgcgcccaacatcatccgcttcgccgatgaccccttcgcgggctcctcgcgcggcggcaggggttcagacgccttcgtcgccgccggcgcgggaaccatcagctgccaggactgcggcaaccaggccaagaaggactgcgtccacatgcgctgccgcacctgctgcaagacccggggcttcgactgcccaacccatgtcaagtccacctgggtgcccgcagccaagcgccgggagcgccagcagcaggtcaccgagccctccaagcgccaccgcgacgccaccgtcggtgctcagccctcctctaccaccgccactaccacttcctcgggggagcagcaacagatggcggtggcggcggagcggttcccgcgggaggtgagctcggaggcgctgttccgctgcgtccgcctgggcccggtcgacgagcctggcgccgaggtggcgtaccagaccagcgtcaacatcgccggccacgtcttcaagggcatcctgcacgacgtcggcccggacccatcatcgtcggtcgctgcgggcggcggcggcttccgccacgccactgacgggtcctccccgggcacggcggggcgaaggcagcgtcgcgggggcggggcccgtctcgtcatcggctgtggtcatggacccgtacccgacgccgacgacgcccggaccgtacggcggctcgcatttcttccacggccatccgagttaggtaatctgatgctggtggcggccgggggtggtgtgagaggagagtggggggagaggagagatttcttccagtcatcatatgctcagctcagcaggatcggaagaaggctggcggagtcagatatctatgtctcgagaagagaatcaaatgacgacgagatgcttggaaaagaagaaatcttgttattatgcgcttgtaacagttcctga

SEQ ID NO: 7277 - DNA, 633 bp, Zea mays
  Peptide Sequence Number=SeqID_49056
atgaagggcaccgcatctagtcgacaaaggctagaacagctcatctcacctcttttagaccaacagcggtcgtcagatcactcatttgctctagttgaggccactgcaacagaggacactgtcgttgcagatgacgaggcagatcaggtgatagatgacgaggccaatcaggaagcagatgacgaggccgatcagaccacaggagatgaggcggaggctaaggctataacagatgaggcggagtcagatgaagtggcagctgcagccactagcaacattaggcttctcgagatggtgttgagtctaccattgtccagacgtatgttgcgggggacacaagggtctacatctagatcacccggagattctttgcgacgacaatgcaacacaaaagttggacgaggagatgcaacaacaacggtaggagatgcaacaaatgcgacaatagatgcaaatgatgcaatctcaaaatatgtatatgtggatgcatcaacagggttctgggacaggtccctacaaccaaatgatgcccccaatgatgtcgtgggtatacgctctgtaggtgccgcctcagatgactctgcagatgccgcctcagatgccaacgccgatgctgccgccacagtgtcgtga

SEQ ID NO: 7278 - DNA, 207 bp, Zea mays
  Peptide Sequence Number=SeqID_49057
atggagtacgcaccctcctcgctcgctttcgtcgtccaccgcctgtccgtctcgcatctcccacagaaaccatctcgcctaggcagcgaggcccgcgtcaccatcgtcgacgtcagggacgaggagaggggttacgacagccacatcgtggggttccaccactacgccaacgacacctatgcggagcggatgcctgagctcgcctag

SEQ ID NO: 7279 - DNA, 516 bp, Zea mays
  Peptide Sequence Number=SeqID_49058
atggtactcgggcgccgtgtcgaacatctagaggacgcgcgggctgttggacgtctcccatatgcagagcagcgagggccatgtatggagccgaggtgccagctggagccatggtggacccagcataggtcctgcaccccgcccagagcctggtgcgacactctgcacctcgtcgaggttgagccagtggtgcacagcccgtgtgcgagcatcccaaacggcctggcggccatggcagtcccccgcagcgaggcggagcgggtggcagtcgtcgtcatcgtcgagggatggcgtgccggtgggcgctcagcgaacggcggtgacaaaggaggcgagagaggaggagagcatggggagcacgcagatctcgtggcgaggatgtcgatgaggtctgagtcgttggggaccacatccatggtgcggcagccattgacggccgtgagctggagtaggccgccgtccttggagaagctcatgcactcgaccttgccgcacttgacggcggacagaacttga

SEQ ID NO: 7280 - DNA, 2253 bp, Zea mays
  Peptide Sequence Number=SeqID_49059
atggagcataggtatgatcctacctccattaatcatgatttggtgttgatgggtcaaaccccagacgatgtggacgacgtgcacgatggtctggaggatctctttggttccactgcccctacccctaaccctacccctaaccctacccctaaccctaccataaaccttggcgacgacaatgtcgctgccgagggcgaggctctcccagatgctactgcctccactacggcaagcactggtagaaagaggaaatgcacatccgatgtctgggaggacatggataagattttcgccactgaaaatggtgttcaggttagagtaggagcaaggtgtcatttttgcaagaaagaacttgttgcccgttctaccattggcactggtcatttgtctcggcatagggacaaatgtaaacgactccatggccgaactgggaaccaatctatgcttagatataatgctgatggtactgtttttcgttgggaatatagtgctgaagttgcacgtgttcagttatgtcgtttgattgctaggttggaccttccattatgctttgctgattgtgatgcatttgatgaatacattaaaactgcccataatcctaggcattgcaatgtttctagacaaactacaactagagatatggaaaagtacttcaaagaacgacatgctatagttgctgaaaaattgaagtctgttacttctgtttctttaacttctgatatttggagtggcaatgctaaagaagattatttgtctgttgttgcacattttgttaactctgattggcagttagaaaaaaggattcttgctgtgcgtctcattgattgttcccactctggcaagaacattgcagagaggattcatgctgttgttaatgaatatgaattggctaaaaaggttttttccattaccttggataatgcatctgctaacactagggcaatggaccatcttacacctttgctatctgcttatgttggtcccttattattgcatcaacgatgtgcatgccatatcattaaccttgctgtgcatgccacatttgtggaactgaaaccttatcttgaagattttagaactgccatctcttttttgaactcatcaaaccaaaggattgctgcatacaaaagtttttgtgttgctatgggagtaagacctcgtaagtttggtttagatatggaagtgagatggaactctacctaccttatgctcaaacaacttataccttacaagagcacattctctgtgtttatccagacccactatcaccctagagaagagggtactacacttttaagtgaagcacattggtatgttgctgaaaaaatattagagttccttgaaaggttttatgattctactgttgtgatgtctggtgtgtactatcctacatcacctttaatgttgcaccacattcttcatattaataagcacatgaacatgtatgaaaatgataatttgcttagacatatagttgtcccaatgaaagacaaattcttaaaatattggggtacaattcctttgctatatgcatttgcatttattctggaccctagagctaaaatgagaggtttcaacaatgtgcttgcactcatgtctcagctgactcattctgattactctggatatctaactactgtgagggctgatttatctgatttatttaataaatatgatgacaaatttggttctgttaggttgcagaggacttcaaatgctacccctggtgaaggtaagagcaaatatgcttgggatttggtatttgctgcagatggcattggtagcagttcttcaatggcactgggtgctggtctgggtgcctttggtgccagtagcagttctgggatggttcctgaactctcaagaaggacatctgctagtgctttgcttcatgcagcaagcactcctggtatttctggttctgaactagctgcttatctagatagtgacactgttcagaagtttgatgatgaattcaatctcctagattggtggcatgatcacaaacttacttatccagtactttcaatcctagctaaagatatcatttcagttcctgtctctactgtgagttcagaatcagcatttagtcttgcaggtaggctcattgaggagcggcgtcgtcgacttggctcaggaatggtggagatgctttccttgctaaaggattgggaggcagcagatgcaagaatgcagcacacaacagaagataagatcatggaagagtccttcagtgatttattcattgattag

SEQ ID NO: 7281 - DNA, 378 bp, Zea mays
  Peptide Sequence Number=SeqID_49060
atgggggccactgtcgctactcacacattgtcaaaccgccctaggccgcctggtcccacttctctgagggattacctcaggcacctccgccaggtttcacccccagagactgatgacatcatcgaagattccgaagtcctagtcgaagaccggctgaagttgcaagctcttcgcatcacgaataatcacttacagaagcagaaagaaatacttgcagccaagtgccagcgcatcatcatacatgccaaagtcaggcagatgataccggatgaggaacagaaggccaaagagttggaacaacaaatcgcaaatatgcaaggctgtaacacccaaaaatttaattatgagagtttagtaaaattctacaaaaagatttga

SEQ ID NO: 7282 - DNA, 675 bp, Zea mays
  Peptide Sequence Number=SeqID_49061
atgaccaggacagctccctctttgcaaattcaaattggttcacatttgatggaggggggaagcattgatgatcatttatctgcgtctattccttcatcatcccccaattacatggagacttcactagaggccaaggaagctgatgatggtaaagtcattggcaccgaggatgaaatggaaacaatatatcttggaaatggtagtgtcgaggaggtaaaagatgtagcagaatgtaatgaacaaccaaattgttgtactgaggatgagcaattgaaaaatacaggagtgatggaacggcatccagatgcttcaaatcactatatcgacatatgtacaaacgagattgtccctactgcaacagaatcttcagccccatcagttgagatagtggtagagaaaatagtagatgaactggcagaatcatctttggatagttctatctctatacctttgccagctcttgttagtacgcctgccaacttggaagcatcttcagaacaagttgcccatgacactgatgtgcaacaaccagtcaaggaagctcctgacgaggaaattgatgcaaagaaaactgatgcagccaaactgccacaaaataagcctaaagcaaactgttgtatgataagagcaagtgattgttctggtatcaaccgaggcatatcactgtacaaatga

SEQ ID NO: 7283 - DNA, 324 bp, Zea mays
  Peptide Sequence Number=SeqID_49062
atggcgattgatatttcagatgatgaatctgatgaggaggttccacaggctattccattattcccaaacgcagatgaccaccctttctaccttcttcaggccaatcaccaatattccaaaggttccttcttcagctacaaaaaaacaatgaaagcagcagataacttcagcacagttattgggaagggtggttttggaactgcctgtaaagctcaattcagtgatggatccatagctgcggtgaaaaggatgaacaaggtttcaaagcaagctgaagaagagttagaatgcctacaaaaagggaaaacatcagcaacaaattaa

SEQ ID NO: 7284 - DNA, 357 bp, Zea mays
  Peptide Sequence Number=SeqID_49063
atggctttggatctacttggttgggttcttaaagctatcgataagctgcgtaaaggtcttttgtggaaaggaagaaaagaagtaaaaggtggctactatctgctatcttggcctaaggtcactaggccaaaggagttgggtggcttgagtattcatgatctgcaaaagcttgggtgggctcttcgggtcagatggctatggttgcaaatgacggagccccctagaccttggtctgaatttcaagttcagatttgtgatattgtcaaaaaacttgtttcagtggctgtgatttcgcaagtgggcaaacacaatgatactcttttttgggctgacaattggttacatggaaggagttaa

SEQ ID NO: 7285 - DNA, 105 bp, Zea mays
  Peptide Sequence Number=SeqID_49064
atgaggaaacatctatggttatgtggtgtaagtggctcaagatcaagctctaagaaggagaacaaggatgttggagctcagaaatgtcagtctagatcaagttaa

SEQ ID NO: 7286 - DNA, 441 bp, Zea mays
  Peptide Sequence Number=SeqID_49065
atgaagccatttccaacctttgcggagaccaagaacgatcttcttctggaggagcttcgcctctctaccactgcgactgccgctcccgccacgacgctctacaacgctcctcgggcatccccctctgcctccaggggggttcctcttaaccacactttggtcccctgtcgcctggagctcttcgacagcctactgactccgggggggggtcgcggtcgtggtcgcaagagtggacgcagtggcacgacagctcttcgggtggttcctagtggccatctttctacaacccatggacaggcaccatccacatgtggcccgggccatccacgggtgcctcggctcctcgccccgtcactcctcaagcagatcttctttgacactccacctccggcagccctgaaagttccctttgcccgggaacaggatctggatgtcgcctag

SEQ ID NO: 7287 - DNA, 591 bp, Zea mays
  Peptide Sequence Number=SeqID_49066
atggcgccacccaacgaccccaatctataccaccatacgtcgcagctctctccgtgggcacggccgtaccatcctggccgcgttgtcatggtgcaatggtcgctgccacctcatggttggtacaaactcaactttgatggatcagtctaccatgatgggtcagcacgagccagtatcggtggcgccatccgtgacagcgacggtcgtgtcgtgctcgcattcgctgagcccacagagcactccacggttggcatagtggaggcgcgcgcgatggctcgtgtccttcgcctggcgcttgggcttaacctgcagcgggtggtggtcgagggcgacgacctcatgcttgtgcggctgctccgtggcgaggacacgcggacgcggatccctgtggcgctgcaggagatccacgggctgcttcgctgttttgcagggtgcgatgtgaggcatgtgtaccgcgaggggaaccaggtggcgcacaccctttgccgtcaggcctaccactgccccggcgtgtgggtagggactgtaccgtccgtcgtgtttgacaaggccgaggaggaccggcgtggcgtattgcatgagcgctcggtg

SEQ ID NO: 7288 - DNA, 651 bp, Zea mays
  Peptide Sequence Number=SeqID_49067
atggacagccgcctcgccatcgccgcgctcctcctgctcgcctccgcctcctccgctgccgctgccgcggacggcgggaaggtggccgtggcgctgtactacgagtcgctgtgcccctactcggcgcgcttcgtggtgaaccacctcgccaaggtcttcgcggacggcctccgcgaggtcgtggacctcacgctcgtcccctacggcaacgcccggatccaccccggcggagagatctcgtgccagcatggtccgtacgagtgtctgctcaacaccgtggaagcttgcgccatcgacgcctggccggatctggatgtgcatttcagcttcatctactgcgtggaggacctggtggtgaaacggcagtacaaggactgggagtcctgcttcgagaagctgggcctcgaccccaagcccgtaacagaatgctacaaaagcgagcatggccacaaggattacgagaatttcgaggcttacatctgcaaggcttacaagggcactccaccgaaggcctgccagggcctgggacgtctgcagatggccctcgagacagcggcggaggcgcgcaacggcgtcagctacaactccggtgtcagcaagcttgcgactgctgaagatgagggtggggagcataaggtgggagaatactag

SEQ ID NO: 7289 - DNA, 285 bp, Zea mays
  Peptide Sequence Number=SeqID_49068
atggcaggtccccggcgtctcctactcctcgtcccgctgctcgtgctcctcggcgcgcacccgccgcagtgcgggtccgcggaggaggggacgaaggtctccctggagctctactacgagtcgttgtgcccgtactgctcgcggttcatcgtcaaccgcctcgcggggatcttcgaggacgggctgatcgacgccgtccacctccggctcgtcccctacggcaacgcgcgcgtcgcatccaacagcgagatctcttgccagaaacacttagcaacacaacaataa

SEQ ID NO: 7290 - DNA, 273 bp, Zea mays
  Peptide Sequence Number=SeqID_49069
atgtcggcgagcagcacccccgtagacgcctcgggggagccgatcccgacttcgtcggtgctgatggcggcgtcgaagcacatcgcggtccggtgccgcccggagaacgttgccttcctcaactgcaagaagaaggaccctaaacccgagaagtgcctcgagaagggccgccaggtcacacgctgcgtcctcagcctggttcgatacgttcgtgaagcgatttgtgaggttactgatgttgcggttgaacacctggcattggttatgcgataa

SEQ ID NO: 7291 - DNA, 1056 bp, Zea mays
  Peptide Sequence Number=SeqID_49070
atggagaagggacaactatcaaatgaatgggctcaagaacacaacgaacaatacttgcacgacgattgggctgacagcttaggtgttttcattgagaatccagaatatgtgaacacttttgagaatgacatggtctctcagcaatcttttccatcccaagaaaaagtaaaagaagtgttgcagcaaatgcaagagaggaatgaaaaaacagaagagaagcaagagcaacagatgcaagagatcctgacattgaaggggaataaaatgaggcttattgagaagatgtttgacttgcagaagcacgaaatggaagttaggagcaagttgaaggaggagcagctcagccttaccaagcaggacatagaagcaagggccaaacaaagcgaggcacaactgcttactactgaactgggcatcatgggagcagacttggataaactttctcctagtgtgagggcatactacagcgccatgcagcagcaaatcatggagcgtagaggcatcatcacccctcatgacacctctctggcccctctccttcaattagagtcgaaagtcgatcggcgaaatgaaaatggcaagaatgaacaagataggatcgatgatgctgtgaagatgtacgaggagaaggaagctttccaattcttgcactgttggaagatgctacgcaacgagcccaagtggaatgacaaaaagtgttgcagcaaatgcaagagaggaatgaaaaaaacagaagagaagcaagagcaacagatgcaagagatcctgacattgaaggggaataaaatgaggcttattgagaagatgtttgacttgcagaagcacgaaatggaagttaggagcaagttgaaggaggagcagctcagccttaccaagcaggacatagaagcaagggccaaacaaagcgaggcacaactgcttactactgaactgggcatcatgggagcagacttggataaactttctcctagtgtgagggcatactacagcgccatgcagcagcaaatcatggagcgtagaggcatcatcacccctcacgacagtaatggggcgtag

SEQ ID NO: 7292 - DNA, 270 bp, Zea mays
  Peptide Sequence Number=SeqID_49071
atggcgtcagggaaaacggatcgaataatcgaaacgggaatcaacgaggggcagtacggcttaccagcggtggcgatcggagtggcgggtagggttcgcgcagcggtcgcggtggcggccgcgggtcgccccttcggccttcctcccgacttggaggccaagctgatgagatgcatatacaacagtcgtggactcgtggccaggcgggtcgacgccgtcactattgacgccgacctaatacgtgtcggcgccaattcttttagcgactag

SEQ ID NO: 7293 - DNA, 1296 bp, Zea mays
  Peptide Sequence Number=SeqID_49072
atgagggatgaggctgggcagtggcgagtggcgacggaggtgtccgtcccgtggccggtgcgcgggccggcaaggtcaccccagcgtcatcttattgcctccgccctctggcacatgcctgtgtctctggccgaggccaggccaggaccaggaaacgctgtctctcgctttcgcctcactccagcactcgaggcaccagcaccacggcccatccctccccccgcgacggcacatggatggatcaggatggcccgtgtcttacactccaagtcaccgggcgatgatgcccgttccccggctccgctgcctgcctgcctgccgccgccgcattccgctccactagccaaagcaacaactcgccacgggacagtaggccacgcgcggacgcgcgagcgttcgtcaccgtcacgcggcaaggcagcgcaacatgcacctcacgacttcctgcagctgcaccgcagtgcaggctggcaggcgctaatcatccgatccgagacctctcaactcccccaggaagctagagctagctcctgcagcactgctgctacacatgctcatcatgatcaaggagaagcagaagccaccgaccgacccagcgaggccggcctgtctgtccgtgtccgtgtccgtgtccccgtccccgtcgcacggcacggtcgcgcgtccccgtcgccacaccctccaccgtcacttcctgtcgccgcacggccgcgcgcgcgctcccccacctggttcgctgctctccgcccagcgccagcggcggaaacgaccgggcagctctcggcccggccgcatgggaattgggaatcaggcaggtcgccgccgttggacgcaataaggaccagaccagaccaccaccctccggctgctacttttgcgcctccaccgcccatccccaaagccccaaccgactgcgcgtcccctctcctcccaaacgcattccatcctctctcctccagtgacagcctccggcgcctcctcgggctgccatccagcccgtgccactgccactgccactgcacttgctgtgccgacccgagctgcggtcgagtgagcaatggagcggcggcggcggcggccaccgaggctgccgctccttgtgttcgtcttagttgccaccacttgccccctcgggagctcaggtttgtttcttctccttggactttggatttcgtcggagtaattgaggtcatcgggtgcgcatttgggcttatggtgttctgctgctgcctccctgctcgcagcagggattggaagcttcggagtcggtgcggagagcaatggagcttcgtctag

SEQ ID NO: 7294 - DNA, 129 bp, Zea mays
  Peptide Sequence Number=SeqID_49073
atggctgccagtcataaacaatttgtttctgcaagaggcttgcacagacctgttttgacaagagccgagcagcgatgcttccatttcggaccacgacctagccaaaggctaatggtttcaaatgtctga

SEQ ID NO: 7295 - DNA, 882 bp, Zea mays
  Peptide Sequence Number=SeqID_49074
atggcagcgtacgcagggacccggaccttccatccgcgcgtccgaggaggagttggcggcgcagggcgtgtaccttccatgcgggctggacgcgcgctccttccattgacggcggctgaggaggaggtggcggcgcaggcgtgctggagagaggaggagggcgcggatgttgcagaggcgagatttctggtggcagacgcgcagagcttccattgctgccgaggcgagatttccgggtcggaccagtgggacgcgtgcgtctgcgagattgtggggcacgtttatgcatgtgtaaacatgtgttatattttgcgtaaacagaaggtggatccacacaccaccgtgattagcgcgcccacgaagctggaagttaccgggtcgaccctcacgcgcatgaatcccgagatccgttgcaccaaccgctcccacctcgccatcatacacgccttaggggtgtcgtcgttgctcacatgcccccgagatccgccgtcgcgccgccgcagccgctcccacgtcaccgtcgtgcgcacctcaaggggtcgctgtcgcgtgcacctcagggagacgctgtcgcgctcgagccccacgggatccaccgccgcagccgctgccacatcaccatcgtgcgcacctcatggggccgtcgccgcgtgcgtgccctcgggatccgatgtcgcagccgctcccacctcgctgtcgtgcgcgcctcagggatcaaccgccatgagcgtgtcccccagatccaccgtcgcgcgcttgctcccaggatccatcgtcgcatgcctctcatggatggggcacattctggacctggtgcggctgaaccggttggcaacatcgggtcagggcttccgctcagctattggaagcccagggctctaa

SEQ ID NO: 7296 - DNA, 162 bp, Zea mays
  Peptide Sequence Number=SeqID_49075
atggacgataaaggcaaaggcaagggcatcatcattggcgatcctcgcatgtcaatcatatcacaaaagaagattgctcgaaaagcttcggacgagaaggctaaaaagtctgaagacgccgaggtacccattgtcatctctagactagactctagggtctag

SEQ ID NO: 7297 - DNA, 486 bp, Zea mays
  Peptide Sequence Number=SeqID_49076
atgacgcagaagcggaagagcatcggccgcggcggcgtcgaggactgcggaagtcccgcccgcgccgcagcgtgcaccagtaccacggcggcgtcaacctctaccactgtcgaggagaagaacacgccggctgttttcgagacaacgccgccactttggatgacggggccggcagagacgaagaagcccaagatcgcgtcgtcgtcgtcgtcgtcgtcgtcgtcctcctcctcctctcctgacggaggcagcaataatgcagccgtggcacaggcccagccgcagccgccgccggcgaaccggtgttcggcgtgccgcaagaaggtgggcctgctggggttccggtgctgctgcgggaagaccttttgcggcgcgcaccgctacgcggagaagcacgcctgcggctttgattacaagcacgccggtcgcggacggatcgccaaggagaacccaatcatcgtcgccgacaagatcgccaaaatttaa

SEQ ID NO: 7298 - DNA, 147 bp, Zea mays
  Peptide Sequence Number=SeqID_49077
atggaggccatgcgggcgacacgaggcggtgtggaggggcggacgagtggccacctctgcctggtgttggaagaagccgagcttctaagtgggcgaggcaatcacctgtggcggcggcagattggttccgtcaaggtaaccaagtaa

SEQ ID NO: 7299 - DNA, 4074 bp, Zea mays
  Peptide Sequence Number=SeqID_49078
atggggaagcaggcggcggtggtgctggccgtgaacggcaagcggtacgaggccgccggcgtggacccgtcgacgacgctgctggagtacctgcgcacccagacgcccgtcaggggccccaagctcggctgcggcgaaggtggctgcggtgcatgtgtcgtccttgtctccaagtatgacccggccaccgacgaggtgaccgagttctcagcgagctcctgcctgacgcttctccacagcgtggaccgctgctcggtgaccaccagcgagggcattggcaacaccaaggatggctaccaccctgtgcagcagcgcctctccggcttccacgcctcccagtgcgggttctgcacgcccggcatgtgcatgtccatcttctccgcgcttgtcaaggctgacaaggcggccgaccgcccagccccgcctgccggcttctccaagctcacttcctccgaggctgagaaggccgtctccggcaacctgtgccggtgcaccgggtacaggcccatcgtcgacgcctgtaagagcttcgcggccgacgttgatctcgaggacctgggcctcaactgcttctggaagaaaggtgacgagcctgcagatgtcagcaagctgccaggctacgacagtggtgccgtctgcactttccccgagtttctcaaatctgagatcaagtcctcagtcgagcaggttaacggcgctccagttcctgtttctgacgacggctggtaccgtcccaagagcattgacgagcttcacaggctgtttcaatctgagtccttcgatgaaaattctgtcaagatagtagcttcaaacactgggtccggggtgtacaaggatcaagaccttcatgacaagtacattgacatcaaagaggtcccagagctttcagtcatcaacagaagcaacaagggggtcgagcttggatcagttgtgtccatctctaaagcgattgaggtgctgtcagatggaaatgtggttttcgaaaagattgcagatcacctgaacaaagtggcctctccgtttgttcggaacacagcaaccattggtggaaacatcattatggcgcaacggttgcaatttccctcggacattgtgactgtactactagctgcaggtacaactgtcactatccaggtggtttccaaaaggctttgcctcaccttggaggagttcttgcagcagcctccatgtgattctagaaccctgttgctgagtatatttatcccctattggagttcagatggcatcacctttgagaccttccgagcagcacctcgtccacttggcaatgctgtcgcatacgtcaattcagctttcttggcaaggacttcagtggatgcagcatcaagggaccatctcattgaggatacatgtttggtgttcggtgcatatgggactgatcatgctattagagctagcaaggttgaggattacctgaagggcaaaacagtgagctcgactgttatacttgaagctgttcggttgcttaaagcgactgtcaaaccatcagaaggcacaacacatcctgagtatagaatcagcttggccgtcagcttcttgtttaccttcctatcttcccttgtcaacaatgagtcaacaaaggttaatggtcccaacgggtcatgtagtaatggagccacaaacggtgcccttgagcactcaccagagaagcatcttaagtttgacagcaacgatttgccgatacggtcaagacaagaaatatttttaactgatgaatacaagccagttggaaaaccaattaagaaagcaggtgcagagatccaagcttcaggggaagctgtgtacgttgatgatatccccgctcccaaagattgcctctatggagcatttatctacagcacccaccctcatgcccatgtaaaggctatcaactttaaatcatctttggcctcgcagaaggtcatcacagttatcaccgcaaaggatattcccagtggtggacaaaatattggttccaccttcccgatgatgggagacgaagcactttttgcagatccagttactgaatttgctggtcagaatattggtgttgtgattgctgaaacacagaagtatgcctacatggctgcaaagcaagccattattgagtatagcacagaaaatctgcagccaccaattctgacgatagaagatgcgatccaacgaaacagctacttccaagtccccccatttttagctcctaagccagttggtgattacaacaaagggatggctgaagctgatcaaaagattctatcagcggaggtaaaacttgaatcccaatactatttctacatggagacacaagtggcgctagctattcctgatgaagataactgtataaccatctattcttcgacacaaattcccgaggtcacacaaaatgtggttgcaaagtgccttggcattccatttcacaatgtccgcctcatcagcagaagagtcggaggaggctttggtggaaaggcaatgaaagcaatacatgttgcatgtgcatgtgcggttgctgcattcaagctgcggcgtccagttcggatgtacctggatcgcaagacagacatgataatggcaggcggtcggcatcctatgaaggtgaagtactctgttgggttcaagtcagatggcaagatcacagccttgcacattgatcttgggatcaatgctggaatatcaccggatgtgagcccaatgttgccacctgctatcataggtgctctcaaaaagtacaactggggcaatcttgcatttgataccaaggtctgcaagacaaatgtctcatcaaaatcagcaatgaggggtcctggagatgttcagggctctttcatcgctgaagccatcattgagcatgttgcctcagcactttcagtcgacactaacaccataaggaggaagaaccttcatgactttgagagccttgtggtgttcttcgaagatgctgcaggtgaagcttctacctacagcttagttacgatgttcgataagctggcctcctctccagaataccagcgccgagctgcaatggtggagcacttcaacagaagcaacaagtggaagaagcgtggcatttcttgtgtgccaattacatatgaggtcaatcttcggccaactccaggcaaggtgtctatcatgaatgatggttccatcgttgttgaggtcggaggggttgagataggccaagggttgtggacaaaagtgaagcagatgacggcattcggattgggacagctgtgccctgacggcggcgaaagcctcctggacaaggtccgggtcatccaggccgatacattgagcatgatccagggagggttcaccggtgggagcaccacttctgaaactagctgcgaagctgttcgacagtcgtgtgttgcgctggttgagagactgaagcccatcaaggagaatctggaagctgaggcaggcacagtggaatggagttccttgattgctcaggcaagtatggcgagtgtgaacttatcggcacatgcatactggaccccagatccaactttcagaagctatttaaactacggagctggcattagtgaggtggaaattgatgtgctgacaggagcaacaacaattctaaggagtgaccttgtctacgattgcgggcaaagcttgaaccctgctgtcgacttgggccaggtggaaggcgcattcatccaaggagtaggcttctttacaaacgaggagtacacaacaaactctgaggggttggtcatccacgatggcacatggacgtacaagatccccacagtcgacaccatcccaaagcagttgaacgttgagctgatcaacagcgcccgtgaccagaagcgtgtcctctcttccaaagcatccggcgagcctccgcttcttctagctgcctcggtgcactgcgcaatgagggaggccatcagagccgccaggaaggaattctcggtctgcactggtccagcaaactctgccatcacgttcgagatggacgtgccggcgacgatgcccatcgtcaaggagctctgcggcctggatgttgtggagaggtacctggagagcatgtccactgccggaccaacaaccactgccaaagcatag

SEQ ID NO: 7300 - DNA, 240 bp, Zea mays
  Peptide Sequence Number=SeqID_49079
atgtgcctgacatgccggcgagtgtgcagggccggtgagctgacgcctgaagagctggagcgcctgatgacggtcgtggcgaaccctaggcagttcaaggtgccggactggttcctcaacaggaagaaggattacaaggacggaaggttctcacaggtcgtctccaacgccctcgacatgaagctcagggacgacctcgagaggctcaagaagatcagtttctttatatcatataggtaa

SEQ ID NO: 7301 - DNA, 279 bp, Zea mays
  Peptide Sequence Number=SeqID_49080
atggggcggatcctcggccactttccatcgacggcttggctcccatggcatgtgatggggaaggaaggaaaaagaacagaagcccatctcgagctgcaatgccaatcaggcggccatggtgcggtgcggagcagcgctgcacagggccctggacgcggcgaaagtgaactgggggagggacgaactgggactgggactgccctggcaagagaatggccggcccttcgagactccaaattacaaagccacatacttgctgatggagaagatgagacatga

SEQ ID NO: 7302 - DNA, 426 bp, Zea mays
  Peptide Sequence Number=SeqID_49081
atgtccggtgctccaaggaagctcggcctcctgaactcgccagcctcgggttcgcgcggcagccgctccgctaaaattcaccggactgtccggtgtgcaccggactgtccggtgtgccagcggagcaacggctccctgcggcgccaacggctccttgcgctgcatttaatgcgcgcgcagcgcgcgcagacgtcaggaacgcccatgccggtgcaccggacatcaaacagtgcatgtccggtgtgcaccggacacccaggcgggcccacaagtcagaagctccaacggctagaatccaacgacagtgatgacgtggcaggggcaccggactgtccggccgttgccgccacctcctctgcgctcgcgcacagggtcgccgatgccccgtccggatcagctctcgcgtctagcgtcgacctgtcttga

SEQ ID NO: 7303 - DNA, 1020 bp, Zea mays
  Peptide Sequence Number=SeqID_49082
atggagcggcgccatccagtggccaacgtcggtgatctaccagcagcgagtgtgtttgaggaagatgcacaccacgacaaagaatatttctttagaggatggaatttagaagatgttgctggagacagtcttacgaagaacgcattctgccggtgggagccgtacgcgtcgacggagcccctcgcgttcctgcgcgacatcgtgctggcccgcgcgcactggggcaagtgcgtcgcgacggcagccgtgcggcgcgcgcacggggacgtggagctggagggcgagtggaggcgctggcggtggacgtggccaaccgggcgttgcagttgcagcgcgtggcggagaaggtcggcgtcaaagcagggacaggacgcaaagcttccactggtgactgcgcaccaccacgacaccaccaagcaaaagaaaaggcaaaagcaacgcgtcggatgggagggaggctcagagatggagcaagaagcgcctgcccgaccggggtccgttcccgcggtcacgctccgtcgtttcgagctcggcgacgtcgacgcgatgctggagtgggcgtcggaccccgaggtgacggcgttcatggcgtgggacgcctgcacgtcccgggacgccctcctggcgttcctgcgcgacgcggtgctgccgcacccgtggttccgcgccgtctgcctcggcggcggcggacactgccgccccgtgggcgcggtgtccgtgacgcccaccgacgacgcctgccgcgccgagctccgcgtcgtgctggcgcgcgcgcaccgggggaagggtgtggccacagcggcggcgaggcgcgcggtctccgcggcgttcggcgacctcccgggcgtggagcgcgtcgaggcgctcgtggacgtcgaccacaacgcggcggcgcggcgggtgctcgagaaggccgggttccagcgcgaggccgtgctgcggagctaccgcgtggtgaaggggaggctcagggacgtggctgtctacagcttcatctctaccgaccctgtcgttgagtga

SEQ ID NO: 7304 - DNA, 262 bp, Zea mays
  Peptide Sequence Number=SeqID_49083
atggccatgtggggaaaaaggccgctgcaccaccacatcgtcgacagcgacttttgggcactgagccttccgtggttgagaaccgagcactatggcgtcgggtcggtgtacaccggcgggagctccgccgcggtggagagacctccgccgcgcagccggctggttgatctctggtacttaaaatatgaatcgttggatggcgatccgatggccaggataggataccggttcggcgtgtttgaagatctaatctgggcggttg

SEQ ID NO: 7305 - DNA, 282 bp, Zea mays
  Peptide Sequence Number=SeqID_49084
atggccatgtggggaaaaaggccgctgcaccaccacatcgtcgacagcgacttttgggcactggtgaacggtagaagagcttcaggggatcgcatgggtcatttccagggaagcttcggtcagaatcgcgggaggaagtaccggcaattgctcaccgaactttcatccccgccgtgcagtgaggttacgagtcacctgaagatcatcctggtacctggaatctcaagtctcaggcaagttgtgcccttgatcacttcttttacctactcatgttctgattaa

SEQ ID NO: 7306 - DNA, 581 bp, Zea mays
  Peptide Sequence Number=SeqID_49085
atgggggtagacggggcgtccgggggtagacggggcacgacgggtcgtgccaaggcacgcgcactacacgagcacgcgcgcgagaccgcacgcacacgccacgaactagctgtccgcacgtcggggccgagcgctagccgagctcaaagctgcgcgctaaaggcacgctgggccgagctcgaggccacgtcggggccgtcacgacgcgagcaaggcacggcggggcgagcgggcaagcgcgccggggcaagcgagcacgggcgagcgaggacgcggccgggcgaggacacggccgggcgaggccgggcgcgggggcgggtggccgagccggggcgcgacgggagcggccgagccggggcacgggaaggccgagctcgccaggaggcggccaagcgggcgcggggctcgccggaggcgaggcgtccgagggcgacgcggacgggtccgaacggaagcgagtttccaagcaggcctcgggtggggacgcccgccgaccctgccgcctacgtcgtggaccctattgcttcgacgccgacgaccctacgactaccatatgcgttgtctaccagtgtgtctaatcg

SEQ ID NO: 7307 - DNA, 681 bp, Zea mays
  Peptide Sequence Number=SeqID_49086
atggcctgttccaatgctaaaaaggtgaacctatgcagcgagcacctggggccgacacgacaaaggaggaatgtgcggggcaggagggctccgaccggggggaaggggcggcttcgctggcggttcgtcggagccgaccaggacgctggccgagtgccggggaggcagcgtggctgggcgaggcttgccggtgattcaccggactgcaggcacacgatgcggctatggtgggacgatggtgaagccaggagagcgagcatggctagggttcggcttcagagctttgctgccgcggcgatctcggtcaaggcgggtcatgagaaaagaaatcgcgtgggggggctggccgccgtgccgcagagaacagaggggagcggctggccaccacgccgtcgagaacagaggggaggggatccacgctcggactggggaggggaacgacgagcaggagggcaggggctgctggccgccgcgtgcggggacatgacctcggactcgcccggcgagggcgctggccgccggtggggctcagccggaggagtagaagagaggagggttggcaggagggacctacctcgacggcagccgacaactgcaggctcggcgggtgcgatttctttcttgtacgagggggaccgtcgcgggagatatgcgctggggcagctcgaggaagaggaatag

SEQ ID NO: 7308 - DNA, 672 bp, Zea mays
  Peptide Sequence Number=SeqID_49087
atgggtatcgagtcgcgggtctgctgcagtacttccatagttccatctggtggagggatgcctggacatgatccgggagcacgagacctgaggcaacatcacctacgcctgggtcctccgcacgcgcgtcgacggcttctggacggcgccgctcgaccccgaagacgccttccacctgaccgcctacgtcgtgcccgagggctcccgattcggcggcctcaacgaccgcctgggagccggcgcccgcgcggcgtaggaagccgcgctgccacggctctcggcgttgcgcgcctcgccgtggccgggtaccgggaccggctcaactccgacaaccgggcctactcgttcccgccgagggccaggtccgcggtgcccgtggcgtcgctggggagcccgggcccgctgagcgggcgggccgtgggagcaagggtgggagcctgggaggcgctgtttgacgaggtcgctggcgccgaggccgcggcgctgcggcgaaggcgaagcgtggcgcggatgggtctctactctctagaggaggtcgaggctatcaaggcgcgcgcggagtggtgggagtgggacgcacagagcccagccgagatatgccgcctcctccggttgggactcccatcgctggctctgagtcgagccgactcttcgtcgactgctgaactgtaa

SEQ ID NO: 7309 - DNA, 216 bp, Zea mays
  Peptide Sequence Number=SeqID_49088
atgaggggtgcccggccaggtgtactacccatctacccccaggagatgcgtacccttttgttacctttttacttgttgtcttttgaagaatttagacagtgttgggagggtgtagttcttggcagcattttaatcaaagattcccaacaacaacaaaaacaattacgttcaatgattcacttgactatggctggaaacgagccgagacgaggttga

SEQ ID NO: 7310 - DNA, 279 bp, Zea mays
  Peptide Sequence Number=SeqID_49089
atgggcaaggctaataagtctccgtcgccggcggtggccaaggaaggcgactactcggcgttgcgggagctgttccggccgcacgtggaatcctttgattacttcctcgataaggggctcgacgagatgattgaatccatccgccccatgttggaacgattccgggtgcaatccgacgtaaacgaacaaggccgtagtttgatgtttttggcaattgctgcagtttcccctgaaacgattcatgtcatagtgaaatttaaatggactggaattgtttaa

SEQ ID NO: 7311 - DNA, 2457 bp, Zea mays
  Peptide Sequence Number=SeqID_49090
atggggaggagtagacgccacgaaggaggaggaggaggagaacgacggggtgcgggtgctggaggggtggccgccgccgccttcgccgctctgctgctgggctgcgtcgtcatggccctcgtcggcggcgccgccgcgcagggcccccggctcccctccgactacaaaaccctcagcggcgccgctccgctcgtggtggccagaggcgggttctcaggagcgttcccggactccagcgagggcgcctactccttcggggcgtccgccagcgcgcctggcacggccatgtggtgcgacgtccagctgaccaaggacggcgtcgggctctgcctccgcgacgtcaacatgaagaactgcaccaccgtcgaccagacgtaccccgggaggaagcggacctacgtcatcgacggcgtccacaagaccggctggttcgtcccggacttcaccagcgccgagcttcttcagtccgtgtacctaacacaagcaatctggtctcgcactgagaggatggacggcatataccctatcgtcactgtccctgacgttcagtccatcgtcaacacgtctcctatctggctgaatgtccagcatcccatcttctacaaacaacgcgatctggacatgagcagctacatacactcgatccggaagctggtgcgcatggactacatctcgtcgcctgagatcggcttcctcagaaacatatccgcaagagtccgccgcagaaccaagctcgtgttcagctttctcgacaaaaaactcctggatcactccgtgaaccagacatacggttcgctggcgaggaacctgacgttcgtcaggtccgtcgcgtctggcatactggtcccgaaggactacatctggccggtgacggccgataactacctgctgccgtccacgtcgatcgtcaccgaagcgcacgaagcggggctggagatatacgcctctggttttgtgaacgataaggctgtcccctttaactacagctacgatcctctggcggagtacctgaacttcgtcggcgatggtggcttctcggttgatggcgtactgtcggactaccctattactgcatcagaggcaattgggaaacccttagttatctcccacaatggcgctagtggagactacccggactgtacagacctggcctaccacagtgccgttgacgatggcgcagatgtcatcgactgtcctgttcaagtgacaagcgatggagtcctcatgtgcatgagttccattaacctgcttgacaccaccaatgttcagagaacacctttcgccactccttccctggttccatctatcttaataaatgtaattctttcatcactgatcaatctatcttctctaccgcagaatgctgcgttcatagcaaagtcactagggatcgacatggttgactccgtaaccgccgccttaagtgccgccggcttcagtaaccagaccaccaaggaagttctgatccggtcaacagacagcgccgtcctcgtcaaactgaagcagcagaaaacgagatgcaagctcgtgtacaccctccccctaggcatcggggacgcttccaaaccctcgctgaaggacatcaaggcgttcgcggaagccgtagtcgtcgacaggacctccgtcttcgctctgagctacgatttcatcatgggacagaacaggatcgtgcgagacctgcaggcggcggggctggctgtgtacgcgcaggtgttccggaacgagtacgtagcgcacccgtttgatttcttgggggatccgaccgtggagatcaactactatgttcagacgtttaatctgtccggcatgatcactgatttccccaagacagtcagaagatacaaagagaacacctgtacagctctggggaaggatatgcccaagtacatgcggccagttgaggctggctcccttgcagatttcctccggtccttccaaacccagccgccgtctgtggcaccgatgccggcgctgaactcttcaagcgtggaggagccgcctcttccaactgctgcgccgagaaacgtgccgcctggtggtggcgccccagcggacgccgccgggactgctggcggcgctgctccttctgatgcgagttccggcggcgctcctccttctgacgcgcgtcacacggctaccggaagtagcgccaaagtctgctcattctgggagcaccggactgtccggtggtgcaccggacagtgtccggtgcgccaggctggctcgagcgaactggccgctctcgggaattcaccggcgacgtacgactataattcaccagactgtccggtgagccaacggtcggccgggccaacggtcggccgcgcgatctgcgcgggacacgtggccgagccaacggctagaagggggcaccggactgtccgggatgaataccacaaagtgagcggcttggataacgccaagcaaatttgggacaccctcaaagatctctcatga

SEQ ID NO: 7312 - DNA, 1164 bp, Zea mays
  Peptide Sequence Number=SeqID_49091
atggcgcgagcgccggccaaggtccatgctgccgccggcaccgggaccaaggcctccctgtcgccgtgcccctctcgctgcggggatgtcgaaatctcgtacccgttcgggatagggctgggctgcttccgtcaaggcttcgagctcacctgcgatcaaacagctccttctcccaggctcttcttcgtgtcggggaacagctcgatccaggcgtcgacacctacaccaagtcttgggaggcccctactgccactggtgtcagttttttatgcagataataattatctgtacactgttggatgtggtgtctacgtctacgtgttcggtgataacagagagatcatggagagcgcaaacactggttctggtgtctgtgaagggttaggctgctgcagcattccaatgcgtggcggccaaggcttcactctcaaactaggtcgcctcaatagtaccattccacagttcggtgaagcgctctccagtgttaagattatcgtttcccaaaactatgaatttgttactgatgatgtttatgcaagttgggtgaatacaagcaatgttcagggcatgctacttgacattgcaatcacggaccaaccaaactgcgcgagtgcccagtcccaagagaacaaggatacctacgcatgtactagtgaaagcatctgcaacgacgttctaccaccagtagtatctcaaggaggctacagttgcttctgccctggtcaaatagagggcaacccctatattgaagatggctgcatagcatattacaacccagaggcaccgagtattaggaactgtacgagattatgtggaaacataagcgttccatttccttttgggatcgaagaaggctgttacgcaaatgataacctacgactcaactgcacaattaacgacactactcttattcttgatcgagggtacgcacagtatcgtgtgaccaatttgtcacttgatgatgggcttctgatggttacaaacatgttgaatgacacaagctccaaaaatgtggagagaataatcatcactagtaactatgacaattaccaggaggttatggatggtaattatgatttctctcaggaggatacagcaataaaatgggttatatcaaacataacttgtcagaaagcaatgcaaaataatgctacatatgcgtgc

SEQ ID NO: 7313 - DNA, 216 bp, Zea mays
  Peptide Sequence Number=SeqID_49092
atggccgctgccctccgcctgcagcgccagagcctcaccgctagcccctttctcttctccgcccatggcctccgctaccgcaagctcgaggtcatcctcactacgaacatagacgggttagacgggattggcaatcacgagcctatcaagacaaaggataagaaattttacgagagatctgaacactggcttttatcaaactcctcaacgaattaa

SEQ ID NO: 7314 - DNA, 1701 bp, Zea mays
  Peptide Sequence Number=SeqID_49093
atggataatggtcatggatcgatcgagaagaatgcatatacgaagtgtgctgatccgatcgatcgttgggtacgtgcatgcatgcatgatgcagtggcggagatcggtgagcgcttcgccttctacgccgtcgcctctaatctgatcatcttcctgacgggacccctgcaagaggggatcgcggccgcggctgcggccaccaacgtgtggaacggcacggcgctgatgctgccgctgctcggcggcgccattgccgacctgtggctgggaagatatctcaccatcatctcagcgtcgctcctgtacaccctgggtttaggcctgctggccgtgtcaaccttggttgggcatcactgcaacgccgccgccaccggcgacaggtgcccggcgccgcccaccatccaggtcaccctattctacgtgtcgctctacatggtggccgtcggcgagggcggccacaagccgtgcgcgcacgcgttcggcgccgaccagttcgaccagagcgaccccggcgagtccgtctcccggagctccttcttcaactggtggtacttcggcgtgtgcgccggcaccgccgccacgctcctggtcgtcagctacgtgcaggagagccttggctggcaccccggcttcgccatcccgtgcgccgtcatggcctgcaccctcgtcgtgttcctgctcggtacgaggacgtaccggtacaccgacacgagcgggacgcggaacctgttcgctcacgccgccgaggctttcgctggctggcgccggcgccagcggagcaggctcagggctgcacaccgcacgtcgcatcaggcttcacaccaaggcgtcgtcggggtgtctgcagaagagccgccggaggccagcagaaggagcagaatcgatgaagaggcgcaggtggtggcggcaacgacggcagccacgaacacagccgtcgtggtcagcgaagccaaggacgtcctccgtctgttcccgatatgggcgatgacgctggtatacgccgtggtgtactcgcagtccatgacgttcttcacaaagcaggccacgaccctggaccgacgcgtcggcgaggtagtcaaggtgccggcggcggcgctgctagccttcatcagcatcaccatcatggtgctcatcccggtctacgacggcttgatcgtgccgctgtcgcgccggttcacgggcaggccgtcggggatcacgatgctgcagcgcatcggcgccgggatgctcctgtccaccgtgtccacggtgatcgcggcgctcgtcgaggagcggcggctccgggtcgcgcgtgaggccggcctggccgacgagcccaggatccagctgccgatgagcctgtggtggatggtgccgcagtacgtggtgttcggcgccgccgacgtgttcgccatggtggggctgcaggagttcttctacgaccaggtgcctgacaggctgcgcagcgtcgggctggcgctctacatcagcatctttggcatcggaagcttcgtcagcagcgcgctcgtgtcaggcatccaccgggtgacggcggcgaggggccagagctggttctcagataatatgaaccgcggccacctcgactacttctactggctgctcgcagggctcagcgccctccagttcttcgcctatgtcttctttgcgtggagatacaaatatataaacagaacgttggagccgagaacatgtgacacatag

SEQ ID NO: 7315 - DNA, 1545 bp, Zea mays
  Peptide Sequence Number=SeqID_49094
atgatggctggcagagctcatggccacagaaaccgcctccgccgcctcatcccgcggctcctcctcctcctcgtcgccgtctacgccgcctccttcgcgatctacctcctcctccagtcccattcccaccaccagtcgccgccggaccccacccccaggactgaagcccgtgacggtgtcctggcgccgtcgtcctcgcagaagccgtggccgcgcctcccctccttcctgccctgggtgtccagcgccgtgccgccgccgccgctgcacacctgcgaggcctacttcggcaacggcttctcccgccgcgtggacgtcctgcccgcgggccgcggcagcggcggcggcggctggttccggtgccaccacagcgagacgctgggaagctcgatctgcgagggcgccagggttcggcttgacccggcgctcatcgcgatgtcgcgcggcggggagccgctggagcaggtgatgggccgcgccgaggaggaggagctacccaagtacgagcccggcgcgctgcaggtggaggggccggcggcgggtatgccggtgcccctggtggacgcagggttcctcaacgactacgtacccaccggcgggatcgggatgcacactatgagggcgctgctcgagtcgacgcgcgttgtgccacccggtgagctgcactgctcccagtgggttgaagaaccgacacttctggtcactcgtttcgaatatgcgaaccttttccacacaattacggactggtacagtgcatatgttagttccagagtcacgaatttaccaaaccgtcctaatgttgtattcttggatggccattgcaaggcacaattagaggaaacatgggaagcacttttctcaagtgtgacatatgctaagaacttcactgttcctgtttgtttccgacatgccattctttcaccattgggctatgagactgccatgtttaagggtcttagcgagagcttcagctgtgaaggtgcctccgtagattcactccgagaaaaaccagactatgaaaaaactgcacggttatctgaattcggggaaatgattgtagcttcttttgatcttctgcaggatgacatcatgtcatccaaaaaatcgaatggactcaatgttctctttgttcgacgagaagactacctggcccacccgcgccacagtggtaaggttgaatcgagactaagcaatgagcaggaggtgtatgatgcaattgacaagtgggcacaaggcctgaaatgcaaagtgaatgtcgcgaacggtctttttgcccacatgaccatgaaggagcaactccgtgctatcctggaagcttcagtggtaataggggctcatggggctggtctaacacacttggtttcagcaactcctgatacaaaggttcttgagattatcagcagcatgtaccggcgcccacattttgcacttatctcacactggaagtctttagagtaccatgccataaatctccctggatcatttgcaagggtcacagatgtcatcaacgagttgagaaaaatactggaaggtctcggatgctga

SEQ ID NO: 7316 - DNA, 393 bp, Zea mays
  Peptide Sequence Number=SeqID_49095
atggcggccatgtcgcaagctccacatacggtgagcaccaaatctgccacaacggccacaaggagacttcccgacgtcgattggagggtcaaggtggtctcggggctcccgatttatagcggtcgggtggatgccgagacggatcggggtcccgtgattcccggcggtggttcacaacaacccccaagctatcctggtttcggactcgaagaagacgaccgccgcgaggggcccacacggcagccacccaacgtggaggctagactgggccgcacggttggaggtgggctgaccgtagggggattaggcccaaggctggaccaacactacgggccgaggctacggcccaagcacgacacatcgctcgtgccgggctggtccaggcactactaa

SEQ ID NO: 7317 - DNA, 306 bp, Zea mays
  Peptide Sequence Number=SeqID_49096
atggccgcgcccggcgctaataagcaccagggaacttctatttcggtacccctccggcacgcgctcgactcaccggagcccaaaacacacccgggcgttgccgtgcatggcgtgtccgcggcgcccgattccccccttaccactgtagaccggccaacagagccccttcccaaaccccgtcccaaccctcgggagaagactgtgcacacctcgggtgaagctcccccgagcgaggaatcggagttttgcttcgccgggagaagcccagtcccacggtcgctggactcccaccccgaccgccggtga

SEQ ID NO: 7318 - DNA, 1629 bp, Zea mays
  Peptide Sequence Number=SeqID_49097
atggacgccaccctcagcaccacgaccacccaggactccctactcttcctcctcccttcagccgccaccttgctctccccgctcctgaccgtgctcctcgtagccgtctcgctgctctggctcttcccgggcgggcccgcgtgggcgttcgtttccaggtcccgcgcgacgccgccgggcgcgccgggcctggtcaccgcgctcgcgggccccgcggcgcaccgcgccctcgcgtcgctgtcccggtccctgcccggcggcgccgcgctgtcggccttctccgtcggcctcacgcgcctcgtcgtagcgagccagccggacactgcgcgggagctcctggccagcgccgccttcgccgaccgccccgtgaaggacgcggcgcgggggctcctcttccaccgcgccatgggctttgccccgtcgggcgactactggcgcgcgctgcggcgcatcagctccgcgtacctcttcagcccgcgcagcgtggccgcggcgggcccgcgccgcgccgccatcggcgagcgcatgctgcgggacctcctctcgggcgcggccggacgagaggtcgtcatgcggcgcgtgctccacgcggcatccctggaccacgtcatggccaccgtgttcggcgcgcgctacgacgccgccagcccggagggcgcggagctggaggagatggtgaaggaagggtacgacctgctcggcatgttcaactggggtgaccacctgccgctgctcaggtggctggacctgcagggcgtcaggaggcggtgcaggagcctggtgggcagagtcaacgtgttcgtggccaggatcatcgaagagcacaggcacaagaaggacgacgccattggagagccggccgccgccggagacttcgtcgacgtcttgctgggactggatggcgaggagaagctgtcggactccgacatgatcgctgtcctctgggagatgatctttcgagggaccgacacggtggcgatcctgctggagtgggtgatggcgcggatggtgctgcacccgggcatccagtccaaggcgcaggcggagctggacgccgtggtgggccgcggccgcgccgtttgcgacgccgacgtggcccgcctgccctacctgcagcgcgtcgtgaaggagacgctccgcgtgcacccgccgggtccgctgctctcgtgggcgcgcctggccgtgcgcgacgcggtggtcggcggccacgtggtccccgcgggcaccacggccatggtcaacatgtgggccatcgcgcacgaccccgcggtgtggccggagccctccgcgttccggcccgagcggttcgaggaggaggacgtgagcgtgctgggcggcgacctccgcctcgcgcccttcggcgccggccggcgcgtgtgccccggcaagacgctggcgctcgccaccgtccacctctggctcgcgcagctgctgcaccgcttccggtgggcgccggccgacggccgcggcgtcgacctggcggagcgcctcggcatgtccctggagatggagaagcccctcgtgtggagcacatggacgatgactgaggtgaaggtcatgtgggctcgtgctgatggactaggaatagtgaaagacgagtgctgggccttggctgacggaccggagtag

SEQ ID NO: 7319 - DNA, 264 bp, Zea mays
  Peptide Sequence Number=SeqID_49098
atgagccgtggcggtagcgcgggtggtggtcaaagttctctgggttacctctttggaagcggtgctccacctgctgagaaaccacctgctgcaaagcctgatggcaccagtcagattgctgctggggttaccagccaaaccaataactaccacagggccgacggtcagaacaccggaaacttccttacggaccgtccttcgaccaaggtccacgctgctcctggcggtggctcttccctgggatacctgtttggtggcaactga

SEQ ID NO: 7320 - DNA, 204 bp, Zea mays
  Peptide Sequence Number=SeqID_49099
atggccgggcacgccgcggaggccgacgtggatggactgggtttggagcctcggaagaatctctgttgttacaactcttttttctcaacgaccgctgctagtccacttcttgtagagactggacctgaactagctacgaaggcacttaaatttgctgatcgttcaagtgctcctatcatcctccttactctgatgaatagttag

SEQ ID NO: 7321 - DNA, 468 bp, Zea mays
  Peptide Sequence Number=SeqID_49100
atggcgcctcccgttgacgtggctggtctgcgccctaggttgggcgaggtggaagctcctccgaagctgaggttgagtctgtcttccgtggccgaggccgagtccgagcccctggtcgggcggagcggagttcgccgtctttcgggacttagcccgagtccgagccctgggatcgggcggagcggagttcgccgtcttccgggacttagcccgagtccgagccctgggtcgggcggagcggagttcgccgtcttctgggacttagcccgagtccgagccctgggtcgggcggagcggagtttcctgtggtgccttctgcaggacctgactgcttgtcagcatcactctgtcaagtggcactgcagtcggcgcggcgcaggcggcgctgtccttctgtcaggccggtcagtggagcggcgaagtgacggcggtcacttcggctctgtcggggggcgcatgcaaggataa

SEQ ID NO: 7322 - DNA, 144 bp, Zea mays
  Peptide Sequence Number=SeqID_49101
atgagtcggctcgcgagcccacttcgagccgagctaagccgagccttctctttcaactcgttgagtgaacgagccgagctcggttccgccgcgcccaacatcgggctcggtgccacggggctcgaccgggggcgggttctttaa

SEQ ID NO: 7323 - DNA, 342 bp, Zea mays
  Peptide Sequence Number=SeqID_49102
atgaacgtctgtgtgctcacccttgctgtactcacatcccccaggtcaagaatagaacccaggtgtgacactcgggttatagtccccgaggtgaaactcaccgaggcaacgaacacggcggatggcggcgatgtctcctctggcatgcacacgacgcaaggcggggatgggagctctacgggtgtgcgagtgagggagaggaggggagtgagtggggacgtagcttcaaaaggggtcgggcgcgtggggtggtggccgggagatgcacgacatgggtgcgtccatggcagggcatgcgcgcggacagttggggaggacgagactgaaagacggggtccatag

SEQ ID NO: 7324 - DNA, 2520 bp, Zea mays
  Peptide Sequence Number=SeqID_49103
atgtcgacgacatatacaaccaagagcaatggcaccacctctgatgacaacaagtggccgaaagatcatgtgaagaagtcggccagtgttgacaggccgccgcttgtccggaccacaaaactttctacaattaccatcaagctatacaggctcatgataattctccggatgggcatcttcgtgctgttcttcaagtggcgaatcggcactgcgcttgtcatgattagctccacaggcaccgacgacaaaagcacagttcttgggatgtggatggtgtccatggctggggagctctggtttgccctgatgtgggtgctcgaccaggtgcccaagatgcagcctgtccgccgcgtcgtctacctcgctgcgctcgacgagccgatgcttccggccatggatgtattcgtgaccacagttgacaccgagaaggagccaccactggtgaccgtgaacaccatcctctccatcctcgcggcggactaccccgcagagaagctcacgtgctacgtctcggacgacggtggcgctctgctcacgcgcgacgcggtcgccgaggctgcccggttctctgcactgtgggtgccgttctgccggaagcacgcggtggagccgaggaacccagaggcctacttcagccccggcgccagtaatggcttcaaggcgtggagggctgactataagggaacggcgtggccggagctggcaagggaccggaggcgcgtgcgccgggagtacgaagaactgcggctgcggatcgacgctctgcaagccggaggacgtgcggcggtagacgccgtcgctgccgatagaagctgctggcggcgaggcgccgcggaagatcatgccggagctgttgaattgctagtcgataatcccggtcccggcagcacgccacggcttggcgtcagcggcaccgtagacggtgtcagcaatcttctggacctaagctccgtcgacgtgcgggttccagcgctggtgtacatgtgccgggagaagcgtcgcggtcgcgtgaaccacggcaaggctggtgccctgaacgcgctgctccgtgcctcggccgtcctctccaacgcacccttcatcctcaaccttgactgcgaccactacgtgaacaactcgcaggctctccgcgccggcgtctgccacatgctcgacggcgagggcggcaacggcaacgacgtggcgttcgtccagttcccgcagcgcttcgacggcgtcgaccccgcggaccgctacgcgaaccacaaccgcgtcttcttcgactgcactgaactcggcctcgacggccttcagggacccatctatgtgggcaccggctgcgtgtttcgccggtcggcactatacggcgtcgacccgccgctctggagaccccagggcgacgacgctggcaagggcgctgccaatggcattgagaccgggaagttgggcgtgtcgacgccgttccttcgctcggtatatgcggtcctgacgaaccaatcggaccaatgggacacggtcagtatttcatcaccgccgtgctcgttcgacgcggccgccattggcgaggcaaccgcgctcgtctcgtgcggctacgaggaccggacggcgtggggccgggacatcggctggatctacggcaccgtgacagaggacgtggccacgggcttctgcatgcaccggcgagggtggcgctcctcttactgtgccaccgcgccggacgcgttccgcggcaccgcgcctatcaacctcacagaccggctgtaccaggtgctacgctgggcggcgggctccctcgagatattcttctcccgcaacaacgccctcctcgccggccgccgcctccacccgctgcagcgcctggcgtacctcaacaccacggtgtacccgttcacctccatctttctcatagcctactgcggcctcttcccggcgatcccgctcgtgaccgggaacggcgccaccaccggggccttcttctcaataatcatcaggccgccgtctgccacgtacatcgcctttgtggcggctctgatgctgacgctcgccgtggtggccgtcctggaggtcaggtggtccggcatatcgttgggcgactggtggcggaaccagcagttctggatggtgtccgcaacgagcgcatacctggcggcggcggtgcaggtggcgctcaagatcgcggccgggaaggagatatcgttcaagctgacgtccaagcagcgtgcgacgagcactgttgccagtgtaaaagacaggttcgctgagctctacgccgtgaagtggacggtgctgatggtcccgacggccgtggtgctagcggtgaacctgacgtccattgttgcagcgatggaaggtggctcgtggagggatggcccaatggcggtgttcgctttggcgttcaacgcgtatgtggtggtgcatctctaccccttcgctctggggctcatgggtcgctggagcaacacgttgagccccctactcttgcttatcgcattcttcaccgttcgattactttgcatagttctctatgtacagatgctttaa

SEQ ID NO: 7325 - DNA, 318 bp, Zea mays
  Peptide Sequence Number=SeqID_49104
atgaggtggacaaggttagccgctaccataggagtctcacttagagcaggtccatgggatgctctgcacatgggagggaacatcccaacgttcggcttggctcggtcttctttggcaacagttgtgctcctagttctcaaggtgccaaaattattcatatcagctccccgggaggatctcgattcaatcatctccgtctcatacccggaggactacaacaacatgatggagcaatacgagaagctgactatcgctgcacctgaaagttccctatgtccgggaacaggatctggatatcgcctagaggggggtgaatag

SEQ ID NO: 7326 - DNA, 1344 bp, Zea mays
  Peptide Sequence Number=SeqID_49105
atggcgggatctggcttgagcggcggaggcagtaccggagggggaggattgggcagcagtggaggaggcggacgcggtcgcggtcgcggctgtggaggagacggacgcggtcgcggctgtggaggagcagggcgattcggtggtgcaggaggagccgaacatggtggaggaggcggactcgatgttggggcaggaggcggacacgacggtggaggtggtggaggcggacgcggcggcgactactggcagtgtggatcaacgtctgctcgatctgcgactcctactgttccggcaaactccattggcggtgggttcccccaaatgcatgtcacctgcggagaagaaatcgacctcgacggtggacataccgtgccaggcacattccatggtggacctttccggccagctgtgcctgcacatgcgagagtcgtcgcagatccgttagcgtcgaccatgttcagctgcagggacgagttgccttcatccttcaaccgaggggaagatgtagttcgagggaatggatacttttcaaacatgatgatggatgacaacattgaaggagaatttgataataatagcaatacatgtcctgatattcagccacaatcaatgcaagttggaccaatagtccccacatcgaggccaaaccataagagatcaaaaaatttcagtgatcaagaagatgaaattttggtttcagcgtggttgaatatcagtatggatcctgtggtaggtaaagatcaaaaagtaggaaggattcagttaagacgacagagtgatactacaatgcaagacatggttgcacaggcatgtgcattgtacaagtccgaagatgaacatgaaaaaggatttcaattcatgcactgctggaataagctcagattacaacccaaatggcttggtaaagtagatgatttggctgctgctaaaccttcaaacaagaaacagaagaccactcgtgaaggggatgccaatggaacattaccatatgaaaccaaagaatctcaagttcaagtcgtagagaattaccaattgacccggcctcccgggaagaaaacagctaaagcagcactagtacaagagaagaggaaaagtgtgattgtagcaatagaaaatttgtgggcagcaaagaaagaaagtgatgctgagaaagagcagaagaaagaggagagattcaataaagcatttgcacttgaagttgatcgagttaacacagaaaaggcacttatggaggtgaggaaagaggagattgaattacagaagcgaagagacgaagagaggataataaatatggatcttagtgggttgacagaagagcaacagagttactacacgaagttgtga

SEQ ID NO: 7327 - DNA, 1506 bp, Zea mays
  Peptide Sequence Number=SeqID_49106
atgagaccatttcaggtgtatgaccacgccacgccacgagaaggcttcaactccccctaccctgttcaaaggtcctcggtgcctttaccgaatgtcttggggtggactgggctggaattctcgcgccgcaacgcgacgcaatgccccacccgcacggtcgcgccgcgcagcgcaggaacccccaccacgcggtcggcgtcggcgtcggcggcggtgctcccgcctccccgccgtcggcgtagctcccgcgcgcttcggccctgggcgccggtgtggtttctccatcacgctctctcgcgcttcctacctgcgtgcgccctgctgcccggtgatggccagccgtctcttcgtgctccgtcggcacacgaggtggtggcagcggcaggcgccacggcctcgctcgctttgcccgccgtctcacggtggggactcggcgtcttcccatgggacgctggagctgctcgcgcgtctgcgcagctcaccatcgctcgaaagaaggaagagcggcttgttgtggcactgaagaaaattgaaccagaggatccatcagaacctacacatgatcccgaggtgcttacacctgaagagcacttctatttcctcaagatgggccaaaaatgtaaaaattatgtgcctgttggaagacgtggaatttaccagggagtgatcttgaacatgcacttgcattggaaaaagcatcaaactctccaggtaattgtgaagacatttacaccagaggaggtcaaggaaattgccatcgagttagccacactaagtggtgggattgtgcttgacattcaagatgggaacacaattattatgtacagagggaaaaactatgcacagccaccaccagagatcatgtctccaaaagtttccctctctagaaaaaaggcactggataaatccaaatatatggaaaagctcagagctcttaggcggtacattcccagacttgagcaggagcttgaagatcttcatgcacagatgaagttagctggagagcatcaaggacaaaatgcagggaaacatgttgcttcaatttcacataatacaaacagtatgccagtgagaaaagaaccttgtggttcaattcgcaacaaaacagtatctgatctcctatcagaaactgtagagggatccaagaggttagaggatgaaagttctgcgattgaagacgactcagcttcagagtctctgtcatttacagagtctgaggatctctctgacatttttgagacagaatcagaggagcaggaagaggacaacaaggatcgccccttatatctcgataggctggataagtttccctcaggaaaaaatgataatgaaccagatgattttgaggagcatctgcggaggatcgcttcactttcagataagactgattcaccttcaaaagaactgaaagtgtcagagctcgatgagattgataaaatctttctgagagcaagtgacgcaaaagttcagctgatgcaagaacgatctcactggtacgccagctga

SEQ ID NO: 7328 - DNA, 204 bp, Zea mays
  Peptide Sequence Number=SeqID_49107
atgggacctcaatggtgggtcggggagtccccgccttggttcagggagggtctctatggctgcgcgatggaggatactccaccggggctcaagggcaatgggcggccaacgggggctcgccggagttactccgccgtgggtggatttgtcgccgttgctcagccacggatagaggtggaagagttggtccgcgccgtcggatga

SEQ ID NO: 7329 - DNA, 687 bp, Zea mays
  Peptide Sequence Number=SeqID_49108
atgaagccgacagaaatcgtggaggcactgcacagctacagcatcggccctagctccagcctcaccgaggtcctcaccctcttccttgctagcatcgtcggggaaggtgcgatattgcctcaatacctcaatataagtgaagatgagtacaggaagaccattaaagtaaatgtgataagaccttggttcctaatgaaggtcatacttatggcgtcgccaccacaaccaaagcagctggtgctcgctacgtcatccacggatccggacctggctgccttggacctccgcaccggcgtggaggactatgtcatccacggatctaggcctggctgcctgggacctctgcacctggtgtggaggacatttgcctctgccctggcgcttcccgccctcggtcgctcgcctcagttgccgaccgcttccttgccttcgctcaagcttttcccgctggccataactctgggaccatccacatctactactgggacaagccgcaagtggtcgtctagagcttgcggcgacttcacccggggcaacgacactggcggcgagtccatctacggcgccaggttcaccgacgagaacttgaagctgcgccacacggggctcgacgtgctctccatggccaacgcggggcccgacaccaacgactcccagttcttcatctgcaccgcacagacgccctag

SEQ ID NO: 7330 - DNA, 729 bp, Zea mays
  Peptide Sequence Number=SeqID_49109
atggcgccgagctgtgttacctcggcgccacagcctgtggcgccgagcttcgggtccaaacgtgcaaataaaatttctgggggtccaaacatcgacagctcctgcccatctcagagtccatcgccgctgatcctgcctgtgcctgcagcgaaacacgcgcggggcaaggacggagctggtaagccgatcgagccggcgagggtggacaagatgatgatggccgaggtggtggccaaccacagcaaaaggagccacaccgacggctacttcagtgccaaagccgccgtcgccgccgccgccgccgcgagcccgccagaggagttgggaagcatgcccatgtcctcgaagaagccgaggccgaggaatagcaacagcccgagaaccgcgcccgtatcgcccaaggagaagaaggacaggatcggcgagagagtcgcggcgctccagcagctagtgtcgccgttcgggaagacagacacggcttccgttctgcaggaggcctcggggtacatcaggttcctgcaccagcagctccaggtcggtgttccaccagtcctcagctccccttacatgcgtgctcctccggctgccggcgccgcgcctgaggatcccgagcactacagcctccggagccgcgggctgtgcctggtgccggtggaccagacactgcagctgacccagagcaacggggccgacctgtgggcgccggcgaacacgaccaggcgcaggtga

SEQ ID NO: 7331 - DNA, 396 bp, Zea mays
  Peptide Sequence Number=SeqID_49110
atggtggtgcctggtggaggcggagggggacacgaggccgtggcgagctgggctccagcgaccagtggaaaaggcggaggggggcacaaggccatggtcgggatgggatccagcggctggcggcgagctcaggaatggtggagggcggcgaccgggaagagggcgagggcatcaggcaccaccccgggaagagggcatcgggccatgtcgtcgcttggtttgcgcagaatgggagggagggagggagacgtgagatgggggcacaatcatcgcgtggggatgggggccggcccgcgtggtgacgggggcgacgacattttcgggaagctcggcgccatagcctgtggcgccgagctaacacagctcggcgccacagcctatggcgccgagctgtga

SEQ ID NO: 7332 - DNA, 165 bp, Zea mays
  Peptide Sequence Number=SeqID_49111
atggggttcacgaaggttccactaactccagtgacggacccaggattttatggcagcctaggctatattggagcacaaaattgggaattggaatcagctttcctaagttatgttgtttggttgcacgtggaattgggatatggaatcagagccccaattccctag

SEQ ID NO: 7333 - DNA, 324 bp, Zea mays
  Peptide Sequence Number=SeqID_49112
atggcgtcgcgaaacgaggcggaggcgcaggggctcgacggggcgacgatggtggactccggctgcgcaagaaaacgctccggtgagcgtggaccggacgcagcagggagggagagggcacacctaagggtgtcccgactagctgacggtaaggcgaagctcaccgtggcactaggcggggcaggggcacaaaggtggccacggaacaggcagtgggcgtcggcgggccatggtggagctctcggtttgcgcgggcaaagtgagagagagggcgagggagctgggcagagggcgcaaatgagagagaggaggtgggcgagctag

SEQ ID NO: 7334 - DNA, 258 bp, Zea mays
  Peptide Sequence Number=SeqID_49113
atgaagaaggatccatccagaacggacagacacttctctgaagtcgtcctcagtggccaaatcccctccctccccacacccatcttcgtctcaccccgccacgcccaccgcactagattccctatcctcaagccccaccatgcctcgctggtggccagcaccggcggagacgtcatgcccgtgccggacgtcgacactggcttgcctctcatcgaggtgcccttcggcgagtacggtttcagcaagcgcaacgtctag

SEQ ID NO: 7335 - DNA, 336 bp, Zea mays
  Peptide Sequence Number=SeqID_49114
atgaggcagctgatccggcggctctcccgcgtcggcgactgctcgccgccgccgtcccactcccaggagacgaggaagggcgaggctcacgcgggggtgccggaggggcacgtgccggtgcacgtgggcggcggcgcggacggcgcggaggagcggttcctggtgcgcgctgagctgctgggcgcgccggctctcgcggacctgctcggccgcgccgcgcaggagtacgggtaccgccatcagggcccgctccgcatcccgtgccccgtcgccgtcttccgacgcgcgctcgcctccgtggccgtggccgccgccggcgacgaggagggcgactga

SEQ ID NO: 7336 - DNA, 240 bp, Zea mays
  Peptide Sequence Number=SeqID_49115
atggctactgcccgagggatgagcccgaccctgcatgacttgcggctggctcgctggggcgaagaaggcaaatcgccgcgtaaggagcgtgttaccaccccgcggcttgttccctcccctgaggcgggcccgggggccactgtcggtaccctggatcaggggtacccctactacgacggtgcccaggccatacagcaggcggcgtgcccgtctaatccgaacagtatgcccaagctgtag

SEQ ID NO: 7337 - DNA, 309 bp, Zea mays
  Peptide Sequence Number=SeqID_49116
atgtccgcgcgtcgccacgcggaatgggtctgcgattgcacggtgcccatggcctgtacggtgctcggtggtactggacctggtgttcatggggctggagaacttcctgaagctgaatctacggtcaggtgtcattggttccagatgcatatgtatggatcacaattcttggggctagcaggacacatgaaataccctttgttcctgcgatctcctgaacaaaggactgacataatggattctgctgttggaaatttggattttcctgaggagttagagactatagtttcccacactggcatcaattaa

SEQ ID NO: 7338 - DNA, 984 bp, Zea mays
  Peptide Sequence Number=SeqID_49117
atggcgtccgcgtccgcccccgaagtggtggtggtcttcgacttcgaccggaccatcatcgactgggacagcgacgactgggtcatcaccaagctcggcgccgccgacgccttccagcgcctgcgcccaaccatgcgctggaacccgctcatggacaggatgatggcggagctccacgccagggggaagacgcccgaggacatccgcgactgcctcaggagcgcgccgctcgacacgcacgtcgtttccgcagtcaagacggcggcggcgctggggtacgcacggcacaaccacaccatgccgaccacgttctcacctgccgctgcagcacttgcgtttgggaccgaccgaccgatgttctttgatgctggcaatggcatggctgctgctgctcccgtttgcaggtgtgacttgaaggtggtgagcgacgccaacaccttcttcatcgagaccgtcctggcgcaccacggcgtgctcggctgcttctccgagatcgtcaccaatccggcgagcgtcgacgcggacggcaggctcaggatctcgccgttccacgaccccgcgtccgcgccgcacggttgcagcctctgccctgacaacatgtgcaagggcaagatactggggaggatccaggcaacaggcagtgacaagaagcggcgccggcgcttcatctacatcggtgacgggaagggagattactgcccgtccctcaagctgggggaaggggaccacgtcatggcaagggagaactaccccctgtggcatctcatctgcgacaacaagcagcttctcaaggctgaggttcatccgtggaacagcggcgaggaactggaaaagacgctgcttaagttggccggcgaagtgatcagtccacctgcacaggcttcacaatttgactacagcaaatgcgagatgagcaatccagcatcctgccctccgtcgtgtgccgcactgattaccgaccaactcttagttcgcaagtactga

SEQ ID NO: 7339 - DNA, 303 bp, Zea mays
  Peptide Sequence Number=SeqID_49118
atgacaagggagaccttggacagcaaggccgaccgagccaagggactcctacacctccgggatacggataccttactcgtcaccttccgtgaaagcaccctcggcggctttcccgacctacagcagatatctcagtacttggagcaattacattttgctcttacattcccttacaaatgggactctagctccattcccgcaggaatgaactacctccacaccagaggcgggccgacagtaattgcagcaatgaacgtgcggaagcagcggtccaatcacctacaggctcgcaccctctcctaa

SEQ ID NO: 7340 - DNA, 753 bp, Zea mays
  Peptide Sequence Number=SeqID_49119
atggcctgctactttgacatcatctcagcaatagagttcaataaatcgggacatcatcttgccactggagacaggggtggacgagttgttttatttgaaaggactgatgtcaaagatcatgcctctagaaaagatgctgagaaagctgattattctatcagcaggcatcctgagtttcgctacaaaactgagtttcaaagccatgagccagagtttgattacctcaagagcttggaaattgaagagaagattaaccaaataaagtggtgtcaagcaacaaattgtgcattgtttcttctatccacaaatgacaaaacgataaagttttggaaggtccaagaaaagaaagtaaaaaaggtatctgagatgaatttggaccgttcaactgctcctacaaatggtagtcctggtgaggtgataacatctgctgaattccatcctactcattgcaatacattggcgtatagtagctctaagggctccattcgacttgttgatctgcggcaatcagccctttgcgacaatcattcccaaatctttgagcagcatgaggccccaggttcaagatcatttttcactgagattatagcttcaatttcggacataaaattttcgaaggatgggaggcatattctcagtcgtgactacatgactctgaagctttgggatgttaagatgaattctggtcctgttgcaacattccaggttcatgagtatctaaggcctaaggcggcaggtccagactacctctag

SEQ ID NO: 7341 - DNA, 390 bp, Zea mays
  Peptide Sequence Number=SeqID_49120
atgcaggatgctacatggcatgcacttttgcagtattgttcgttgtttggtggggtggctgacgacctcgacttgaagtactatccccgtcgctcaactggcagtactagaggtgtgattgtcttacccgttggtgaggacaatcccatattgagtagcatggtaaacctagtcgcagtgttcaacatcgagctagaccacgcccttgacgagttatgcaaggctcgtgcggagattgtggaactacatgcgaagcgcgtggagcgtcgccatcaggaggatggttcccctaccactgttgggactcagcgcccttaccgctcaccgccccatcatcgttatgcttatggcacccctgactacaggacctggataaacttggagccctag

SEQ ID NO: 7342 - DNA, 651 bp, Zea mays
  Peptide Sequence Number=SeqID_49121
atggtcggccatatatgccgcaagcagggaaacaggtgccacgcgcggcaaggttccaccccagggcgacgacggcggctagcgaccttacaccacggccacacccaggggtcatcgcggcaaccgtgcgtagccacatggcgtggtccgaggtggggtccctggtgccatcggggcacagcggagctcctcctcggtgcgcatgtaccagccggatttcccgcggcagtagtcatcagcgccaacgcgggtaggagtacaggcacgtcatccccattggttcaacccagacggtgcatgcatcgacgactggaacttgggttcccgggatccttcgacgacgaggcttgttcccccacgatgcgcgatatcctctctctcccaacatcacgcatagacctgctcgagctacggaaggaaaggaacgtgggtggactacgtatcaagtctgatacgaagcaacccaggaaggataggatgtgggcgtatatgaaggcctgggatctccgtgaaaattggtcagcgttgagccaggataactgcccagagatgtttagcggacatgggatgaacctgggcgacatcacccgtgacgtcatttccggcgagatgaataaccaaacaagtctcgtttgtttcctttcattttga

SEQ ID NO: 7343 - DNA, 360 bp, Zea mays
  Peptide Sequence Number=SeqID_49122
atgaggccgggcaaggtggcggctcaacggtcggcggccaaaccgtcaaaacgctctgcagatccgagcgcgagggagaggaaagcagacgtcgtggttgtgtgcagcttggtgcctcgaccctggcggtttggagaaggtaaaatagagactgcatgcacaggacgtgggtatgcatcaaggttgagggaagttgcagctaagaagagcaagagaggaggttttggagatggtaaaaatgacaggtcgggcctgcagccccgggaggccaggcgcggacgcgctacgcgcgtgtggggctggctcacgggcgctgctgtgcgttgggccacgcgggggcacaacaatgtaggggcctag

SEQ ID NO: 7344 - DNA, 204 bp, Zea mays
  Peptide Sequence Number=SeqID_49123
atgtcgccgctttacatttctgtgccggtagcagttcgtaggctcgggcggttcgctgccgtgtctttggcgctcggccgcggcatgttggctggagaaagaaatgggaggagagagatagaagagcccgtgactgaggatactggtgagcagcagatagagactgctgagcaggagctcgttgaaggcaagttgtgcccttga

SEQ ID NO: 7345 - DNA, 957 bp, Zea mays
  Peptide Sequence Number=SeqID_49124
atggcttcgacaaaatacctcttaaggaaacaggaaccagcagcgcatcagctgaaaacagcagcagatctgtccagattacagacagaacatgatggcctcgatcttcagctgatgcgcgaggttgctgaggtcgatgtggcgtcgtcgatggaagagcgtaggcgtccacaccggtatagtgcacggttctgcctcccacctccgacatccaccgctccgctccgatctcggatggtggtcacgctttcatcgctgccatcaacggtctcattcccacgtccgcggccgcccccgcaatcaactccattgcccccacaatcccaatccaatcccggcgctcaccttccatcgacgaagcggctcttcctcgcacctcgttatgcccaccccgaccatgacaagtgggcccttaatgtcagcgtccccctgcacttcctcgcgcttgcgtcccagcaaacacctctctgtctagggttgccgccgcccgatccagcagccatggtgacgcccctctgccccacccctgccactacgagaacattcaggttgtcggtcgcacggttcctcgtgccacgtgtcccttctcctccgtcaccgcccgactccctcgcgtggacagcgctgcgcaacacaggagagcgggctgctacttcgtcccaggtcaaggtgagcctccctctccctgatccgacacgaagtgttgagcatctcgtgggcgtgctcgtcgtcatggaggtcgagccagcactcgagcggctgtccggaggcgacacacgcggcggtaacagatccgacccaggtcaaggtgagccccctccccctgatccgacacggagtgatgagcgtctcgtgggcgtgctcgtcgtcgtggaggtcgagccagcactcgagcggccgtctggactacagttcgagctgctcagagctctcctcgcgcgggactgtgcccattag

SEQ ID NO: 7346 - DNA, 1524 bp, Zea mays
  Peptide Sequence Number=SeqID_49125
atggcaattgacctgaaccttcaggaaacgatgagccttattacggaaaagcaccagggaaggctcatcgccggtgcagtgctgctggtcaccaccatagtctccttcatcaagctcctcctcatgtggtccgactccagagtccgtagccgcagtcgactgccgccgaccatcccggccgtgcctatcatcggtggactgatccggttcatgcgcggccccatctcaatgatccgggaggagtacgcgcgcctcggcagcgtgttcaccctcaacgccctcggctacaggatcaccttcctgatcggccccgaggtgtcggagcaccttttcaatggcgccgagtctgagatgagccagcgggaggtgtaccgcttcacggtcgcggcgttcgggcgaggggttgcgtttgatgtgccctactccttgaggctggagcagatccggatctttgccgaggggctccgtggcaacaagctccgaggctatgccaccctcatggtttgtgaggccgaggagtacttctcaaagtggggtgagagcggcacggttgatctaaagcatgagctggagcaggtgatcctacggatcaccagtcgatgcttgctggggagggaggtgcgtgagaatctcttcgacgacgttgccacactcttccacgacctgtgcaacgggatgcagccggtgagcgtcatcttcccctacctcccgatccccgcgcactggcggcgcgaccgggcgcgccaacggctgagggagatgttcggcaccatcatcagggcacggaaggcctccgggcggtccgaagaagacatgctgcagcgcttgatcgactacaggtacaaggacgggcgcgccaccacggaggacgagatcgccgggctactcatcacggtgctcttcggcgggcagcagaccagctctatcacctccacctggaccggggcctacctgctccagttccgacgctacctggcagcggccgtggaggagcaggaggaggccatctggcgtcacggagataggatcgaccatgacgtctttgcggagatggacgtcctgtaccgatgcatcaaggaggctctccggctccagccgccggtggccataatgttccgctggtcgcactccgacttcgccgtgaccacgagggaaggcgaggagcttgtcgtccccaagggccagatggtggcggcgtcgccggccgtcgccaacaggctcccccacgtctacaaggacccagacttgtacgacccagagcggttcgcgcctggaaggagcgaggacaaggcggcaggtgccctgtcctacatctccttcggtggcggcaagcactggtgcctcggcgagttcttcgcctacctggagatcaagacggtgtgggcgcacctgctcaggaacttcgagatggagctggtgtccccgttcccggagaacgagtggaactccatgctcgtcggcgttaagggcaagctgatggtaaagtacacgaggcgcaagctcgtcgtcgtcgatggcaaataa

SEQ ID NO: 7347 - DNA, 381 bp, Zea mays
  Peptide Sequence Number=SeqID_49126
atggcggggagggcgttggccaccttctccatggccgtgttcgtgctccgcaagttcccgggcgctgaggcagacacagagggccaccatgacaccgtgagggtgtacttcgaccgcgtcagtggtgatgatggccagcttctcctggttgcagttgacgaggacaaacccgagcctggacgcggcgaggcaaaaggcaacggcgtagccaatgccgttggtggcggtagtcaccacagtccaggtaccgtagcggcaggcacaggcttgcccaggcagagaggaacacgacgtagacaaagaacgccgagcgcgaagcggatgccgtgtggacgaccacgaggaggcagcacgaacgtccacaaggacggtaggtggtag

SEQ ID NO: 7348 - DNA, 393 bp, Zea mays
  Peptide Sequence Number=SeqID_49127
atgtcgaagatgtctgagaaagatgcttcagatgcgaagcctggactagtcagacttcgctataagtataagttcgaatatgaatttgggagccttgtgatgaatgacaacaacgtcaaggatgaggatgtcgtcacaatagccttggcaacgaagaatgctacgctgcctattgtagatgtggtgaagccaaagagcccaaatgttcaaccagtgcctccagcactaacaccttcggcgatcatagttgttgaagagaaaactggttctgcgaagcttgtgatggtaggggacaagggcaaagggcccgcaaaaatcaaagaggccaagaaggctattgaggatgacacgctgcttggtgatgggccttttgatcaagagcttggaggctga

SEQ ID NO: 7349 - DNA, 120 bp, Zea mays
  Peptide Sequence Number=SeqID_49128
atgtcccctgaagatttctcagactgcctcacctacactcatataaagggccttttcttgagcaaagccctaaagacaaggaaaatgttgagggcaaagatgcccaaagagaaattgtaa

SEQ ID NO: 7350 - DNA, 453 bp, Zea mays
  Peptide Sequence Number=SeqID_49129
atggagaacaaccgcaacctccgagacttcttatcccaagtcggatcttcctcctcggctaggatcccacatggccgtgaagctcccgaagaagacctgggcatcttctaccagacgccgttgtctcgggcaccttctatcagttccccagccgcccgtctacacattgaagatctacatatcaactcccttggtaatgactttccaaatttatcctcctaccaagaagttctccgtgtgggagtcatgagatccagaggtggctcacaagtttttcgtggccaaggtggatctagaggatgtcgtggagctcggggaagggccacagttactcgtggtggacgctctggtgtcaacccaaccactgaccatgtccttgttcaagatctgcaacatgaagaagaaaatgaattggacactcaatctccagtgatattaattcagcaatactag

SEQ ID NO: 7351 - DNA, 603 bp, Zea mays
  Peptide Sequence Number=SeqID_49130
atgaaatcactggtccacgaccgacccgcggcggagtcgcgcggtgtgcggcggcgctgcttcctgagcttcggtttagtggatgaagaaaggatgtggcgtcgattggagagagaaggggttaagattaagcaaggtcgatcgttatttatgcgcccgaatttccagacggcaaaccatacgaaccaatcgtccccagctcacggcggagatccagggagtggtttgcagtggctgttgtttgctgcaatttcggggttggcggagctcgggattctgttgcgattacggtccgattcttacgccgaggtgggagacgagctgcgcaaccgatcatggcgggggtcgttgcggcgaactgcgagaatcacggcggaagaacagcgcccagcagacttggtgccgcacgaggaagaaggatgggctgacgacgcggccccacgcgtcattggtccaaacaggtgtccacggaggctgaaaagtgggccccagcgtcagcaggcgcaagtgcgcagtggatgggccgcgcagaggtacctcgggctgggccgaggtttcctcgggttcgggtgtgtcattgagtttgacgaatggttgatatag

SEQ ID NO: 7352 - DNA, 537 bp, Zea mays
  Peptide Sequence Number=SeqID_49131
atgaaatcactggtccacgaccgacccacggcggagtcgcgcggtgtgcggcggcgctgcttcctgagcttcggtttagtggatgaagaaaggatgtggcgtcgattggagggagaaggggttaagaataagcaaggtcgatcgttatttatgcgcccgaatttcaagacggcaaaccatacgaaccaatcgtccccagctcacggcggagatctagggagtggtttgcagtggctgttgtttgctgcaatttcggggttgacggagctcgggattctgttgcgattacggtccgattcttacgccgaggtgggagacgagctgcgcaaccgatcatggcgagggtcgttgcggcgaactgcgagaatcgcggcggaagaacagcgcccagcagacttggtgccgcacgaggaagaaggatgggctgacgacgcggccccacgcgtcattggtccaaacaggtgtccacggaggctgaaaagtgggccccagcgtcagcaggcgcaagtgcgcagtggatgggccgcgcagaggtga

SEQ ID NO: 7353 - DNA, 462 bp, Zea mays
  Peptide Sequence Number=SeqID_49132
atgatgagctacttccaaaccactacttgcaagcctcaaagcagggtcgttgtgaacaaacctataccaggtcttgggagcacaagtcagcatccgttatattcacatgctctcagattccacaggctgcaacagaaggtgtacccaaggctacttctcgttgctgctagccacaaaaggcttactcctgtatgtgtcttaagtggaaagggaaatgctggcactgctgatgatgttttgtccaagccagttgttggtagaattgtcatactccttgaggtggattacgggcctgtttggttcgtggctaactgtgccacactttttctaagtactgatattggatgtttctgctatcgcttgtgcggcttaaattgtaaagttagtgtgataggaatcacattcaatggtacttctgcctacggtgaatctggaaagttccattacaacactagaagttag

SEQ ID NO: 7354 - DNA, 1218 bp, Zea mays
  Peptide Sequence Number=SeqID_49133
atgcgtgcatgtaccatcgaagagcactacagaaagaggcctgacggagtgcgagttcggaacctgccggaaatcttcagttacatgtccttttcttcatcctccatcacagttcattcgcaaaagaaaaggaaaggaaaaggaaaggaaagaaaagaaaagaaaaggaaaagtataaccgatacacggcttttgcctgtatgtgctccgctcactcggtcgctccatccatggggacggacgtccaaacccaacgcaggggcggcgtcggtgggcgtgtgctacggcacgagcggcgacaacctgccgccggcgagcgcggtggtgggcatgctgcgcgacaacggcttcacggtggtgcggctctactggcccgacggcgacgcgctggcggcgctgggcgggagcgggatccgggtggtggtgggcgcgcccaacgaggccctgccggcgctggcgtccggcgcggccgcggccgcggcgtgggtccgcgacaacgtgcaggcgcacccggcggtggcgttccgctacgtggtggtgggcaacgaggtccccctggagcaggcgccgctgctcgtgccggccatggagaacgtgcacgcggcgctggcggccgccgggctgggccacgtgaaggtcaccacggccgtctcgcagggcgccatcgccgtgcacctgcctccgtcggcgggcgagttcacggaggaggcccgctcgttcatgggctacgtggtggcgttcctggcgcggacccgcgcgccgctgctggccaacctgtacccctacttcgtctacacgctggggctgggccacctgggcatggacttcgcgctgttcacggcgcccgggacggtggtgcaggacggggagtacgggtaccagaacctgttcgacgccacggtggacgcgctgtacgcggcggtggggaggctcggcgtcgccggcggggacggcgtcagggtggtggtgtcggagaccgggtggccgacggcgggcggcgccgcagcgtcgctggagaacgccaggacgtacaaccagaacctggtgaggcacgtgtggaagggcacgccgcggaggcccaggagggtggaggcatacgtgttcgccatgttcaacgaggacaagaaggacgccggagtggagcagaactggggcctcttctacccgaacatggagagggtttaccccatcacctttggagccggacggcgacactga

SEQ ID NO: 7355 - DNA, 852 bp, Zea mays
  Peptide Sequence Number=SeqID_49134
atgggcgattctgactcctgcgcgcgcatttattgctctgcagggagccgttggcgcggaggtgtaagcctaattccctttcactcggcccccgtctcggcctcggacgacaaactccacctcgcccaacccagggctcagactcggcctcggctccggaagacgacgaactccgcctcgcccgacccagggctcggactcgtcctcggctccgaaagacgacgaactccgcctcgcccgacccagggctcggactcggcctcggctctggaagacgacgaactccgcctcgcccgacccagggctcggactccgcctcggctccggaagatgacgaacttcgcctcgcccgaccccagggctcgaactcagcctcggctccagaagacgatgaactctgcctcgcccgacctcagggctcggactcagccttggcctcagacgatgatctctgcctcgcccgacccggggctcggactcgacctcgacctcggaagacagactcgacctcgacctcggaggagccaccgcctcgcccgacccagggctcggaccgaccacgtcacagggggggccatcattaccctacccctagctagctcaggctacagggaacaagaccagcgtcccatctggctcgccccgggctctcatacgggaaggttggccgcgcggagaggacgggacggcgcgtacaagcctctcgctccctcccacgcggacgcttgtaaccccctaatgcaagcgcacccgacctgggcgcaggacaacacgaaggccgcggggaccccccggggtcgaaacgccgacacaaatattgaagaaatgattctctcaatggatgctcaatag

SEQ ID NO: 7356 - DNA, 1239 bp, Zea mays
  Peptide Sequence Number=SeqID_49135
atggccgccgccgccatcgaagcagctggtcgccggaagggtagctgcttcttggaagtcggccgccgcgagatcggctcttcattcccccgcgtctcttcccgccgaatcagcggctccgagtatggaaaattgcatggtcatgaaggctgtgttaataccgtaagcttcaaccctgctggagacctccttgtgtctggttcagacgacacaaacatcatactatgggactggctttctaaaactaaaaagcttgtttacccttctggtcaccaagataatgtcttccatgctcgtgtgatgccgtttactgatgacagcaccatcgtaactgttgctgctgatggccagaatccttactatttttcaattggtggttccgacgagtatgcacgtttgtatgacatgaggaaattccagttggatggttcaagaaacacaaaccagcctgtagataccttctgccctaagcaccttattaagggtgcgagtgcgagggtccacatcaccagtattgcatattcctatgcaagggagatacttgtatcctacaatgatgagcttatctatttgttccaacacaatataggtcttggtccaaatcctgtgtcggcagagccagagtttttcaacatgcttgatcagccacaagcatacagagggcacaggaattttcgaactgttaagggagtcagtttctttggacaacatgatgaatatgttgtgagtggatcagattgcgggaatgtattcatatggaggaagaagggaggtgaattgatcaggatgatgaatggtgacaaaagtgtagttaactgcattgaaccccacccgcatttcccatttatggctactagtgggattgataacactgttaagctttggactcctgcagctaaaaaattgattatgccgctgcctaaaaatgcaaagcaaattgcctccgagggtttaaagtatagagtatttaggtctcattggctgatcttcagagtgatgaagactaggcatacaggagatcagactgcgtgcagaagatgtccaagggttgaggagcaagtcgtggtcgtcgccagacatgaggagcgagccatggtcattgagcgcgacattgagcgcgaggcaggatatggcgtcgccgccgtgtgggcatggatggagcagtgcaagtcgctggaggggatcacgagggcaagcacgtacccaaacacactcctgaccaggaggttggtgatgtag

SEQ ID NO: 7357 - DNA, 507 bp, Zea mays
  Peptide Sequence Number=SeqID_49136
atgtcgaacaagtgcgcaagaatgaagtataatcaagtagctaattggatttccagtggtgtcattggatttttgctatgtgcaaaagaaggtcatgcagtgaacttcttaactcctgtgaatccaattgagaaaatagaaggagcagcaaacacttattgcatagcaaaagaaggtcgtgcagtgaacttcttaactcctatgaatccaattgagaaaatagaaggagcagcaagcacttattggcaaatattttttgtgtcgacttttgctaaatttacagataatcaagtagctaattggatttccagtggtgtcattggatttttgctatgtgcaaaagaaggtcgtgcagtgaacttcttaactcctgtgaatccaattgagaaaatagaaggagcaacaaaagctggaagggaactcagattttacaattccgaggagaaaccaaaagaatcagtgtcagaaccgcagaagataaagatattgccaatgaccaggtgctga

SEQ ID NO: 7358 - DNA, 258 bp, Zea mays
  Peptide Sequence Number=SeqID_49137
atggcagttcacggctggcggctggcaagcggggtgcgggcgggcgtgcgggtggtggcgggcggttcgcggctggctactgccaagcgggggctgactgaaatttacatgaacaccttttttggtcaggctggttcaatgatttgggttgctgacaaagtccttgatcattctcggctgaagacaactaactggaaatttatcattcctcgtttatactggaattaccgaaatgacgacgtgctgctaaatatttag

SEQ ID NO: 7359 - DNA, 1030 bp, Zea mays
  Peptide Sequence Number=SeqID_49138
ccttgcagagaagaagacctacacgttaactctgccggaccctcctctctgtagcaggtacatctttggctcgtcatatggttggattgtcaccgctgatgagaggtctgagttgcacattgtaaaccccatcaccggcgaccagattgccttgccatctgtcaccaccattgatcaggtgaagccgatctttagtgatattggagtcgtttgcggatatgagcactcagggtactctggggtgtgggaagtttcggacataccgtccatatttgacctcagtgagctacgtgaccacctcttccacaaggtcttcctctcttcagatccatccgcgggagactactttatggtgctcatccataacccacactgtcagctttcctttgcaagggcaggggatgataaatggacttggttgccacaaggtgattcctatgatgattgcttatttaatggtcaattgttgtatgcctgcactcaactaggagaaatccatgaattcgatcttggtaccccaacaatcacgcacaagatatttttgggtcgtgttaaagatctctatgacgagaagatttacatggttcaagcttcatgtggtcagatgctgcaaatatggaggtccgacgacactatagaagaaggggataacgaagatgaatatgatccagattttggacctgacttgccttggcatagtacctccatgatcaaagtttataaactggaaccaacttcaaaaaaacttgttgagataagtagtctgggtgcgaatgtgttgtttcttgggcacaacctatcactttgcctccatgcagaagaacacccacagctgaaagcaaatcatatctacttcgctgatgacgaaccatatacatatttcaagagtaaacgacgtgatattggtgtatttgacttggaacgtaattgcagcgagaaaatagtatctcctcagctttggtccaactggccagccccagtgtggttagttccaaatccaaggcgaataggcctatcattgtgcaagtag

SEQ ID NO: 7360 - DNA, 492 bp, Zea mays
  Peptide Sequence Number=SeqID_49139
atgggcgccaagtgctgcaacctcattctgcccaaacttctgaaccagacctctcttgcaaaaacacaagacaccaacaagtgttgcaccgtctcttcctgcttatcacaaagattggactctctgctcattcttggggcatggttgatttggaagcataggaacggagcggtcacaagatcttttttaacgagtccagtgtcaactgctggtacatggctgggtagtaatcatcaatcgttgaggactccacaaacaaatgatgaaagtgggtccttaattggtgatatcgtgccaggcaccatcgaccgttacacaaaatgccctctcagtgggcaccatgggatggggtctttcaattggggtattgtgtctcttggcacatttttgattttgaaaacacacatagggagaaagccaagtgggaaactgtcatacccagttggaagaaggctttttagtgtttgtggtaagcttacagttgctctctag

SEQ ID NO: 7361 - DNA, 195 bp, Zea mays
  Peptide Sequence Number=SeqID_49140
atgggtcaaaggacacttgccttcaccaaccagctgctgctcaaggtcttcacctgcaactccttcgaactccaccaacagaccgttatctatgatgctcggccgagctctgtccatggcgggtgggtgtcgcgtcgggacgctacaagaagcgaagaggagaggaatgtggagggtggaagagggcgagcttag

SEQ ID NO: 7362 - DNA, 249 bp, Zea mays
  Peptide Sequence Number=SeqID_49141
atggcgattgagtcagctgagagtaaggtggtgcgacgacacgaatcagcaacgagaaaggtgtcgcacgacatgctcaattgcggggtgtccccgtggcctctatgccaggctgagctagccaccatcaagctagggcgccgcataaccgccaacgcacagttcgacaccgacgacgatcatgccttgttcgacggaatgtcggataaggcccttatcgattgcaccgctcgatcggttgattgttaa

SEQ ID NO: 7363 - DNA, 330 bp, Zea mays
  Peptide Sequence Number=SeqID_49142
atgttggggcgaaggcgaagacgctacccttcgctcgatgccttcgccaacctcgctgcaccaacagaggcaaagcgactggcagcttacacccttcgtccaacatactgcaagacgaaggcctacaatgaagtcgccccatcccgcgaggtcgtcgaccacgaaggcccatgtggaattcgacccattgtaacaagccctgcgtggctaaagggtgactacacatcaagatactcagcaattatcccgtttggctgtagtggactagctttatgtggggttaagatcaagcaattgcttttagttggtcagggtgaagcactagcatag

SEQ ID NO: 7364 - DNA, 492 bp, Zea mays
  Peptide Sequence Number=SeqID_49143
atgcagtacaatggatcaagcagtctcattagctgcgagaagcagaacgattcgaatcgagtttttaatcctggcaagcttgctgcgcgggtcggtggtggagctcgctgcgcgacgagtgagcgaggtagtggcagcggcagcgacgtccgacagcaatgcaagggaggagctctctgccggggctacaggaacagcggcgtttcgccgaggagctgcgcagggaggagaggtggggcgagctgctgctgcgcgagggagaacgagccggggaaaaagaaggggcgccctgctgcaggtagaagaactcgtggggtcctggtggaggtcgctggccaggtcaaggacgacgctggtcagggacggctggacctaggaacgtcgagctgctggattgaacagggctgcacgtggggaggagggcttcctgctgccgtgcctgaagggggcgccaaggggagagaagggggcgccatgggaagctccaagtag

SEQ ID NO: 7365 - DNA, 1354 bp, Zea mays
  Peptide Sequence Number=SeqID_49144
atgaagcagacgtgggagtcgcaggccacgctggaggcccgcatctccgcggagaggcagaatgcgtcgtgctgtcggcccggccctcgccagagaatcgacgagcatggtctacgagaactcggtcctgcggggcgtttcgtcgagcacctgcagcaccagctcgacgcggtcggccttggcttaggcattcgagagcgccatggagacaaacacggaccaacgttggaggaggacgccaccacaggaagatgcgaaggtagtaatccatctgatctgaagctgatggataagtatgaagcatccgagttcaacactctatttgatccgaatacgatggagaagacggcggaggacctgtcgttcgatgttctgtggcttatctttgctaatctggagttacctgaccttgtgcgtgctggatcagtctgttccatatggcgtgacatatacacgagcctatgcaacagtggatcttacaatcctcagcacacaccatgccttctctacacctctgagtctgccggcacaaaggcagcttgcttgtacagccttgcagagaagaagacctacacgttaactctgccggaccctcctctctgtagcaggtacatctttggctcgtcatatggttggattgtcaccgctgatgagaggtctgagttgcacattgtaaaccccatcaccggcgaccagattgccttgccatctgtcaccaccattgatcaggtgaagccgatctttagtgatattggagtcgtttgcggatatgagcactcagggtactctggggtgtgggaagtttcggacataccgtccatatttgacctcagtgagctacgtgaccacctcttccacaaggtcttcctctcttcagatccatccgcgggagactactttatggtgctcatccataacccacactgtcagctttcctttgcaagggcaggggatgataaatggacttggttgccacaaggtgattcctatgatgattgcttatttaatggtcaattgttgtatgcctgcactcaactaggagaaatccatgaattcgatcttggtaccccaacaatcacgcacaagatatttttgggtcgtgttaaagatctctacgacgagaagatttacatggttcaagcttcatgtggtcagatgctgcaaatatggaggtccgacgacactatagaagaaggggataacgaagatgaatatgatccagattttggacctgacttgccttggcataaagaacacccacagctgaaagcaaatcatatctacttcgctgatgacgaaccatatacatatttcaagagtaaacgacgtgatattggtgtatttgacttggaac

SEQ ID NO: 7366 - DNA, 336 bp, Zea mays
  Peptide Sequence Number=SeqID_49145
atgaagaacgttgcactattcgcttcctgtttcactagtcactacctcatggccctctttgcacgatgcatgctgctcctggcgtgtcttggtctaggtgaagatcttcacgtcatagtggatgaagtccacgatgaacatggagaaggtcaaaatgttgacgccggccacacaaacacaacacataacgtcggtggccatacacacacacaaaatgcagtagcaggtcgtgttcgtggtaggcttggtctggtcgagggcgtggagttggtttcattgttgggcgcgggcaacgtgatgaccctgttcacaccaaccgtagtcgggcgagtctag

SEQ ID NO: 7367 - DNA, 867 bp, Zea mays
  Peptide Sequence Number=SeqID_49146
atggccaagcgactcttccactcctgccgctcgccgtctgccgcagccgcggtcagccccacgacgacactcctcccgacagctcacccgcccgttgttccggctccatcgggcggtgcgtgctgcccgcgccgcgtgcctcggcgggggcgggcccagacacctgcagcctgtggcgccgggggctgcaccgtcgactacggcgccgacgacctccctccggcgcgtggaacgccagcgtaccgctggctgaagagctcccgatggcacgtcatcgaggccgccaacgcgtacgcctccgacggcgacggcgacgacacgccccgcctgaagatcgacgcgcggcgccgggtgcggcactcgcgccgccgccgccgccgcagggtgctccaccggaggctggcaggcccggcgagctggtcgtcgggcgacagcgggtggttcagcagcgacgacgacgagccgttcggcgcggggtcggcgctgcacgtggcggcgtcgtcgagcaccacaacggagtcctcgtcgacgggcgcgagacagaacagcgccggcgccgcgaggggggagggggaggctgcggccgcgtcgctggccgggggcttcgcggtggtgaagcgctccgacgacccgcgcgccgacttccggcggtccatggcggagatggtcgtgggccgcggcatctacgacgccgacggcctcgagcgcctgctccgctgcttcctggcgctcaacgaccgacgccaccgtcccgacatcgtggcggcgttcggcgacgtgtgggaggccgtcttatccgacctgccgtcgcagtcccactcccacggcaccgctgccgctgccacctccgccatgtctcacccctag

SEQ ID NO: 7368 - DNA, 648 bp, Zea mays
  Peptide Sequence Number=SeqID_49147
atggcggtcgacaacccgcccgccggcggcggaatcgacgacgtcttcctcacgtggcggaagaacgactttcggccgccgcatctcctcgcttctctctcccgcgcccaggccgtcgtcgccctgcgcaccagcgtccctgcccacgcccgctcagaccgatgccgagcagccctgccgaagactgagctgcgcgcgcccctgcctgaccgcacccaggacgacgcgacccgaagaccttgccgcgaccgcgcagcagcccaggagccgagcaaggaccccgccatcccgatgccccgtcgagcagcgcaccgaccgcgacccgagtccccaagccggaaacggctgccgtttcttctccccttttccctccccacgtcctctctccttcaatggagaccagccaccgtttcttcttcccccggctcgctctctcctcgcccctataaatcatcgttcccgcgccacgccgacccatcccagccttccctctcccacgcctcaagtctgctgcccccgcgaggaaccgttactgccaactctatgtctgccacctgcgtcgcatgccagttcctcgtcggccgccggagcttcgtcgaaacgtggccgtggagttcgcagcaccacacgctcgtcgccaaggcctga

SEQ ID NO: 7369 - DNA, 465 bp, Zea mays
  Peptide Sequence Number=SeqID_49148
atggccgaggagtttgctggcgcattaggtcccaaattcccaaataaattggtgctaaacaaagaggagggagaggccaagctatggattagtagactacctgcgagaaaggcacccacaaggctggccacggcatgccgagtcaaggtgcagtcgcagttagcgaaggtgccgcgggttcaaccatacgcccgagatgcgcgacgaggaagagaaacagaaagagaaatctttgcctggcagatggggaccaccacccagtgcctcccgcgtctaaagggccagtttagctggtccgaagcttgcgcgcggccacaccgtgcttggtcagcgcgcacccgagtacagcgggtggaagaagggagtgctgacgaggtggccccacgcaacagtggcccagaggacgtgcggcgtggaggtgtgaggctgagcggtgggctagaggcatcggcatgtgcgggatga

SEQ ID NO: 7370 - DNA, 147 bp, Zea mays
  Peptide Sequence Number=SeqID_49149
atggggaaaatctatgcgaagctcttcttctctctcccaagtagcttcatcttctctgttgtgactctattgtactttgcacatctttatcaccttatttcttataactctagtcaacgtgtcaagaatcttgacaggatactccgt

SEQ ID NO: 7371 - DNA, 591 bp, Zea mays
  Peptide Sequence Number=SeqID_49150
atgggcccagacacagggcgcgtgggcgcaaagcggaatcccacgacctcggccgtgcgatcaagatcggacggaggagatcaaagccaggagggctggtggggagcactatggacctatgccagcgcactggacagggttgggttggctggacactgtgcgggcgcgtcgagcaagcgcggccgcatgccggtgaggccaaattggctaaaggcaggcgcaaataggaaaaaccaagcacgggggcgggtgtctcacctcgggcggagctcggggtcacttggcgtggcctccgacgagctagaagaccggcacggcgggcgcgggtcaccagcgaagctgagcggcatgggcagagcgcgagagggagcagggctatgtgaaatgggatggggaagtgagtgcgggcgcgcgcggtgctcaaaaaggggtggggcgtgggcgggcgacgtggccgaggattccggcgacgtgcgcgagtacgcgcgctggtccacggtgaggcgcggggaaggcagaactgataggggaggcccacgacgcagcgagggagggagcgagcgcatggggcaacggctcgacgtctggtag

SEQ ID NO: 7372 - DNA, 417 bp, Zea mays
  Peptide Sequence Number=SeqID_49151
atgacgccatcaggccgatccctgctcgcttctcgggggagtccactggtgagcacattcatcaatctatcttatgcaatcttcgttgtcgtcgttggaagccaccatggcgcaacccgcgtgaccccctctcgcccagctggtggctttccctgtgcctcgtgcctcccctggtcgagcggcctgcctgccatggtagagagatcacagggcgtgaccggcccagccccccctccgcacatgaactctgctcctatcctctgcatgagcccgatgggcggccagcaacgccaccggcgagccgcccccttcctggtgctcggccgacgagctcccccccccttgcggcagttatttcttccccctatgaacgtgctagaggttagagaaaggccagatcaaatcccacttttttga

SEQ ID NO: 7373 - DNA, 126 bp, Zea mays
  Peptide Sequence Number=SeqID_49152
atggggatgcgttgtctacgagatgagtacaagtgcggtcactgcacgacggcagtcggggtcagtgaggcattgtacgccaaggcgctaatgagactgcttgatccattgtactgcattgagtaa

SEQ ID NO: 7374 - DNA, 135 bp, Zea mays
  Peptide Sequence Number=SeqID_49153
atggtcaatcacgctggcatcaccggcgctcgccgttatccggccaggctacgtgcctcgacactttaccatgtcgcgtgttctggtgtgttcctgatgctccccgaccccgccaattggactaggaccccttag

SEQ ID NO: 7375 - DNA, 1731 bp, Zea mays
  Peptide Sequence Number=SeqID_49154
atgacccacagcttgagcaaatccgcggggtgcaggccaggctcgacgagggagcaggagcgcttgagccgatccgccgggacgtcgggcaggcatgagcgggccaacccccggccggagaaatacgtcatctaccccagggcttccagcaccgcgtcgccgacgacgtcagggtcaggccaccacccgcatctagtggggtcggccagaacctggctgcagcagcgatgcttctccgcgcgatgccggagccatcaaccaccgaggggcggcgaatccaggggagctcaagaatctcctggaaggcgccgcggtccgacgggccgagagctctgcctcccgaaggcaggggccttcagccgggccatccgacgggcgccgttcccgacccggttccgacccccgactactatcacaaagtactcgggggagacgagaccggaactgtggctcgcggactaccgtctggcctgccaactgggtggaacggacgatgacaacctcatcatccgcaacctccccctgttcctctccgacaccgctcgcgcctggttggagcacctgcctccggggcagatctccaactgggacgacctagtccaagctttcgccggcaatttccagggcacgaggcggtcgaggctatctttcgaagggacaagcagccctagggccgccccatcggaagatgctcccgaggcgtcaactcagcgcggcgccaagaagaagggcaagaagaagtcgcaagcgaaacgcgacgccgccgacgtggaccttgtcgccgccgccaagtacaagaatcctcggaaaccccctggaggtgccaacctcttcaacaagatgctcaaggagccgtgcccctatcaccaggggcccgtcaagcacacccttgaggagtgtgtcatgcttcggcgccacttccacagggccgggccacccgcggagggtggcagggcccgcgacgacgataagaaggaagatcaccaagcaggagagttccccgaggtccgcgactgcttcatgatctacggtgggcaagcggcgaatgcctcagctcggcaccgcaagcaagagcgccgggaggtctgctcggtgaaggtggcgacgccagtctatctagactggtccgacaagcccatcaccttcgaccgagccgatcaccccgaacatgtgccgagcccggggaaatacccgctcgtcgtcgaccccgtcatcggcgacgtcaggctcaccaaggtcctcatggacggaggcatcagcctcaacatcatctacgtcgagaccctcgggctcctgcgtgttgatctgtcctccgtccgagcaggcgctgcgcccttccatgggatcattcccgggaagcgcgtccagcccctcggacaactcgaccttcccgtctgcttcgaaacaccctccaacttccgaagggagaccctgacgttcgaggtggtcgggttccgaggaacctaccacgcggtgctgggaagaccatgctacacgaagttcatggccgtccccaactacacctacctgaagctcaagatgtcgggccccaacggggtcatcaccgtcggccccacgtacaaacacgcgttcgaatgcgacgtggagtgcgtggagtatgtcgaggccctcgccgagtccgaggccctcatcgccgacctggagagcctctcgaaggaggtgccagacgtgaagcgtcatgccggtgtaacacccctggtgttactataa

SEQ ID NO: 7376 - DNA, 1308 bp, Zea mays
  Peptide Sequence Number=SeqID_49155
atggaggggggcagcaacagcccggacgggcagtcgtcgggcggcagccccgaggagcggggaagcggcggtagcggaggccggggcaccggggagccggcgcggtcgcggtggacgccgaagccggagcagatactgatcctcgagtccatcttcaacagcggcatggtcaacccgcccaaggatgaaaccgtccgcatccgcaagctgctcgagcgcttcggcgccgtcggggacgccaacgtcttctactggttccagaaccgccgctcccgctcgcgccgccgccagcgccagatgcaggccgccgcagcggcggcggcggcggcggcggcatcctccgcgtccaacaacagctctcccgcggctagcgcaaccgtcggccttccttctggcgctctacaatatcctttggccatgggcgggaccgccgcctgccagtatgagcagcaggcgagctcctcctcgtcgtcgagaagcactggcggctcctctcttgggctgttcgcgctcggagccgccggggtgcccggcaccggcggcggtgggtacttccaggcgtcgtgtggcgcttcgtcgccgctggcgacagggctgatgggggacgtggacagcagtggcggcagcgacgatctcttcgccatctcccgccagatggggttcgcggcggcgagcaccgtcgcctcggcctctgtggcaccgagctccaacgcacaccaccagcagtattactcatgcgaatcacctgcagcgacgatcacggtgttcatcaatggagtcccaatggaggttcccaggggcccaatagacttgcgagccatgttcggccaggacgtgatgctcgtccattccaccggggtcatcctcccagtcaacgactacggaattctaacgcagaccttgcagttgggtgaaagctatttcttgaggttcctggacacggcttgcctagctgtacccgagcggacgtgtcaagcgctgctgacgccggcgtgctccggcgccggcaggcggcacctgcccctcgatccaccgccccatgctcttcacgtacgctggagtattcggaagtctctcgatctgggcgcgagagagcaaggcagagggtgcgtggtggtgatccagttgtccgtgcgtgacaacgcggcggactacatatatattcttcacccggcctgccgcgttgaactgaagaccagcagtgagagtgagtgcgttcttcttgggctcttggccgaagtgtccatgcacattgcacagcctccatcgccagctgtcgtcgcaagttcttccttcgaccctgcctaa

SEQ ID NO: 7377 - DNA, 327 bp, Zea mays
  Peptide Sequence Number=SeqID_49156
atggattttagtaaggaggccaacgacggctacgccttcgtcaacctgacctcgccggaggcggcttgccgattgcgttggccccatgggggcctaccatacgcactggtgggcttgccaagctgtggcgaagcatcaccaggcgaacttggagtaaagcgcagttgtggccccaccgatgggttcgccacctcacccgaggtgggcctgacggcctctatcggtaccccaagactggggtacccactcctactgggactaggcgggacccctgtggctgtccatagccacatagtgacgggcagttcagcctatctaaggatctaa

SEQ ID NO: 7378 - DNA, 340 bp, Zea mays
  Peptide Sequence Number=SeqID_49157
tgaggtggctgacggtcttaaccttaggtattaccgtcgttattcgactggaagtacggggagtgtggttgtctcacctattggtgaaggcaatcctagattgagtaacacagtcaacctagtcgatgtgctcaacactgagctagaccatgctcttgatgagttgagtagggctcgtgctgagatcgcggagctgcgggctaagcgcatggagcaccgtcaccaggacgatggttctcccgcccccactagaactcagcacccgtatcgctcactgccacgtggacaccatgcttatggcactcctgactatagggtcaagatagatctggatccttag

SEQ ID NO: 7379 - DNA, 159 bp, Zea mays
  Peptide Sequence Number=SeqID_49158
atggccgccatgggcagggacgctcccctgctcggctccgttgggaggatgatgggtcgcgggccgcccattcatcgttggacgtctgagattaaaggagaggcgcgaggtttcgaggatctgaagaatcaccctggtaactggaatctcaagtcctag

SEQ ID NO: 7380 - DNA, 249 bp, Zea mays
  Peptide Sequence Number=SeqID_49159
atgtgcctggacgaggtcgccggtggcggcgcggagcgcgagatgccgtgcaagcaccggttccacgaccagtgcatcctgccgtggctggagatgcacagctcctgccccgtgtgcaggcaccaggtgcccacggaggagccggcggcggggcaattgacggtggcagaggctcaggtgctgagtccagtggcaacgcgcgcggcgacgacggggcgttggacaggaagccaaggagcatcccgataa

SEQ ID NO: 7381 - DNA, 2421 bp, Zea mays
  Peptide Sequence Number=SeqID_49160
atggcgaggaccatgctcgatgagtacaagacttcggaccggttttgggcggaaccaatcaacaccgcttgctacgccatcaaccgtctctaccttcaccgaatcctcaagaagacatcttatgaactcctaaccggtaaaaagcccaatgtttcatattttagagtctttggtagcaaatgctttattcttgttaaaagaggtagaaaatctaaatttgctcctaaggctgtagaaggctttttacttggttatgattcaaacacaagggcatatagagtctttaacaagtccactggactagttgaagtttcttgtgacattgtgtttgataagactaacggctctcaagtagagcaagttgatcttgatgagctagatgatgaagaggctccgtgcatcgcgctaaggaacatgtcattggggatgtgtgtcctaaggaatccgaagagcctccacatgcacaagatcaaccatcttcctccatgcaagcatctccaccaacccaagatgaggatcaagctcaagatgatgataatgaagatcaagaggagccacctcaagaggaggacaatgatcaagggggagatgctaatgatcaagacaaggaagatgatgagggtcaaaggccgccacacccaagagtccaccaagcaatacaacgagatcaccccggtggaagacacattaagggattcggattgggtgttggcgatgcaagaggaactcaacaacttcacgaggaatgaggatgccaagcccatcaagacacccatggaaaccaatgggcatctcgaccaacacacgggaggtaaatccgtagatcaaaagaggtatgagagctccaccaaacacccactaaggtccgtttgggacagctccagcttcaagaaatttggtgaagttaatgaagcagcacccaactcaaccgctgctatcagctccagatccgaccgcctcgatcgggacgcgagcatctccatagcgaccaaccggccgccgcgggtgaccaacccagccgcgctttcccccgtcagatcccctcctagccagccatggccgagccccgttccgccctccgcccgcattgccactgttagtgccatggccaccgcctgccggagcccgctcgtctggctcttcgcgctcgccgccgcgctattcttcctctcctggtacctcctcctcaactccgccgcgggcccaaccgccgcccgccgccccaaccaggggctccgcctcggcggccccggtaggaaatgcgaccccgcggaggcgctgctgcgagtgttcatgtacgacctgccccccgagttccacttcggactgctcgactggaagcccccgggcttcggcggcggcgtgtggcccgacgtcagggacggcgtgccggactacccgggggggctcaaccttcagcacagcatcgagtactggctcaccctcgacctcttggcctccgagcagggcgcgcccacgccctgcgcagcggcgcgggtgcgccacgcggcggacgccgacgtcgtcttcgtgcctttcttcgcctcgctcagcttcaaccgccactcccgggtggtgccgcccgcgcggaacagcgaggaccgcgcgctgcaacggaggctcctcgagttcctcgccgcgcggcctgagtggcgcaggaccggcgggcgggaccacgtcgtgctcgcgcatcaccccaacggtatgctcgacgcgcgctacaggttctggccctgcgtcttcgtgctctgcgacttcgggaggtacccgcccagcgtcgccaacctcgacaaggacatcatcgcgccctatcggcacctcgtcgccaacttcgctaatgacaccgccggatacgacgaccggccgacgctgctctacttccaaggcgccatctacaggaaggatggtggttccattcggcaagaactgtattaccttctgaaagacgagaaagatgtgcatttctcatttggaagtgtagctggtaatgggatcgagcaggcaacacaaggtatgcggtcatccaagttctgcctcaacattgcaggtgacactccatcctccaaccgcctcttcgactccattgtcagtcactgtgttcccgtcatcatcagcgatgagattgagctcccgtttgaggatgtcctcgactattcaaagttcagcgtcatagtacgtggcgcagatgcagtcaagaaggggtttctaaagagcctgatcaaagggatcagccaagaagagtggacacgcatgtggaacaagctaaaggaagtagaaaagcacttcgagtaccaatacccatctcagactgatgatgccgtgcagatgatatggaaggctattgctcggaagcaaactccagctttcaccatgttttcaatcctgccgaaacaagagttgatactgaagaccaaaccttaa

SEQ ID NO: 7382 - DNA, 249 bp, Zea mays
  Peptide Sequence Number=SeqID_49161
atggcgggcgggattgagctcgctggagctaaggagaggtggctggctggtgagggtgccaaaggttcacaaaaggccaataaaaagaccaagaaaagggttcaacaaaaagagcaaagggacaaccgaaggcaccctggtctggcgcaccggactgtccggtgcaccaccagacatgtccggtgcaccagggttctccacgcgctgaactcctcaccttcgggaaaactcagagccgccgcgctataa

SEQ ID NO: 7383 - DNA, 561 bp, Zea mays
  Peptide Sequence Number=SeqID_49162
atgggaggggagtgcccctccgacgaggcgtcggtgcagcggctgatgctcaaggatctggcacaagctattcatttccatctcaagattaatgggctttggatctatgcagcaacatgggaattcgatcagaatccaaatgacttggcacattctaatgagttaaaactagaggaatattttttcaatgtcaaggcactactcatatcatatgtacgagattttaattgtgattttgtgtactcacatgcaaagtggatgatagttgataggttgaagtcttgtgctcacaggggctgcttcgtgatccatatctacattttcaggagagttaaggacagagttgaactaaaggaccttacacagtggcatcgactagatggtactctctcagtgtccagtagtgttcaccatttcgcttgggaaacatcggtttcaggttgtatcatggtatcaccagatcaagcaacaaaaatatacaaggccatgaaggacaagggccttcccgttgatttggttgagtgtgaaggggaacgacatggtttccttaaggctcagtga

SEQ ID NO: 7384 - DNA, 1386 bp, Zea mays
  Peptide Sequence Number=SeqID_49163
atggatgacctgctggagtgcaaacaagcgatgttcaaggcatcaactatgcccaaccgtgatgtcgaggaaattagctcaaagtggagattatcagattactatgatgagctcaaccaggacagcgacactccttttttcttgagtctcggtatgaattatttggtggagatgtcggttagctcgtccagccttggcatgaatgaggacttgccatttgtacctgacacacatagctcattattgcagcaagcggcatgggacagggagcacttcgattatgaaatgcgaaagtctattgctgagattgtcctagaagatgagctctttgatgttggtagttccgttcacagtgttgattcatgcatgcagttcagggatcaaatttgcatgtctaagttactcatcgattcttatcgaatggagttgaagtacaagatagcatacatttctatgtgtcaatgggatcctggaattttgtcactaggtgattggcctataggagggaattttagtccaaggaaatctgatttgatcgggtactgttatgagaaaatgccaccttggaatttaacttcgccttctccggccacggccacgtacacgtacccttgttcaccgccgcctccatttcctcccggtggcaccgggtggaccacgcgcacggcacacctcgtgcatatgcacgaggcagcgcacgcgcgcgcgcgcgcgttccggcgccgacggtggctgagtctgcggttctgcctcgcgccctcgccctcgcccaacacccgtgcggacgaggagacgcacgcgacacgcaaaggctgcgccgaaattaggcccgtcccacgatccccccatgccattctgccaaggcaggcaagcctagcgtcgacgtcggccctggtggagcgagctcaggcggccaggttcgccgacttccctcttgccagtgccagtgccaggtggtgctcgccgtccgtccgtccgtccgtcctcctctgcttgcttccagcacagagtcaagcacgcgcacaacgagggcgcggcccgtctgccggcgccgaggatcttcgcgagctatctcttctcagccggccggtaccagtcgtcgacgcgacccgtcggccttcgatcatgaggccatcgtcgtcgacggttgcagcagcggttcttgtcctcgccgccgtcctcgcctccggcggtaccgtcggcgcggcggcgcggccggtggtggggcacggcggcggcgatcgcgccgccgtcttcgtcgcggtggaggtggcgacgggcacggattcctcggcgcagccgtccaactgcacctacgggaacaacgtcggcggcgtgtgccctccctttccccccacccccagcgctcccaatgctgggcactag

SEQ ID NO: 7385 - DNA, 447 bp, Zea mays
  Peptide Sequence Number=SeqID_49164
atgggcaggggtaggagaggcattggttggcctcatcgtgccaacagcaagagtaagtgcgctctgagtcctccctcgaaggacttcggtgactcagagtactcgaaggaggcctccttcgagtatgatcaatcgctcgctccggcttctcccccggtgtcatttaaggattcggatgactccatagggctatccaccgtggcccgggcgtactggcgctccatcgagcgcgctaggctcagtggcggcgatggtgacggcagcagcagcgacgacgacgacgaggacgacggcagcaagggcgacgacggcaagggtgacggtggcagcgatgatggcgaggtctacggcagcaagggcgacaacgacaagggcgacggtgacgacagcagcggcaagggcgacggcggcaacggcaaggccggtggcataatgccactggtttaa

SEQ ID NO: 7386 - DNA, 1263 bp, Zea mays
  Peptide Sequence Number=SeqID_49165
atggaggcggtggaggaagccaaccgggccgccgtggagagctgcaagaagctcgtcgccgtgctctcgctatccggcggcgacgcgttccggcctatgcctgtggccgcggagaccgacgaggcggtcgcccggttcggcaaggtggtagccgtcctgagcggcaggctcggccacgccagagcaagggttggcaagaggagcccggcgcctcccgtcgtcgatgcaagctgcctcttggatcacccgtccttggcagtggcaccgcgccacactcccaacggcggccacctgctgctcagtgcaactactcctcctctgccacctctgccaccgcatctgctgcctccagctagtatggcgatgcgaagcgctgcggtaccgatgacgatgagaagccaagaagcggcaccggcgccggcggtgctgctggtgccgccttgtgccagcaacgttacactgacgccggccaagaagttcgaccggagcatgttcctagagacgccgctgctggagctgaactcctgcggcgtgcctccctcgccgtcggcgtcgccagccatggccgcggttcagaggaacagcacgaaggtcgcggcggctgtccccgcgcccaatccttgcaccagcgccccgcgcatccagttccatccgccgcaccagcagcagcagcaggcggcgaagaagcagaagagcttccagttcgaccagacgccgagcggcgagcagttccacatcgaggtgccggtgccgctgccccgtgccgcccccgccgccaaggaggtgatcagcttcagcttcgacaacaactcggtgtgcacgtcgtcggcggcgacatccttctttacgtccatcggcagccagctgatcagcatgtccgacgccgcgacgagctccgccgccacggcgaagaaggcgtgtggcaagagagcggaggacagcagcggcgtgaggtgccactgcccgaagaaaaagaagccgagggagaagagggtggtgagggtgccggcgatcagcgacaagaacgccgacataccagcggacaactactcttggaggaagtatgggcagaaacccatcaaaggctctcctcacccaaggggatactacaggtgcagcagcaagaaggactgcccggcgaggaagcacgtggagcggtgccgcagcgacgccgccatgctgatcgtcacctacgagaacgaccacaaccacgcgcagccgctggacccctccgtgctcaccgccgcgaacgcggaggcttga

SEQ ID NO: 7387 - DNA, 162 bp, Zea mays
  Peptide Sequence Number=SeqID_49166
atggcgtggtggcgttggaaagagtctttgccagatctttctgtgatcttatacagggaggtgggagcatatgcatatgtgaggtgggcagtctcattggctccttcacttgagcaggaagcaattctcaaaaactggtcaatcatcacgggtgcaaactag

SEQ ID NO: 7388 - DNA, 1686 bp, Zea mays
  Peptide Sequence Number=SeqID_49167
atggcgtcttcctcctccagcccctcgtcaacttcgccctccaccgcttcacgttctgaataccaagataccgatcatttggccgctcagtccctctacgagacgacgtatcctccgctccccacccgtgaagccgctccaacaacgagcgccgccctcggcgtcgcaccaggcgccatcaacgcctcggccaccgcgcccggcgtctcccgctccaacacacgatctcaaatataccacaccctctggggcggcaccaaacgcgtccccctgcccaccaacatctccctcgccctcgcgcaccagaggagatgtcgaggtcggactcggactcggaactccgcggatgtctcccagccccgccggaataaccccgtgggcttatcccagcacgtctcctacgcgtcgcgcctggacctggattcggggtggggtaccgcaccggccccgacgtccgcgctcgccccgatgaggtcgtccaccgcgaacccgtcgccgcctacgtcggcatggaccaggcccttcctctcgtcgagcaccgtggcctcaacccggacggacaacaggatagccgtcgccgccacgccgccacccgacaccacgctggtgcccgacgcgccaggctacgcgcccgccgtggcgacgagcgttgacaccgagccggagccgaacgcgtccatctccaccacctatttcgcgcccgccgtggcgacgagcgctgacaccgcgccggagccgaacgcgtccatctccaccacctctttcgcgcccgccatggcgacgagtgctgacaccgcgccggagccgaacgcgtccatctccaccacctctttcgcgtccgccgtggcgacgagcgctgacaccgcgccggagccggacgcgtccatctccaccacctatttcgcgcccgccgtggcgacgagcgctgacaccgagccggagccggacgcgtccatctccaccacctctttcgcgcccgccgtggcgacgagcgctgacaccgcgccggagccgaatgcgtccatctccaccacctctttcgcgcccgccgtggcgacgagcgctgataccgtgccggagccggacgcgtccatctccaccacctctttcgcggccggcgtgacgacgagcgctgacaccgcgccggagccggacgcgttcatctccaccgcctctttcgcgcccggcgtgacgacgagcgccgaccgcgcgctagagctagacgcgctcacctccgcctcctcttctgcacccggcgcagacccagacatctccagcattatagacgacttggagaccttgttcgttgcaggatcgggcatgcaagcgatcggcgacagaggcgtgcaccccgtcgacgacttctatccggacctattccaggcgtggcgagaggatgtcgcgtcgcgggcgtggcgagaggatgtcgccccgcgggctgggcgagagcatttcgcgtcgcgggcgtggccacaggatgtcgcgccgcggacgttcggctactacgacatacctgccgccgacatcccgctctgttcggagtgccgcatccgatccgcacagatcgaggctagacattacgaccatttggacatctgcgcccggtgctacgccaaaaagttcgtctgcccgatatgtggctatgatttgggagtgccgccttcgaccggcacacatcgaggctag

SEQ ID NO: 7389 - DNA, 249 bp, Zea mays
  Peptide Sequence Number=SeqID_49168
atggaggagcaaaggaggccacctagctcaaagatggtgccagtgtccatgaaagcgtcctccccaaatgcgacgcttcaaggcatgaagaacagaagccattttcgaagtgacaggaaaactgcactgcaacaagacgtgtgtgtattgttctacttggtgtttagttgtggacaagctgaggaaaaagttgtggcacgagaagaacgtccactgagctctaaagcaggcattcgcgaggccgcttaa

SEQ ID NO: 7390 - DNA, 273 bp, Zea mays
  Peptide Sequence Number=SeqID_49169
atgaggcacgagcgaccgttcctaggaaaggaggttgacgccaatgatcacggagccgacatgttgtcacgtgggcgtcagctcgacacaccgaagcaagatcttggcaccatttatattgacgccgagacatgtaatttcggcgtcaataataataacgccgaggtcatcatcaacaagcttacaacgatgcttacaaaccctaggaagcctgccctttcgctacagtttggtccgccgccacaaaccctacagcttggctcttggctgtga

SEQ ID NO: 7391 - DNA, 438 bp, Zea mays
  Peptide Sequence Number=SeqID_49170
atggatggaagggcaccagtggcggatggttgtctcgtcgtccttgtcgtcatccacgtcaacctcctcatcctcgtcgcggcggcgcgggacggcgagcgcgccgaggcgaggtggaatttacaggcgtgggaggggagaaggggaggaagaggtggtgtctgggttggcgatagcgccatggcggggaggcggtcggggagtggggaggaggagcaggcgggggggcgatgcaagtgccatggcggggaggtgtggtgcttcggggtggaagagctgggggaggggggatccatgggggagatgagccacggggatctgggagttgattgcggggggctgccgcagcgacgccatcgatggaaaggagtgctgcgggcggggccggcgctcagggcaaaacccgtccacccatccaatgtgggacgtctacaatag

SEQ ID NO: 7392 - DNA, 834 bp, Zea mays
  Peptide Sequence Number=SeqID_49171
atggctccgtcgttcctgctggactgcgcgcggcccaagaagctgtccctccccgtgcggctgcacccgctggcggcggcgctgcacgagtcggcgcgcgcgctgctggcgtgggcggacgcgccggcgcagacggggcccgcgtgggtggcggacggcgccgggcgcgcggggcgcgtgctgtcggggctggcggacctgctccaccacccgcaggcccgcgacgcgctccggcggcacccctggacgacggagcagctgctggacgacctgctcctgctggccgacctccacgggtgcttccgcgagtcgctggtggcgctgacgcagctcctggccgagacgcacgcggcgctgcgcaggcgcgacggcgcccgcctcgccgccgcgctgcgggcgcagcggcggtcggcgcgggaggtgtcccgcctggcgtcctccgcgcgggacctctcccaccgcgcgggcgcccgacgacgactccgacgaggccaccctcgcccgacgccttcgcggccgcgacggctgccgtggccgccgcctcggccgcggtcttcgccggcgtgtccgcccgcgtccgccgagtcggcggccagcgccgcgccgtccccgaggaccccgacgccctactctcccgcgcgcacccccggcagcccgataggaggaggaggagcggaaaggcttcacatgggacgggtgcgcgagctcgaggagtgcgtcgacgccaccaagacggagagccacgaggtgtaccgcgcgctcgtgaagcgccagagtctccctgatcaccctgctcaccgcccacgttctgactctgacgacatctgctcataa

SEQ ID NO: 7393 - DNA, 228 bp, Zea mays
  Peptide Sequence Number=SeqID_49172
atggcaggctctcggccaccgacaacactgctcaccgatgagcgcgtcttcctcttcgtggccccgacacacctcgccacgtcgctcacgatcctcgtggtggccgcactcgtcgttgagctcaccgtggacggcttcggctccgccttgcttcgccactttgggactagagcattttttggctcggtgtggttcatggcaagagcttcaagaggctataatttgtga

SEQ ID NO: 7394 - DNA, 378 bp, Zea mays
  Peptide Sequence Number=SeqID_49173
atggagctcgaggacgtggctgccatgggcgggtgctccacggaggagaagcagaggaggcccgcacggagcaggactgagctagagcaccgcgacacacagggaaatggaggaggggccgctgggggcgagtttgagggagatggggaggggatgggggaagagctcagcaccagggatagtagcgtcgcgatgggctgctcggcagcatcaccacggcgatggcttgcaccaccgccagctacatctcccacacggcggtcgcagcaggaacaaggagaagcgaggaacaggggctgggcaccatgggcgagcgcaggggaggagagagatgcgttttcacccgttattaacatctggagattcagatcgatatga

SEQ ID NO: 7395 - DNA, 279 bp, Zea mays
  Peptide Sequence Number=SeqID_49174
atgacgcagcttccccaacgaaccccggcgaatttccaggggctgagcgccgctcgtggagcggacttcaacggctcagctaatccctgcccagttctcgcgcctatatgggtgcccttgacctcgccattcctcgcgaacttaacccaccagcgtccccacgagagctcctgcggcgaacgccattaccgccgcaagggagcagtagagagagaacagcgggttctggcgctggcggcgtattgtggggcattggtgaccaccctgatcatgcggtga

SEQ ID NO: 7396 - DNA, 129 bp, Zea mays
  Peptide Sequence Number=SeqID_49175
atggcggcagagacgggttacggaggggatcccacgccgcggcgacttggcgagagcctggccacatgggcccgcatggcagagggcgacacagaaattggctcaggtgcgacttgggctgcgcggcag

SEQ ID NO: 7397 - DNA, 537 bp, Zea mays
  Peptide Sequence Number=SeqID_49176
atggccatgatcatgccatcgacgacctgctccacctcctctccttcacagagtcggagcttgtcatcgaagctgccacccttcaccatgggttttctcgatgcgctctaccatgtggtgatgcgccgcaatgccgtctatgtcaccgtcgtcgtcatcgattcttccgcaggcgagcagttgagtctgctccctccggcctctctctccgattctccatcccacgttggcttccccacgccctacacattcctggcagggtccttcctagaggcaaagcggctgctgatggccggccgaagatggatggcgcccctggacgccgactgccatgacattgtgcccgtcctcgtgccgcagtttctcagatgggtcgcagactatggtaaattggtgactgtcggtgccagaagcaacttgaaggacgagtgccctagtggccagggtgtcacgctccacaagatcgtgacagccataggaggtggtgtatcggttgctaaggcgcagcgtctttggaaggctgtagtcgggccgtga

SEQ ID NO: 7398 - DNA, 621 bp, Zea mays
  Peptide Sequence Number=SeqID_49177
atgccgccgcattcaaatcaagtagccgccgacgtcgggtccccgaatatcggtctaggagcgtccccaagccttctgggggtgacgcgtcgcccaccggtgaagccggtcgctgggcagggcgcaatcgctcaccggacttcatttcttcgccaccgtccgccttacgtcgcggccggcgtcactgaggcaacgatcaccggtaataagcccatccttgtcttcgttatacattgcgcattgtgtagctacgatgaattggaaaacggggagccggaatgcgtgattgatgtccgccggtcgtgggcgccgccgtggctcggggtgcgccgccgtgcgtgggtgccctgttggggtgatgatcgtgcgcagttggatgaccagcaacggctgcgattagatcatctgcataccgattcgcgtaatgggttcggcgccgttcgatccgcatctggcggacgggaagcgagcgtggaagaggtactgcgtatggtaaatctgaaccgtaggatcccgatccaccgatcaggattgtttaccgattcttataaagcgtgggctaattctggcggccggcgcccccttgactttccagaattgaggcccagtccagtggcgtga

SEQ ID NO: 7399 - DNA, 1065 bp, Zea mays
  Peptide Sequence Number=SeqID_49178
atggcgcctcctgttgacgtggctggcctacgccctaggttgggcgatgtggaagctcctccaaagccgaggtcgagtctgtcttccgtggccgaggtcgagtccgagcccctaggtcgggcgaggcggaggccatcggctgaggccagggcggagtccgagccctggggtcgggcgaagcggatcggagtggcgcaggcggcgctgtccttctgtcaggctgatcagtggagcggcgaagtgacggcggtcacttcggctctgccgaggggcacgcgtcaggataaagggggcagtgtagactgcccccgctccctacctgcacgcgccagcgaaaatcccgccccgcaacggactcccgcacctcacgccccaccgtcctccgcacgcccgcgcgccgcagccgccgcgaaatcctgctcccacacgcccgcgccagcgctcgcaacggcgcacgcccgcgccagcgcccacaacggcgtcgtcacagcgtcggtggcagcggtgctggaggtctcaggagagacgactcgcatcctcgttttagcctgccacccccgtgatcgaagccaccatggcaacaaggtgacaatggcggcgaacaagaccacgatggcaacaagattgccgccgccaccggcggcgggagaataccgcggcgctggcgggcgtcggggagggacagcggcattatcgatcgatggccttggcttttctacggtcttggcctcttggctgtatgtgaagccggctagagataaaacatgtctgggcgtggttggcagccgcgaacggggtctccccgacggcgcagctacggctaccaacaattccgagcccctcccccccgccacaatctcgtccgtcgcgtcgtcaccgtcgcgcgctccgagctcaatcccccgcgcgcggaagccccgagctcaatcccccgcgcagcgccccgagctcaatccgcgcgtaccggtccatggggcacttgatgaggtccacgagctcggccatcacctatgggtcgaaccgctgattgccgagccagttgaaagtcgcctagagggggggggg

SEQ ID NO: 7400 - DNA, 1314 bp, Zea mays
  Peptide Sequence Number=SeqID_49179
atgggtcgacacccagctaccgacggctccgatccaaccggagctctgaccatgtttttcgacgggtcgctgatgaagacgggggccggcgcaggcctactcttcatctcgcccctcgggaaacacctacgctatgtgctacgcctccatttcccggcgtccaacaatgtggctgagtatgaggctctggtcaacgggttgcagatcgccatcgagctaggggtccggcgcctcgacgcccgcggtgactcgcagctcgtcatcgaccaagtcatgaagaactcccactgccgcgacccgaagatggaggcctactgcgatgaggttcggcgcttggaggacaagttctacgggctcgagctcaaccacatcgctcgacgctacaacgagactgcggatgaactggctaaaatagcctcggggcgaacaacggttcccccggacgtcttctcccgggatctgcaccaaccttccgtcaagctcgacgacacgcccgagcctgaggtgccctcggcccagtccgaggtaccctcggcctggcccgaggcaccctcagctcgacccgaggcgacctcggttcagcccgaggtaccctcggcctccgagggtgaggcactgcgcgtcgaggaggagcgaagcggggccacgcctgatcgaaactggcagaccccgtacctgcaatatctccaccaaggagagctacccctcgaccgagccgaggctcggtgggtggcgcggcgcgccaagtctttcgtcttgctgggcgatgagaaggagctctaccaccgtagcccctcaggcatcctccagcgatgcatctccgtcaccgaaggtcaggaactcctgcgagagatacactcgggggcttgcatccatcacgcagcgcctcgagcccttgtcgggaatgcttttcgacaaggcttctactggccgacggcggtggccgacgccactagaattgtccgcacctgcgaagggtgtcaattctatgcgaagcagacccacctgcccgctcaggctctgcagacgataccaatcacctggccctttgctgtgtggggtctggacctcgtcggccccttgcagaaggcgcccgggggctacacgcacctgctggtcgccatcgacaaattctccaagtggatcgaggtccgacctctgaacagcatcaggtccgagcaggcggtggcgttcttcaccaacatcatccatcgcttcggggtcctgaactccatcatcaccgacaacggcacccagttcaccggcagaaagttcttggacttctgcgaggatcaccacatccgggtggactag

SEQ ID NO: 7401 - DNA, 492 bp, Zea mays
  Peptide Sequence Number=SeqID_49180
atgagggagatcgggaccggcaacaagtccgcaagctcggggagaacacattcaagggagtctgcccacaagcacaaggaggaatcctcttcctccatcaagtcccaacggaagggtgacaaaaagaagaagatgaagaaggtggtctactatgagaccgactcttcgtcacccccacctccggctcggaatcggcatccgtcacttctaagcgccatgagcgcaagaagtatagacagcgccgcctgcgccactccgactgctgcgccactcggcagagtgaggctgacagcagccaagtccggcctcgagcgccataggaaactccgcctcgcccgaccccagggctcggactcgggctcagccccggaagacgacgaactccgcctcgcccgacccagggctcggacttgggctcagccccggaagacgacggactacgcctcgcccgacccagggctcggactcgggctcagccccggaagacgatga

SEQ ID NO: 7402 - DNA, 432 bp, Zea mays
  Peptide Sequence Number=SeqID_49181
atggagaccgagcgcttggaggacagcgacgacgaggacagccacggcgggatgaaggggagccgcgcggtgcaggggagccgcgcggtggaggagcccccgctgctgctgctgctcgtctcggcgcaggggagcctgcgcggtggaggggagccgcacggtggaggggagacccgcggcggccgaggggaaggctcgccggagaggagcgctcgccgctcaagggagccgcggtggaggggagccgcgcggtggagcctggagcgtgcgatttgggatcgatttgggggagaacctgaagtgaggaccggtcccacttgtaaggacttaggtccacatggaagagtctttgacgggagaaaatgccgccgtgaggtgatttctgagcatagtgtggaggtggggaggggaaaactgagtagagaattttga

SEQ ID NO: 7403 - DNA, 534 bp, Zea mays
  Peptide Sequence Number=SeqID_49182
atgcggcagcgccaacttcgttatgctatgcgcaactcccctgctagttggatcgtgagtgacaccgacacccctgacgcgtctggctacagtttcgactgcgagaggtgtattggctctattgtaataagggcttgtttggtgtggttcctccacgctcgctccatagcgtacatgaaaatggcactggctctgttctttccttttgctgtccagaagcactccacacgagggcgtttggtgcagcagagccgcagagctggtggtgaagccggtggtcatgctcttcaactgtctctaaacccaaatttcttgtccagggtgcaggagtctgctcatcttaaggctgtactggacaacccgcagttccagcttgacccattcgctgcgatccatcagcacctgctggcaacgcagccgcctgcagctgcaaagaaggacgacgcagcggggaagcaggggaaggtttccaaggacaagaaaagcaggaggaagaagggcacatcgtcaatctctcaggcaatggatatctga

SEQ ID NO: 7404 - DNA, 135 bp, Zea mays
  Peptide Sequence Number=SeqID_49183
atgacgaggaggggtggtggctgcccgcaatggagcggcgaccctgagggttgtggccagggggcggcaaaggatctaggctcggattgccatgttagacaaaggaaggttgaatatgaggttcaaaagccttga

SEQ ID NO: 7405 - DNA, 231 bp, Zea mays
  Peptide Sequence Number=SeqID_49184
atggcggagcagaagaaagggattcaaagcaagcgggtgacaggaggagacggcggaggaagatcaggagagagcgtccggctggacctgctgcacagggggatgaaggcggcgtgcgagtgggactcgatggcggcggtcggcggcctagcctattattccttcgtgtggaaacgtgctcgtgcgaggaacacaaattatgacccttcaataaacttagagacctggtga

SEQ ID NO: 7406 - DNA, 309 bp, Zea mays
  Peptide Sequence Number=SeqID_49185
atgtcgtcgggcgaggacgggtactgcagctcagattcgtcgcgggcggaatcccccgaccagccgcaggcagctgcggcggcggacgcggacgtggagtcgcctcgcgccggagccgggccgaacaagcgcgacctccacgcctcgccgccagctaagcgcagccggagatcgatggagaagcgggttgtgtcggtgccgctggccgagtgcggggaccggcccaaggggggcagcggcggggaggggccgccgccgtctgactcgtgggcgtggcgcaagtatgggcagaagcctacattggaataa

SEQ ID NO: 7407 - DNA, 258 bp, Zea mays
  Peptide Sequence Number=SeqID_49186
atgaggttctctagaggatatggtggctggagtgacttggctgtctaccctgccaccgggttggacagtcgagtgggaccctacctcagcaggagaggagcaggaggagtgatgggccaggcttccccatcctcccttttatttacccttttggatttgatcaagttcctgaaggtgacccatgaagatttcaagaaagcaaaggagaaggtgatgtacaagaagaaagaaggtgttccagatggtctctacatgtag

SEQ ID NO: 7408 - DNA, 846 bp, Zea mays
  Peptide Sequence Number=SeqID_49187
atgccagacaacagaggtagtggtagtagcaagagcatggggggaagctacgctggtgaggatagtggagggcaagtgaagagagtagagagggtcggagctgtcatagcgagcgagcacgacacgcaagggaatgtggcgtatggctggatcaaaggacatgaacgtgccccggatgagctagccatcgtggagaagggcacacacaacaagttcggtggaaatgggcgaagccatggaaccggcgagggtggagacaacactggtagtagtagtgcaactgcgcgagtagccaggaggaggatggcaggcgaggggatgaggtgcgtcgaggaggggaggggaggccctgacaacgtgcgcgacagttgctgccgcgacggccgcgggatggcgaggaggccaagcagggttagtgtgccctgggggtggctagggcggtggtcgaaggggaggggaggccctgacgatgtggcgacggttgctgccgcgatggctgcgggatggcggggaggccaagcaggggtagggggccggcgggcggcgactaggaggtgggaggggacattggcggctatgggcaaaggaggcgcggctctccgacgagctagtcagcctcgactcgagctggcgacgccggcaacgtctgaagacatggaggcggcggggaagtgggccgcgatggatagggagcgcggtggccgccgcgagctgttcgaccgcaacggggagggccgagacgagtgcgacgggctggagtcggggcggcggctggacggcggccgcgtggatccaagggcaccgatgactggggaatccgggcggacacaagaagggcacacgtag

SEQ ID NO: 7409 - DNA, 906 bp, Zea mays
  Peptide Sequence Number=SeqID_49188
atgtcgaatgtcacgggcaagggccaattgggatctgatatggccgacttgtttctaactctaagattgcaaggcctagccggtctttttaatttgatggagaatcgctcgagcggacagcagcatgagacctgttggttccaggagagttgtactatatctaaaaaaccgagggctgatttgatgaccaaggaattggagctctcaaagatgaaacatccttttatcccttactctatccatgagacccaaaatcaaattattatggcaatttggaaattgcggtcatcaggtctggaacaaaaaggtgaggtgattgataaagaacctgaactgaaagagaacccttatgaagaaggttctctattggccaacgaagatgtaaaaatgtcagaagtctactcggccgttctttctgtcgacgtcagtgcgttaatggagatgttctctggaggtccactggaacacaaagtgatggagagagccggttgcgtcgactacttagctacagaatgggagctgctaaaccgtaatgtataccaacgtcatataaactttcggtttgacaaaagcttgtcaagatatggaggggaagcaacgaccactcagcaaaagtataacttaccgaaccaaaatgactggattgtcgaggaggtgatgaccctccaaggtgtccagcatgaagattactccagtatccaattgaagtaccacatgaccagcacgcccttgagaccaaacagctgcaggatcaaggttttgttagggattgcctggttgaagggcactaagcatcagaagaaggctgcaaagaatgtcatgatgaactccgccaacaggctgagggagatcttttcagaagtcgagaaggaggtcacatcaaggaaagttccagcttcaggctaa

SEQ ID NO: 7410 - DNA, 3873 bp, Zea mays
  Peptide Sequence Number=SeqID_49189
atgacgtgtgccgtaccccacttcttcgtcgtggactggactgcttcggaggttgggcgtatgcggggggcggagcggaggatcttgtttggaagtctcgttggtgaagaatcgaagctgcctcacgtgggccgacaacagagggacaaaacctcgttggcgaagacagaccgtggctacgaactccaaagccaagggccagctacccaaggtcccgacgtccttgacaacctggtatcggctactcggcgtacctcgtcttcatccgctccgccgccgcaacatctccccactgctacgccaccacccagcccacccagctcgccaccattggccgctacgtcaatcacttcaaccaatggcggacccagtgccaaggcaccacaggccgatgcctgggctgccacgccaccgtcagtgcagaagaaaatgaggaggttcttggttgatagaagtttattgtctgcaccacaaggtcaaagtgcaatagcaacacaaccaaacccaccacaagctcaatctagaggtggcaacgagatcaatttggatgagattgtaagcgatcctgcacttagaaaacctatacatgagtatgctccagagattcgtgaccaaattaaaagggcatacatattgaagggaccaacacaacctattgttaatttccctaagaagaaatttggtgattctagtagggcttttcaacaagcatggtataagaaatttgattggttagaatatagtgtgtccaaggatgcagcattttgtttctattgttttctcttcaaggaaccgggaagggcagaatttcatggatttgatgtattcaataaactaggatttaacaattggaagatggcatataaatcattgcctgagcatgttggtggtataaatagtggtcacaacaaatgtgttgaacaatgcgatgattttaaaaatcaaaggcaaagtatatcaagtaagctctcaagtgcaactagagaagctgaagaattatatcagacgcgtttgacttcatctctagagtgcttgaggtttcttataggacaagggatggcttttcgtgggcatgatgaatcctcgtcctctctaaataagggtaattttctagagaatgatagattggtacaagaacataatgaattagtgagacattctttcaaccgtggtggtttgaattgtcaaatgatttctccaaaaattcaaaaagatcttgcaagatgttgtgcggaagaggtcactgatgtgatcatgggagaacttggtgataagcatttctccatactaattgatgagtctcgtgatatatccgtaaaagagcaaatggcattaatgttgaggtatgtcaataatcaaggaaaggttgtggaacgatttcttgcactacaacatgtcattgataccacatccgagtcactaaaggtatctttgcttgctcttcttgacaaatacaacttatcaatttcgaagataagaggacaaggatatgatggtgcatcaaatatgagagagctaatgtgggactctgtcatagaagtgcttgggattgttgaaagggatggacgcatatcgtctgcagctggagggttgattgaaaaaatggagaattttaagtttgtcttcattttaaagcttatgggtaacttgttttctatcacaaatgatctttcacaagtcttgcaaaggaaggatataaatattatccatgccattgatttagttgatgatgtgaaatatcaattgattgccttgagggatcatggttgggaagactttcttgatgaggtcaaaaagttttgtgaagcaaaatgtgttctagtgccaaatatggatgatgagataccatgtagaagccgctcaaggcgtgaaaggcttatcatcacaaatcttcatcactaccgtgttgagcttttttatgtcacaattgatcaaatcattgctgatatgaatcatcggtttaatgaagcaactacagagatcttaacatgcttttcatgtcttgatccaaagaataatttctccaagtttgacaccgataagctcttccggcttgctgaaatttatgatgcagatttctctaatagtgatcgttctttaataaggggccaacttgagacttatatactacaagttagaaggcatgctgcttttgcatcttgtaaagatgtagcaagtttggctataaagatggttgaaacggggaagcacttggtttttccattggtatacaaattaattgagttggttttgatattgcctgtgtcaacagcatctgttgaaagatctttctcagccatgaaaattattaagtccaaattacgcaataagattggagatgagtggttcaatcatttgatggtgtgctatacggagcgtgagatattcaagggtcttgatgatgttacaatcatgcgaagattccaaaacatcaagacaagaaaaatgaatttaccttgtggatcttcttgtgtggacatttactctacggatcatggaggagaaggtctggatggcctcctacaacttggaggagggcgcgcagatgtggtacatctagatctagacggacgagggcaccacgtcctggcgtcaattcaaggatttgttgaacctacgttatgggccaccgctgcactcggccccgcgcggtcgccgagtatcaagatcggttccaggcgctccaccctcgtgctggtccgcttgaagaggcgcagagggtccagatatacactggtggtctccggttgctgctcagcatcaacgtccggatacagaaccccccagtccctggtcgcagccatgggcttggcctaccagttcgaactgcaagagcagtataccgcctcggcccccagagcgtcgcccaaccctcggctactgagtccagccgcccacctggctctacccgcgccgccgagtgccaaagcagccacctccgcgacaatcaccgttgagggcctccccatcaaacgcctcacccaggcggaacaagaagagtgccgccatctcgggctctattgcaattgcgatgaaaaattcaccagggaccacaatcgtgtgtgcaagcggttgttcctcctcgatggttttgaggaggaagacggcgcggccacggagaccgtcgaggacgtgggcctgaggacgccaggccctagccagggtcgcatcaacgacacgatgcaactgggggtcgagctcggattcgcatccctcgtcgccttgctggactcgggtagcacctacaacttcatcttagaggccgctacccttcggaccagactgcctctacagcaccaacctgcctcacggttatggtcgccaacggcgaacgcgtcatgtgcgttagcgtcatccgtgacattccgcttacaatcggtggcaccttgttccccgctgatctctatgtcatgcctttggcgatacgatgtcgtcctcggcacccggtggctcgccatgctcggcccaatcgtgtgggatttcagcaaccgcgcggtctccttcacatatcagaaccacgctttctgctggcagtggctggcaagccctcgtgcgctggtcatgagcacgaccactgctagcagctcattcctcgaggagctcttggtggatttcgacgacgtcttcgatgagctgcacaacctgccgccatcgcgcagtcgtgaccacagcatcaccttggtgccgagggcgccaccggtggccgttcgaccataccaataccctgtttgcacaaggacgaattggagcgtcaatgtgcgtccatgctggactaggggattattcagcgcagcatctctacgttctcatccctgggcctcgtcacgaaggtggaccgatcttggcggttctaagtcgactaccgtgcgctga

SEQ ID NO: 7411 - DNA, 2583 bp, Zea mays
  Peptide Sequence Number=SeqID_49190
atgaggaacatgatcagcgctggtcgagcggacgaagcgagcagtcgtgagtacgctccccaaaaacctgatagcccgcacacccgtgcaagtgtagctctgcagacgacgatttcggagtcctgttctcccacttactctgtgttcgcagaaggtgggacaggaatagacgggagggtcgcgaaccctccattggccattgctcgatctctgtccctctcgtcgcaccttcgcagccgtcgttcaccgaggccgcggatggcgaggacttcgggcccgccgggtcccccggagcccggccgccacgacgcgccgatgctgctgcgcgtgcacgtgatcgaggcgcggggcctgccagccatctacctcaacggctccagcgacccctacgtgcgactgcagttggggcggcgccgcccgcgggagaccacggtggtgaagcggagcctcagccccgtgtgggacgaggagttcgggttcctcgtcggcgacgtcgccgaggacctcgtcgtgtgtgtgctcaacgaggaccgcttcttgggcgccgagttcctagggcgggtgcgggtgcccctcaccgcgatcatggagacggacgacctttcgctcggtaccaggtggtaccagctccagcccaggagcggcgtcaagttcaggaagaaaaggcgcggcgaaatttgcctgagagtatacttatcggttagggccaccctttgtgatgacgcacatcaagctccaccgcaacttatcgatgatatatcgtgcagctcacacaggtcaatcgaaactaatgaatcaccattatcagctactgttaacagtctggatatgtcagcctgtgccagcatggatcggacatccctcaaaagttcggatggcttcaaccaaagcatgacggaggtccgaggtcctagaagcacagggccactatcttgtgtcagcatagagcaatcaattcttctggagcctgaagaagatgatggcagtgccatcgttgatacatcctcagtagtggaggtcatgtctcggtacttccggaaaactgctgatgctacacattctgtagcatcagatcctgtgtccctagaccagtttcgaagcacacaaatgaattctgaatgtcgtgaaaatgaagagggttgcacactgcctgaggtcagccttgatgaactgctgaaaaatatggagtccaaagaccaagcttgtgaactgccaggaaacttgcctggtggtgtactaatggaccaatcttacattattgcaccagctgaactaaattctttgctgttttctggaacttcagatttctggccagaagtttctgaacttcaaggaacaagtggattcaacattgagccctggaagcatgacaataatgagaactgtttaaaaagaacaataacttatacaaaagctgctagcaaattagttaaatctgttaaagccactgaagagcagaaatacttgaaggcaacaggaagttcttttgcagttttgtctagtgttagcactcctgatgttccctgtggtaattgtttcaaggtggagatattgtaccgtataatatctggttcccagttgccattagaacagaccacacaaattactgtaagttggcgtctgaactttgttcagagtacgatgctgaaaggaatgatagagaatggagcgaaacaaggccttgcagagggttattcacatttctctgaagtactgtcccggaaagttaaagtagctgaacttgccgatgctaatacgaaagataagattttagcatcactgcagacacagaaagaatcgaactggaaactggttgctcgcttccttggaagctttgcattcatatgctctctcagtacagcactgtatatcactactcatcttcatctagccaagcctaatgtggtgcttggcggtcttgaatattttggcattgaccttccagattccattggagagattgtgttttgtattattttgatcatccaagggcataatatcatgaaagtagggcgacgttttttgcaagcctggaaacaacgtggtacacctggggttcctgatccttacgtagtttttacatgcaatggaaagaggaaaaccagctccgtcaaataccagacttctgaacctaaatggaatgaaatatttgaatttgatgcgatggacgacccgccagcaagattggacgtggttgtgcatgattcagatataccaaacaatgaaactcctatcggtcaaacagaagtgaactttgtgaaaaacaatttgtcagatttgggtgacatgtgggttcctcttgatggaaggtttccccaagggcaccagcccaaattgcatctgcggatctttttgaacaattcgcgggggactgaagttgttatgaattatctggaaaaaatggggaaagaagttggcaagaagacaaattctgcattccgtaagctcttcagccttccccccgaagaatttctcatcgacgatttcacctgccatctaaaacggaaaatgccacttcagtattttaaaggaaaaatttgctcgtggacattgagaacggccccctttgctcgtggacactga

SEQ ID NO: 7412 - DNA, 951 bp, Zea mays
  Peptide Sequence Number=SeqID_49191
atgggcggcggcggtggagctgcacagggtggggagagggccgcctgctgggcggtattgcacggggcgagggctgcacggggcaggggcgcgacaactgggatggagatggtcgaggctgcgcgccgagcggaggccgcgctccagcgggaagggaccgcgcgctggcgggggcaggaacccaagggggccgcacgtgtgctggcgggaacagaccgcgcgccgtcggcaggggacccacgggagaggcggcggcctggagatggtctcggcagggcagatccggcgggtctggacgcccgacggcgtggggaggcgcgacatcgcgacgaccagcgagtggcgcggctgctggctcgacctgcagcgccacgtgcgacctccagcggctggacgacggcggctggcgtcctagctcccacgcggggggagggagggttaggggagcagcaggggggaggaaggggagggctgccagccggtgtccgtagagatggccgggggtcggcgacggctgtggggtggggtgggagaagtcatacaactgagcaccagaagatccagagtgatttgaaaaaccagagtgctatggcactgcataatggaccaattggtatgcccccaatgctaaaacagacacgcacatatattcctaatagaccaactactactctcccagtgccaacaatggttattattcttggactaaaatatgtttccacttttgaacaatggacccggactaagcaagatgcccagaatgaccaaaagctctttcttccatcctccactccgcagctgtcatcgccacaactacctcctgttaatgaagaaaacaaatcttgctatgaaaaacagtcactcaaaattataagtgctaatgtacctatctggattaacacattgtgcaaaacaacctatgttttcaagcgacgaatcattaaaatttaa

SEQ ID NO: 7413 - DNA, 525 bp, Zea mays
  Peptide Sequence Number=SeqID_49192
atgctgctggaactcaacgctggaggatctcaactgtgggatggtgcggcggccaaggagaacggtatgattgtgcatcaagtgagggggttcgacatggagctattgtttgggaaagatgaagcagaggcatggaggcgcggccaagggagctgtgccgagctccacggatggagaaggcctagcgcgcgcggccatggagctcgcgggggcgccctgcgcttgggcttgagggagctcacaggggaaggtgctaaaggttcaacacaaaccaataaaaagatcaaagttagggttcaaaataaaggagcaaaagaaaccgaagagaaccctggtttggcgcaccggacagtgtctggtgcaccaccggacagtgtccggtgcacagggccgtacgacttcaaacttgccaccttcgggtttctggagagccgctccgctataattcaccggactgtctggtgtgccagcggagcaacggctagcgagcgcaacggtcgactccaacggtcgcctgcaacgtga

SEQ ID NO: 7414 - DNA, 141 bp, Zea mays
  Peptide Sequence Number=SeqID_49193
atgaccgaagggcatgccttgctaggcaagtcatcgggaggtccatcaagtggcctatggagcgagatcaacctcaagggagtcgtgactgcatctcctgcccgaggttggcctcggcccccgagcttcaagctgacttga

SEQ ID NO: 7415 - DNA, 3195 bp, Zea mays
  Peptide Sequence Number=SeqID_49194
atggaggacgaggggaggcggaggcaaagagctgggacagagaggcagcatcccgcgggagagtgccctgttgctcccacggtggagcacagcagcagcaaggagctggtgatggggatggaggatgaggtcgctgaggcgacgacggcctcagatctaaggattcgtgagagaactcttcttggtgcgcggccccgtgaaggcgccctcgctgtagtagccgatgccgctggcgtcgatgagaatggacaccggctgcttgtacactgctcgcttcagggcggcctcgtcggtgttgttcatcacgtacctgctgtcgatgttcaccaccggacggaggattcgcaatccatggagaggctggggcgaggagactccacggattgcgtcgatctgtgccgaggaatcgaaatccatggagagcgcggcgatggaagggcgaggatgggggcgcttatggaagggatcgtgggggcggggacgaggatcatggggcatcctaaaatggcgcccgtcggagtcggagagcggggcgggggcgagaatcgcgggagcggggagctcgcggcgtggtgtgcgcgggcgggcgggcatcacagccacagcgaggcgagcggtttccgttgggggttcgcggtgtggtctgcgtcgttcgcggcagcgttgacagcgtggtctgcggaggtgtttggcggcgggccctcccggcggcggccgcaccggctacgggcgaccgtagccctcccggcggcggcccgcaccggctacggcgaccgtagccctcccggcggcggccgcaccggctacggcgaccatagccctccccgcggcagccgcatcggctacggcgaccgcagcccgccccgcggcgaccgcattggctacggcgaccgcagcccgccccgcggcgaccgcattggctacggcgaccgtagcccgccccgtatcggccgcatccgcatcggctacggcaaccgcagcccgccccggcgcgagcgcgctggctacggccaccttgacgcgtcgccccgccgcgggcatgcgccgtacaaggacgccttcggctcgccgggcggcgaccgccacgcttctccccgcgggcgcagggaatacggagatagccgcgtctcgccccccgggggtagggactacgaaagggcgccctgccgcgaggagcgcgaccggtacggccgccctggccgcggtgccgatctcgggcacaactccccgccagcccacatgctcccagaccacccgtccgacctgggacgttcagcatccctacgcgctgacgaccatagccttctcaaggacgactaccctaggggaggccctcatcggagcatcagaaaggagaacgagttgtttgcgaacggtgacctgactctcagaataagtgcaactgaaatgggaaggactagcgccatgtactcccaagaccgcaggctctcacctccaccacctatttatccctatgtgccacgtgagacgggattcttgacaggcggatctgccatgaaggccagtgatggttatggtgctggaactggaagcgcccagcggctgcatgatgatgacgattttaagtaccacaaggatgccccacacattgagaggagtagagatattgataggcattattctggcagtagggacttagttgttgagaaaggtggagttgctgaaaggtatgcttctgctgatgatctgccttctgggaggattcgagaaacagagagtctttactctagtagaggtatgctggagtctgacctggtgccgtgtaggcagttgaaggttcttggtgatccttcctcagctttgcctgccaaggaccaccatccatacaggatgtacactgaacctggctacgagacaagcaacagatacatcatggagggccttggcaggtcatctcatgactcactggggcatgggagtgaccatcctcataggttttcaggaggttcattagagcatgtaagcggtcatggtgatgaaacattattggatattgcaaggcaggcacactctaagcatacaccaagagctgcatcattggagtacgatgtacatgatacgcatagtgaaccagagaacttacgtgggaatgtctcaatgacttcaaggcacacatctgtctcaacatctttgagaggtcttagggatgaaaggattaacgacaatctgaggttatcccgtaggattgaagaagatgagggtagcattgaatccatgcatcaggacacagagcacttaattcgtcattgttacaacggtgacgcttctgtacagtaccaaacagcaaggggtggtgatgatcactattcccactcccctggaactgaacctattggaattgcaaggcggctagctcatcaacatgagtttgattcctttggttactcaagtgatcaagaagcttcccttatggtttctaggaaaagatgcaggagtcctgaatatcatgatcatgagattgatatgtatcaagctgatcatgggtttgcaggacatgagcactatgatgatgatgttgttgatgaatatgatatacccccaccaagaatgtcacggtttgatgatgaatatgatgaaatacatgatgtgctagctaatcgtgatgttttctcaaggatttctttgccacatgaaaccaatcaggaatggactgatatggatcaggggaaccatcctcattctaacatcttgggttacgggtgttcaaaacacgtacctatgcatcagaggttgtctaaacccaattaccactcacaatttggggaaactcccatgcatggaagaggaagaggaagaggaggattgactaaaagtgccaaaaagggactgagaactgctcctcatcagttgcatgatgggtacccatcaggtagaaatgaatttgttagaccaaataaattttcaaagtcgtcaaaagatgaacttaatggttctgaagtgaagcatgaagatgctccagagtatgaggatgttcctctgcagaaagatccaccagaaggttcagaggagttcagtaaacaggttgatgaagcctttcttaagtacacaaagatattaaatgagagtccagctatgcagaagaaataccgggaggcgccaaaaggatctttgccatgctgtgtctgtggcaggtttgtcttcctttgcctgcgaactaaacagttcctcctctaa

SEQ ID NO: 7416 - DNA, 306 bp, Zea mays
  Peptide Sequence Number=SeqID_49195
atgaaggcgctgggcgctgcagcagagagaaagataagagggagagggcgtcggcttggggaaaaaaatagaggcagtgaaggcgaggtcgccatgggaagaggagtagagacgtctgccttcggagttcgaacatggggtcggccaacatggggaagagacctggacgtccatggagaggagcccgagcagcagagaaccaagagggagaaggctggagcgagcagagacgcgcgcgatctgggcgagcgcgtgctagggcgcgcggcccgggcgagctgctggtgcagatctgggcgagactag

SEQ ID NO: 7417 - DNA, 231 bp, Zea mays
  Peptide Sequence Number=SeqID_49196
atggaggtggtcaccggagcaacgccgagagacgaccgacgggatgggggtgggggaagaaaagagcgaggaggaagaaacacacctgaaagagaagtcgaagacgagaagagggaaatgctccacatagagaacaatgacgacgaccgtgaacaggagtggagggacgagcacgacccgaaggagaaaaatactaatggtgttcagtggagcttaatgccaaatatttaa

SEQ ID NO: 7418 - DNA, 258 bp, Zea mays
  Peptide Sequence Number=SeqID_49197
atggcgaggaagacgctggatcagccggagggctgccagtccggctgcttcctccagtccggcagtgtctgccgtgacacaccggcgctggcgctcagcaggaagaggaaggggaaggcttccggcgccgggatcaggaaaaatggagcggccacaagccggcatcagcttctcggtatagagatttttgcatacatggcaccggcttcgatgggcttcgcatgtacggcaccgcaaggacgccaattgcaaatatga

SEQ ID NO: 7419 - DNA, 312 bp, Zea mays
  Peptide Sequence Number=SeqID_49198
atggctacaaactacttcagtgaaatggctgcagcgatcgtcaacttaagctcagtcgaacagtcactatcggaatccggctctttgtcgagtgctcgacgctttgtcgagtgtaatatattgtcacacccggatttaagggataaagccgggacgcaccgcttcaagaagcccgcgccgccagttccccccggcgcgtcgcccgtgctccccgtctgggacgccgtggcgcccgggccctccatcgcccccgcgccggtgcccagcatttgctcaacctcagtattggccaacgtgaaaacatggagctga

SEQ ID NO: 7420 - DNA, 876 bp, Zea mays
  Peptide Sequence Number=SeqID_49199
atggatagaaggatggatgtggctaagaaaaaatgggtgcaaattaaatataagggccttcaagcaaaaactccaactgtatatttatgcacagagacacacatacacacaactgactccaacgggccgccgggaactgcagcaaactctcctcgctgcactgcacacttgactctccttcgtgtctccccccaaccccaattccccccaacccaagccatgcgagcatctcaggaccatgcgccgcagccactgcctctgcctctgcctccacctccgctatctctcccgtcgcctcccgccccgcctcggcgcgggcgccaccgcagctcctactcatcatcatcctccgcctcctccatctccagcgcgtcgtcgaccttctgcccgtcgccgtcgccgtccccgcgcgccagtaccgccacctcgctcgtgccattttcgtgggagcgccagccgggcgtgcccaagaactcgtcccgcgtcgggctggcctcgcccactggcactggcacccctctgccgccgccgccgctccgcccggcccctcgacggcggcgcgccagggacgacgaccccttcgtggccgccttcgccgagtgcaccagggacgacgacgacgacagcatcagaaagctctggccagtgacggcaaagccagcagcagaatcgtccgggcgcgccgagcgctggtggtggatcgctgccggcggcggcggcgggctcgtggccttcctcgacctgcacgggtgcaagagcgccgtggatgtcgctgacggcgccgccttccacccccgccggctcgtcgccgccgccgccgccgctgcaggtcccagggcggtcggtcgtccagggaagccgaagatgagtaattaa

SEQ ID NO: 7421 - DNA, 1305 bp, Zea mays
  Peptide Sequence Number=SeqID_49200
atggaggagcatcgtgcccacgtgcggtcgtatgtgtcggtggacaccagacggaggagcactgtggcttcgctcacgttgatgcagccaaacagaggggcgcacaatcggatggagaagcaccgcaaagctttggcttcatatataaagaaatatgcctactcgaatgctaagactgaagacctatgggttgttcttgaggaggaatctggggagcctgttaaggatttgatgactacatggactaagcaacaaggatatcctgttatttatgcaaaaatcaatggacatgatttggaacttgaacaggcacagtttctatctgatggatcgtctggtcctggaatgtggattgttcctgtaacagcatgctgtggctcatatgatgcacagaaaaagttcttattgaaagataaaatggataagataaatattaaagagttttctgactctcaaagtgctgatggggagaagaatcaaatcatttggatcaaattgaatattgatcaaactggattttatagagtgaagtatgatgatgaacttgcagctggacttgtaaatgcaatcaaagcaaagaagctctcattaatggataagattggtatcgtggaagattcatatgcgctctctgttgcttgcaagcaaacactgacgtcattgttgcgactgctgaatgcttataatgatgagtctgattacactgtactttcacatgtaacctctgtatgtttaagcatttctaaaataacagttgacgctactcctgacttgaacaaagatatcaaacagcttttgatcaaccttcttctcccagctgtcataaagttaggctgggaccccaaggatggtgagagtcatcttgatgtaatgcttagatcactgctcttgactgcgctggtcagacttggacataatgaaactataaatgaaggagttcggcgtttccacatcttctttgaagacggcaaaacttcccttcttccaccagatactagaaaggctgcatatcttgccgtgatgcgaactgttagcacctcaagcagatccggttttgatgctctccttaaaatctacagagaagcatctgaaccacaggagaaatcacgtgtcttagttatcatattgcaaaattattccaaatactgtcttcaagtctgcaccatgattttaaaagcccaacagaaagatggatccaatcctacccctcaagctgttgaagctgatggtgatgacaatcggtggttcaggaaagtggttccttacagcagtgcccttcagcaacctttccatgcacctacttag

SEQ ID NO: 7422 - DNA, 345 bp, Zea mays
  Peptide Sequence Number=SeqID_49201
atggcagcaacatcgtgtcctcctcggtggcacgcatggagaaaggtcaggagcaagaccgacttgccccgtacccgcgtcgacgagcgtcggtcgtatcgcggctgcgactgtgggcgggggcagcagattggggaggaagaacagggcgaaggccgaaaaaacgaacgggacatccaacgatggcaaaaacgatggtgcgcgcatgatgtgaaacgttctcgtgtacgtgcaatagccactgcgcggatcggcgttgggattgctgttggacgaatatggggaggaagtgcccgctcccacgtcctctgccgagaatggggtggcgctgaggcggaggcatga

SEQ ID NO: 7423 - DNA, 465 bp, Zea mays
  Peptide Sequence Number=SeqID_49202
atgacggcgagcttcctgcgcgagctcgacggagaaaaacgacagggcggcacatcagtgaggggcggcgacatcgctgcaatgctccggtgggcagacaacaaggacagagaggaaaacagcgccgcctgcgtcgctccgactgctgtgccactcaacagagtgaggctgacagtagctaagtccagcctcgggcgccataggaagctccgcctcgcccgaccccagggctcgggctcaacctcgatgctggacgacggactccgcctcgcccgaccccagggctcggacatagcctcggcctcggaagacggtctccgcctcgctcgacccagggctcggactcaacctcgacctcgaaagacggactccgcctcgcccgaccctagggctcggattcagcctcgacctcggaagacggactcgacctcgacctcggaggagcctccgcctcgcccgacctag

SEQ ID NO: 7424 - DNA, 339 bp, Zea mays
  Peptide Sequence Number=SeqID_49203
atgatgaaatcgaagaacggagggggatcgaccacggcgagcaggggcacggtcagcagtgagggcgcaaccggggagggcgcggtcggcgagggcgcggtcgggaaggagctccggcgagctccgcggacggcggatgacggtggtggctctggtcggcacgtaagagcaagggagagagagaagagagtgcggggagagagaggggcgagctcggtggcaagggggccagttccatgggctcggcatcggctttataaagagggatgggagaggaagaggcagtggagggagatgcccaccaacgccattaacgtcgttaatggtgtcggttactag

SEQ ID NO: 7425 - DNA, 273 bp, Zea mays
  Peptide Sequence Number=SeqID_49204
atggtcctcgcctcagttgtttccacctcgttcaccttcctgcttattttctctctcccctcatgcctctgcctccgcgccaccccattctcggtagagggtgtgggagcaaacgcatcctcctcgtattcatctgacaccagccccaacaccgacccgcacagtggctattatgtccaggtcttcgttgtgtccttctccagcaacgaacaagtatgcccgcctcttcccttccgttcctgctctatgaaaccttggaagtgggggaggtga

SEQ ID NO: 7426 - DNA, 444 bp, Zea mays
  Peptide Sequence Number=SeqID_49205
atgagcaggaccaccacggtcctcaccgtgtcctcctacagcggctcctacagcggcgtggcggcggcaaacaccgtggatgacttgtgcgacatgatccgtggcttcgtggaccaactagcgaaccgggcagtcggcgacctcctcacctccctgcggccctgcgccttgcttcctgcctccctccacgtcggcggcgtcaccaactccggcttccacaggtcagccacgctgacactggaacaggatggcatcagaggtctggccatcctccaccgacgcagggtcatcctgctcacgaccgacacagcctctctgcagacggaggcggacctgcgccgtgtccaggcgccggcggacgagcagtccaggcattccagagcccgctcggtgccgccaagcggcgagcgcgcgtggtgcagcgtgagcatcacgaccatgtag

SEQ ID NO: 7427 - DNA, 699 bp, Zea mays
  Peptide Sequence Number=SeqID_49206
atgcaggtggcatgcaactacaccacagagatgcaccctttcgacttcgacgcatccagcatggaggcccaggcccacacgtcatgtaaccggcgcgccggttactacgtgcgaaaaactgcaccgccacttaagccaatgtcgcgccttctcaactacggaaccggtgccgcgactcgaggcaaccccgtgcatggcccaacagtgccaaccaagcgcatcggtcacggggacccagaaaggggatactccgaaagggatccttctctgcgaaggaagcgggccccgagccctcctactgatcaggggttcgaagggtggcccctcggaagggttcgacaaccgcctcagagcactcaggctccgcgcccactactgataaggggttcgaaggctgcccccccgaaggggctcggcctcaacctcgacctcggaagacggtctccgcctcgcccgaccccagggctcggcctcaacctcgacctcggaagacggtctccgcctcgcctgaccccagggctcggcctcaacctcgacctcggaagacggtctccgcctcgcccgaccccagggctcggcctcaacctcgacctcggaggagtcaccgcctcgcccgaccttgggctcggaccgaccacgccacagggggggctcaagcgctcctccgacgaccacgacatcacatgcacagggcactag

SEQ ID NO: 7428 - DNA, 144 bp, Zea mays
  Peptide Sequence Number=SeqID_49207
atgaggctgggagttccagtggtgctgcccctgctgcccctcctgccattgaccctgctcttgctacgatcctctagacccttactcagcagcaggctcacttggcagcgctccggcagctcctacagcgcagcctccgtctga

SEQ ID NO: 7429 - DNA, 558 bp, Zea mays
  Peptide Sequence Number=SeqID_49208
atggaggtgcgcggggcgccggacctgaccgacttcatgaacgactggttcttcggcaaggtcggcgcgcagcacagcagcggcgtcggctacgacctgactcgcgagagcagcaagacgccggcatcgtctgcacagggcagctgcccaggttcgctggcggatctgggacgaagcccacgccgagctcgaccgtcgggacccgatgtcgcgctcagccagaagttgtggcaacgagagtacgggacttgggcagttgggctggctgtggtccgtgaagtggttccaaattccagtgactccacatgtcaagttactttaaaggtgtcggggaccataattaggggtaccctcaaggctcctaattctcagctggcagtcaggcccggccgcaggcaccataggaagctccgctccgcccgacccagggctcggagtcgggctaagccccggaagacggcgaactccgctccgcccgacccagggctcggacttgggctcagccccagaagacgacgaattccgcttcgcccgacccagggctcggactcgggctaa

SEQ ID NO: 7430 - DNA, 810 bp, Zea mays
  Peptide Sequence Number=SeqID_49209
atggcgccccacacgctccctgacgacggtggctctcggcccccttacggaagcaagaggacgtcagcaaggactcgacagccccgacagctgtccttccgccaggctccagcgctcctccgacggccacgacatcacaccaactgggtgtcaaaacctctccggctgccacaacggcatgcactggcaacctggcgatatcggcaacgagatcatgcaacgcgcgtccatcacctcgtcccctatgcgccccgaccccttcgcctcctccgccccctcctcctcatcccctccctacctccaaaccctcgccgcaagtgccgcttccgcgacgcccctactcccgattctcctcatggtcgcgccacctccatctcgcccatctctgccgttcactctcgccaccgctgccacacctccgcgtcctccgcccccgctttcgccgccgatggatccagcgacggtgtcgcccgccttagctccttccttcgccgccagcgcgccgtggtcgccgtcctagcagcaggggaccgtaccgcgtcgaggcccaccaagctcgtgctctctgacgcctccaaaagcgtgagctcgattgtggcggcaatatgctacgcgtggatgctaccaagcaagggggatggccaggctgcagtgccggtggtgaacatgcgccggagcaggatggcttggtgcaggcaggcggcttggctcctgtatcacgttggggtcgatgcatcggcgctgctcttcaccgatgagaattttgcatttgtttatggcatgcaaaatgctccattccccagtttgtaa

SEQ ID NO: 7431 - DNA, 564 bp, Zea mays
  Peptide Sequence Number=SeqID_49210
agagagatgtttaactgtttctacaatgacgaaggagcttcatctgcgttctgcgacgacgacggtatctgcgacgacgacgacgacgacgacgacggtgaatctttcaacaggaccacagtcttgtcaaagattcacctacatcattacgcgtgcgcacgccgcctgacagctcctgacggaacgtgtaatacgataggaagcggaccaagatctcgggcgcgagttctgtctcgcccgatgccaaactcaatctcgggcgaaagctccgcctcctccgaaccaggcctcgactacttgctccgccgcggatcccgtggaagggcacttcgtcgactgtggcacacgtcatcgaatctcaagacaaggctcggtcgcaacctcgaatggaccttcacctcgtccgagctcggctcttccctcaatatctgtgacagagggcttcccaacgtcataaaaaacagtggagctgacacatcccccctcggccttggcctcagctctcagcggaaaacaagcgagcacaagtcaacagcaaagtaccaggccatactgtctacataa

SEQ ID NO: 7432 - DNA, 1107 bp, Zea mays
  Peptide Sequence Number=SeqID_49211
atgttgacgggcgatctagccagttgcatgatctacctgcgtttgagggttgctctgtgctcctgcaagaaaaatacggacccggccgttcaacgaactcaatcattggatcatctgttgagcttgagcaggagaggacaagattttgctgctgggcctgccaagcactggtcgacagcaaatctacgcgccagcggacccggaatttaccgctgccgtgcatgggctccaacgccagagcatgagccgcggacggtaagagcgtcgtgtagggtcttggattcttggtccggtgctgtaggcgtgttcttgagatcgaagatccaggagatgatcctgcggcggagatcgaggtcgatgaacagcagcgccggcgcgcagaggagccacgtccccggtcagtccgcgagatcgtcgaccagtccatgcgacggtgacagtggcggggccggggacggggccgccgccgccagcagcaagagtgcgaccgcgcgtgccctgttcgcctccccgaggctgctgcactcttcttccctgcccgccggcaccgtcgccttcgccaagagccccgcgccggacgccgagccccagacggccttctccatgagcccaacctccgtgctcgacgcggcggcggccttcgtgccgggcacggacggcgccggcaagcgccgcccgccgtggcgggcgcgggacaacaacggtctcgcggacgcgctggactgcagcgaccaccaccaccagcagcagcagcaggagcggatcgtcctcgcggcgacgccgtcgtcgtgctcgctggccagatcgtgctccctggaccgccgcgtcgagttcggcgtcaagaacaggagctcgtggctgcccctccgcggccgcgaggccacggcgccggcgccggccgacccgtgggagatagagccgtcgtcggaggactacacgtgcgtcatctcccgcgggcctaacccgaggacggtgcacatcttcggcgaccgcgtcgtggagggcggcgccggcgccggcgccgacgccgcggcggagagggaggacagctcgccgcggcagatcaatctgccggcgcgcggcgaccggggcttcttcagcctgtga

SEQ ID NO: 7433 - DNA, 1140 bp, Zea mays
  Peptide Sequence Number=SeqID_49212
atggcggttgccgtcctgttgcggcagagggcgctctcgtcgccccacgcggtctcatgccgaaatggttcgtactgccttgagcggttggatccttgggcgttgcgtatgatagctggttggcatcctcatatgtggtacccgaaagctcgagaaaagaagcgtaatgtgtttttacatgttggccctacaaatagtgggaaaacttatagtgctctcaagaggctagaagcaagctcttcaggtgtgtactgtggacctctgagattgttagcaagagaggtagcccaaaggttaaacaaagttaacgtcccttgtaacctgattactggacaagaaaggaatgaaattgaaggtgcaaaacatagctcagtgacagttgagatggctgatatgacaactaactatcaatgtgctgttattgatgaaattcagatggttggctgtaaatcaaggggttattcgttcacacgtgcacttctgggactttgttcagatgaacttcatgtctgcggtgacccagctgctgttccccttatccagcgaattcttgaagctactggtgatgtagttacggttcaatattatgagagactatctcctttggttcctctgaaatctccacttgggtctttctctaacatcaaggcaggagattgtttagtatcattctcaagacgtggaatttataaactcaagaaaagaattgaaagggagggaaaacatctttgctctgtggtctatggttcattgccaccagaaactcgaacaaagcaggcgacaatgttcaatgatgataccagtgaccttaatgtgctagtagctagtgatgctattggaatgggtcttaacctgaacatttccagaattattttctctactatgatgaagtttgatggtttctgcaacagggaactaactgtggccgaaatcaaacagattgctggtagggctggaagatatggatctaagttccctgttggagaagtgacctgtctaaatcctcaagatctcccattgctgcactcgtctctgaaatcagcttcctccattatagagcgtgctggactttttcccacatttgatttattatctttgtattcacgattacatggaactgacttttttcaccctatactg

SEQ ID NO: 7434 - DNA, 966 bp, Zea mays
  Peptide Sequence Number=SeqID_49213
atgtcccccaataagtccggccatgcttcaggccgtgacgcggttttctggtccgatagaatgaacgaatatcttattgattcgctgcttcaccagcaagccattgggaacaggagtgagtccaaattctcatcggtggcatatgatagcatcatcaccggtgtgggtgagaggtttggcgtggtgatcgaccggaacaatataaaaaatcgcctaaagcatatcaaggaatcgttcaatgaatgtaggaacctccttggtgaagataatcggtttaggtggtgcccagagagcagaagattcaatgccgacccaaatgtttggagggagttgatcgagagaaaaccagaagcaaagaaatggatgatgaagacgattgaccattatgatagcttaatggatctatttggtaagaatagggagaaacgtcaagacgttgagaactcaaaaggtacctcgaagaaaaaggcgcgaacagaaccgccaaaggagatacttcaacgtactccattaaatcggaaggggtcagctcttgccgaaagttcagataagacggtggacaaatgtgagatccatgatgagataaaaacaaatgtggaacttgatttgtcagaatcgtgcagaactgataatggcattgttgccatacctgttcgtgcctattcatacggtaaaggtttgccctatgctcctgaaaattggccacgtcatggagacatatggcactggaaagttggaagcagggcttctggagcaggccattgggctgacaggtatattatgccgccatcccgttttcgtggcgctgctcctaagaagttaggatttgcaagtagaggatttgcaagtaggttacaagttgaggaattcgttaagagagaatttccggatgttgatcctagcacattcttttctatgtttatctggaagatccctgctgaaggatacaggatccaaaaaggttaa

SEQ ID NO: 7435 - DNA, 1796 bp, Zea mays
  Peptide Sequence Number=SeqID_49214
atggaggtggagccggaggcggtcagctgcgagtgctgcggcctggaggaggagtgcacgggcgactacatcgtcggcgtgcgggcctacttcgggggcaggtggctgtgcggcctgtgctcggaggccgccaagtacgaggccggcaaggagtgcgcccgccgcggagccggagcctcagccgcggcggcgccgcccgacgtggaggaggccgtgcgcgcgcacatggccatctgccgcacgctcaagggcggcggcgggcccgcgggccgcgtcgccgagggcatgcgccagatgctgcgcaccgcgtcctggaagaaggccgcgtcgtcgtctgccgcgtcgccgaggggacccgcggccggtcaccaccgcgcctcgccgggggccgggccggtcacaccacgacaaggatctactaactggctcaaggcccatctcgatttctgggccaaggcaacgtcagcgtcgctcgagtcggcgtcccgcgtcccccacggatccatttcggcggtgcatccagttccgggcccagatcagatctgcgaagccgttgcgccggcaggccgcttcaaatttcgaacacctcgtcggccagggccaccgtataacaccgatcccaacccgagaaaccccaccagccagccagccaaccagccgacagccgacgagcacgagcccatggacgagacgagggagatggatccgggtgcgggggtgcccaggagggcggccaccgccagcgggacgcccaccgcgtcgcgcggctccagcacggcctcctcgtgctcctccaactccaacccgtccgcccgcgcctccgcgtccacgtccacggggacgccgccgtccgccgtcgtgctaccgtgggcggcgcgcgcggccgcgggggacagctgctactaccctgggtgccgcaaggacgccaactgctcgtgcgagatgtgcctcgcgagcatcgacgccacgcgggacctggtgcgcgcgcccgaggcgcgcaggttcttcgggggcgccagggaccggaggctcttcttccgtgaccgcgccgcgggggcggggtcggggtcgggtgaggggtccgacgccaccgagccgccgtggacgccgccgatgcggtccacggccaagtccaggcgggcgccagggcgggaggcggccgggggccccgaggcgagggccggcgttcggtcgcacgactggctgctgtacgccgccactgttattgggttcctgctcctcatgtgggtcgacacggggctcgtcccggaggccgcggccagggggtttgggcccaagctatcgccggaagccgtggcgcgggtgggggccgatgcgcgcctcgcgcctggcggcctggaacataagctgcacgtcatggagcgcagggtccgccagcttgttggcggtgaggggatcgccaattgcagctcgcgagactccgtctggcgattccaccagaatgatcagcaggtgttccactggcgctgcacggtgtacaaatccgtggcggaggaggtcagcgtctgggggagcccactccgcacctccggtctcctcccaagagcactctcggcgcggcacctcaccctcctctccggcgagatcaccgagtggtccgacggaaaggtgtggccgacggtgcgggcgagcaacgggagctcctgggcccaccggaggcagagcgcggcggcggtgcggctggaaccggagacgtgggtagtcgagtaccagaggagcgcgcttttcgagggcacacggctgctaccggccgccgcggagctgatcgcgtccag

SEQ ID NO: 7436 - DNA, 744 bp, Zea mays
  Peptide Sequence Number=SeqID_49215
atggagatcaagcagaagcaaccattgttgctccctgcgcccagcagcccctctcgcctcctctgttctgcgcagcaccagcagtacctgcgccctgcagcccccgcccttctctctgttctgcgccagcaacacctagccacggtgtctcgttgcgggatctccagcccactccatcatctcacccctattctctatgagacatccccagtaggatccacaatcctatcagccttcctctggctacacgaacgtttcttggagaaggctaaactatcaccagactatttcattactgattgtgaagatatgttgaaggttgctgctattgttgatgatttacctcttgggttgtatgataaatacctcttctgtatgagtccggtggactttgcagaaaattatgcaaggaaaggaattgttcgacttaaagaaatattcacacctggaacattacaggttcctaaaacagacaatcaactcaaggagcttgaatctgttcacaaggtcctagagttatatgtgtggttaagcttcagaatggatgattcctttccagaccgtgaagtagctgcctctcaaaagtcaatctgtagcatgttgatcgaagaatatctggagaggtttggatggcagccacaagaccgaagaaaggttttgggtggagcacaaaagctgctccaagaatacgatgtatcacaaatgaacaaatattttcaagaagtcaacccaggaccgaagtag

SEQ ID NO: 7437 - DNA, 2466 bp, Zea mays
  Peptide Sequence Number=SeqID_49216
atgccgttcggcttgaggaatgcgggtgcgacgtaccagcggtgcatgaaccatgtgttcggcgaacacattggccgggcggtcaaggcctacgtcgatgacatcgtagtcaagacgaggaaagcctccaacctcctttccgaccttgaagtgacattccgatgtctcaaggcgaaaggcgtgaagctcaatcccgaaaagtgtgtcttcggggtaccccgaggcatgctcttggggttcatcgtctccgagcggggcatcaaagccaacccggagaagatcgcagccatcaccagcatgggacccatcaaggacttgaagggcgtacagagggtcatgggatgtctcgcggctctgagccgcttcatctcacgcctcaacgaaagaggtctgcctctgtaccgcctcttaaggaaggccgagtgcttcacttggacccctgaggccgaggaagccctcgggaacctgaaggcgctcctcacgaatgcgcctatcttggtgcccccagctgccggagaagccctcttgatctacgtcgtcgtgaccactcaggtggttagcaccgcgattgtggtcgagaggcaagaagaggggcatgcattgcccgttcagaggccagtctacttcatcagcgaggtactgtccgaaaccaagatccgctacccacaagttcagaagctgttgtacgcggtgatcctgacgcgacggaagctgcgacactacttcgagtctcatccggtaactgtggtgtcatccttccccctgggggagatcatcctgtgccgagaggcctcgggtaggatcgcaaagtgggcggtggaaatcatgggcgaaacaatctcgttcgcccctcggaaggccatcaagtcccaggtcttggcggacttcatggctgaatgggtcgacacccagctcccaacagctccgatccaaccggagctctggaccatgttcttcgacgggtcgctgacgaagacaggagccggcgcaggcctactcttcatctcgcccctcgggaagcacctgcgctacgtgctacgcctccatttcccggcatccaacaatgtggccgagtatgaggctctggtcaacgggttgcggatcgccatcgagctaggggtccgacgcctcgacgctcgcggtgactcgcagctcgtcatcgaccaagtcatgaagaactcccactgccgcgacccgaagatggaggcctactgcgatgaggttcggcgcctggaggacaagttctacgggctcgagctcaaccacatcgcccggcgctacaacgagactgcggacgagctggctaagatagcctcggggcgaacaacggttcccccggacgtcttctcccgagacctgcatcaaccctccgtcaagatcgacgacacgcccgagcccgaggtaccctcgactcagtccaaggtaccctcggctcggcccaaggcaccctccgctcggcccgaggcatcttcggttcagcccgaggtaccctcggcccccgagggtttctactggccgacggcggtggccgacgccactagaattgtccgcacctgcgaagggtgtcaattctacgcaaagcagacccacctgcctgctcaggctctgcagacgatacccatcacctggccttttgctgtgtggggtctggacctcgtcggccccttgcagaaggcacccgggggctacacgcacctgctgatcgccatcgacaaattctccaagtggatcgaggtccgacccctaaacaacatcaggtccgagcaggcggtggcgttcttcaccaatatcatccaccgtttcggggtcccgaactccatcatcaccaacaacggcacccagttcaccggcagaaagttcctggacttctgcgaggatcaccacatccgggtggattgggccgccgtggctcaccccatgacgaatgggcaagtagagcgtgccaacgacatgattctacaaggactcaagcctcggatctacaacgacctcaacaagttcggcaagcgatggatgaaggaactcccctcggtggtctggagcctgaggacaacgccgaaccgagccacgggcttcacgccgttctttctagtctatggggccgaggccatcttgcccacagacttagaatacggttccccgaggacgagggcctacgccgaccaaagcaaccaagctagtcgagaagactcgctggaccagctggaagaggctcgggacaaggccttactacactcggcgcggtaccagcagtcactgcgacgctaccacgcccgaggggtccggtcccgagacctccaggtgggcgacctggtgcttcggctgcgacaagacgcccgagggcggcacaagctcatgcctccctgggaagggccgttcgtcatcgccaaagttctgaagcccgaaacgtacaagctggccaacagccaaggcgaggtctacagcaacacttggaacatccaatag

SEQ ID NO: 7438 - DNA, 558 bp, Zea mays
  Peptide Sequence Number=SeqID_49217
atgagtcccacaagatcagtgttcagttggataacctgtaggaaatattcatgtggtatatatgaacctgaatgcccttacaagacatttggatcccttcattttagaggaattagaattcacttaataaacgacgtggttgagatagcaagttgtgctccactctttataaacgacaatgaccaaaggtggaacccagatgctatagtctttaactcatggcagcactatggatgtccaaattactggatgttgcacttcttcaaagattcaagcggcgctacacttcatccgtccactattcaactaccaaactacgaccaattggttgtaaattttggaagaaaagatgttagtctgaatatatatgtaacagggttggaaactgatattcagacatttggatccataaagacggttctcatgtcgggttggctgcgggatgagaactccttccaacagcccgacaaggtggtgccggcggcaagtccaataaccaacgcgggcaagcaaatttctattttggtggacgagaggcatgttgtggtggcaaactaa

SEQ ID NO: 7439 - DNA, 438 bp, Zea mays
  Peptide Sequence Number=SeqID_49218
atggcgccggtgttgggcggcggctccgcgaggacaggagagctgcgacggccaatgtcggtgctgggcggcggctccgcgaggacgagagagctgcgacggccaacgccggtgctggacggtagcttcgcaaggacaggagagggcggcgcccttgaggataggagaggcagagaacgaagtgaggcacgggatgggcaggccacgacaacgacgatgttgggaggcggtctcgcaaggacgagagagggcgagaggcggcttcgcaatgacaggagaggcggagaacgaagcgaacgagagaggaagagagagaagcgaccagggctcatgcggacgctgaagattcgatgctacgttgagatcggacgtctccctttctccgggcgacgtggccgctccgagggaggaaaatgtccactgagttttaatagatag

SEQ ID NO: 7440 - DNA, 951 bp, Zea mays
  Peptide Sequence Number=SeqID_49219
atgtcgtcgtcgtcgtcgtcgatggactgcgtcatctcctcctcaaaggacaacgagaaggagatcacgcctccaccgctcaacagcggggcggcggcgtggtggacgggggacacggtggcggtggtgacgggcgcgaaccgcggcatcgggcacgcgctggcggcgcacctggccgagcagggcctgtgcgtggtggtgacggcgcgggacgaggcgcgggggcaggccgccgcggccgcgctccgccacggcgcgggacccccgcggggcgccgtgcggttccgccgcctcgacgtcgccgacccggcatccatcgccgccttcgcgtcctggctgcgcgacgagctcggcggcctcgacatcctggtgaacaatgccgcggtgtcgttcaacgagatggacaccaactccgtggagcacgcggagacggtcctccggaccaacttctacggggccaagatgctcaccgaggcgctcctgccactgttccgccgctcgccggcgaccagcagccggatcctcaacgttagctcccagcttggtctgctcaacaaggtgaaggacccgcagctgcggagcatgctgctggacgaggcggcgctgacggagggcgacatcgaggggatggcgtcgcggttcctggcgcaggtggcggacggcacctggcgcggccgcgggtggccagaggtgtggacggactacgccgtctccaagctggcactcaacgcctactcccgcctgctggcctccaggctggccggccgcggggtcagcgtcaactgcttctgccccggcttcacgcgcacccacatgacgcggggcctcggcaaccgcaccgccgacgaggccggacgcgtcgccgcgggcctcgcgctgctcccgcccctccacctgcccaccggcaagttcttcaaatggcgcacgccgcagctctactccaagctctga

SEQ ID NO: 7441 - DNA, 570 bp, Zea mays
  Peptide Sequence Number=SeqID_49220
gcggccacaggggagcaccgggtgcagctcgacttctcgtcctccatcgtggagcagttccttctgcgaccattccttgccgggatattcttcgacccggtgctcgacaagtcgtcccgcctcttcgagcttgtgttcaagcgcctcagcctaggtgacaacgtcctgtcggaggacgacatcgacgccatcgtggcgcagctcgcctgcccacgagtgttggggtgggggtttgaagagtggagacatgagcgaagaaggcggcgaccacggtgttctcccccgtgggcaccctctccaaacaaggtccttgttgggctcacgcgcctccacgcggccaccaccccagacgacgtcatcctctcgccgccggagacggccacaaggatgtggatgatgggggtgccgaggatgcgaggaggatgggcgcggggtgggggctacacgcgcggtggcatgggcaggcatcgcggcgacgacgctggatctgcccatgccaccgcggatctgttgtggcggcggtggggaggaggggtgggggatccgcgtgggggagggtcgcggggttga

SEQ ID NO: 7442 - DNA, 1545 bp, Zea mays
  Peptide Sequence Number=SeqID_49221
atggtgagaaaggaccccactgagatcttgcatcaaggcaattatttttctgttgcactgagtgccaggctgatcttaaagattatgctgaaaataaactttaagaatcttgaagatgagttggtcttgaaagtcagaactgcaatcaaggaagtagaggcaggtgatgatgaatactccctcttggttaatttgaagcggctttatgaacttcagctgtcaaaacctgttaagaatgatagtttatttgaggatatgtaccgaatactagctcatcttagagatatggataatgaggtgaagagctttctcctcctcaatatgtatcttcaagtagcttggtgccttcatgcaattgatggtgaaaacccatctgaaacatgtattgatgaacttttatcaaagcaaagctcactttttgatcaactctattattatttagtggtactgcccacttatcagaaagaggggaggagcaccactgtactttcatgcagagtctgcatcattactgcagaaatgtggtgcttgtttaagaagtcaaaatattcttcgacaagactagagagtttgggttatttcccacagccagatatggttcagaagttctggaaactatgtgaacaacagctcaacatatcagatgaaacagaagatgaagatgcaaatgaagaacatattgaagacacaaacagggatgctgtcatgattgcagctgcaaagctagtgcttgctgatacagtatcaaaggattatcttggtccagagattgtttctcactatgtatctcatggggcaagtacgacagagataatcaaacatctaattacttctctaaagaaaaatgcaaactttgacatgggaactctattttttgaggccttgaaaagggcatatgaacgttacatggcccatgttcacgacggagaaaaccaaatcttgactggcaagtcttattcagaatgtcaagatcttgctagtcgtcttgcaggatcctatgttggggctgctcgcattaaaaataagtcagatatcctgaagattatccgagatgatgtagagaagaggattcaacatatcaatacgactggagatcaaagtgtttggcgcccattttttatgttcgtagagcacctacgtgacaaacatgcaaagaatgaggttttgcatgaggaagaggaaaaacctgtgaggaaacggggccgtccaagaaaagttagagaggtaccagatgtaccagatctacgcggtgctcggcatgtacgtgggaagaaactttttagagatgatgggcacaactctagtggtgaggaatctattggtgcatctgaccatcaggatcacggtgaagatgacgacagcaacggcgatgcagatcagcccttgatcaacacgatcaggtcttccgccgccaagctacggtccttgaagatctctcaacagggaccaagcagccaaaaaggggtccctggcccatccggcgagaataatgaacgtaggatgttctcgttctgggttttgccacaccctaacaggagcatgtaa

SEQ ID NO: 7443 - DNA, 681 bp, Zea mays
  Peptide Sequence Number=SeqID_49222
atggccgtggacgacggtgttcctgggaagggggacgttgggcgggcgatagttgctcaatgggctcgtcccttcatcgtggtactgccatgggcgtccaccggcaaggccggagagggagagggggaggcagatgagagaagagaggaggagggggcgatggtttctcacccatggtggagctcgaccgaggacacttcgatggtgctttgggatgcggtgggcgtgcgagcgagcgacaccaagttctggatcgaggcagtcctccggggcacggcggacgcgcgagcggcgacgacgagctcgccgactgcatgtcggtgggtggcagttgtgcgagttcagctcggctacgtgggtgtcagggttgggggggcaggcgagtgcgacatgaggggtttttcaaagggtgggcggggtggttggcaagccatgcgcgtcgtgcgcgctcccctcggcatgcgtgcaggaggagcggggcaggtcgattacgcggggttgagggagatgataggtgggacctgctgggcagaggggggaatgacgggtgggcccacggggcacgcttgctactcctatgaagcgggtgcacggtcgagccaccggaaagagaaaaagaagattgggagagggaagaagagagagatattctggatgtggaaggaattggagcacctttga

SEQ ID NO: 7444 - DNA, 837 bp, Zea mays
  Peptide Sequence Number=SeqID_49223
atgaagcacgttgaaatgatgatgagaggtgttgtctcgaatgttggcgctcctccctcttactccgcttggaaccttcccccgatggccattgttgccgcacacaagagtctgcttcaagaggaaagacagacccacttcctgatgctagttgctgccaacgactctaaaattgatattgtgcttggtatgctagctgactctcaggttgagtctgtcgaggtaaagaagaagaggagaaggcttcatcattggtcaggcttggagccagtgaatgcccatgttgcacagaaccccggtgacagtacagtgaatactaatatagaggatgctgtggagggctgcgcccccgggggtgctccagcccctgagtatcctccaacccccgagggtgctccaacccccgagagtccttcgattggctccctctctactgcttccatggaagttcatgtggggtcgccaatgccccgaactgatgatgttgaaatgacaagtgctgatctgctcgttggtctagctggctctgccgccttagaggtcagtggccatggcactgaagacccaatgggtgctcctagagttgagatcctaatgggtgatgcacatagcttggattaccccattcctttgatgcctgatcctgctcgtgatgtggcttctatcggtgtcctttcttctgggaagaggtgtgctcaaagtcaggcggagcttgatcaggtgactatgtttcttgacggtgctcgtgccacgaattcctccgtacatgcgaagcttgacttggagaaggaagctcacgtggtaactaagagcacctacaggggggtgaataggtga

SEQ ID NO: 7445 - DNA, 894 bp, Zea mays
  Peptide Sequence Number=SeqID_49224
atgaataatagaaccttggcatccaggggctatcatctacatggagtgcacaccggtctctatttcagccgcaacattcgtaccctcacgacgctgcgactgcggggggatttcaactcgttggctcctaccttcggcttccgcttcagtcttatcgtgtgcggtgcccccgttgcgattccggtggatgttagaaatgagaaaccccacacagttagacatccatgtgacctatccttaggtgtaaacaaaattcttgaaagcggaatattaggatttgagaagtgtttcaaggtcattgcaaatatatcggatatccaccctaaagacacagaagcaccgcctgatggggtggatgacatgacaaggttatcatacttgcatgagcctggtgttttagataacctggctgtcagatatgcgaaaaatatcatttatgtgagtgatgctttattcctatatgggaagcacaactattatacctatactggtaacattctgattgcaataaatccattccaaaggctacctaatctggttgatgcccgtactatggaaaaatacaaaggtgcaaatcttggtgacctagatcctcatgtatttgcaatagctgacgtctcttacaggcaaatgataaatgaaggaaagagtaactccattttggtcagtggtgaaagtggtgctggtaagactgaaactacgaagttgttgatgggatatcttgcatatctgggtgggcgatctggaacaggagagaggacagttgaacagcaagtattagaatctaatccagttcttgaagcctttgggaatgcgaaaactgttcggaacaacaactcaagcatttcaggaaatcttatagcagctctggtgaaagttatgtggcatacttaa

SEQ ID NO: 7446 - DNA, 858 bp, Zea mays
  Peptide Sequence Number=SeqID_49225
atgccggatcccgcgcccgagcctaccagcgccgacgcagcaaccgagcctgtacccaccggcgtcgtcgttgcttctcagggcttccaggtaaacggcgatggcgacatgctggagcctacacccgccaatggcgacgtactggacaacgtgcaggcaccggcaacacggtcttccttgggcttagtacctttaaacagcttgcattcaatggtggacattgatttagtacaaccaacgccacgagttgattgggacaccatgattatctcggatgggtgggacaatgaaggaaggcatgaagtgccatgtgaaaatgaaatgtattgccaactcggattgttgaatgaggacgaggttgagagaaatagaagggaggaagcttgtagaggtggctttatcagtgttgaagacaatgtggaaatgacaatagtgatcacattgcagaccagccttgtgaagactatctaccagatgagaggaagagagtcttcggattcgagtcggatacggaacgagtactacccgatggttgggaaattaatatcatcggtggttgtattggatgataagcatacttgcacttctagtggtcgaagaaagactaccacacctactagtggttgggttgctttccacgcactacctcttcttatgaagaaacctcacatggaagctaaagagctacaagttacactacaagacactcataatgtgacaatatcacatgacgttgtttggaagggaaaagagaaggctctcaaggacctgtttggctcttgggaagagagtttccagctatggttctcttggcgtgaggccatcctagcaaaatgtcctggtagcgttggagattga

SEQ ID NO: 7447 - DNA, 396 bp, Zea mays
  Peptide Sequence Number=SeqID_49226
atgactcgcccaaggccaacttcgtgcaggagacatagttctgatttgcccgaagccaacctctgcgagagatgcggtttcgattcgcctgaggccaacctcggcgggagatgcagtcatggtggcggtgacggtggtgacccatggcgcgatgttgacggtggtgttgtcgtaggggttggagtttctattagagcatacgacagagacgtcatggatggcgacgtagagggaggtgagcgtgacacgctcgtggaagagggacttggcgtcgttagcgagaggcgtgtcctagctgaaggagacagattgatgttgatgctatcatggatggcggactcgaagcccgcgaggacgtcggcggtggcgcacttcgctggccagcagaccttttga

SEQ ID NO: 7448 - DNA, 600 bp, Zea mays
  Peptide Sequence Number=SeqID_49227
atgctcgccaggatcatcttctgcgtcgtcgtcgccgccgccgtcctcgccgtcgtcctccttgccaccgtctccccgctgccgcaccggtcgggcagccgcaagggcgctgcaggccagcgcaccttcacggtgtacatccatcccacggcatcgacagccgtgcggcaggagcaagcccaagggcgccggcaagaagcgagcgcgctggtgttccaccaccggatgacggcggggccggagagcgcgtcgagggccgtcggcgcggcctctgggtttctgctcccggcgggcgagcggggtagtgccgtggcgtcggtgttcgacacggtgcacctgacgttcgacggcagcgccgggctgtccggcagtctctgcgtcgaggcgagcaacgagaaggcgcgccgggccgcgagacgccggcacggcggggaggaggaggaggtgctgcgagtggtgggcggcactggcgcgttctcgttcgcgcgagggcatgccgtcctgcgggggcagtggtcccgccccggcgccacggcggcggcgcttcttcttgagctgagcattttctctgctgagagtgatcagctgatcgcccattag

SEQ ID NO: 7449 - DNA, 1896 bp, Zea mays
  Peptide Sequence Number=SeqID_49228
atgtcgtcgtcggtccggcacggctcgtcgaggggccaggcatggttctgcaccacgggcctgcccagcgacgtcgtcttcgaggtgcacgacatgaccttccacctccacaagttcccgctcatgtccaagagcctcaagatccaccgcatgctcagcgagcaggaggaccagcgtccgacgcggggacggcggcagcggaggagacaggtgaggagcagtgacggagacgatgacggtgctgcggaaacagagatcgaggaggaagaagccgagcctgagcagcagcaggttaggacggagggggagggcgacgggcagccgtactgcattgcgttccccgacttcccgggcgggccgggcacgttcgaggcggccgccaagttctgctacggcgtccgcgtggacctcaccccctggaacgtcgcgccgctgcggtgcgcggccgagtacctggagatgacggaggaccacgccgaggacaacctcgcggcgcgcgcggaggcgtacctggaccaggccgtgctgcggcaccccggcgacgccaccaaggcgctcaagtcctgcgaggagctgctgccgctcgccgaggacctcggcattgtgtcccgctgcgtggaggccatcgccgcgcgctcgtcgtccgcgtcgcggtcctggttcgacgacctggccgtgctcggcctgcgcatgtacaagcgggtgatggcggccatggccgcgcgcggcgacgtcagggcggaggccagggagagctgcctcgtgtcctacgccaggggcaccatcccggggctgtcgaggtccatgcggcgccgcctcgcgtccgcgcccgtgtcctccgaggtggagcagaaggagctcctcgaggcggtggtcgccagcctccccgcggacaagtgctcggggcgcgtcgtcaccgccaagttcctcttcgcgctgctgcggacggcgcacatcttgcgcgcgtcggacgccgcgcgcgcggcgctcgagcggaaggccgccacgcagctgcagcaggccgcgctggaggacgtgctcatcccgagctactccggcaccgcggagacgctctacgacgtggactgcgtccagcggatcgtcaggtatttcctcgcggaggaggagctcggcggggaggcgtcgtcttcggccgcgatcgaggaggaggaagcggtggccgtggcgcggccgtccgccgtggtcatggtgcaggtgggcaagctggtggacaattacctcgccgaggtcgcgtcagacgccaacctcaagcccgccaagttctgcgacctcgcgctttcgttgcccgaccatgcccgtatctacgacgatggcgtctaccgcgccgtcgacatctacctcaaggcgcacccgcggctgacagcggaggagcgggaccgggtggtgggcgtggtggactgccggaagctgacggtggaggcgtgcacgcacgcggcgcagaacgagcggctcccgctgcgggcggtcctgcaggtgctcttcttcgagcagctgcagctccggcgcgccatcgcgggcacgctcctggcgccctccgccggcgccgctccgcgcgaggctgcggcgtggcgaggcgcgacggcgctggcgcaggacagccaggtgctgcggctggacatggacagcatggcgagccgggtgcaggatctggagcgcgagtgctccagcatgcgcagggccatcaagaagatcgacgggcgcggcggcagcggcagcggcagccggtcccccggcggccgcagcgcggacgggtccaggcccgcggcgggcgggtggagggcgcggcacgggtgcaaattcagcacgcaggtgtgcgactcgcacgcgcgcaacgtggtggcgtccagggcgtccaggatggggatgagcccgtag

SEQ ID NO: 7450 - DNA, 210 bp, Zea mays
  Peptide Sequence Number=SeqID_49229
atggagaaggggcctggaggaggctccacagtttctggacatcgtcaattcgtcgtgttccaggggctagggccttcccttctcttttctcgaggagcaaaatggaccccggattttgtaaacttagatgatctgactcggaaagaagtctacttaactctaaagatcattggtgctaacatggtttcaaaactactgaaaacccattaa

SEQ ID NO: 7451 - DNA, 618 bp, Zea mays
  Peptide Sequence Number=SeqID_49230
atggccgacattgtggccaacctagagacggcgttagcactctgcgagggaagcgccgccgacggtggcggccgtgggaccgacgggttcggaaacatctcctccagcgccagcctctgtcatcgtgttgagaccgagaaagggaacagacggacggtgatcgaattcattgcttacccaggcaagctccccgatctcaaggccacgaccaccggcgacgccggctcggctggccagagcaaccaacgcggcgagccaggtagtcaccttgctgctgccgttaagttccggtggggaagggcatggaccgggggggaggcgtggatcggcgtttggcaagcgcgttgcgaggggcggtggggaagggtgtggacggtgcgacatgtgcactgctggatcctaggcgtggacggcgtgcggcacgtgctgccggatcccgggcgaggggcggggactacaggcgaaaatgacatcgtgttgccggatccggtgggaaagggcgtggacggcgtgcggaggaaaaggagcagaggtttctggataatagtattagagaggaaaaaacttaagatcgacaattttttatttgagattcccttcgcaactgcaaaagtttag

SEQ ID NO: 7452 - DNA, 630 bp, Zea mays
  Peptide Sequence Number=SeqID_49231
atgggcggcccagccggccagataagggtgcagttaggtccccgcggcggcacgcgtgcgcggctgtgggcgcgtccccgcggcggctcgcgggcgcggcccgtcgtctgtgagcgcggccccggtggcacggcggtctccgtccccggccccagcgcgcgcgcggagcgcgactccccggcggcgcgcgagaatagttcgtcgttcaggggcgcgggcgcggcacccggcctcacatggcgcaggcgcgcgacccagcgtgggcttggccagccaggcgcgtccctgtgcgggcacgcgggcctcgccacaggcgtgcggccccggccaggtcccggcgcggtctcgacgctcggtgtgccgctgttaggcgggcgaggcctcgacggcacgggtgcggctggcatggccccgtccggccgtgggtgtccccggcgtgggcacgggcccagcagccccggtggcgtggcgtggccccaacagcccaagcggagcgggcgcgagactcctctggcgcaagttctggcgggcagcgctaccaccgtctgtccgcaagattgcagcacacatgtgtgcaagaacagcgccattgcagatgaggaccgacagatacataacaaaactgagtaa

SEQ ID NO: 7453 - DNA, 327 bp, Zea mays
  Peptide Sequence Number=SeqID_49232
atgtggaaccctatgtctagtgccttgaacacgaaggtcaggaaccacgcgcgcatctcacgccatagggccttggcaagctcagctgtctcgctcatgctctctgtgttactgctccacgtgttgtgcctcgatggggagcttggtgacaccaccaccgccttagactgcaccttggctgaagctgaaggtccatgtgcttgcttcttcgataggattgttgtcctcgacgattccatcgaaaatgcacttggcttgttggtggtggcgttgctcctcgtccaggagaagggtccagtggcatcgttcagcaatttgaggacctag

SEQ ID NO: 7454 - DNA, 507 bp, Zea mays
  Peptide Sequence Number=SeqID_49233
atggcaaaacggcggggcagcgagcgctcgacgacgagggaaagggtgggaggtaggggtgctagtgggatggggggacgcggggtggttcacgggcacgatgccccccatatctcgccgaggcggttgaggaggacgccgctggccagtgggccccaccagcaggccaaggcggctgacggccgggcgagccccacacgcggcggcggcgctgggcactgcccacgcgcgcacgcgcgcggtgggcgcgggcgagccgctggggtgggccatggaggcgccctgcagctgggccgtggcgagaagaaaggcggctgggctgcgtgggggagcaaaggctcacgggccgcggctgctaaatcagcccaagccgagagaggagagagatgtggggagaaatgggtaggtggtgatgaggatgatgattttggttatgactatggtactggagaagatgaagtcgcagaggaggacttccaggagtttcaagagtatgatgagttctag

SEQ ID NO: 7455 - DNA, 2115 bp, Zea mays
  Peptide Sequence Number=SeqID_49234
atggacgtgcccaccaggttgccagacccagtggcgtcgcctatactgaggcactcgtctgccaactcgatgaggaggacgcggtcgctgcggtccctcatggccgactcgccgtccgtcaccttcgcggccaacctcaggtcgggctccaaggccgagtccaccgcgtcctcgctcgagagcttccggttccagcgcgacgggtccgcgtcagggacccccgcggtgttctcgcgggtatccaccaggcggtccgcgtccgagcgcgccggctcgcagcgcgacctccgggacgaggacgcgcggttcgtgtacatcaacgacgcggaccgcacgaacgcgccgccggccgggctccccgacaactccatccacaccaccaagtactcagttgtcaccttcctcccgcgcaacctctacgagcagttccaccgggtggcctacctgtacttcctcgtcctggtggcgctgaacatggtgccgcagctcggcgtgttcacgccggccgcgtccgtcctcccgctggcattcgtgctcggcgtgacggcggtgaaggacgcgtacgaggactggaggcgccaccggtccgacaggaacgagaacaaccgcaccgcgtcggtgctggtgggcggcgtgttcgtgcccaagcgctggaaggaggtgcaggtgggcgaggtgctgcgcgtggtggccaacgagacgctgccgtgcgacatggtgctgctgtccacgagcgaccccaccggcgtcgcctacgtgcagaccatcaacctcgacggcgagtccaacctcaagacgcggtacgccaagcaggagacgatgcccacgccgccggaggcgctcgcgggggtcatcaagtgcgagaagcccaaccgcaacatctacggcttcctcgccacggtcgacctcgacggccgccgcgccgtctcgctcggcccctcgaacatcgtgctccgggggtgcgagctcaagaacacgacctgggccatcggcgtggccgtctacaccggccgggacaccaaggtgatgctcaacagctccggggcgccgtccaagcgcagccgcctggagacgcggatgaaccgcgagaccatcatcctcgccgtcgtcctgttcgtcctctgcgccatcgtgtcggtgctcgcgggcgtctggctcggcgaccacagcgacgagctcggggtgatccccttcttccgcaagagagacttctcggtgaaggacgacccggatgccacgtacaagtggtacgggatgggcgccgaggtggcgttcaccttcatgaagtcggtgatcatattccaggtgatgatccccatcgcgctgtacatctccatggagatcgtcagggtcgggcaggctttcttcatggtgcaggacaggcacatgttcgacgacaagcggcaggccaaattccagtgccgcgcgctcaacatcaacgaggacctgggacagatcaagtacgtgttctccgacaagaccggcacgctcaccgagaaccggatggagttccggtgcgccagcgtgcacggagcagacttcagcgacactgccggcgccggcgccgacgacgggcattctgtgatcggggaggacggcgtcgcgctgcggccgaagacggccgtgaagaccgaccccgagctggtggcgctgctcaaggaaggcggcggcggcgcgagtgccgaccgcgcccgcgacttcctcctgacgctggcgacgtgcaacaccatcgtgccgatcgtggtcgacgacgacgacaacgactccgcggcggcggcggccaggctcctggagtaccagggcgagtcccccgacgagcaggcgctggtgtacgccgccgcggcgtacgggtacaccctcgtggagcgcacctccggccacgtcaccgtcgacgtgctcggctccaggcaaagggcagacataacagaagagacctactgcatgcgcatggatgcatacaacacacccggccctagcacaccggcggaattatggccagctcgctggtctgccgtgcacgaaggaccggacactgcgttttttcaggcaagggaactagagatggcaacgggtacaaacccgttgggttttgccatcccaaacttgtacccgtga

SEQ ID NO: 7456 - DNA, 3360 bp, Zea mays
  Peptide Sequence Number=SeqID_49235
atgtcggcgtcgcagaaggagctgggcgacgaggacgccccgcgtgggtgcgcgtgccgacgcccccgcgccaccaacgagcgcctcgacctcgcgggcaacgccgtgcgcaccgccaagtactcgccgctcaccttcctgccgcggaacctcttcgagcagttccaccgcctcgcctacgtctacttcctcgccatcgccgtgctcaaccagctgccccagctcgccgtcttcgggcggggcgcctccgtcatgccgctcgccttcgtcctcctcgtcaccgccgtcaaggacgcgtacgaggactggagacgccaccgctccgaccgcgccgagaacggccgcctcgccgcggtcctctccccggccgcccccgggggcgcccagttcgtcccgaccgagtggaagcacgttcgagtcggcgacgtcgtgcgcgtcgtgtccgacgagtcgctcccggcggacatggtcctcctcgccaccagcgagcccactggcgtcgcttacgtgcagacgctgaaccttgacggcgagtccaacctcaagacccgctacgccaagcaggagacgctgtccacgccgcccgagcgcctcgccggggccgtcatccgcagcgagcgcccaaaccgcaacatctacggcttccaggccaacctcgagctcgaaggggagagccgccggataccgctcggtccgtccaacatcgtgctgcgcggctgcgagctcaagaacacgccctgggccgtcggcgtggtggtttacgcggggcgggagaccaaggccatgctcaacaacgccggcgcgcccaagaagcgcagccgcctggagacgcacatgaaccgcgagacgctcttcctctctgccatcctcgtcgtgctctgctcgatcgtcgccgcgctctccggcgtctggctgcgcacccacgaggaggagctcgagctcgcgcagttcttccacaagaaggactacctgcaccgcgacaaggacaatgactacaagaactacaactactacggcatcgcggcccaaatcgtgttcatcttcctcatggcggtcatcgtgttccagatcatgatacccatctcgctctacatttccatggagctcgtcaggctgggacaggcctacttcatgatccgagacacgaggctgtacgacgagtcctccaattcgaggttccagtgccgggccctcaacatcaacgaggacctaggccagattaagtgcatattctccgacaagaccggcacgctcacgcagaataagatggagttccggtgcgcgagcattgacggaatcgattacagtgacatcgcacggcagcggcctcctgaaaagggcgatcggatttgggcgccaaaaatatcggtgaacaccgatccggagctggtgaagttgatcagggatgggggcgataccgagcgagggacgcagactcgggagttctttctcgccctggcatgttgcaacaccattgttcccatgatcgccgatggtccggaccctaaggagaaggtgatcgactaccaaggcgagtcaccggatgagcaggcattggtctctgccgctgcggcatatggctttgtgctagtcgaacgaacatcgggccacattgtgatcgacgtccttggtgagaagctcagatatgatgtccttggtcttcatgagtttgacagcgatcgcaagaggatgtctgtcataattggctgccctgataagtctgtcaagctgtttgtaaaaggcgctgacagttcgatgtttggagtcatcgacaaaactgcgaattcagatgttgtccaagcaacagagaagcatctccattcatattcatcattaggtctgcgaacacttgtcattggtatgcgggaacttagccaagaagagtttcaggagtggcaaatggcttatgaaaaggctagcacggcactactaggaagaggaaaccaactccgcaacgtggctgccaacatcgagagaaacttgcgtctattgggtgccactggaattgatgacaagctgcaggatggtgtacccgaagcaattgagaaactgagggaagcagggattaaggtttgggtgctaacaggtgacaagcaagaaactgctatctccatcggctattcctgcaagcttttgacaagagacatgacacagattgtaattaacagtcgctcaagagaatcatgcaggaagagtctagaagatgcaatcgccatggttaacaaataccaatcgttctcgacagacccccaacttagggtgccccttgctttgattattgatggtaacagccttgtctacattttcgatacggattgggaggagaagctttttgaaatcgctatagcctgcgatgtcgtcctatgctgtcgggtagctccccttcagaaggctggtattgttgatctcattaagaagcgaacaagtgacatgactttagctattggagatggtgcaaatgatgtatccatgattcaaatggctgacgttggcatcggcatcagtgggcaagagggaaggcaagctgttatggcctcagattttgccatgggtcaattcagatttttggttcctctgttgttggttcatggccattggaattaccagaggatggcctacatgatcctatataacttctacagaaatgctacttttgtctttgtgctattctggtatgtactttacactggtttcaccctaacaacagcgataactgagtggagcagcgtgctatactctgtgatatatactgctgtccctactattgtcgtcgccattctcgacaaggatctcagccggcggacattgctgaagtatccccaactctatggcccagggcagcgtgatgagaactacaacctgaggctattcatattcatcatgatagactccgtctggcagagccttgcatgtttcttcatcccctaccttgcatacaggaagagtataattgatggttccagccttggagacctatggacactatccgttgttattcttgtcaatattcacctggcaatggatgtcatcagatggaactggattacgcatgcggcaatatggggtagcattgctgcgacatggatttgtgtcatgatcatagattccataccaatcatgcctggtttttgggcaatctacaaagtgatgggaactgggctgttctgggcactgctgcttgcggtaactgttgttgggatgattcctcattttgccgcaaaggccttcagtgagtatttcatccccagtgacattcagattgcaagagaaatggagaagtcgcaagatttccatgatgtaactcatccagaagttcaaatgagtacagcaattctttcagcagtgtgcaagctttcttga

SEQ ID NO: 7457 - DNA, 183 bp, Zea mays
  Peptide Sequence Number=SeqID_49236
atgtgcgcggtgcaccgttacgcgaaggggcagcctattttcctgggccttctagccagctatctcggacacagtcctgaggccctgctgctgcttggtctctcctgggttttcaacgtgctgttggatcgcagacagggaatctgcgagcaggagagtgaggttacggttgttgacctttag

SEQ ID NO: 7458 - DNA, 441 bp, Zea mays
  Peptide Sequence Number=SeqID_49237
atggcgggccactcgtatgaccgctcgagaggggcgaatggagctaaggatggcgccgccgcaggaggggaaaccattatacctggtgttgggcgatcggaatcgaccgagggcaatcgctggtcctctctgatgctcgtcgcggcttctcttgggcagaatcgcactctggaccaccagaatgcctcgccggagtggaaactccgccatgctatcgcgcgtaccgtgggtagttgtcgtcgcggcaccaaatcgctagtaagtcctcaatcatcgtatttccctcgacctcctttgcgcgtagaacagttcggggaggcgtattggtcactaggggaccagttggcgttcactctggtgggctcgccgccgtgggaagccaggcgctgctgcatcgggaggttgaagatgaacggcgaggtgatggccgctggccgttga

SEQ ID NO: 7459 - DNA, 534 bp, Zea mays
  Peptide Sequence Number=SeqID_49238
atggcgtccctctcccccgcgctcctccccggcgccggcgtgaccctcctccgagcgccgcccgtgttccgcgtcaccgcctcttcctcgagctcggggagcaagaagggcaagaagcccaagagcggcagcaagggcaaggacaccaaggcgctggagcctccagcgcccgtggtccgccgcgcgccgccgggaagcgcctccatattccagcagcagaagaatgaggcggcgtccagggccgggggcgccggtgggaaggggcccacggaggaggagctacggcagcggcaggccaacgagaacgccttcctcctcgcctggcttgggctaggcatcatcatccttgtcgagggcatcgcactcgccgcctccggttttctgccagaggaatatgacagcttctttgttaagtacctttatccatcgttcactccaacagttgttctgtttttggctggtacggttggcatgtttggagcaatgatgagggtagagttagcaaatgtgcttgttatgtatgaagtagcttaa

SEQ ID NO: 7460 - DNA, 987 bp, Zea mays
  Peptide Sequence Number=SeqID_49239
atgctgaatcaggttgaccttgatccttatgggtcaccagctgcattccttgattcagcggttcaatgtgtagcagatgggggcatcttgatgtgctcagctacagacatggcagtgcttgctggtggaaatgcagaagtttgtttttctaagtatggttcttatccattaagaggtaaacactgccatgaaatggcgctgaggattcttcttgcctgcattgagtcacatgcaatccgtcacaagcgctacatagttcctataatatcagtacacatggatttctacattagggataaggaaaacatagctgtaccaaattttcgccttactctgcctgaagtatgttctgaatgtggccatcaatttgttatggggggacctctttggagttatccaatacatgacaaggtatgggctgcttcaatattatcagatattcatgctatgagagaagcatatccagcttatccaaaaatttcggctatactatcttcagtctcagaggtaatgtctttttcttctgctgtacacaatgcaactgacatagatgggaaaattggaaaaattgatcatgaattgctggaggcacctttatttgtgagtcttcacaatctgtgtgcaatactgaagtgcactactccaaccatggttatgttacaatgtgctatcagaaatgctgggtatcaagtatcaggaagtcatgtggacccgctagctcttaaaacagatgccccgatgtcagtgatctgggacatcatgcgatgctgggtcaagcttcacccagttaaacatcgacctggaaatcatcctggcaatgtgatactttcccaagagcctaaatttcaggcaaaattttccagagtactgggggcctcggtcacccggaagcgcgcaagattcatgccaaatcctgagaagtattggggtcctgggacgaaggctggcaggaatccgagaacatttcagatggataaccgtaactga

SEQ ID NO: 7461 - DNA, 633 bp, Zea mays
  Peptide Sequence Number=SeqID_49240
atgacgagctccccccggtgctgctgctgcctcactgcctgcttcatcgctggctgctcgggtggtcggctcgccgccggttctgctccgtcggactcggacgcgatgaccgtgtgtatccagtctcgcgtctgcgtcaccagtgatgatgggtttctcttcctttcgctcggctccttttatgattatgacctagaggtcacacggctcgacgccgacgccgacgccgtgacagataaggcatcgggtgtcaacttggactgcaaggtcgatctgcaacatgtcgccaacagtgctcgtaacgcagagtacaacccaaggttcgcgcgtatcgtccagaagctcggtttcccagctcggttcaaggatttcaaggtccaaaatatagttgggtcatgtgacctcaagtttcctattcgtctggagggcctcgctttggccagtggcttgtctgccacttatgaaccagagatcttccctgggctggtctaccgtatggtggaccctaaggtcgtgatcctcgtcttcgtctccgggaagattgtcctcacaggagcgaaggtgcaggaagagatatgcgcggccttcgagaagatacacccgatgcttgtgcagttcaggaaacggtcgtag

SEQ ID NO: 7462 - DNA, 408 bp, Zea mays
  Peptide Sequence Number=SeqID_49241
atgaccgccgccagcgcaggccacaccgccacccatcccacggcgcgcgtcttcatcccgcgcgcgtcgctcgcgccgcgcgcaatcccgcccgcgcgccgtgatgcccgccccaccaccccgcccaccatcccggcgaggagaacatcccgcgcgcggcgcccgcgccaggcaccctgccccaccaccccgcccgcgcgagcccccccgcccgccatccccggccaccccgccctggcccgccatccccggcgaggacagcatcccgcgtgcgtcgcccgcgccaggcaccccgcctcccacccccctcccccgacgcgccgtgatgaccgccgtgggggtatcccgcccacagcaaaccgcgacggattacatgaaatggaaggcgagattcgcggactaatctga

SEQ ID NO: 7463 - DNA, 234 bp, Zea mays
  Peptide Sequence Number=SeqID_49242
atggggggatgggagcgagataacgtgctggcagtaggagtgcctctagccaacggggaccaaggtgttgaggtaggggtccctggaggcgaaaggaaaggcggagacggcgtcgccgaaggcaggggcaccgtagggtggcgtcgtcaggtgagccagatgggactgacgaggagctctaaggggcggtgggaggacgcgcaggttccccgtcgacggagggcgagggcctag

SEQ ID NO: 7464 - DNA, 729 bp, Zea mays
  Peptide Sequence Number=SeqID_49243
atgtctcgcttgcccaacgcgacaaaaacagagctcggaactggacgtggacgtgcgagcacacgcacaacccgtaatccccccacacggagacaccgtgacacggcccggagcgcctcacgtcacggtgctcgtgccggccggcgctgcacaggcatacaaacggagatctatctagtgaaggggtatcttcatgttctaatcacaaccgttcatcaaccgagtgacagtagccacgtcgtcccccacctccagaccgcacagacgatggcactaggatccccacggcagagcgccaccggagctaagcccaccggcgctccagacgtcttacgcttcagtcgaagtgctaaacgtttacgaggcgatggcagaaatgcagagaggcccataccagcggcaatgacacggcaaaggcgacagtggtggacggcggatcttgcgaccgagcgttgttccggaaaacaacactattcaccctgtttcgactactgtgccaaccaccagggtaaggctaacaacagtgagtcacggcttctcccgagttcagcctcgggcgcaacagggatctccgcctcgcccgaccccggcctcagcctcggcctcaggagaaggtctctgcctcgcccgacctcgacctcggcctcaggagaagtcactgcctcgcccgaccttggtctcggaccgactacgctacaggggatacatcattaccctaccactagctag

SEQ ID NO: 7465 - DNA, 3453 bp, Zea mays
  Peptide Sequence Number=SeqID_49244
atgcctctcctcaacccaaccggatcctctggtggaacttccagggtgccctcgtcggcggcgcgcttctcctcctctacatcgtcgacgccgccgttggttgaaagctcagaggtcatgcctcactcggcgcggcctccggggaccggagccaacttcaaccgcgcgcgcgaccagcgcggcacccgccgcgtctttctgcgtcgcccgccgcctccgcttcggcgtcctcctcatgtcacagccaatggtcatcgaggcgagggaggcagcggcggcgggggagcgcgtcggagcgcgggagaggaggcgggcgggcggtacacgaggcgcggcggcgtggcggaccgtgaggtggcggtgagtgccagcgcggaccctgtgggacggaatgctgcgaccgtcgccactggtggtgaggctccaccgccgcgggaggaggatggcggcggacgaggtggtgttcttgtgagcaagcgcccgtctgctgcgcccgtgctcccaccgcccaagcggagggcggtctccgtcactcggcagttcccacccgcctccaggtggacctcggctgctcctgctccgctcgctggtgcagatgccgacggaggtttgcggacacgatacgaagggcaacgtgagaacagagcttctgatgcattcaagaagccggcagttgctcgtcccctcgcgggcctcaaggatggtgttggtgttggtgtgatgtcgagagcggtgtcccccaaagctgctggcacgagggttctcaaaaagccgtgtgccagggatggagctgctccaatgtcgaacacagatcgtcatgatgctggattggtgaaatcgtctgctgcacatgacagaggaaggggagcaaggattgatgagctgcgggggaagaagggcccggtgaccggcgcacgatttccaccaaagccagagatcatatctaccacacgcaccttgctacctggccatggaaaggatggcggttgccatagcaaggtgcatcggccattggagtctgggcgtgctcatggtagttctttggctgatggacgtgctgtggaaattgttgctgcttgcactggtactagtgctggagctgtacaagatggcaaattagagaatggagaggttccctccaagaaggcttgggggtctcaggtttcttccgatgctgttctgcttgatcctgcatcttatagggatgtttctgcaagagatttccctggtttaagtgggaactttggaaggaagacgctgtcatgggcactagtaaaagatagaaaggtgatgaacaaatatggtaggacttcgtacagatacaacactgttgctgcatctttttctaagaattcttccaaaaaacccgtgatgggtaagatagtatctgacagtggtaggattaacaggatgatatcttctgatgttgcagcagaagtgtctggtgagggcactgtgttgggaagtaaggacatgtttacaaatcaaagcacagtcaagccagacaatgtggttcagaaatttgttacagatgctcagcatataccattttccaaaggcaagaaggaaaccgtacgcgaaaggtgggtaacaacaaatgggattcaggactctgttgagctcactaaggatcgagttatgcaagctcccatgtctgcagacatgtgccccatgcccatgacacacaaaaagaaggctgccacaactagggatttctttggtcacaagaggatggtgaaggcaaaagctctaggtcatcaacagaggatgtttgcctcgggtagtaagagcaaacgggatgatgaggtggcttccaacttgaaaattcatgacatatttagggaaatagttttaaatgaaagaaatctcgagctttacctcaatagttcatcaggcctgccttctgtgaggtgtcaaaggcaatatagatacatgaatgcagatgctaggagcagatttaaaatgttgtgcaggatgtttgagtttgtatgcaggacgcttgtacaaactatggagcagcgttcattgaagatgagaattgacaatgaagctgctaaagtaatgaaggcgttaccaggttttactaaacatggtcctattgtgggacaagttcctggagttgaagttggtgatgagtttctatacagagctcagcttgctattgctggtctacatagtgagtaccggagaggcatttccaccaccacatatagaaatggcatgcttattgcaataagcattgttgcttctggaggttatcctgatgaattgggttgctcaggtgaactgatatacactggttctggcgggaagtctgctgttaagaagaaagatgaggatcaaaagcttaagtgtgggaaccttgcactaaagaattgcatcaaaacaaagactcctgtaagagtgattcatggatttaagtgtcggaataccgatcgaggcagtcattcgggggccaaactaatcccaaaatacacttatgatggattgtatttagtggtggatttctggatggatggtaaaccaggttcaagggtgtttaagtacaagttaaaaaagattcatgggcaaccagaacttcctatgcacatagctaaaagattgaagagcttcaaaagccgtccaggcctgtgcatgactgatatatctcaagggaaggaagccactcccatctgtgtcattaatacagtcgatgatgtgcaacctggacctttccaatacaccactagaattagatatccatttgggcttacagaaaaacacaatcagggttgtgactgcaccaatggttgctcagactctgagagctgtgcctgtgctgtgaagaatggaggggagatcccatttgacttaagtggcgcaattctcaatgagaagtctgtgatatttgagtgtggttcatcttgtaaatgtcctccgtcgtgccgcaacagggtcagtcagcatgatatgaaaataccactggaagtattcaggacaaccaagacaggttggggcgtaagatctctatggtccattcctgctggcagcttcatatgtgagtatatcggtgaggtgcagcatcaaaaggcggctgacaagagaaggaacaacaattacttgtttgatgtaggccttaactatgatgacgagaatgttagcagtgtgttgctatcaaatgtttcaggtttgaactcttctagctcttgctcccaggccatggaagatgtgcgcttcactatagatgcatctgtgtatggaaacatcggaaggttcatcaaccacagctgttcaccaaatcttcaagcacaaaatgttctccgggaccatggtgacaaaaggatgccacatattatgttctttgctgcagagacaattccaccactacaggaactgacttatgactataataactctgaaatagatcgtgtccaagctgtagcagttcaaacaactgactttaagccgaaatga

SEQ ID NO: 7466 - DNA, 3207 bp, Zea mays
  Peptide Sequence Number=SeqID_49245
atgcccggcataccgagggatgtcgccgagcactcgttggatattcgagccggagcccgacccgtcaggcagcctctgcgccgattcgacgaggagaagcgcagagtgataggcgaggagatccacaagctaatggcagcagggttcatcaaagaggtattccatcccgaatggcttgccaaccctgtgcttgtgaggaagaaaggggggaaatggcggatgtgtgtagactacactggtctcaacaaagcatgtccgaaggttccctaccctctacctcgcatcgatcaaatcgtggattccactgctgggtgcgaaaccctgtccttcctcgatgcctactcagggtatcaccaaatccggatgaaagagtccgaccagctcgcgacttctttcatcacgcccttcggcatgtactgctatgtcaccatgtcgttcggtttgaggaatgcgggcgcgacgtaccagcggtgcatgaaccatgtgttcggcgaacacatcggtcgcacagtcgaggcctacgtcgatgacatcgtagtcaagacaaggaaggcttccgacctcctctccgaccttgaagtgacattccgatgtctcaaggcaaaaggagtcaagctcaatcctgagaagtgtgtcttcggggtgccccggggcatgctcttggggttcatcgtctccgagcgaggcatcgaagccaacccggagaagatcgcagctatcaccagcatggggcccatcaaagacttaaagggcgtacagagggtcatgggatgtctcgcggccctgagccgcttcatctcacgcctcggcgaaagaggtctgcctctgtaccgcctcttaaggaagaccgagtgtttcgcttggacccctgaggccgaggaagctcttgggaacctgaaggcgctccttacaaaggcgcctatcttggtgcccccagttgatggagaagccctcttagtctacgtcgccgcgaccactcaggtggttagcgccgcgattgtggtcgagaggcaagaagaagggcatgcattgcccgttcagaggctagtctacttcgtcagcgaggtactgtccgagaccaagatccgctacccacaagttcagaagctgctgtatgcagtgatcctgacgaggcgaaagttgcgacattacttcgagtctcatccggtaactgtggtgtcatccttccccctgggggagatcatccagtgccgagaggcctcgggcaggatcgcaaagtgggcggtggaaatcatgggtgaaacaatctcgttcgcccctcggaaggccatcaagtcccaggtgttggcagacttcgtagccgaatgggtcgacacccagctgccgacggctccgatccaaccggagctctggaccatgtttttcgacgggtcgctgatgaagacgggagccggcgcgggcctgctcttcatcttgcccctcgggaaacacctacgctacgtgctacgcctccatttcccggagtccaacaatgtggctgagtacgaggctctggtcaacgggttgcggatcgccatcgagctaggggtcagacgcctcgacgcccgcggtgactcgcagctcgtcatcgaccaagtcatgaagaactcccactgccgcgacccaaagatggaggcctactgcgatgaggttcggcgcctggaagacaagttctacgggctcgagctcaaccacatcgctcggcgctacaacgagactgcggacgagctggctaaaatagcctcggggcgaacaacggttcccccggacgtcttatcccgggatatgcatcaaccctccgtcaagatcaacgacacgcccgagcccgaggtaccctcggtccagcccgaggtaccctcagctcagcccgaggcgtcctcggttcagcccgaggtaccctcgacccccgagggcgaagcactgcacgtcgaggaggagcagagcggggccacgcctgatcgaaattggcagaccccgtacctgcaatatctccgccaaggagagctacccctcgaccaagccgaggctcggcgggtagcgcgacgcgccaagtcgttcgtcttgctgggcgatgaggaggagctctatcaccgcagcccctcgggcatcctccagcgatgcatctccatcgccgaaggtcaggaactcctgcaagaaatacactcgggggcttgcggccatcatgcagcgcctcgagcccttgtcgggaatgctttccggcaaggcttctactggccaacggcggtggctgacgccactagaattgtccgcacctgcgaagggtgccaattctatgcgaagcagacccacctgcccgctcaggctctgcagacgatacccatcacctggccctttgctgtatggggtctggacctcgtcggtcccttgcagaaggcgcccgggggctacacgcacctgctggtcgccatcgacaaattctccaagtggatcgaggtccgacccctgaacagcatcaggtccgagcaggcggtggcgttcttcaccaacatcatccatcgcttcggggtcccaaactccatcatcactgacaacggtacccagttcaccggcagaaaattcttggatttttgcgaggatcaccacatccgggtggactgggccgccgtggctcatcccatgtcgaatgggcaagtagagcgtgccaacggcatgattctacaagggctcaagcccaggatttacaacgacctcaacaagttcggcaagcgatggatgaaggaactcccctcggtaatctggagcctgaggacaacgccgagccgagccacgggtttcacgccgttcttcctggtctatggggccgaggccatcttgcccactgacctggaatacggctccccgaggacgagggcctacaacgatcaaagcaaccaagctagccgagaagaatcgctggaccagctggaagaggctcgggacagggccttgctacactcggcgcggtaccagcagtccctgcgacgctaccacgcccgagaggtccggccccgagacctccagatgggcgacctggtgctccggctgcggcaagacgcccgagggaggcacaagctcatgcccccctgggaggggccattcgtcatcgccaaagttctgaagcccggaacatacaagctggccaacaatcaaggcgagatctacggcaacgcttggaacatcaaacagctacgtcgcttctacccttaa

SEQ ID NO: 7467 - DNA, 828 bp, Zea mays
  Peptide Sequence Number=SeqID_49246
atgccaggtccaacgccgtcttccacgccgccggcggcagccgcaaaccccagccacaactcgaggcggaagcggaagcccaggccgaaaacagcgcccccctctgccctaaatcctaactgggcgctgctccagtccaagctcccccaccgccccgctgcgacccacctcggcaagcgcaagcacgacggtgccactccggcgcccgcggagccgtctccaccacccacagcgcaggaggtcagactcgagccaacctccgacgataccagcttgactaaggtggtggcgattgattgcgagatggtcggggtaggatttgatggcggtaaaagcgccctcggcagggttaccttggttaattcctttggcaatattgtatatgatgaatatgttcgcgccgtggagcgaattgtggactaccggacatggattagtgggattagacctaagcacatgaacaaagccaaagaattctgggctgtgcagaaggaagtagctgagctgattaaaggaagaattcttgttggtcatgcactgcacaatgacctcaaggtgctgctactaagccacccaaagaaggacatcagggatacatcagaatatgaggttttcagaaggttagatggtctgggcatctgctgtgacatgattattcttatcgaggatgcgagagctgcgatgctcatttacaacaagcacaagaaagcatgggagaagaacatgaaggaacagttcagattcaaaaagaagctcaagaagcgaggcaagaagaaaactactgagtccaatgggaatgatcccaatgtccccactgttcttctatga

SEQ ID NO: 7468 - DNA, 375 bp, Zea mays
  Peptide Sequence Number=SeqID_49247
atggctggtccaaccgcgcctaccacgggcagcgggtcacaccgacgcgcgcgcgagggcagcgctaggaccgagtcgcgccggaccgggcaccatggccgactgcgacaccctgctgaagaacgtggaaaacgacatacggtccacgattcgaagaatttgagacatggggagaaagaggggaggataaggaactcggataggagcaacagtcaagtggcgcaccggacagtacggtgcccccagaaacagaaagcagccaatcagggattctcggcccgcgcactgttcaatgtccggtgcacccgtagacagaaggcaaccaggtccttccaaatggtactccaacagctcctaggtcccttggggatataa

SEQ ID NO: 7469 - DNA, 378 bp, Zea mays
  Peptide Sequence Number=SeqID_49248
atgggtaccatgtttggtgtagtatctagtaccgccttagacgtgtctgatgcatttgaaaggtcctttgtgtgttttggtgtattgaatgataacccaataaaagccgatcgaactgaggatgaaggcaagaagaacttcgaggaaccaagagaaaggaagaaggtcaagaagattgaggtacctaaagctaagggtgaagaagatggtcttggaagaagtcaagggtattggagctcaaatatggcaaatattatcaagttatgtcgacgtgaggattatgagtccaaccccgagctcaaacagaccaaaaagagcaaaatggtgaaaacaattaagtatacaaggaaagtcctccaaaaagttcaagtgaaatag

SEQ ID NO: 7470 - DNA, 1146 bp, Zea mays
  Peptide Sequence Number=SeqID_49249
atgcacgacgccgtcgtggccgccgtccaccacaccgtcgtggccggcgccgcagccgcgctcgtcgctctggccgtcgcgctcgccctgctctggcgcaagaggcgtatggcagccgcgagaagccccgccaatggtgccgcagcctcaggctcttcgtcatcgaccaagcctcttccggtgatcccgctcgccgacgtcgagcgcaccacggaagggttccacccgagccgggtcatcgggcaggggaggcactttgccgtgtacgctgccgcacctggcatcgccgccaagcgcatgcacccgcacctcgtcctcggcgaccccggcgggatgcggttccccgccgcggtccgctcgctggccgtgccgccccaccccaacgttgccgcggtgatcggcctctccgagggaccaggggagcgcgtcatcctcgtcgagcgcgcccccgccggcgccgtcagcctcgacaggatcctaggctggggcgacgacgcgcaccacgtacccgcgttgtcgtggcgccagcgcgccgcgatcgctgccggtgccgcgcgcgggctggcgcacctgcacgcgcacggcgtggcccacggccgcgtgcggccgtgcaacgtccttgtgaacgcctcctccggcggcgccgcgcgctggaggcacgccaccaccaggctcaccgactacgggctgaccggcttcctcgaccgccgcgacgacgcgcgcgccgatgacgacgtgtacatgttcggcgcggtgctgctggagctgctcacagggcggcgctgggacggcggccggcttgcggactgggccctgccacacatacgcggcggcgccagcatcgaggtgttcgacgtcgtgcgggccggcgcgccggccgacaaggaggaggtgcggctgctggcgcgggcggccagggtggcgctggcgtgcgtggggaacgacgggcgcagccgtccggggatggcggaggtgtcggccatcctcagcgacgtggaggccgcgtacaggcgccgtgacggtgcacttgtgggcaaggaggaggagcacgacgacgatggcgatgagagccgtctcagtggatgccttctttgcccaggcaggagcatccacaaagcggacatgctgctccggcctcccttgtga

SEQ ID NO: 7471 - DNA, 510 bp, Zea mays
  Peptide Sequence Number=SeqID_49250
atgactgcccgcgcggcgtacacgcccctcacggcgcgacggcgatcccgcccgccccccgcccggccccgcgcggccccctgcccacccctcggcgcgaaggtgccccgaccccccgatcagccccccgaccctgcccctccccggcggcgcccgcccgctcggcctacccggcggcgctcggccgctcggccctcggcgcggcgacgcggctcccctccccctccctccccggcggcgatcccgcccgccccctgcccgaccccagccccggcggcgctcggcctcgccccctgcccctccccggccccgccccggctcgccccctcggctcgcccgctcggcccctccccgcggcggcgccccggctcgccctcggctcgcccgctcggccccggccggttcaaccgcccccctggccggttcaaccgccctggccccagctcgcccgctcgtttccccgtcccggcctcgcccgaccgtattttcgctcgcccgcgttcgcgatga

SEQ ID NO: 7472 - DNA, 212 bp, Zea mays
  Peptide Sequence Number=SeqID_49251
atgatgcttgcgttgaagggtcgcgtacggaatcagacgtgtgacggtgcgggcgtctacggcgagtgtggaccgccggtcgagccggagataaggcgggggtattttgtgacaaacaaaagcgtccgcgctggcactggcactggcaggctatccccggacgatcatccacagtcgcagtgcagccgtgcaggcagggctgttgaagagag

SEQ ID NO: 7473 - DNA, 369 bp, Zea mays
  Peptide Sequence Number=SeqID_49252
atgcggatgcagaaccgaagtttcaagaggttcagcgagcttatgaggttgcacttgaactatcatttatggaagcagttcaaggatgcagcaaaacgatcaacttccaaacgtctgtcacgtgcgaaacctgcaatgttcatgcaaactggacccttcaggatgcaatcaacttgcacaaaatgtggtggttctgggaagactgtgaagccagtggctgcctgcttctccctcctcaaggcgcagcgtagcacagcggctgcgttgctggcggccaaagatgatggcgcgtcgcgatgtacaacttctggtggcacgggggatctcctcatcaccgcgcctttctcggaggatcaaccaaacgggtga

SEQ ID NO: 7474 - DNA, 735 bp, Zea mays
  Peptide Sequence Number=SeqID_49253
atgtggtctcctgtcctcgctccgccgtctcaccttctccccctctccctcctcaccgccgtgctccctgccgccacgctgtggcccttcctcgacatcgtctgctccggccaccgccacctccggctcgctcgccgcgctccacgatcgcggactcaaactagagctggcttcaccatagacttctggaggaggcaacgagattgggaattggaacatggggagttcggtcagctgcttgggaggcggctccaagtcgaggcaagatcagaatggtcaggtcgtcgcgggttcgtctccccgttcagccacacgttgatgcagggcatagtagcaactggtactaaatttggtcatggggtggatggtatcaaggagtggatattgccaaagctccctctgggtactgcttactaccccaagtttggagccaccaatccattggacaataaggataaatctggtgccaaaagtagcttctctccatcaagcatgacaaagaaggaggctatgctaacagaattactttggctatttattccagagtatgcagatggcatacaaaataatacacattctacattgaatacgggtactgctattcagagtattgccatcagctatggatctcttattcgtaggtggttactgaacagaacttctgttggacagggcatgaaatgccaaaatgatagtgcaaaaaactatatttttacgttctacgtagctgattga

SEQ ID NO: 7475 - DNA, 573 bp, Zea mays
  Peptide Sequence Number=SeqID_49254
atgccggatcggattccccaagcagccccaggtgatactgagcccactcccaccaagctccttcttcccttaatcaacgggcggccgcatccgatcggggatccaggcagccatgccttgttggccacacagatcccacctctccagtctccgctcgaattcgcggaccgacgagcacacaaacacatcatatgcaaactcgggagaaatgacggacagagactgctactcaccgacaactggacccgaggatccctcggaccccatggcgaacccgtccgcttcctccagcttcgagccgctgcaccctgctatcccttgagacgggaggaggggaggatgcgtgctggaagcgggcgtgctaaaccgagcagggaggagaaggaatataccaaggcccgccccagcgtgaggtcgtcctcggtgcgatgccccccaggtccgagtgggggactggggtctggggactggggagtagagcaagacaacaagaaaggaactgctctgctgcagagacaggggaaaggatacaacagagagacagggtcagaactcagaactaaaaataaatga

SEQ ID NO: 7476 - DNA, 363 bp, Zea mays
  Peptide Sequence Number=SeqID_49255
atggagatcatactttgttctatggcgttttctgcagttcccagaaactttaggctgctagaagaactagaacgtggtgagaagggcattggtgatggaactgtgagctatgggatggacgatgctgatgacatatttatgcggtcctggacaggaactatcattggtcctcccaacgttgaaccaagtctatttcctatgcttggaaagtgggaaagggaacatacgatggaggacattctgaccagcttaaaaagggagatgtcaactccacagaatcgcaggctgtaccaacctcatgaaggcaatgaagaccaaagagtagagcagaaaggggtgtctcttagatgtgtcatcatgtaa

SEQ ID NO: 7477 - DNA, 540 bp, Zea mays
  Peptide Sequence Number=SeqID_49256
atgaggctcataaacttggaaaacagagttgcgtttgcacggatattcttcccttctgaagccaagattgtcatgcgcattgcacaagctgattcaaccgaagagtttgttggcatcaccaatttcagcaaactaaaggaagttgatctaaatgaaaccccaacaatgcagaatacgaggttgcgtgaacgccttgatgccttgacaaagacagtcgagctagggagacgatacttccctcattgttcagatgttcttgacaagttcctcaatgaagaatctactgatctgatcttccttgaaactgggagtccagaggatcagcgactcaagagaatgcggttttctgaactcaaagaggacgtgcgcaaggcgttcacaaaagataaggcagcagtggcagccatagcttcctcagcatcctcgtcttcatctccaagaaattccttggaaaattggagttatcagactagtcctaagagaggaaacctctctgctgtcaccaccgacatgaatcaaatcacacgaccgatcacttag

SEQ ID NO: 7478 - DNA, 690 bp, Zea mays
  Peptide Sequence Number=SeqID_49257
atggcggccaacgccgggaataagatccgcaacgccaagctggttcttcttggagatgtgggcgctggcaaatctagcttggttcttcggtttgttaagggacagtttgttgaattccaggaatcaacaattggagcagccttcttttcccagaccttagcggtcaatgatgagactgttaagttcgaaatctgggatactgccgggcaggagaggtatcatagcttggctcccatgtactataggggtgcagctgctgccattgttgtctatgacatcacaaatccggcctccttcacccgtgccaagaaatgggttcaagaacttcaagctcaaggaaatcagaataccatagtggctcttgctggaaacaaggctgatatgctagatgcgaggcaggtgccagcagagtttggccacacggtaaacccctttgaagcaaaggcgtatgctcaggagaatgggctcttcttcatggagacatctgctaaaactgcaatcaatgtgaatgacatattttatgagattgcaaagaaattgcttcaagggcaacaagctccaagcccacaggctggaatggttctgaatcagagaccaaatgagaggacgatatacacatggcacaggtggggtaagcagaacagcgtgctggatctccgttaccctgatatccataacttcacagattaa

SEQ ID NO: 7479 - DNA, 180 bp, Zea mays
  Peptide Sequence Number=SeqID_49258
atggcggagccggtgccggggacgggcgcgggcgccggcggtggccacctaggcgaggcggctctggcgcacgggaaggccgcggtcgcgagtcgggcggcggtgatggccggcgccaagggcgggcgtgggcgactgcgccataggcggcatttaaactgtaagtcacacgaaaaatga

SEQ ID NO: 7480 - DNA, 1005 bp, Zea mays
  Peptide Sequence Number=SeqID_49259
atggctgccagcgtcaagaccgctgccgccgtctgcgaccccaccgccgcggtaaagccaggcctgaagcggaagcgcatcgccgtggggagcatggaccagtacgagttcgaggacacttgctgcctcggcgtgggtggcttcggcgccgtcttcaaggcgcgccaccgtgccacgggccagaccgtcgccatgaagcgctacagcccggccgaccatacagcgttccgcgaggcgcgcttccttgaggaggcaaactgcggcggcgccaacccgttcgtcgtcggctaccacggcgtcgtccgcgaccccgtcaccggggagatgatcctcgtcatggagtgcatggcggccagcctccacgatctcctctgccagcggccccgcgggagcccgccgctgcccgaggccaccgtgcgcgccgcaatgtggcagctactttcaggcaccaagaagatgcacgacgcccacattatccatcgcgacatcaagccccagaacgtccttatcggcgagagtcatagcgtcgtcaaaatctgtgacttcgggctcgccatgtccatcgacgagcgcctcccgtacgcgccggccggcacactgtggtaccaggcgcctgagatgcttctggggaagcccgactacgacgagaaggtcgactcctggtcccttggctgcgtcatggcggagctcatcaacaaaggcaggccactgttccagggattccacgacgacggacaactctgcgcgatcttcgatttgctcggcgtgcctgacgacagcacgtggccgtggttctcgtccacgccattcgccagggaggtgatgccggagctggatatgcaattgcaacggtgcaaccgcctgcgcaatcggttccccgagacgaagctatccacggaaggaatgaggattcgaggtgctcagtggcctgctcacatgcaatcccgagaagaggctgacggcagccgccgcgctcaagcacccatggttcgccaaggtcgatga

SEQ ID NO: 7481 - DNA, 705 bp, Zea mays
  Peptide Sequence Number=SeqID_49260
atggcgagtaccgatgactcttggaacaacccgagagtcgccgacgttggcaacgaccatgaggtcccgctgcttgacgatggacaacgcggtacagccgctttggaccgtgtgcaagcggcggctgcgttggagcttgtcatacacagcggctcatgcgaccatgtaggactgcttccagaggtcgaactggcagtcgtcaagcttcttcttgtcgtcgacgagcgacgccaacctagacgtgggctatatgtgggaatgagaatgggaatgggctttgcgggaagtgggaatgagaaaggcagaacaaagaatggattgtgcggggaggagggaatgggaaagatagaacaggaaatgaaaaatagcagaacacagaatggaacaaaagaattgggttatgcgatattccgaggtgagatttttcaacaaagtttactggtcctaagtctaggctttgctgctaccagcaatggaatagtagtgtgcaatgttggctcgaagagcaaggaccatgaagcacatagtgaactttggtccaaagattcagaagcgaaagctgctagtcggagttgcacaactgagagaacagttccagaggagctctctctctctctcttcctatcgaagggtttcaccagtaatggcaataaagatgaaggggatcttcaaaggactgaagataatctctcaaatgttcggtaa

SEQ ID NO: 7482 - DNA, 1419 bp, Zea mays
  Peptide Sequence Number=SeqID_49261
atggccatccgcatcaccgtatcctattcgggctacctggcgcagaacctggccgcgtccttcggcctgcgctgcaccgccgccgcggctgcgggcgctggcgccgcgcccggtccagggtgccgcttcctccaggacgcgctatcccgccctttctgcctcttcgcctcctcccgccacgtcgacccccaccatgacgccgaggatcagaaccacccgaagcccgggcccaaggctctgtcccctgccgttgcagcaagaggagatggctactcactgttgctgccgcgatcgtgttccgcgaaggcgccgccgccggtggatgaccccccagcgtcgctggccgtggggctgctgtcggtgttcgcgtctgggatgggatcgactggcggcattgctggtgcatcctcccttgttgcgtcgccgtcaatatcaaccgggctcaaccctgcgtcgctcctcccgttcctgcaggcgagcaagtggctcccctgtagcgacatagtcgctgctgcaacgacgtcgcgcagctcaggacgcccagcaggtgcaacggctgcacctacaccgcgtacagctgcaccatcgcctcgtcctgcaccacgcgcagccgctccatcgccccgtcctgcaccatgcgcagccgttccatcgccccgtcatgtaccagtgccgtcacctgctgttgctgctccttccaaggtcggcatacaagcattggttgatagtgctagcatcgcctcaggttcagctgggattggaagaggggtcattgcctctggtgcagctggaatggtgaagaagagtggtgctagtcttcctgttggtgcaggggtgggaaggaagaccggttggctctcaaggtgggtgagctcatgctcagatgatgcgaagaccgtctttgccgctgtgaccgtgccactgctctataaatcatccctagctgagccgaggtccatcccatccaggtcaatgttcccaacatttgatgttggtgatcggatccttgctgagaagatttcgtacattttccgggaaccggaaattctggacattgtgatctttcgggcacctccagtccttcagttcatcagagcttattataacaagaacaatctttgtaggcattgggctacagcgcaggtacgtgatggtaacttgattgttaatggagtagttcaggaggaagaatttgtgttggaaccagccgactacgaaatggatccgctgactgtgcctgaaggctatgtctttgtactgggggataacagaaacaacagctttgattcacataactggggtccacttccagttaagaacatcctcgggagatctgtgctccgatactggccaccatctaggataacagatacaatatatcagcatgacatggtgcagcacacagctgttgcatcctga

SEQ ID NO: 7483 - DNA, 1446 bp, Zea mays
  Peptide Sequence Number=SeqID_49262
atggcctcctcctccctggccctccctccaatctctctcctcctcgcgctgctgctcctctccgccccctcgccgtccgcctgcgcctcgctttccttcctcaccgcctcctccaacggctccgcctccacctccgccgacccggagctggaggacctggccccggagcccaccttcctcgaggaggtcatcgacgccgtctcggagaagtacgactgggatccggacgccgaggtcagggtctggccgctcgacgccggcgccgtccgcgtcggctccgtgcagcggtacgagttccgggcgcgggcgggcgggtcggcggcgctggcgcggttctccgacgaggccgtggagtggagactcccctccgcgccggccgtcgaggaggtggatgggccggacggggtcgacgtcgtccccgccgaaggcgcgttcgggttcgacaccggcgtcagggacgtggagctggttgggccggtggagctcaagcttgctggcaaccaggacggtagcctcgtcgagctccagttaccttcgtcccttccattacctgttaagaacttcacggtattattaatgcataaagccatacaggggcagaggacccactggcgggttgtttttaattcattgttgttaagtaaatggtttgttgatttacaatgcttttgtgaaagaggtcaggggaatgccacatacacaaggcttaagaggatatttgttgcggatggcattgcattaaaggtcattggtgcacagaaagtttctgtaacccaccctcacagtataggtcttctatcaaatggaagtttgttggctagtaacaacgacctaagccaaatatggcctttgagctactcaacctgtgccccattacttcaagtgggtattgtaggatcagtcgtaattgttgtgcatcaaacaagtgtatctggaggccatgtgaagactttcttaaggtcacatgacactatagagttattgtcagacaagtataaagtccatatatcaaatcggttgatctcagaatttttgttctcctcaattagcccaagactgataaagcttgaaaagatcttgaagacttggtttagcaaaagaaaccaggagaatagttcagtgcacttcattgaagctaaagtgacatcgatacctctggtgaaattccgtttggagtttgaaagggatgtcactgaggatgatcccatctgggaagatgttccagagtggaaaacgagacccatggtccagcgagttccagttgacattatagctagagtggaagatgacgataggctgaaggctatttcggtgaagaaggttaggaggcaatttccagtagtggacaccactacttggggcagcctgacttcaaatatttccttcacaaagtttctgtcattcattttgccaccagaaccgctgtcgctggatgtaaagtggtaa

SEQ ID NO: 7484 - DNA, 348 bp, Zea mays
  Peptide Sequence Number=SeqID_49263
atggatggcatgcttgctgatcctaaggaagccatgactggtatcagagaaatccactttttgcccttcaaccctattgataataggactgctctaacatatattgacgccgatggcaactacaccgtgtcagcaagggtgctcctgaacagcaaaataaatcgttcgaatccaattgttgaaatgaaacctcccaagattatgcggaatcaatcatttgatctgtgctcccccatcgccaccagcgacggtgccacccctgttgcgtccatgggtgccaggaaagacggtcagctaggcaacctcctcaaggctccgaagcttttggacacttccaccaagtcctga

SEQ ID NO: 7485 - DNA, 348 bp, Zea mays
  Peptide Sequence Number=SeqID_49264
atggatggcatgcttgctgatcctaaggaagccatgactggtatcagagaaatccactttttgcccttcaaccctattgataataggactgctctaacatatattgacgccgatggcaactacaccgtgtcagcaagggtgctcctgaacagcaaaataaatcgttcgaatccaattgctgaaatgaaacctcccaagattatgcggaatcaatcatttgatctgtgctcccccatcgccaccagcgacggcgccacccctgttgcgtccatgggtgccaggaaagacggtcaactaggcaacctcctcaaggctctgaagctgttggacacttccaccaagtcttga

SEQ ID NO: 7486 - DNA, 222 bp, Zea mays
  Peptide Sequence Number=SeqID_49265
atgggagaccacgtctcaggtcgcgtgaggagggcaatctgcgggcaggatcactcaggtcgtccaccaactgcatcttgtgggtggcaccacatcactggcttgatcatcatctctcggtcctatatgaggtgcaagatgcatatgtatgaatataatgaaagtagcacaaaaatagcacaagatataccaagacacagtggcgaactaaacattaattag

SEQ ID NO: 7487 - DNA, 138 bp, Zea mays
  Peptide Sequence Number=SeqID_49266
atggccaccaccgtcgttgtcgaagcctaccgggcctcgcgcaactgcgttgccaccgggacaggggcgcccgaacctggttcggttgaaccggatgacaccgttgggctagggcttcctctagttattggaagctga

SEQ ID NO: 7488 - DNA, 105 bp, Zea mays
  Peptide Sequence Number=SeqID_49267
atgggccagattgaagtttggcccattatggcgttccacgataacatattctctatatatttactagagagtaaatggcctatcacaactttgatagtgcaatag

SEQ ID NO: 7489 - DNA, 930 bp, Zea mays
  Peptide Sequence Number=SeqID_49268
atgggcgggcagtggctgggggaggggatgccgccgtccaacctgcagtgcttcttggactgcaccacccccaccgtggacacgcacattctccccaagacgaatggacgtttgccagccgatgcttggcaccacgctgagatggacagcgtcgagtacttcaatctttccgacctctgggaacagtactacgagtggagcgcgtacggcgccggagctacggtgcagctcccaggaggggagagagtagttcagtactatgttccatacctgtccgggatgcagctattcaccaacaaggtcctgacggcatccaggagttttggtgaagataatggcatggatttctggagtgatgatgaggacaacgagaagatgtcaagatcgtggagttcgacttctgatgaatcattgttcaactgtgatgtggtatggcccaacaggaagcgtccagggcacttgtcctttgagttctttgaagtaggttcaccttacggaagggtcccgttcattgacaaggtctatgaactatcccagggctttcctggattgacattactgaagagtgctgacctatcgcctgttagctggatgtcagttgcctgcgtgaaggatttatctgcatgcttcttgacttaccatactatttcctcctcgttccaagattacgggctcgagaccatgaccaatgattgttgccatccagttgccgacggcaagcagaatggccacatggataaaaagagtaacaccgtgtcactgcctccattcggcctcgcagcacacaaggtacatggttccctctggaccaaccccatgacaggagatcacagaaagatggacttcctcttcagtgcagcggactcctggttgaagcagcttggagtccagcaccatgacttcaacttcttcatcactcaccccatgtga

SEQ ID NO: 7490 - DNA, 777 bp, Zea mays
  Peptide Sequence Number=SeqID_49269
atgacgccgcatctgcccgccgtctcctcctcctccacgacgaccacatcccgcgccgccgccgccgctgccgcgcctccgtcctcgccgcatcagtaccggaggcggaggcggcgccgggtgccgggctgcctccgcccgcgcgccgcgtccgtccgctgctgcgccgcggcggcgcccgcgccgcaggcagcggtgcccgcggccgcgcgggccgaggcaaccacgcgggtcttcgtcgtgtccgacctgcacacggactacccggagaacatggagtgggtgcgccgcctgcccgccgaggtcggggcgggcaagggggaaggcgtcgacgcgctcgtcgtcgcgggcgacgtggccgagacaagggacaacttcgcgcgcaccatggagatgctcagggatggattcgccgccgtcttctacgtgccggggaaccacgacctctggctgcgccgcgagggcggccgctacagctttgacaaggagaaggatgttagcagtgtgcgtgttccgtcgctagaaatggcttgtaaagactttcatgcttgccaatggccttcagacctgacaaatgatgatgaggctcttgctctttactttgacaagttgaatgacaagaatcatgatgctactgaagaagtgaaaagtagcagcaaacagatattaacattttcacacttcgtaccaagaggcccccggccgacgttcctgcccatcgatacccctctccaatccctcaccgatctagtgaccataacatctggtatcgactag

SEQ ID NO: 7491 - DNA, 270 bp, Zea mays
  Peptide Sequence Number=SeqID_49270
atggcgacgatggaaggcaccgagatttggggaagggaggggattgcgatagaggcaaaggatgccggggccaagttcccacgggtgacgatggaaggcgccatgggcaccgcgatgcgggaagggagaggatgccccgcacgtgcgggtgacgatggaaggcgtcgtgggcgccgcgatctgtttggggaaggggccgcggcgacagggggctgcgccggtgcggggaaaggaggcagcaacacggtgacataccagagtgcagggtga

SEQ ID NO: 7492 - DNA, 552 bp, Zea mays
  Peptide Sequence Number=SeqID_49271
atggcggatgaggtggagcttgctgcggaccagcacgtccgctacatcgtcacggtggagaagaagaaggactcctttgagtcgctggtgatggagcacatccgcctcaacggcgcctactggggcctcaccacgctcgacctcctccacaagctccatgccgtagatgccgccgaggtcgtcgactggatcatgtcctgctaccaccccgaatctggtggatttggagggaacgttgggcatgacccgcatgtcctctacacgcttagcgccgtgcaggtcctctgccttttcgatcggctcgatgtccttgacgtcgacaaggttgctgattgttctcgtatattgccttatgtaccttatcattactgcaccgtctgcataagattgatgtgcaaaaagctgtggatttcgttgttagctgtaagaacttggatggcggatttggagctatgccaggaggggagtctcatgctggacaaaagatatgctgagatggcgctgtcagatgtggacgctacttcacagaaccacgattcgacggagaaatag

SEQ ID NO: 7493 - DNA, 174 bp, Zea mays
  Peptide Sequence Number=SeqID_49272
atgcaggttcagaataatttatgtactcctaagaatggaccaaaaactggtactgagaatgaaatgcatattctggtggcgttggcgtctttgttggcgatggcatcaaacaacccagtgagaccaaacttgcccttgctgagcaccagggcgagaacatggcctcgacagtga

SEQ ID NO: 7494 - DNA, 1089 bp, Zea mays
  Peptide Sequence Number=SeqID_49273
atggaggtgaggtccgagcaagggctgatggcggggagggatctattcggtatgccaaagagcccgccggcgccggtttccgggccgccggcgtccgccgccatgcagagcgtgcgcatggcgtacacctcggacggcaccgctgtgttcgctccgatgagatcctcggccgcgacgccgtcttaccagccgcagggtgcagcccacggcgctagcatgtccgcggcgacaatcattggaggcaatggcgcggcagctgcgccgagcatgggggagccggtgcccaagaagaagcgcgggcgaccaaggaagtatgggcccgacgggtccatggcgctggcattggtgcctgtgtcggcggctacggggtcgccgacgacagggcagggttcttctgggccgttctcaccggctgggtcaaatctgacgaactctctgttggtagcctcgccggacgggttcaagaagcggggccggcctaagggttctaccaacaagccgcgcatggatgctgctggatcgtcaggagctggatttacacctcatgttatcacagttcaagctggggaggacgtgtcatcaaagatcatgtcgttttctcagcacggaccgcgtgcagtctgtgttctctcagcaaacggtgccatatcaaatgtgacgcttcgtcagactgctacatcaggcggaactgtaacatatgagggtcggttcgagatactgtcactgtcggggtcattcctcttggtggaggatggtggtcaacgcagtcgaactggagggctcagtgtgtcgttggctggtcccgacggtcgtgtgctgggcggtggagttgcagggctcctcgtagcagcttcgccagttcagatagtactgggaagtttcaattctggaggcaaaaaagaggcaaaaaagcatgctccttcaggacccacaccagcgccactgaaggtcgctcctccgacaacaaccaggatgggacccaacagcagcagccctccttcaagaggagagaaggttgtggagccaaaggttctgcacaagaatacgttgaaagcatttggcatccttgatggcatgccgaaccattga

SEQ ID NO: 7495 - DNA, 204 bp, Zea mays
  Peptide Sequence Number=SeqID_49274
atggcgatggtggatgagtgcttgctggagaggtatcaatcgaagctccagggtttgctcgtcggatttggcctccgcggtcgtgccgcctcatgtcgggtcgtatgcaacaggcgaaccctggggctctccatggagaaggtgccagacacgcaagatccaagggttcctgctgcgtaccggttcgggagcgtaggattctaa

SEQ ID NO: 7496 - DNA, 684 bp, Zea mays
  Peptide Sequence Number=SeqID_49275
atggcggagccggccggcaaggcccgggagcggcgggtgtcgatcgaggaggtggcgaagaagctgtccctgtggcacacggccacgttccggcccatcctgacccacgccgagctggagcccatcctgtgtgcggcgggcttcgtggcgctgccgtcggcaccagcgacgcatcagaagcaggacgagcggcccggcgtggcgtggcgcgagtacgccttcctcggcggcggcaatgcgagccctgcggcggcggccccgcggcgctggctgggcccgcgcccccgcctcccgtacccgcgcgtcgacggcctccacctcaagacgtaccaggccttcctcggcgccgtcgaggcctacctcggcgcccaccgcgtctccaacctcttccacgtcaggctgatgccggtgacgagcccgcacgaccgcgcgttcgacaaggtgttccggccgatgcggaactgcagcccggaggaggacgggctcatcgtgtaccgggagggcaccctggacgacctcaccgtggagacgtgcagccgccacgccgccaccggggacgacggcgccgccggccacgtcatcccggggatcagctgcagcgacctcggctgcctccgcaaggtggacggcaactgcctcgaggagggatgcaaaagccgccgcggcactgcccgcggcccatga

SEQ ID NO: 7497 - DNA, 363 bp, Zea mays
  Peptide Sequence Number=SeqID_49276
atggagctcgaggaggaagagagctatgctgtgggaggaagaagagagaagctcggcgtccaatttatagagaagagggagggagaggaagggtcgaccggcgtcatgccattgatggcattcaaagagcttgaatggagggagagaaacagacgagttgaatctcccttacacgcaatgaaaaacggacgtggagcttcaggggcacggcgcgcggtgtcgggctgctctgctggcgcggcttgggcgcaggtggctgcaagtgctcggctctgtcgcagcgcggcagggcggtcctggtgttacagtttgcaagaccccatcttcactaccgaggtgaatggccaaggattcactacgtag

SEQ ID NO: 7498 - DNA, 120 bp, Zea mays
  Peptide Sequence Number=SeqID_49277
atggccaacgaggagggctctgtttgtgaccgggaagatgaggaccccgacacccagggcccactggggactcgggctatttcccgagtacctctccgtaaggacctattcactggatga

SEQ ID NO: 7499 - DNA, 129 bp, Zea mays
  Peptide Sequence Number=SeqID_49278
atggcgctgctgcccccatggtctacctgctgcgagttttgcctcgtcgcactcgtcgtcgggctcaaaccggtgtatgttgtgtctcagtttgcaataataaaagttatggtcgcggatgaaaagtag

SEQ ID NO: 7500 - DNA, 195 bp, Zea mays
  Peptide Sequence Number=SeqID_49279
atgaacaatctgctccagcaacatttagctcaggccaagcagcgaatgaaatcgcaggctgataaacgccgctcaaagcgtgtcttccaggttcccattgagattctacagaagcgtgtgatcctgcgcggcgtgcaagctgtttcccaaggcttgatcaagtggtcatcgctgccatcatctcttgctacctag

SEQ ID NO: 7501 - DNA, 582 bp, Zea mays
  Peptide Sequence Number=SeqID_49280
atggacgcgccgggagcgctggccacgcaccaggggccgactgtgtgccatggctgcgagcgggcatgccacactagcgggccacaagccgtcgcgccggctagccgcgcgcaggctggccacgccgggccgccgctacgccgactggccgcgctggccgaccgcaggccaccacgtcggcgggccacaccgagccaccgcaacgccgactggtcgcgtccgcgcccgcgccgaggccgcgcccgcgctggagccgcgcagcgggcaccgcgagaaacggggaggagaggaaggtggagggggagaggggcgagcccaccacggggacggagacggctcgagcggcttcgaggggcggggggcgactccgtgcggctgagggcgatgtggacgagggaaggggcgctgggcgacatgggcgtcaggcacgaggggcggttggggaagaccgtcctaccaagcgggccccactggcgatggcggcggcggctggggcgctcccgcgctagtgtttgcgggggaggtgggccgggcggcgtcgggtgggccgcgcgcgcgctgggagcgggcgccgcgcgctag

SEQ ID NO: 7502 - DNA, 558 bp, Zea mays
  Peptide Sequence Number=SeqID_49281
atgacgtcgtttgttctcaactctctacgaaagcaaagaaacatcagcaggaccctgggccgcaccgtcagctacgcttctacagggctcgagcacttctccgacggccacctgggccatctccttgtatctataaaaggggatgtccagggccttcctagaggaggcaaggcgagcaggggaaaaggacggtcttcccccaaccgcccctcgtgcctgacacccacgtcgcccagcgccccttccctcctccacatcgccctcagccgcacagagtcgcccccccgcccctcgaagccgctcgagccgtctccgtccccgtggtgggctcgcccctctccccctcaaccttcctctcctccccgtttctcgtggtgcccgctgcgtggctccggcgcgggcgcggcctcggcgcaggcgcggcgcgagtgcggccccggcgcgggcgtgactagtcgcggcggctcggtgcggcccgccgacgtagtggcctgcggccggccagcacgaccagtcggcgtcgcggcggcccggcgtggccagcctgcgcgcggctag

SEQ ID NO: 7503 - DNA, 1290 bp, Zea mays
  Peptide Sequence Number=SeqID_49282
tccgagcacgacaccaccgaagccaccccgacgaagcccgacgccaccggagccgccctgacgcagcccgcggccgccggagcctctgcccccgtccccaacgccaccggcgcccgccccgaccccgccggagctcgcttcaccggttcatcgtccggcaaactggtggtggagggggggaagtcgaagaaggaggaggagagcctgccgccgggcttcaggttccacccgacggacgaggagctcatcacgtactacctgcggcagaagatcgccgacgccagcttcacggcgagggccatcgccgaggtcgacctcaacaagtgcgagccatgggatctcccggagaaagcgaagctgggagaaaaagagtggtatttcttcagcctgagggaccgcaagtacccaacgggtgtgcgaacaaaccgtgccactaacgctggttactggaagacaacggggaaagataaggaaatcttcaccggtcagctaccagccacgccagagctagtagggatgaagaaaaccctggtgttctacaaaggaagagctcctcggggcgagaagacaaactgggtcatgcatgagtatcgtctgcatcactcctctagatcagtccccaaatctaataaggacgagtgggtggtgtgccgggtgttcgccaagagcaccggcgctaagaagtacccgtccaacaacgcgcactcgcggttgcaccaccacccgtacgcgctggacatggtgccaccgctgctgcagcacgaccccttcgcgcgccaccacaactacccgtacatgacctcggccgacctggccgagctcgcgcgcttcgcccgcggcacgccggggctgcacccgcacatccagccggcgccgcaccccgggacgtcggcgtcggcgtacatgaaccccgccgccgccggggcgccaccgtcgttcgcgctctctggcggcctcagcctgaacctcggcgcctcgccggccatgccgccgtcgctgccgccgacagcattccacgcgacgatgtcgatggcgatgagcggacagacggcggcgccgagttgtgccggcaccggtaataaccatcgtcatcaggtggtggcgggtgagcaccagcagcagcagatggcggcggcgggggctcggcggctgcgtgatcgtgcccggagcggacggagggttcgtcgccgacgcggccgccgggggtcggtaccagagcttggacgtggagcagctggtggagaggtactggcctgccggctaccaggtctagactctagtagctcgtag

SEQ ID NO: 7504 - DNA, 192 bp, Zea mays
  Peptide Sequence Number=SeqID_49283
atggccctcgccgtgaagctggcgtcggcgatcttctgccgcagcacaaaacttaccgcgtgcttgccagaggtgcactacagtaaacggaacaacgtccgacggccaaaaccgtcggacataaggttcaaaccgtcggaaataagttatctccgacggcaatgccttatctccgacggcaatgacgcctag

SEQ ID NO: 7505 - DNA, 1170 bp, Zea mays
  Peptide Sequence Number=SeqID_49284
atggcgctcctcctcctcctcgtcctgctccgctccgccgccagcgctggcgcgggcgctgaaccgcatcgctccccggccactgccctcttcgtcctgggcgactccacggtcggctgcgccgcggcgacggcgagcagcattctgtcgctcaacctgaccaccaccaccaccacgctgccgtcctcgctctccggcgagccgtgcctcttcttccacgaggcgcggctccgcgtcccggacctcctcgcggccaagatgggcctcccttcgccgcccccgatctccgcgctcaacggcacagcgtccgccgccgcgcgcggcgtcaacttcggcggcggcggcgggcagctgctgttctacggaggcggaggcggggtgcgcgggccggcgtccgtcttcctcacgggcgccgtcgggcagcaggtccgcctcgcctccgagacgctgcagctgctgcggctcgaggccgccgcgccgggggagccgtcgtcctcgcccgccgcagtgttcgtcctgtccttcggcgccgacgcctacgcgcgcctgctcgcgcgcgggcccgccgaggccgccgccgccgcgcccaagcacggccgccgcgggctcgcccgcctcctcgccgaccgcgtcgcgcgcgcagtctcggagctgtacgaggccggcgcgaggagggtggcggtgatgggggtgccgccgctggggtgcgcgccgcgcgtcgtgtgggagcggtcgtcccccgtccgcgacggcggcgcaggatgcgtcgaggaggcgaacgagctgatccaagggtacaacggcaggctcgcggcgaggctggacgagctgcggctggcgctggccggcgccgacgttgtgttctgcgacgtgtacaaggggatgatggagatcatctccaacccgaccacgtatgggttcgaggagacgagggaggcatgctgcgggctggggcccatgagggccacggtgggctgcgtcagcaaggagatggcgtgcggcgcgccggagcgccacgtgtggtgggacatctacagccccacggaggccgcggatgccctcgtgaccaactggtcctggtcgtcggacggctccggcgccaccagcatctgcggccccatctctctgcagcagctggctgcagtgtcgccgtcgccgccgggggcgtag

SEQ ID NO: 7506 - DNA, 831 bp, Zea mays
  Peptide Sequence Number=SeqID_49285
atggcctcaaaagctataaaaagaaggcctatcagcgctgagactgatacaacaggggaaaaacaaatggatacagcactgtcagatcctgtaacagaacctcttctaggaaacactcctcaggaagagaaatccaagacatatgagcctattacacggtcaggtttctgggatgggacggcacaggagtgtcttcgttggacacatcttttagcagcttttgttgctcaatctgcaagaaacatagtgctacttgattcattcatcatctttggccaactatttatgagttgtcacttggatgttgctgataatgatgtttcactgataatgatgtttctggaaacatctacttatctcacttttctccttaagtgctttggacaaattgttctaaaagagcccgacttttcacttgcagtaaatgttctttctgaatttggatatttgctagcaagactctttggttgctcttctgcttccaaaagttcacaaaatggacagacacttccagttaacctcagtccattacaggaagaaaggttaagattgttgagacaaaggatagatgtgccatatgactgctcctctgtcaagcatcaggattcctttcacaggctactgcataaagcagatggaaaaatgagaacaaaagctggtgttcactttgttcaactactcgatgatgacggtgtggctttcgataaccttttctgtgtagcatttcaggaggttctgaagtctacacggggtcagttagagcaagagcttactatcggaggtatttctcgcattcaagacatgccatcattcagaatgctgagaaggtag

SEQ ID NO: 7507 - DNA, 423 bp, Zea mays
  Peptide Sequence Number=SeqID_49286
atggaggagcggagcggcggcggaagtagcgcaggaggcggcctcgcctacatattcaccgacagtgacagcgacagcgacgacgaacaatgtgagaaaagtcatgacgacgataataatactttgtcctgtccagctcgagatgattcaggaacaagatatcgtgaaggttctcattctgcgagttcttctgggcttggagaagatactgccattcacagatttgtcggatcaacggtgcaaaatgcatgccaccatgggttagtcgatccaactgtcaacctaaaggaggctatggatgatataaacggtatgtttgggagaccactgaacttgaaatgctacagagcaaagcggaaagccaacgcactgtcagatagaagaaaagctgccccagcttctggttgtttctctccatattag

SEQ ID NO: 7508 - DNA, 396 bp, Zea mays
  Peptide Sequence Number=SeqID_49287
atggcgtccgcgctgccgctcctcctcgcgccgcgcgccgtctttgcgtccgcggggccgtcttcgcctcatctccgctcccgccgcctcgcgctgcgtcttcctccccctccccgacccgccgccctctccgcgccaccagccgccgtgcagccgcgcgaggcccggcgcgtccagccgccccgcgccgcctcctgctgccaagatcccgctccggccgcgggaggaggcgccagggactggcggatgttcttagcatggtacctgatggctctggacaagaacccgattgtgactaaggcggtcacttccgctgccctaactctggccggggacctcatctgtcaggactggaatatctaccggaatcccaaggctttgattcaacctaattag

SEQ ID NO: 7509 - DNA, 573 bp, Zea mays
  Peptide Sequence Number=SeqID_49288
atgagtgctctgaagaaatccgacaagaaagccgccctcgacttcgcggcatggagcttcaatgtcaccacgtcggtcggactcatcatgtatgtccactttctccaacgcaagtactctctgaactcattcaacctgctgggccacactgctccagcccaagctgggtcactcctgctagtgggaccatttgcagattacttgttgacaggcaaaagggtggatcacttcagtttctcatcgcttgctctgtttttcctggcactctcatgcttcatcgccattggtgttaatctgagccaattcatctgtattgggcgcttctctgctgtatccttccaagtcctaggccacatgaagaccgtacttgttctgtcccttgggttcctattctttggcaaggagggcctgaatcttcaggtagtccttgggatggttctggccgttcttggaatgatatggtacgggaacgcatctgccaaaccaggcggcaaagagcggcgcagcgtcctaccgctgaggtctgcaagtctcaagggaagttcagaagaaaagggtggtgccgagaaatag

SEQ ID NO: 7510 - DNA, 2756 bp, Zea mays
  Peptide Sequence Number=SeqID_49289
acacggtagtgagcgggcagtggtttggcatagacaagatcacgtatgaatatcaggacagtgtttcttggaagaaccaagaagatcctgcaccaggtcctttctcctatcacgcagatcttgttacgatgagccaatatgtgtcaatatggaatcactcggaagtttactggcaatctgggaactggacaggcaaagcattcacgtccatccctggaatgccactaaagagtgactacatatatgacttcgttaacaacagtcgcgagcttaagtttcggtggactacgaaggatgtgtcagtaatcacaagagtaattctaagcaataatggccaactacaacgtctcacatggtccaatgattcggaggaatggataacagggtggtattttcctgcagctctatgtgacgtatattctgtatgcgggccttttggagtctgcaggacaggttctgatgagcaatgcttctgcttgccaggtttcagaccagcttcctcaagaagttggcgtcttggagcatggagtcaaggatgtgttaggcaaacagatatccaatgtgctgagtcaaatatatcaagtgccataaaggagagtgatgcgtttctcaagatcactaacatcaagttttcacaaaacccagtaaaactgaaagtccaaagcatggaggggtgcagatctatatgcttgagtaattgctcttgcactgcatatgcacacaagcaggattgcaatatctggaatagtgaactctgggatcttaaacaactacctaatggtaatactgatggttcagatatgtatatacgtcttgcagcatctgatcatgtagttcaagatagcgaaaaaaaggcacaccatctgaggctaattgtgctatttgcagtgctgggtagtatttttatggcactatgtgctcttagcataacagttaagatgtttcaaaggacttcatctagaaaggcattctcagataattactctctcgtcgtctatgattactcgtttttgcggcactgcacaaagaacttttcagatagagtggggcaaggtagctttggttcagtgttcaaaggattgctcccagactccaaaccgatagctgtcaagaagcttcaaggcatgaaacaaggagagaagcaatttcacaccgaggtgagggctttagggaaaattcaccataacaatctagtccacctcattgggttctgcttgagaggggctgaaaggatgttggtgtatgactttatggtgaatggatctttagatgctcatctcttcaaggatgaaaagatattggattggaacaccagatttttaattattctaggtgttgcaaagggattacagtatctccatgatgaatgtcaggagtgcatcatacattgtgatataaagcctgaaaacgtacttcttgatgtaaacttcagtccgaaactggctgactttggtctggcgaagcttatggaaagacattttagcagggccttgacaactatgagaggaacagcagggtatcttgcaccagagtggattggaggtctgcccataacaccaaaagcagatgtgtacagctatggaatgatgctatttgagatcatttcgggcagaaggaattcagaattgatggagagcggagccataaggtactttccagtgtgggccgcaataaggataagtgaaggtgacatttctgaaattttggatcccagactaagtgccgtgaattttcaagagctagagagagcatgcaaggttgcatgctggtgcattcaggacaatgaggctcacaggccaaccatgcgacagatagttcaaatcctgcaggacattcaagatgtcagcgcggccccagtaccgccacatcacctgaagcaacaccttcgacttcacgttgcaaagccccaccttcacacgcataccagacgccgagaagcgaaaacaacaatcgagggtgatgtcgtggccgagaagaactttaataacgacaccttcagtaagcgagtgatgtctaggacactaccgtcgcttgtccaagatggaccgaactttcatcgaaagaagacagtgttgaagaatgcgacgccctcaacaggagaagcggcgtccacaagcatcaccgtcgccgagactttcgcccaagaaatccccagcacatcgtcatgccaagacctagggacaaagcatgcagctttcgctgtcatcctaacatctcgcacaaaccctttagaggggcatcgacacgccggctgccgcagcagccgcaaagctgcgatgatcaccatcctctctggctgggcacacagattgggcacacagaaccgggcaacacctggccacgtgcgccacactgtcgcgcgcgcgccagagccgatgccgactgtcggccaccgaagccaaccagcaccaccaccctgcgccaggccctgccgctgccggccaacgccaccccggcgctgtcgtatgcaaccaaacgagaggacctatcgccgccattttggccggttgcgcagccctgccgacacaccccgccagaccactggacgcgtcctctccgcccgcgcccctccccgagcgtcgacgtccaagccctgcacgaggtctgccaaaaccggccaaccacgagcaccgtcgaggcatcgacaccgagggccatctccaaccatccactcccatctccggcagccatgtgcctgcactgaactcctctccgccctcgacagccgcgtcggtgtcgagccccttcccggctga

SEQ ID NO: 7511 - DNA, 600 bp, Zea mays
  Peptide Sequence Number=SeqID_49290
atggctgccggagatgggagtggatggttggagatggccctcggtgtcgatgcctcgacggtgctcgtggttggccggttttggcagacctcgtgcagggcttggacgtcgacgctcggggaggggcgcgggcggagaggacgcgtccagtggtctggcggggtgtgtcggcagggctgcgcaaccggccaaaatggcggcgataggtcctctcgtttggttgcatacgacagcgccggggtggcgttggccggcagcggcagggcctggcgcagggtggtggtgctggttggcttcggtggccgacagtcggcatcggctctggcgcgcgcgcgacagtgtggcgcacgtggccagccagagaggatggtgatcatcgcagctttgcggctgctgcggcagccggcgtgtcgatgcccctctaaagggtttgtgcgagatgttaggatgacagcgaaagctgcatgctttgtccctaggtcttggcatgacgatgtgctggggatttcttgggcgaaagtctcggcgacggtgatgcttgtggacgccgcttctcctgttgagggcgtcgcattcttcaacactgtcttctttcgatga

SEQ ID NO: 7512 - DNA, 636 bp, Zea mays
  Peptide Sequence Number=SeqID_49291
atgggaacgcaggcgctgatgctgaacacgcggtggaaggtgttccggggcgacagctcccgccagcgggacctcatgttcagcatagtgaagccatccatgatccagctgcggggaaatcaaatggcgacgtcgccgctgtgctccgcttccccacggctgcttcgagccctaggccagcctccccgagacgtccactcgccgcggacagtcgtcgtggccgcgggcacccgtgtgagcagagtggaggcccgcgcgtcgttggtgctggccttggcctcgcatgcgctctccgcctcgcagcgccgcttcgccgagcacaccgatgaggcctccaagtacgccttcccgtccggccgcttcgagccccgcaccctcgaggaggccctcatattcatgtacttttttgcagtgcctgatctcgagacagttctgtttcgcatactgaagtgcgaggcagagtatgagatcagagaagtggagaatactgcctctgagcaaatggaaatgacaacacctatttttactcggaaggcgaagtatggttccaatttgcctcacccaaaagatccttctgtgactatcaaggaggtgccccgcaaaatagttactgttgcagccttttcaggtccataa

SEQ ID NO: 7513 - DNA, 186 bp, Zea mays
  Peptide Sequence Number=SeqID_49292
atgggtgggggatggggcgagtcgcgggggcaggggcgtgctcttgcagctgaactctacctcacggggacgatactggtacttgctgtgcatggtggcgacggggttcatggaccgacacgacagcgacgcgaggcagcggcggctcttgctgttggcgaggaggcggtgaatgggttgagataa

SEQ ID NO: 7514 - DNA, 387 bp, Zea mays
  Peptide Sequence Number=SeqID_49293
atggccatggttaggaggaacagagcagctgctcagcctgctgcatcgagtgcgacaaggcgggtgaggctggcgagcgcgtcgaggatgccgccactgaagccgttggtggagaggtcgagcgcctggagcgcggcgagcctcgcgagcccggccgggagcacgccggagaaggcattgcggtggaggtggagccccgctagcacgggcaggcgtaggaggtcggcggggagcgggcccaacaggttgttggagcgcaggctgagcagctacagcgccgtgaggcagccgagcgtgccaggttggacggcgccgaagaggcccagccctgggaggtgtagcgccatgaggcgcgcgccgtcggggctgcaggtgaccctcgtctag

SEQ ID NO: 7515 - DNA, 504 bp, Zea mays
  Peptide Sequence Number=SeqID_49294
atggccacggtggcaccattcctcgcggcaaggatttgcgccggcgatcgccgccccgactataccgagcatctcacgtctatgtctctagcgcaaaacaaagggggcaatcgcacgaacatggaggtcagatgttcaccgacgattagggcacataggttcccggcgacggtgaggtgcggcaccgcggcgaggattgactccggtgacaaattgccgctgttgatcagtagcctagctccccagaacgccccagtgcagacccccgatggttctgggaacgccacgaccccgccctacagctgttatggttgtggccagaaaacgcaacggcggcggctctccctcacgctctggtggcgacgacaactggtggcggcgctggagttgcacgcagggttacgggatggagccaaggacggcggctctaccccgcaactatataggaccgatggattcggtgggtggacacgcgacgcctgggaagatcgcgcggtggtttag

SEQ ID NO: 7516 - DNA, 540 bp, Zea mays
  Peptide Sequence Number=SeqID_49295
atgggcaagaacaacaagcgcaagcgtgagccaactcctccatcggaggattttggtgactcggagtactcagaggaggagttctcctctgagtctgaggggtctccggctcccatccccctgcgtgagtcgtctgacgactcagacgactcccaggggctcgcggcggaggtctggacgtacatccgggccgtcgagcgctccgggctcgagggctcggatgagtcggagtactcctcggatgaggaggactcggacggtggcggcaaggacgaggacgacgaggacgacgacgacgacgaaggcggtggcggcggtgatggtgacggcagcgacaggggcggcagcagcggcagcagggacggtgacggcggcggcagcaggggtggcagcggtggtggcggcagcagcaggggcagcaacaggggcagcagggacggtgacggcggcggcagcaggggcggcagcggcggtggcggcagcagcaggggcagcaacaggggcggcagcggcggcggcaacaacagggccagtggctag

SEQ ID NO: 7517 - DNA, 189 bp, Zea mays
  Peptide Sequence Number=SeqID_49296
atggccgccgccctctgcctgcagcgccagagcctcgccgccaacccctttctcttctccgcccatggcctccgctaccgcaagctcgaggtcatcctcactacgaacattgacgggttagacgggattgacaatcacgagcctattaagacaaaggataagaaattttacgagagatctgaacactag

SEQ ID NO: 7518 - DNA, 1818 bp, Zea mays
  Peptide Sequence Number=SeqID_49297
atggcgcgagcgccggccaaggtccatgctgccgccggcaccggggatgggctccttgttatccctaccaccgcctccctgtcgcactgcccctctcgctgcggggatgtacaaatctcgtacccgttcgggatagggccgggctgcttccgtcaaggcttcgagctcacctgcgatcaaacagctccttctcccaggctcttcttcatgtcggggaacagctcgattcaggtgacttctctagatgtcggcaacaatatgggttgggcttcagctgttgggttcaacgtcaccatgagcgcaggcgtggacacctacaccaagtcttgggaggcccctactgccactggtgccagtttttatgcagataataataataatctgtacactgttggatgtggtgtctacgtctacgtgttgggtgataatatgacagatatcattggttattgcacgagtatttgcacagataacagagagatcatggagagcgcaaacactggttatggtgtctgtgaagggttaggctgctgcagcattccaatacgtggccgccaaggcttcactctcaaactaggtcgcctcaatagtaccattccacagttcggtgaagcgctatccagtgtcaagattatcgtttcgcaaaactataaattcgttactgatgatgtttacgcaagttgggtgaatacaagcaacgttaatgaaatgatattttacattacaatcatggaccaaccgaactgcgcgagtgcccagtcccaagagaacaaggatacctacgcatgcactagtgaaagcatctgctacgacgttctaccaccggcagtatctcaaggaggctacatttgcaagtgttcccatggcttacaaggaaacccataccttcaaaataactgtacagggattgtaattgggcttgtttgtggccttggatccataagttttgcacttggtgcaattgtactcaccggtaagtggaaaaaaggcatccaaaggagaattcgaagagagtacttcaagaaaaatcaaggtctactcttggagcaactaatatcgaatgaaaatgctacaaccaaaacaaagatattcactttggatgaactagaggaagcaaccaacaagtttgatgctactcgtgttctaggtcatggtgggcacggcactgtttacaaagggattttgtctgatcagcgtgtcgtggctataaaaaaatctaaaatagtggagcaaatagagatagatcagttcatcaatgaggttgctattttatctcaaatcattcaccgcaatgtggtgaagctttttggttgttgcctagaagatgaggtacccttgctagtgtatgagttcatatcgaatggcactttgtatgacattcttcatgaaaatattgcaacaaaatgcttgttgtcattggatgatcgaattaggattgcaacggaagcatcaggagcacttgcttatctacactcagctgctgcaataccaattttccatagagatgtgaagtcttctaatatactcttggacgacaacttcactgtaaaggtttcagattttggtgcttcaagatctctatcccttgatgaaacacatgtggtgacaattgtccaagggacattcggttatttagatccagagtattattatactggttctctaactgagaagagcgatgtgtatagttttggagtgatacttgtggaacttttgacaagaaagaaaccaatttttatcaatgaatcgggtgccaaacaaaacttatctcattacttcattgaaaggactacaggaaagggactctcatggaaataa

SEQ ID NO: 7519 - DNA, 615 bp, Zea mays
  Peptide Sequence Number=SeqID_49298
atgtattctaatgctgttgggaatctcatgtatgatatgatctgtacaagacccaatttggctcatactgttagtgtgccaagtccggcttcgggcgccataggaagctccgcctcgcccgaccccagggctcggcccccgtctcggcctcggatgacgaactccgcctcgcctgaccccagggctcggactcggactcggctccggaagacgacgaactccgcctcgcccgaccccagggctcggactcagcctcggctccggaagacgacgaactctgcctcgcccgaccctagggctcggactcagcctcggctccggaagacgacgaactccgcctcgctcgacccagggctcggactcggcctcggttccggaagacaacaaactctgcctcgctcgaccctagggctcggactcagcctcggctccggaagacgacgaactccgcctcgcccgacccggggctcggactcgacctcgacctcgaaagacagactcgacctcgacctcggaagacagactcgacctcgacctcggaggagccaccgcctcgcccgacccagggctcggaccgaccacgtcataagggggccatcattaccctacccctag

SEQ ID NO: 7520 - DNA, 378 bp, Zea mays
  Peptide Sequence Number=SeqID_49299
atgaaggatgtgtggctgggtgttagtggccagatccgagcacgagtgagaagctcggccagccaactgtggacgacacaggatgtcgatgcccggaccgagcgatgcgagcggctatgggaaacgacgagggagcgaccaccagaacgaggagagactcgcgacaaactgctcagacccggtgcaaatgagccacggccagcggcgttgtgctggtggggagtgacgaagatcggcggtgagcagctgggaatgcagctgctggcgcgagagacagagatgcggtgcggccaggagcttcagcgcttgttaagattcataaaagttcggattaccactttcatccctagctacaggaaagcatcagagaagacgtga

SEQ ID NO: 7521 - DNA, 840 bp, Zea mays
  Peptide Sequence Number=SeqID_49300
atgtggtctggtgcaccggactgtccggtgtgccaccggacattgtctggtgcaccaggaccgtacagggtccaaccatccactctcgagaaaactcgggtgcgctccgctataattcaccgaactgtccggtgtgccaccggactgtccggtgcactagcgggcaacggctatcccagcgtgcaaaggttgactctgatgggagctacagtgcagcacagtgcgcaacagaagtcagagcgcagaagtcagagggcaccggactgtccggtgtggcaccagactgtccgtggacatggaaaatcattgaagatgatggctaggcacatcaagatatgtgccaccaagtgctatagggcaactgatgacactgattttgaccctgcaactgatacagagtctcagtcatctcttgggttcttggctagagcagagattgacattgaagccaagaccattgtttggatgatagggcataggaggtacgatgctacttttactaagtttgcctctgctaaccaattgaactatgttgtcatttctgctggttgtgatcttgaaagctctcttgtgggtttttgtggtttggatgacaacccaattaatggactaacatgtgtgctaagtgttgaaaaactacatagtgcaaagcttgtagagttcaacacaagtgttcaagagaacattacttatgtgggactcagtgtgcatgtcttggagacaactgaagccaagtatggaggcaagaagagcttcgaggtatcgagtgcatgggacaagatcaaggaggctgaggaacttaaagctaggggtgaagaagacttgctaagtcaaggttga

SEQ ID NO: 7522 - DNA, 324 bp, Zea mays
  Peptide Sequence Number=SeqID_49301
atggcgacggcggcggcagggttggctccggcaaaggaggtggtggagaagaaggtggaactcctgaaggaggcctctactcgacttgttgtccgatgtgacctggcaacggttagagttgccatcgtctctggaggagatcaaaacaagacaacacaattaaatcaaacttcaccttcacttttaactccatctatctcggatgaaagacgattaaaggatgatgttggtcacttttcaattgttacatgtcatagaaaacaaggcaacacaaaattaagagacaagaaccttcatcctcaagataatacaccttcagtgtaa

SEQ ID NO: 7523 - DNA, 411 bp, Zea mays
  Peptide Sequence Number=SeqID_49302
atgttgaggcccatccagtcagctactagtcacatgggaggcccatctagaaaacgcaggccggatcgtacagccaggcccagctcctcgggttttattgtccgagaccctctcgggatctcactgcgctacgagcctacgactacgagagtcggtcgcggctccgtccgtaccctcccgtcggcgaagtcacgcccatcccgtcccaacggtagcagtaacttcaggatttgtggccgggacaagaggacaaggctccgacccagcgggcagagtggtctggcgactcaggttgcccaggatggaggagaaaggcgaggtccggtttgtggccagcgaacaaggttatgtggaaaattatacaagacaatttctactcagctaagcctccaagcttgttttaagtgctga

SEQ ID NO: 7524 - DNA, 132 bp, Zea mays
  Peptide Sequence Number=SeqID_49303
atggcgagaggcaggtggctagatggaagatggaggcaggatctgcccatggagatgcagaggcacggctccatggccaggagatggatttataccgcccagaccttgactccgagcggccagccgatttaa

SEQ ID NO: 7525 - DNA, 210 bp, Zea mays
  Peptide Sequence Number=SeqID_49304
atgggcgagaacgacgaagctgacaggtgggctcgagctgccagggagagggagcggcgcgagagggagggaggcgagtcgctgacgagcggggccaagctgtcagcgaggcgcgcggcgcgtggagctgagccgcctgggccagggagaggggaagggaagagcgggcacgcggagctggttgagtatgcacatgatgaggtgttctaa

SEQ ID NO: 7526 - DNA, 453 bp, Zea mays
  Peptide Sequence Number=SeqID_49305
atgggagggcttaagcgggaccttgacatttctatcggcacaccccggacgctctccaaggccgtggatgagaagatcgccaagctcaaggctttatccgagagcgaactttgtgaggccgtccatacatcggtgaagcgggtgttagccgtcattgcatcccactacgagatcaaccacgagtgggtgtgcgaaggctatatcctgcttaaagaggatgaccttgacgaggtggaggtccggaggctcgctggtgtcgtcgaaaggtcaggttcggcactggctcgccacttcgaggaagaggtggttccgccagtctctccactcggcgttgggtcctactcgaccgcaacacctctagatgacaaagagggtgttgcttccgcccttctgttacttgagctatttaccctacggggttgtaataaacttttaagtttgttatgtatgtaa

SEQ ID NO: 7527 - DNA, 426 bp, Zea mays
  Peptide Sequence Number=SeqID_49306
atgtgggtcccgggcgtcattcacccaaccatcacgaccatgcaggcggactcactggcattggggccacgcatcgaccacctctcaagctctggcacgcgggtcccactgatcgacatcactagtcacacgcttgcatccaccttcggtcaccgactggtgggaccctatacgcagatttctcgccagagtacatgcgccaccgcaggactgccctttgccatggtcgggggccgtcggcatgtctaccccgggcatcgtgttcgtcggcatgttcgaatcaaagctttgtgcgccgtgccaagaaacggggcagtctggccatggagccaccgtgccggtgctgggcgtggtgatcggagtggtcggcggggggagatgagggagaagggtagtactgccatcggatgcatgaccaatggatga

SEQ ID NO: 7528 - DNA, 630 bp, Zea mays
  Peptide Sequence Number=SeqID_49307
atgggcgaggtcaagccacttttgacacccatgtccaccacgatagtgcttgatgatgatgatgatgaaggacagcgccgcctgcgccgctccgactgctgcgccactcgacagagtgaggctgaaaggcagtcaggcccggcctcaggcacgcccgacccagggctcggactcgggctcagccccggaagacggcgaactccgctccgcccgacccagggctcggactcgggctcagcccctgaagacgacgaactccactccgcccgacccagggcttggactcgggctcagccccggaagacggcgaactccgctccgcccgacctagggctcggactcgggctcagccccggaagacggcgaactccgctccgcccgacccagggctcggactcgggctcagcccctgaagacgacgaactccgatccgcccgaccccagggctcggactcgggctcagccccggaagacgacgaactccgcttcgcccgacccagggctcggactcagccctggcctcagccgacggtctccgtctcgcccgacccaggggctcggactcgacctcggccatggaagacagactcgacctcgacctcggaggagcctccacatcgcccaacctag

SEQ ID NO: 7529 - DNA, 726 bp, Zea mays
  Peptide Sequence Number=SeqID_49308
atggtggatccatggaaccccgcacgcccgacctccggattcctagctgcggcgcgattctcggcaggatttggatggggcgacgcaatccgttcgccgcggctacctacaatcctgagccccccgtcgcaatcccgtctgtcgcatcgtcaacgctgcatactccgtcgcgcgctccgagctcaatcccccgcacgcgaagccccgagctcaatcccccatgcaccggaccgagctcaatccgcctccacctcgcacgcctcgccttcacctctgctcgccctcgcccgacgcctcgaccctggccccaatcacaccagaaccgttgccgtcctccaacctcgagcgcctcgcctccacctcagcctcgcccccgctcgacgttttgagtctggccctgatgatactggagccgctgccgacctcaacctcacttcatgcgccttggtcatggcgagtggggcgaaggcgtggctgatgtcgcggcatcgaatctcagcgtcgcgaatctcagggatcctcggtctctttgcccatgaggagaggcacgacaatggttgggaacgatgggccgaccaacttggagaaggagcaggacgagagatgctgcaggttgccgagttgctgtgggatgcctccggtgaagctacagcctgccaggatcctgagaagcattcggccgtcgagaccgaggttgaaggaaacgtccctgtaggtggttatgct

SEQ ID NO: 7530 - DNA, 3549 bp, Zea mays
  Peptide Sequence Number=SeqID_49309
atggagggtaagggggacgcgtcagtgacgccggtgaggactagtgaccggctgcggcagcgtccaaagtactatgctcgtggctatatgtactacaatccagccatgaggaagaaggttaagtctaagaagcgaactgctgcatcacagattgctaagaaactgcttcgcaagccagctgcacggccaccacctgccgatgtcgggcaaccagctggtcgttccagaggaccgaccaggcacctaatcgcgaatagggcgacgattaggacacctaatcggtcctggtcgacctctgcaaatttgcgccgttcaacgagaaagcgaaggatttctgtaaatctggagggctatgatacagatagttccagtatggaagatgacgatcttatgagacctagatatcgatcttcaaagagtttacggcctagaagatctttgcgaggacaaagactgcatccataccatgaatctgaggatgaccaggaaagctctgatgaacaaggtgcagaagatcaaagagaaaatggcaatgagattgaagaggatgttggtgatgaggaggaggttgatggaggtgatgaagctgaaggagatggagatgacgaagatggtgaggaagagcaagaaggaaggaggagatatgatttaagggaacgttcagaggttcgtagaccatcccctcgtaaggaaggaaagcacagaccacaatctcctcgtagagtactagttcacggaattggtccaaagaacagcaagtatttaaaaaaaggtgggtcgcgcatgcataagcgccctcgtttctctttgccagatgattcagatgattcccttcttgtggatgagccggacgagggcccatccatgccatggatgcgcagtgggaggggaagtatgccatggttgatgggtgggttggacatgcatagtccagcagcatggggcctgagtgttggagcatctggttggggtcatcagggtgacacttctacttcactcatgcctggggtgcaaactgctggaccaagttctaagggaggagccgacattcaacctctgcaggttgacgagaatgtgagctttaaagatataggtggactttcggagtacattgatgctctaaaggaaatggttttctttccattattgtatccagatttttttgcaaactatcacatcactcctcccagaggtgttctgctttgtggcccaccaggcacaggaaaaacattgattgcccgtgccttagcctgtgctgcctctaaagctggccagaaggtcagtttttatatgcgcaaaggagctgatgttcttagtaaatgggtgggtgaggctgaaaggcagctaaagttactttttgaggaagctcaaaagaatcagccgtcaattatattttttgatgaaatagatggcctggcacctgtgaggtctagcaagcaagagcagattcacaattcaattgtttcgacattgcttgctttgatggatggccttgattcacgtgggcaagttgttttgattggagcaactaacagaattgatgccattgatggagcattgcgtagacctggccgatttgatcgtgagttttattttcctttacctggctatgaggctcgagcagaaatactggatattcatacaaggaaatggaaggatcctccaccgaaggaactaaagatggaacttgctgctagctgtgtgggctattgtggagctgatttgaaggcattatgtacagaagcagctattagagcatttagagagaagtatcctcaggtctacactagtgatgacaagtttgtcattgatgttgattcggtcagtgtcgagaagtaccactttttggaagctatgtctacaataactcctgctgctcacaggggatctattgtgcattcaaggccactttcaacagttatcgctccatgtctgaagagtcatcttgagaaaataatggaacatatttctgatattttccctttcctttcatccatagattttagcaagttctctgctctctcctatggatcttccatccctcttgtttatagacctcgccttttgatatgtggtggtgaaagtgtcggactggatcatgtgggaccagctgttttgcatgagcttgagaagttctctgttcactctttgggactgccgtctcttctctctgatccaagtgcgaagacacctgaagaagctcttgtgcatatctttggggaagccaagagaacaaccccgtccattctatacatacctcagttccatctttggtgggatacggcacacgaacaactaagggctgtgttgttgactctgttgaacgagttgccctccaaccttccagttttattgcttggaacatcatcagtggtttttactgaccttgaagaagagtatcaagtggatcaaccaagttttgacgatagattgaggtacttcagtatattgtttgagtcattgctctctttccaaatggaagaatcaagaaacaagtcaaagaaacagaagtctgctattgaccttcccaaagccccgaaagaagtggagggccctaaggtttctgagctaaaggctagggcagaagctgagcagcatgctgttcgtcgaatgaggatgtgcctccgagatatctgtaatcgcattttgtacaacaaaaggttcaatgtatttcacttcccagtattagaagatgaggtgcctgactatcgatcaataatccacaagcctatggatatggctactgtcttgcagcgggtggactctggacagtaccttaccagggcagcatttataaaggatattgatcttattgtctcaaacgcaaagacttacaacggggatgactacaatggatctaggattgtcagtagagcatgtgaactcagagatgtgattatcgttgttgtgtctaatgaacctctttttggccaggtccaaggcatgttgtcacaaatggacccatctttggtgtccttctgtgataaaattgcttcacaaggggggccactgcaggctgtggatgatgaagatagagctattcttcaagcagcacctgttgctcagctggtttctggtactagaataagtgcaaggcttcgaaatgtacagcctgaagtaaacctgtcacaaagttatgaagtgctaaggcggcaaaagaaaagtgcagaaaatgaacaaagcatgactagagatgaaaagtctcctgaagatgtagatttgtcgaagccaactgacgcagaagaagctgcaaaagaaccagagtcaaatggcactacgaaagaagccaacgattcaccagccaaagaaccagaagtatctacttcccctgaacccatggagagtgacaacggcaaaattgccgcggctactggcgacgacttgttagaacagctagaagccctgaagcaacgcttcatggaactcactgcaagctatggcgtgccgcagctcgagaggctgtattccaagataatgaaaggagcaatagagttgacaagtaaagaaagcaacgaggatcataggcgttacaatacgagagaatactaa

SEQ ID NO: 7531 - DNA, 327 bp, Zea mays
  Peptide Sequence Number=SeqID_49310
atggcagcggcggcggggccgtacaaagagatgctggaagtggtgaacgcgtgcgcggcccggatccggtggcgccttcgtccagcttccaagcgccgcctcctcaacgagtgcactgacaatcacgttgaggacaggaccctattggtcgttgatctgagtagcttcctcgagaacacccagattgccttgccttctctgaatggcatcatggacggcttccccaagagcgtcggcggtggcggccctaacattccggcgggatcccaccccgcaggcgggagccaggcggcggcaggaggaggcgcgacgcagcggacgcagtaa

SEQ ID NO: 7532 - DNA, 782 bp, Zea mays
  Peptide Sequence Number=SeqID_49311
gggttgtcgcgggctgggtcacgtcggctgaccaagtcatgccgtgccgagctgcgcacctagacgagcaggcagcgcgagcgagctggccgaggctgcaggccgctaagggcgtccgcgagcacggggacgcgccacagtcgcgtgccggccgagcggatgcgtcacgccgcaccgcgggcagcagcgttgggtccgagctcgccgtgccggggccgagtcggaccacgtcggccacgggggccgcgcgagcgcagagccggcgccgggaccgcgtgccgcgccaggcgccacggacgccggggcagagaccgcgtcggggggggcgggctgggcgggcggacgcgctgcggccgcgccgagcgccgccacgccgggcccgagggcgagcctccgaggccaaggctagggacgcgccggcgagctgcggactaggccgcgaggccgcgcgcaggcgaggggggagctcggcggagccatggcgggcgatgggcgggcggacgcaggcgccgtggccgcgccaaggccgagccgcggcgggacgggcgcgtcgcgccaagccgggccgaaacggcgccgtggccggggctggggatgccggggacgcgccgggcgccacgcccgcgccggccgcacgcgagggagaggggagggacgagggaagaaaaagaagatggggcttaccgtggaacggggtcgagcgaacggacgcgacggcggcggtttcgaacgacgagaacaatggggagagaggaaaggaatgtcatgggggaaagggatga

SEQ ID NO: 7533 - DNA, 132 bp, Zea mays
  Peptide Sequence Number=SeqID_49312
atggccatcaggttcatgagctcagggggcaccagtgagctagagaagagggggagcgctcggctggtggagatcctgcttcaagggaaggaggggcgcgaccctggagagggagattgtgatgagaactaa

SEQ ID NO: 7534 - DNA, 393 bp, Zea mays
  Peptide Sequence Number=SeqID_49313
atggcggaggacctggcctcattctccgcgcaggatctgagcaaccttgagcagcagatcgagttctcgttgtacaaagtttgcctcaggaagcaagagctactcgaccagcagctgctcgagatccgccaaaggaacctggctgcggctactgctagcgggcaacaccagcaggctggcgagatgatgggaattaacccgaggccgttcctgtggtgggacgtgggagccagtggcagtggcagccagagccagcagctgctgcacggccgggacgccgcggagtcgtcgatgatggtgctggggctgtcaccgcagatgcataggtacagactccagccgcgacagcccaacctgcggcaggacaccgacgtccacggctggctatggtaa

SEQ ID NO: 7535 - DNA, 228 bp, Zea mays
  Peptide Sequence Number=SeqID_49314
atgaaccacttcatcctgtcaatctggaccatcaccttccctatcgtcgaccaatatagtggttacctcatcagcaggctccagggatacatcaagggtgtaaattttatttataaaactaaagaactgaaagaaataggacaaaaggttgatgaggttaaccgacgcatacagtgcagcatcgaccgtggatgccggtctaggaaagtgatccgcttcaagcagtag

SEQ ID NO: 7536 - DNA, 492 bp, Zea mays
  Peptide Sequence Number=SeqID_49315
atggcaaagggcgtggcattgggaggccaacgtgcgacgcaaggagggtcggcgacaaggagtggcgacacgacgagctccggtgtggttaaggtaccacagcagggcttgacagagtaccgggagagctcgttgaagcaacaacagcctcggcgtggtcggaaggttagggttttcactgcttctgcattgctgccctcgggagactcatccttcactcccgggggcgttctcccatcccagccgccaggccctccacgccaccgctcccagccagccacaccgaccgacgacgaggagctcagtgctcgtgaagcaacagcagccatggtggtcggtcgagtcaaggcggccatgggcttcaagcagagctcggccatgcccaagcctagggcgtcctcctcccgcaaggtgccgacgccgacaccgccgcagctgcatgggtcggccgcaccggaggtcctcgggctcgtcagcgcagttggagaatga

SEQ ID NO: 7537 - DNA, 1461 bp, Zea mays
  Peptide Sequence Number=SeqID_49316
atgaatctcaaggggttatctgtcttcctcatctccagaacctttcttttccctctgtcctgcctctcaataaactccgtggagctccagcggtacccttttcctgatgttgagagatttgataatgaagcatttgatagagctgcagtcgttggaagagataatgacaaagcaaagataaaggacatgatcttgcaaagtaatgcacaaaagttctcaatcattcccattcttggcctcgtggggttggggaaaacaactcttgctagattaattttccttgaccagggagaaggttgggattttgatcttcgtatctggatatccttaaataggaaactaaacataaaaatgattgctagtgatataatctcgcaatgtaatcatagagaagaaaagcttttagatgttcgtacggacatggagatccaggaaaactttcagttgctaaagaggtgtttgcaagaggcactccatgaaaaacattgtctgattgtcttggatgacctttctagcacagataaaaaccagttggatgaattgaaggaaatgctgaagggtacaaatgagtctatcaaggttttagtgacgacctccagcgaaataactgcagaactactgcacaccattccaccgtacaagttgtgtcctttatctgaagacgacagttggaaaatattttctcaaaaggcttttgggaattgtgatggtgataacactgaccttaagaaaatcggaaaggaaatagtaaaaagcggctggttccctcaccacagcgcgtgttctaccaccgccgcctccgcactcgcctccgcggatccactgttcacagtccgcggcgatgacctgtgccatatacggtccacgagcacggatgcgccgcggtcgtaccatgtgccccttgccggtggctgtggcttcactccgtggctcggcccggctccactccaccatctccatgccgcggtggccacaacccacagtgccgcgtcgggcgccagactctcctccgagtttcggccctccatgtcctgctgtccacgacgccaggcgccggctgttcctgctctcctcgatgtccaactgccccacacctctccatctcccctctctgttcaaactccgcaatgcacagtggacagtgttgcaaactgccagcgcaatgggctcaactggccaacaatccaaggccgcaagtggtttggggcgtcatttttactgagctccgccactggtcgacgtcctgatcaagagcaagtcgatatcaacctcatcggcgacaagatcccatggcatcatctagctctgtacgcccggtcaaaagatctccgtcatcaggatggcaagatgatcgacgacgtcaacctggattacatcagatgggtcgcgctcgagcaggtccttagcttcctcatgacatccatgactcaagaagtcatgggccagcttgccatctactaa

SEQ ID NO: 7538 - DNA, 198 bp, Zea mays
  Peptide Sequence Number=SeqID_49317
atggaggagtatgacgtgaacctggacgggctcctggactgcgaggagttcgcggagttcatccggaagcacatgcacgaattagttgggattatgttccaagagaggggaaatgtttgcaggctgctgaagcaggagggcggcctgcggtgtgcagtcactcgtggtgctctggatttctatgtttatatggcatga

SEQ ID NO: 7539 - DNA, 315 bp, Zea mays
  Peptide Sequence Number=SeqID_49318
atgtggatgctccctccgaggtcgaagtcgagtctgtcttccgaggccgaggtcgagtccgagcccctgggtcggcgagcggagacgtcggctgaggccagggctgagtccgagccctggggtcggcgcaggagttcgtcgtcttcaggggctgagccaagtccgagccctgggttgggcggaggagttcgccatcttcaggggctgagccgagtccgagccctgggtcgggcggaggagttcgccgtcttccggggcttagccgagtccgagccctgggtcgggcggagggagttcgccgtcttcagggactga

SEQ ID NO: 7540 - DNA, 306 bp, Zea mays
  Peptide Sequence Number=SeqID_49319
atggcgcaccggacagtccggtgcgccaccggacactgtccggaaaacagcgccgctcgctccgctccgactgccgtgtcatccaccccggcaacgactgacaacaagtcacgatcaaccatcgagttcagcctcgggcgcaacaggaagctccgccttgcccgacctcaggctccggcctcgggaggaggtctccgcctcgcccgacccccggactcggcctcgaccccggtctcgagaggaatcgcgtcctcgcccgaccccggcctcgacctcaagggaagtctccgcctcgaccgaccctag

SEQ ID NO: 7541 - DNA, 136 bp, Zea mays
  Peptide Sequence Number=SeqID_49320
atgcggcgggtacacgcctcgcacctcccacgcgctgagtggtccaccgttcagtgggtgcgggtaacttgttcagcgggtgcgggcaactttgacgattcacctttcacacctgcaacactatataaacagacgg

SEQ ID NO: 7542 - DNA, 273 bp, Zea mays
  Peptide Sequence Number=SeqID_49321
atgaagaatcaagagcccagattagacagcgaaccgcgcgccggtgagaaattagagatgaccagagagtccgcgtgcccggctgatgataccggagtctccacctggcctggcgatccgaccgtgctgcacatcgagccccaaaacgaggaaggagggttcaggcgtgcagaggtcaaccgtggcggccccctttctctcgacgatgagtcccctatttctctccttggtgtccggcttgcgacggctatggctcagggtcatggctgctag

SEQ ID NO: 7543 - DNA, 1182 bp, Zea mays
  Peptide Sequence Number=SeqID_49322
atgttggttttgcagtttatagacgtcgctcttatgtctgttcctcgttcaaagcataccttcatctttagaattctggtggccctaattggatcaaagaatggcagctctattctgatgaagaatcaagttcttggaaattggtttcccatcaccgtaatctgcaggcctcgtttgctgatattgtttgaaagccagctttatctggagcaaatttggttcctttggttgtctggtcagggccaggcattcttcctcagtaacagccgctttgagaggcttaacattcggtcatcattaaggggctcccgtgttcggccttgggcttcgcggaatttaatttggtggcccaagaagatattgaagcatcacccggagatttctgggcataagtttgtctccagcattaatggccctcccggccctgtgatgaatgactctcgtattacctggggaaattctatttcaggcaataatcgtcaattatttggaatttctggtcagaattgtaggaggccttttgatttcttccctagtaagtttgagaatgtttcctgggaatactcttcgcggccatggttcagggcttctttgccctcgcctgctggtgggccttctcccccgcccttttttaataattttggcgagttcgcgcaggtggttcttacgagaagtggctcctcgcctttcacggaacttgcactgtttacaaaaccctcttccacttcgctgtcgtggaagagcccgtcaccttcaagccctcatctgtgctgggagtgttcatcgcacctgcgactccctcctcacgaagtctttgaagaaatggtgttccacagagttgatcccgctccattcctccctcacggttttgtggcgcaacaggttgatcaccgggaaatcatggtacgcactatgacccgtcctcagccctcgactcatgaagattggggcatcgttcttgtgcagccgctgccagagcatgaggttaattttcacatatttgatgacattattggtgagtaccttatgggggtccggcacattcaggtcaggagcattcatcgctcccatttgggtcaggcccttccacaagatgaagaccctgtgcccccttacccacatgatggtcatcagctccctgtggagtactttgggatggggcagcctgtggccaacttctag

SEQ ID NO: 7544 - DNA, 384 bp, Zea mays
  Peptide Sequence Number=SeqID_49323
atggcggttgccgccacgacggctggttggggggagggggtgggggagcggcgcgggcgcgacccggccgcgggctcgtgcaccagccacggcggcgcggacgccggccatgggctcgggagccagctacggctgcgcaggcgtgtccaggccacgtgcgaggacgacggcgcgggagcgacccgatgcaggtgtgacccagccacgggtgcggacgccggcgcggggtgcgggcttggaggcgtcagcatggacggcttggcccagtgcgggcgggcacggcttggccccgaccccagtgcgggcgcgtgcgaccggccgagccccgccacaggcaaccgccccagcatggccggatctgcccctggcggcgcgcaggcatag

SEQ ID NO: 7545 - DNA, 678 bp, Zea mays
  Peptide Sequence Number=SeqID_49324
atggcgacggcaaggagtgggcagtggcaacacggggagcgggcgggggacgattgtttcagcggcgggattaccaaggagacaacgccctgcagcttgactaacacccagatgactagcactcctaggtccacgagatccagccactcttgccaccatagggtgaacgctcctccggtgcacgccatcccaagttcgagggagatgaatgagtacttcgctgccgaacagcgacgccaacagcaggatttcattgacaagtacaacttcgatcctgcaaacgactgccctctcccaggcagaggcgcataccgttgtggccagagaatcacttgccgcaggttcaggtaccccgtaggttcagctcgccctccctcggacacaagctgggggatgatccatcaacaccgcgtggaagcagatctgtatgtatgtgtggctatgtggaggactggaggggaggggagccagggtgggtgggcggatagagtcatagagaagagaatggatctgtatggcttcgatgcagatgcggtcgccatcgacaccgcgcccgtctgtcgcatttctgacgctggaggatcgatgggagcgcccctctggctgtggctccctcccagggcgccctcctcctggagctcgccgtgggcgactgcatgccgccgccgccctgcctag

SEQ ID NO: 7546 - DNA, 282 bp, Zea mays
  Peptide Sequence Number=SeqID_49325
atggtcgttgctcaggcacgtgagcgagttgcggctctttcctgggagcaggagcatgcttctatgaccgctctcgctcgccagctcgaagaggacgagctccttggaggcccaccgttcgagactgcccccgttgagatcgctcttcactacgagactttagtggtcgcaacccttcacgccttggtggccggtgttcagaacatccggtccctggcgcatgttgttgtcaacaccaactcctacgctcgctaccgggatttggtcctcttcaccctatag

SEQ ID NO: 7547 - DNA, 273 bp, Zea mays
  Peptide Sequence Number=SeqID_49326
atggcggcaggacgggagcgatgggcaccactggagcctccgcagccagagccaagggtggacccctctagtgctctggaaagagagaactacaacttgggtcggtcaaaagtttctttgcaaaggatcaaagaggttgaggcattaggttgtttccctacgagggctagcagagttgtgggattggagactgttctgcgacctgtggatgagatggtgctttacatgcaagcaaaaacaagtgagaaatgtgtccataagcttcatgcatga

SEQ ID NO: 7548 - DNA, 273 bp, Zea mays
  Peptide Sequence Number=SeqID_49327
atgacgccggtgagcgcggaatgggctaaccagagggggttgggggcaaaccggaggattcccacgctgttggcaaagaagcggaactcaacgaggcagcgggcgcgacagagacttaacggcggtcgcagaacgtgcgacggagcttcctgggcgcgctcgcagagcgagagagagggtgagggtgctcggctgtgtgtgcaactgagcggggaaggggttttcaaatcaaattcaaaccatttcaaacatgagcatcaaacaaaaggataa

SEQ ID NO: 7549 - DNA, 177 bp, Zea mays
  Peptide Sequence Number=SeqID_49328
atgtcgtgcgcgtttgacgactactatatcgaggattgtggcatcatcttagcatcggaggtgacgcagaggaggatcgacaacagtgaccagtttgtcatcctcgccaccgtcagggttctccaagaagtggcacatgagacccagtattcagcggaagctctaaatgaaagctga

SEQ ID NO: 7550 - DNA, 510 bp, Zea mays
  Peptide Sequence Number=SeqID_49329
atgaccggcgcatcgttagattcagtattcatcgaaatctccatcaagatttacactctgcagaggtggtacaacattacccgcaatacgtgtatcccatctagccttgggttgtatggacccttaaatactaccaagggggagatcgacggggtggtttcgaccgagcagggaacggacagggggtttggtgtcgagcagggaagcggggcaggggtcgtcgacgtcgggcagggctccggcggggtgctgcgtggtcgacgaagctccgacgagggcgtggccgagctccagcgacgaaccatggcaagggaggaagaggatggcgggttcgaggagagggaaggggagagggcgccgggggggagaagaaacggccgacataactccattgatggcattcatggaggttttgaatggagggagagagaaggggaaatgggggggaggaggagaagcgtcgactgtccggctccggggtcacggtcgggcacggggtcggcggcctag

SEQ ID NO: 7551 - DNA, 261 bp, Zea mays
  Peptide Sequence Number=SeqID_49330
atggctgattttgagaagggccctgaagagatgctagatctcagtttggttgatagtgccatcttatggattgtgaagcttttaaagacaagatttcttctagaagcgatggcaacttcgcagaaggaggaggagaggtgggagaagatgtggcgcattctggactggctagaccaccaactcgagaatagggaggtgggatctagaagagcgacgtccaccgcataccttaccgtcgacaatcttctgcgagggatttga

SEQ ID NO: 7552 - DNA, 1314 bp, Zea mays
  Peptide Sequence Number=SeqID_49331
atggcaacttcgaagaaggaggagaagaggtgggagaagatgtggcgcattctggacctgctagaccaccaactcgagaatagggatgtgggacaacatagactgcagggccaggcagaactggttgcagctaccgtgcggaagacggaggagcgtggtagtcacaactatgttccagtgatacttggaggtaccaatttctcagtgtttggtgaaaattatgctgagaagatggtatggggtagggtatttggttcagattcacatggcctagtgcaacagctagctcatggggtgggtgatgagtggcacaataattgtgaccaagatgttgtgcctaatgtcccatggatgtttgttggaatgccacagcaagcaagtacatacccagtgtctagtgaaatgggtcttaaagtggcatgggacggggagatgcaatttgaaacacacacacatgagggattactgcagcaacttgctcaaggtggagaagccttagaagaattggctaagaagaagggtgatgttgtagatgagaccagcaagtctgaccaaccaagtgagacagttgctatggttatgaatggtggaagcatggaggggcttcttcctgctagtgttattagtgtgcttgaggaaggccctgagaaggagcagaatgttgaaaatgctgatgctactagtgctggtggtatcctttctcaagatttggttccagaattaacccatgaaactaatggtgcaagcgagattataagtgcccctaaggttgatgatgaggattgggagatactacaggttagagaaattagtgaagaagaggtggaagattaccttgtggtatctaaagaaggggttgtggatgaggtgatgcaggttgagttagcagatggtgggactggggaagaggaaatgctctttggaaaagaagtagcagggaatttggtgcagccatcaccgtttcctcgaagcattggtactgcaatggaagatttggagtatgttgaaggtgaggctgtagtcaagaattattatctatctattgaagatgtgcagataagagttgtggatgacatagatttggtggatatattattcgactttgatcatagtttgtcgttatttgggtactcttttaagcaaatacttgaagcaatggctgacatatggattgggatggatgggttcagggttatgatgagtcactgcctagatattcatggggatggttgtaaggagcttccaaacatggaattccaggagttgtgccatctttactgcagaagcaaatggaccacaattgttgcattgtga

SEQ ID NO: 7553 - DNA, 553 bp, Zea mays
  Peptide Sequence Number=SeqID_49332
atggcgcctcctgttgatgtggccggtccgcgccctaggttgggcgatgtggaggctcctccaaggtcgaggtcgagtccgtctttcgtggccgaggccgagtccgagccccaaggtcgggcgaggcggaggctgttggctgaggccagggcggaatttgagtcctggggtcgggcgaagcggagttcgtcgtcttctggggctgagcccaagtctgagccctgggtcgggcggagcggagttcgccgtcttccggggcttagcccgagtccgagccctgggtcgggcggagcggagttcgccgtcttccggggcttagcccgagtccgagccctgggtcgagcggagcggagggcgcgcgtcaggataaaggtgtcaggccacctttgcattaaatgctcctgcgatttggtcggggttgcttctcggcgaagacagggcctcgggcgagccgggaacgtgttcgccgctggaggggggcctcgggcgaggcggagatcctccgagctttatgctgatgggggttaccagctgagaattaggagccttgagg

SEQ ID NO: 7554 - DNA, 465 bp, Zea mays
  Peptide Sequence Number=SeqID_49333
atgacagcgcaagcaaggaagggagcatgtgtcgagcctgcgactgcgagagagaacgtggtcgtgcaggtgttctctgagcatgtcgctcggaatcgacagcaaaagctttgcacagttggagcctgtggggtcctctcctcgggccgggcaggccgccggattaatcagcgtcaagttagctcactgactcactggactgcgcagcgggggcgggagacattggcacaagacattctgccacaggcccacagcgtctaccatgtactgtacccgtattatattgataaaaagcatttggctctcaaatctaatcatgagaagggcaaatctaaagtgcaagtagatgagagctcaagcgatgatgatattgatgatgtgaagcttgcatttatggcaaagaagaccaccaaatactcaagaaggcataaaattttacttaataaagaatttcttcacaagtag

SEQ ID NO: 7555 - DNA, 264 bp, Zea mays
  Peptide Sequence Number=SeqID_49334
atgacatacagctacccttcgaagctgcacccgagcagccccaccttgtctgcgcaggccctcgatcaggtccacttatctgtctggggctacacttcgaagcgtgataactctcgcggtggacaatccacagcacatatacccatgactcgcacgccaggtcccgatcattctaagcacgtcctgggacgagataagtaccgatcatcgcaatgttgggattacggcagagggcttctggggattcctcggctatatggctaa

SEQ ID NO: 7556 - DNA, 1141 bp, Zea mays
  Peptide Sequence Number=SeqID_49335
atggcgcctcctgttgacgtggtcggtccgcgccctaggttgggcgatgtggaggctcctccgaggtcgaggtcgagtctgtcttccgtggccgaggtcgagtccgagcccctgggtcgggcgaggcggagaccgtcggctgaagccagggctaagtcagagccctgggtcaggcggagcggagttcgccgtcttccggggctgagcccaagtccgagccctgggtcgggcggagcggacagtcggagcggcgcaggcggcgctgtccttctgtcaggccggtcagtggagtggcgaagtgattgcggtcacttcggctctgtcgactggaggacgcgcgtcaggataaagctttgtgctgatgggggttaccagctgagaattaggagccttgagggtgccaaggtcttcttcgggtccttcgccggcgaccagcagcaccagatattggggccatgtgtaagggcggaagctgttcctaccgcgtcaataaggggagtcctgctggttctaccaggaagatccattccacagcctctcaaggatctcataatacttgcacgagctaggatgcagctcaagcctcctgcaagacccaagctctattcagggctcatgccccaagaggatttggatccgtaccgtgatctaataccaggcttgcctgaagacttggcgaagatatgtcttgcccttgtccctcgtgctcattttcctgccatgggcgcagtttccaagaggtggatgtcgttcctcgaaagcaaggagctcgtagctgtgaggaaggaggttgggaaacttgaggagtgggtgtatgtcctggttccagatgctggggcgaaggggtcacactgggagattttagagtgttcggggcaaaagcagagccctcttccacgcatgcctggactaaccaaagcggggtttggtgtggttgttattggtggtaagctctttgttattgcgggctatgccgctgaccatgggaaagactgtgcttcagatgaggtttatcagtatgattcttgcctcaacaggtggactgtgcttgctaagatgaatgtagctcggtgcgtcttcgcctgcgcagaggtcaagggggtgatatatgttgctggtggatttggtccaaacggcgaat

SEQ ID NO: 7557 - DNA, 1044 bp, Zea mays
  Peptide Sequence Number=SeqID_49336
atggcggggctgtcgctgcggtgcggcgactgcggcgcgcagctgcggagtgtggaggaggcgcaggcgcacgctgagtccaccaaccacgccaacttcgtcgagtccactgaggccgtcctcaaccttgtctgctccaactgcggcaagccatgccgctcccataccgaggtggacctgcacacgaagcgcacgggccatacggagttcgcggacaagaccgcggaggcggccaaacccatcgacctcgaggcgccgcttaagccggcctccgatgatgccacggacgtcgatgcgtcggcctcggcgactgaggagacacaagagacggttgtgccagaggtgaacaaggaggtgctcacggaccttgagggcatgggtttctcgacagcacgtgccactaggggcgcttcacttctctgcctaggtaatagcaccattgaatgtgctattaactggctttctgagcaccaagaggacgcagatattgatgagatgcctctggtaccagctaactcaaaaacggaggttaacaagccaagcctgactcctgaagaaatgaagattaaagcacaggagctaagggagcgtgctcgtaagaagaaagaggaagaagagagaagaatggaaagagaaagggagaaggaaagagtacgaatcggaaaagaacttcttgaagccaaaagaattgaggaacaaaatgaaaggaaacgcatgatagaattgcgaagacttgagaaagaggaggagaaaagagctagagaaaaaatccgccagaaattagaagaagataaggctgaaaggagaaggaaactaggattgccaccagaagacccagcagctgccaaaccaagtgcaccacctcctgttgaagagaagaagattagctgtcatatagactgcactgacgttgtcacaatagacaatgattgtcgaaggaatcgagacgtgaagctctttaagcaactgtcgcaaccaacaacactctgcaactgcatgtgcaacaacctgatactcgaccactacactagaatgggactttga

SEQ ID NO: 7558 - DNA, 483 bp, Zea mays
  Peptide Sequence Number=SeqID_49337
atgccccctctccccctcgtcgtgtccctccttttggccgccgagccacccctctctccccctcgccgcctctccgacccggccgcgtcccgcctcagctggtggatgggtgggagtgggacgacaagggtcatgatggccgatattctatctatatccatgcatctctctcgcacacccttacatgtacattctatctctctttttgttgggcgtgaaattcacagtgaaaagttatttggagtgagaatgcaagatggcttcctgctgtttggacctctgggttgtggcaaaacactcatagcaaaagcagtggcacatgaggcaggggctaattttattcatattaaggtagattcattgacaacaaaaagaggtaaagaggggggggttgttgaacgtctcctaaaccagttacttatcgaacttgatggtgatggtcagcataaaggtgtctacgtgataggtgctacaaacaggtaa

SEQ ID NO: 7559 - DNA, 153 bp, Zea mays
  Peptide Sequence Number=SeqID_49338
atgggtgccctgccctctgactaccgtgtgctcgccaagaaggattggcgttgccggatctgggatggtcaccgtggtcgcgattccatcgaaaaccgcagggcatgtgggagatcgccgccatggctgctccttatctgggcgcgggattga

SEQ ID NO: 7560 - DNA, 609 bp, Zea mays
  Peptide Sequence Number=SeqID_49339
atggactcagggaaagcctccaaggcctattatattgaaggtggtgcaggtcaaagccaggctagattttgttttgggttcgcactgtaccagttttgtttggaattgggagatagagatgtcctcactagcaactgggggcaaccatttggcctctttggttacaccactggcaccgccaagggtgatgcgttgcgggcgtgcatcgctgcctgcaaggtctactggtcggtagagtgtgtcgccaccaccgtcctcgcgggctttgagttcgccgtccacaatggcgccgacgtcatctccgtctccttcggccaggatgcgtccctcgccaatgacgccaagtccctcttccacgcgcctgtcagggacctccccaacgtcctcactctcggcaacagcgtgcaccttagggggcgagctttgggtccaccacaatgcacttcagcgcgctctactcgatggtcgacgtcgcgggcaccgcccaagccacctccaactttgcgacgccaccagctatgggctcgacaccctggaccctgtgaggggatcgcgggtggaagcataattgatgagggggataatccaaataagttagaccgcttttga

SEQ ID NO: 7561 - DNA, 351 bp, Zea mays
  Peptide Sequence Number=SeqID_49340
atgtttttgtatgagaaaaataacgggaaatggagaatgtgtgttgactatatgggcttgaacaagaggggtatgttgctcagattcatcgtctctgaacatggcatcaaagccaacctagagatgatcatagacatcacgaagggagttatcggcagagcatacgacggagacgtcgtgtatggcggcatggagggagtcgagcatgacaggctcgtggaagaggaacttggcgtcatcggtgagggacgcgtcctggccgaaggaacagagatgacgacggcgccattatggatggtggattcaaagcccgtgaggactgtggtggcggcgcactctaccgaccagtag

SEQ ID NO: 7562 - DNA, 837 bp, Zea mays
  Peptide Sequence Number=SeqID_49341
atggacgagaagaagggctccgaggaggcgccgttcttcacggactacggcgaggcgagccggtacgaggttaccgaggtggtgggcaagggcagctacggcgtggtcgccgcggccctcgacaccctcaccggcgagcacgtcgccatcaagaagatcaacgacgtcttcgagcacgtctccgacgccacccgcatcctgcgcgagatcaagctgctgcgcctgctgcgccacccggacatcgtccagatcaagcatatcatgctcccgccatcgcgccgcgagttccgcgacatttacgtcgtcttcgagctcatggagtccgacctccaccaggtcatcaaggccaacgacgacctcacgcccgagcaccaccagttcttcctgtaccagctgctccgcggcatgaagtacatccacgccgccaatgtcttccaccgggacctcaagcccaagaacattctcgccaacggcgactgcaagctcaagatttgtgacttcggccttgctcgggtgtctttcaacgatacaccttcagccatattctggacggattatgtggcaacaagatggtatcgtgctccagaattatgcggctccttcttttcaaagtatactcctgcgattgatatctggagcctaggttgtatatttgctgaaatgcttatagggaagcctctctttcctggcaagaatgtggtacatcaactggatctcatgacagatctacttggcactccttcaccagagtcactttcgagggtcggttcacttttccctacttctagaataagaaaaacagttacaggcttggagagttggagccttatcttttaa

SEQ ID NO: 7563 - DNA, 837 bp, Zea mays
  Peptide Sequence Number=SeqID_49342
atgtcgtacagggcgaagttgggagtgggatggctcaccgtcgtcgaaggaaggcggttgaggaggtcctgggtggccgagacgacgatgccaagtggtggaggtggtggggacgcaccggtggatgaggggcggagaattgtcggtggtgaaccgacgaacatgaaagagattgtaagtgatgtgagggacaacgagaacgtcgttgaggcacgagctgaggtggagtcggggtcgtcgggggcacaccgtatgggggcatgtcgaaggcaggtggcgaaagagtttcgtagctgggtgcagtcaggagagccgacgcctgcacaggaggatgagaggcgccgatccaggggttgtagaccgacggccagccttggccgcccccgggccggtggaacctccacgcgtagagctgccacctccgcgtctgcccttgcgggggtgatggtcgccgtcggtggtggaggccagacgaggggccgcaagggtggtggcaagaggacggacaggggccccggtcaacgaggtgcgagggtcatggcccccggaaggcgcctgaccaccaggatgagcgttgttgaatgctggggctggagcgggtgcctcaatcgtcatggtgagctcctcgaggtgaagctcgttccgcacgacatggaaggtgggaaacaacacgatccgcttgatgagagcctccaggtggccgtaccaggcgctgaggccacgaagaaggttgagcaccagggtgcgatcggcgataggcctgccaagatcatggagagagagtccaccattcccttcatctggcgacaatattcttccacggagagttcccattga

SEQ ID NO: 7564 - DNA, 327 bp, Zea mays
  Peptide Sequence Number=SeqID_49343
atgatggtgctgtggagccacgagatgaccacgctgtccatctggacccatgatggagacaacggggcagcggggtcatcgaggacgtggtcagtgagggcgaagcgccctaggcccgtagccctggagaccgagcctggcagcagcggcgatggtggcagcagcagcagtggtcgtgtgggccacgatggtgagggagctgcgggaggggccgtgggtggccacgatggcgtaggagaggtggccgccaagggggtcgtggtcgggctcatccgtgccgagggcatggcgggcagctgggggagggcgcgcgccagggaagtgtga

SEQ ID NO: 7565 - DNA, 1962 bp, Zea mays
  Peptide Sequence Number=SeqID_49344
atggaggactacactcgtgggaatctgccaaccaacagccccaactacgccgagctgaggaggatggaaggcatcccggagcttgaggacgaggccgagttggtggggaatgcagaggcatcaaagccatcgacttctggggtttctgatcagaacaagaaagggaagggaccaattcaagacaatgccgcttccaacggcgatttttctggtgacagcaagctgcagaagaaagcgacttcaaaggccgattcttctggtggaaagctgcagagggatgccacttcaatcagcgattctcctggtggcaagctgcagaggaagggatcggaaccacctcctggtggcaagttacaggggaagggatcggagccaactactgacgccaaaggcgaggcggggaaaccggtgtccaggaatgattccgggccaagcaatgtcagctcgaaaaacaaagaagggaggaagaagaacacaatgagcctaaagggcacagttagcagtgacattgatggcagcagcaccagtgggaagaagaaaggtgtggccttcgaaagggaacgatccatcagagaagcagaaggatgtggggagatccatggccagtcggtggtgagcagcgacccattctcaccatcgcatcatgggacgagggatgtcagagaggcgattaatgaggtcaatgagctgttcgacgaggcggcaaactgcagcacagatgtctcaaggctgctggaggtgggcaaaatgcctcgtagcgataccccgagagttctcagatatgtctcttccagagtgatggatcctttaggccttgctgtgtcgacatcgtcttgcctcccgaaatcacatggcaggaagtcgagaccatcaagcagcatggcaaggacttcagcttcgttagatgctggcagtagcaatgatgttggccacctctcatcaaccctggagaagctgtgggtctgggaaaaaaagctctatcaggaagttaaggatgaggagaagctacggatgaagtatgagaagtattacagaaggctgaaatccatggacgaacgaggcgctgaatcaagtacaatcgactccacccgtttgtccgcaagacttgtggagtccaagatcagcatcaacattagaaccgcaaacgccttctcgttaaaaatacaggagattcgagacgaagagctttaccctcaactggttgatctcatccagaggttcaggagtttgtggaaagatattatggaatgccatgagaagcagctattagccatacaggacagtaggattcactggatgaaggcgatgactgtaagtgaatccggcgttgtgtcagaggcctcacgggatttggaacgggagctgacgaaatggtaccgttgcttcaacaagtggatgatctcgcaaaggtcctgtgccgaggcgctgaacgaatggctgaagaaatggctccctgagtcgcaggaggaggttacagcagacggggctcctcctttctccccgggcaggcttggcgcgccacccgtattcgtcgtctcaaacgactggttccaagcgatcgagatggtctccaggactgatgtgctgaaagcgatcgaccagttctctaaggtcgtgcgtagattcaagaagagccaggaagacgagcggcggcagaggcggagagccgaccacgcctccaaagactacgacagaaagcgcaaggatctggaggaagagctcgggctgagcaccatggagagtcctcgctacagccatgacaaccgtgtggtggacctggagaagctgaggaaaagaagagacgaggagagcaccaggcatgacagggtcctgaatcatgcccacgtcacggcttcagctactctgccagtcggtttggtccctgtgctgcaacagatcaccagcttctttcagaggaaccaacgggtctacatgcagattagaactcaacaaggcgcctga

SEQ ID NO: 7566 - DNA, 189 bp, Zea mays
  Peptide Sequence Number=SeqID_49345
atggagagtgccacccacaggcggggcacgaagcttttatgccacaggacgaagtttggcgaggatcacggaggatcccaacaaaaccggagcggtgaccatgcgatgcgcggctgcttcggtaatgggagacgagacactgttgaccatgtggggtggggtacaagcgtgtgggtaaggcacatgtga

SEQ ID NO: 7567 - DNA, 780 bp, Zea mays
  Peptide Sequence Number=SeqID_49346
atggagttcaccactcccccgcccgcgacccggtcgggcggcggagaggagagggcggctgctgagcacaaccagcaccaccagcagcagcatgcgacggtggagaaggagcacatgttcgacaaggtggtgacgccgagcgacgtcgggaagctgaaccggctggtgatcccgaagcagcacgcggagaagtacttcccgctggacgcggcggcgaacgagaagggcctcctgctcagcttcgaggaccgcacggggaagccctggcgcttccgctactcctactggaacagtagccagagctacgtgatgaccaagggctggagccgcttcgtcaaggagaagcgcctcgacgccggggacacagtctccttcggccgcggcatcagcgaggcggcgcgcgacaggcttttcatcgactggcggtgccgacccgacccgcccgtcgtgcaccaccagtaccaccaccgcctccctctcccctccgccgtcgtcccctacgcgccgtgggcggcgcacgcgcaccaccaccactacccagcagatgggcacacggaaccagtaacaccttgcctgtgcgccacactcgttgccactgaaatgagagcatcatcttcgcaactgtcactcacacgctccaacctctccaggccgccacaacctagaatagccagagtcgatggcgcccagccacggccgtcgtcgtcaccacgccagccacagtcgttgtggtgccggtcgtgccaaccgcaaccacggcgaacggccgacgttccttga

SEQ ID NO: 7568 - DNA, 204 bp, Zea mays
  Peptide Sequence Number=SeqID_49347
atgaccacttccaattcaagagttaggtcgtcggtcccactcaccggcgagcgggaagctgaggtgcgggaggctgcaggccagctcgccgaggagaaggagttgcttgaaaagcacaatctctggactggagcaaaggatatcctacatgaaaaggtgattgaaggagttatgctcagcaaaggatactacagctgctactaa

SEQ ID NO: 7569 - DNA, 228 bp, Zea mays
  Peptide Sequence Number=SeqID_49348
atggtcgtgtgctacagccgcagcggaattagcggctgcggtggtacaccgatcaccctttctcggttctcggaagcggccagacgagggagtaatgcgcggtggccatttattcaccacgtggacgagtcgggggaaggaggtcgtggtcaccggatttgcgattacagcgtggactcccaccgagtttgggagtttgttgagggagatggagagcagacaaggtag
